United States Patent Application Publication US 2022/0096574 A1 - sequence listing, part 8

SEQ ID NO: 35040 - protein, 220 aa, Veillonella tobetsuensis
  misc_feature (1)..(220): tr|A0A2S7ZQZ2|A0A2S7ZQZ2_9FIRM 7-carboxy-7-deazaguanine synthase OS=Veillonella tobetsuensis OX=1110546 GN=que E PE=3 SV=1
MLLSMNVIEIFASIDGEGKRQGCLTTFLRLHDCNIRCSYCDTLYSYGPQSTFESMSIQAVADIIEQLGNHRITITGGEPLLQEQDVIELIDELTKRNPQYDFNIETNGTIVPSFQRDNVWFTYDYKTPSSLAEDSMNLDIFKMATAEDIIKFVVGSVQDLDRMDEVLKTYPTNGQIFVSPVWGNIEGAMIVDYMKAHNWQNVKFQLQIHKFIWDPGAKGV

SEQ ID NO: 35041 - protein, 219 aa, Veillonella tobetsuensis
  misc_feature (1)..(219): tr|A0A480B4W3|A0A480B4W3_9FIRM 7-carboxy-7-deazaguanine synthase OS=Veillonella tobetsuensis OX=1110546 GN=que E PE=3 SV=1
MLSMNVIEIFASIDGEGKRQGCLTTFLRLHDCNIRCSYCDTLYSYGPQSTFESMSIQAVADIIEQLGNHRITITGGEPLLQEQAVIELIDELTKRNPQYDFNIETNGTIVPSFQRENVWFTYDYKTPSSLAEDSMNLDIFKMATAEDIIKFVVGSVQDLDRMDEVLKTYPTNGQIFVSPVWGNIEGAMIVDYMKAHNWQNVKFQLQIHKFIWDPGAKGV

SEQ ID NO: 35042 - protein, 210 aa, Veillonellaceae bacterium
  misc_feature (1)..(210): tr|A0A134CJY8|A0A134CJY8_9FIRM 7-carboxy-7-deazaguanine synthase OS=Veillonellaceae bacterium DNF00751 OX=1384 082 GN=queE PE=3 SV=1
MKNKLYVNELFNSIDGEGRRAGELASFIRLCGCNLRCSYCDTTYAFTEGTPMAVEEILSQLRYRNITLTGGEPLLQDVHLLLQRLQDRDVNIETNGSVSIRPYLSYSHVWFTVDYKSISSGMTTAMKEENFQLLRPQDVLKFVVGTHADLEQARKICAYFKPSCPIYISAVFAAIEPKEIVAYMEAYRLMNWRLQLQLHKYIWPPTARGV

SEQ ID NO: 35043 - protein, 219 aa, Veillonellaceae bacterium
  misc_feature (1)..(219): tr|A0A134CB22|A0A134CB22_9FIRM 7-carboxy-7-deazaguanine synthase OS=Veillonellaceae bacterium DNF00626 OX=1588 754 GN=queE PE=3 SV=1
MKNKFPVVEIFDSIDGEGKRTGYMAIFVRFAGCNIRCTYCDTCYALSPEDALFYFTKDELLAKIRSYPWKRITFTGGEPLLQPLEEICRILGDEGYDINIETNGAVPLFRHRPKGVFYTMDYKCTGSGVRKYMRTENFRDLTQDDVLKFVVSDRRDLDDMKYILDTYFPTGGPKFYVSPVWGRIEPVELVDYVKAHGLDRVCVQVQLHKIIWSPTKRGV

SEQ ID NO: 35044 - protein, 222 aa, Verminephrobacter eiseniae
  misc_feature (1)..(222): tr|A1WGV0|A1WGV0_VEREI 7-carboxy-7-deazaguanine synthas e OS=Verminephrobacter eiseniae (strain EF01-2) OX=3917 35 GN=queE PE=3 SV=1
MNYRAPAPRPMTYSVKEIFYTLQGEGGQTGMPAVFCRFAGCNLWSGREADRADALCRFCDTDFVGTDGTLGGKFAQADALAERIAAQWPAADSAHRLVVLTGGEPLLQVDAALLAALHAQQFRIAVETNGSLAAPPGIDWLCVSPKAGAPWVQTQGQELKLVWPQAGMDLAAIARTGQFTHRFLQPMDGPDQAAHIAICIAACLQQPLWRLSLQTHKISGIR

SEQ ID NO: 35045 - protein, 212 aa, Verminephrobacter sp.
  misc_feature (1)..(212): tr|A0A4Q2LSQ4|A0A4Q2LSQ4_9BURK 7-carboxy-7-deazaguanine synthase OS=Verminephrobacter sp. Larva24 OX=2509434 G N=queE PE=3 SV=1
MTYSVKEIFYTLQGEGGQTGMPAVFCRFAGCNLWSGREADRADALCRFCDTDFVGTDGTLGGKFAQADALAERIAAQWPAADSAHRLVVLTGGEPLLQVDAALLAALHAQQFRIAVETNGSLAAPPGIDWLCVSPKAGAPWVQTQGQELKLVWPQAGMDLAAIARTGQFTHRFLQPMDGPDQAAHIALCIAACLQQPLWRLSLQTHKISGIR

SEQ ID NO: 35046 - protein, 219 aa, Verrucomicrobia bacterium
  misc_feature (1)..(219): tr|A0A1Q6V3D1|A0A1Q6V3D1_9BACT 7-carboxy-7-deazaguanine synthase OS=Verrucomicrobia bacterium 13_2_20CM_55_10 OX=1805420 GN=queE PE=3 SV=1
MPEQEKTLTINEIYHSIQGESTWAGCPCVFARLTFCDLRCNYCDTEYAFYEGKKQTLQGVIDAVASFRCSLVEITGGEPLLQKNVLPLMSMLCDAGYTVLLETSGAHDISKVDSRVHRIMDLKTPGSGEVEKNLWANIDYLTLRDEVKFVMGSREDYEWSRDKVQRYGLSSRCNAVLFSPIFGRIDPRQIVEWILADNLDVRFQLQMHKFIWSPTQRGV

SEQ ID NO: 35047 - protein, 225 aa, Verrucomicrobia bacterium
  misc_feature (1)..(225): tr|A0A424HLU7|A0A424HLU7_9BACT 7-carboxy-7-deazaguanine synthase OS=Verrucomicrobia bacterium TMED71 OX=198687 8 GN=queE PE=3 SV=1
MEYPVHEMFHSWQGEGDHSGKSAFFVRLYGCPVHCPWCDSAGTWHPDYVPEKIDRIDAATIADAAAAVRCDLVVITGGEPTIHDLGPLTDAMKERGLKSHLETSGSFQIRVSFDWITLSPKWLSTPLPESLAVANEFKLIVEDESSVQKWVETLGNSIDKRSVWLHPEWSVRKDPRILESITEFVKKNGGPFRAGLQGHKYYRADLLDRNSAKPSPLGGNPMLGY

SEQ ID NO: 35048 - protein, 245 aa, Verrucomicrobia subdivision
  misc_feature (1)..(245): tr|A0A0R2RN02|A0A0R2RN02_9BACT 7-carboxy-7-deazaguanine synthase OS=Verrucomicrobia subdivision 6 bacterium BA CL9 MAG-120507-bin52 OX=1655590 GN=queE PE=3 SV=1
MRIAEIFHSIQGEGLLAGVPSIFIRTSGCNLRCHWCDTPYASWKPEGPEMSIQEILKKTSPWDCHHVVLTGGEPMIAPGLPELATALKKEGKHITIETAGTILPHGIPCDLASLSPKLSNSTPPPERDSAWTKKHEANRLQPEVISDWIRNYNFQLKFVVSSENDLVEIKSLLSRLETFVAPPHQSVRGEEGPPVPFHQVLLMPEGIDVKTLAARSPWLVEICQREGFRFCPRLHIDLFGHTRGT

SEQ ID NO: 35049 - protein, 221 aa, Verrucomicrobia subdivision
  misc_feature (1)..(221): tr|A0A520Q555|A0A520Q555_9BACT 7-carboxy-7-deazaguanine synthase OS=Verrucomicrobia subdivision 3 bacterium OX =2052186 GN=queE PE=3 SV=1
MHETFYSWQGEGVHFGRAAYFIRTYGCPVKCTWCDSAGTWHPNYTPDNIEKISEENLVNAAKATQCDFVVITGGEPTIFDLNELTAQLEKEKISRHLETSGGFEIKGDFQWITVSPKREKLPLDSNLRLANELKIIVDGEAALEEWKKYLKPYTLKIPIWLNIEWSLRDNKKLKEKITTFVKEHGFPYRVGYQFHKLFQADEMDGNSKPNVPLGGNLDLGY

SEQ ID NO: 35050 - protein, 243 aa, Verrucomicrobiaceae bacterium
  misc_feature (1)..(243): tr|A0A1Z9FIC7|A0A1Z9FIC7_9BACT 7-carboxy-7-deazaguanine synthase OS=Verrucomicrobiaceae bacterium TMED137 OX=1 986879 GN=queE PE=3 SV=1
MKVSRLADGSPEIFHTLQGEGASLGSPAVFLRLSLCNLHCHWCDTPYTWNWERTPWRHQDDVKFSKTEEIVELSPAEIAPLILSYNCNRLVLTGGEPLLQQDELVKLAELLPEITFIEIETNGTKLLSDDFIDIPTQFNVSPKLSNSGIDEKLRLNFKALDLFASLEKAFFKFVVCNQSDLDEIKALHSKLNISPDRIHLMPEGRDAETLQQRSLWLADICRDKGYHFSPRLHVLLWGNKRAK

SEQ ID NO: 35051 - protein, 243 aa, Verrucomicrobiaceae bacterium
  misc_feature (1)..(243): tr|A0A1Z9A8W9|A0A1Z9A8W9_9BACT 7-carboxy-7-deazaguanine synthase OS=Verrucomicrobiaceae bacterium TMED86 OX=19 86881 GN=queE PE=3 SV=1
MKVARLADGSPEIFHTLQGEGPSLGAPAVFLRLSLCNLHCHWCDTPYTWNWENTPWEHQDGEKFSKADQLLELAPKNLAETILQYDCPRLVITGGEPLLQQPDLIDLLAFLPGLPLIEVETNGTQLPNPALAHRVTQFNVSPKLSNSGIKESLRLNSDALSFFAKSDKAAFKFVVCNEIDLAEIQALQAKFHIPAGKIFLMPEGRDAETLKNRSLWLAECCRDQGYHFSPRLHVLLWGNERAK

SEQ ID NO: 35052 - protein, 252 aa, Verrucomicrobiae bacterium
  misc_feature (1)..(252): tr|A0A2A2Q0L9|A0A2A2Q0L9_9BACT 7-carboxy-7-deazaguanine synthase OS=Verrucomicrobiae bacterium Tous-C2TDCM OX= 1982329 GN=queE PE=3 SV=1
MKLARMPDGAPEIFHTLQGEGRGAGRPSVFIRSSLCNLHCQWCDTDYTWNWTDTPHRHERDSDPSYQKFQRGEQIVDLSTAEITAILSRHDCRNYVFTGGEPLIQEKSWLELMAALDGDGRPRPHFEIETNGTLLPGTAFLDRIDQLNVSPKLANSGVAEELRLKPGTMKILATTGKTDFKFVIGSQEDLDEVLALIEPASLPRDRVFLMPKALNVAELEANQSKVAAMALSHGLRYSDRLHLRLYGAKRGV

SEQ ID NO: 35053 - protein, 230 aa, Verrucomicrobiae bacterium
  misc_feature (1)..(230): tr|A0A2A2YCY6|A0A2A2YCY6_9BACT 7-carboxy-7-deazaguanine synthase OS=Verrucomicrobiae bacterium AMD-G2 OX=19823 28 GN=queE PE=3 SV=1
MLICELFHSIQGEGSLAGVPSVFVRTSGCNLRCVWCDTPYASWNPTGTKYEIADLLGEILAYPAQHVVLTGGEPLIAKGIEFLAAELRANGKHLTIETAGTIAPQGIACDLASLSPKLAHSTPSEEQAGPWAARHQATRWQPDVIRAWINHCDYQLKFVVRNEQDVIELMELLGSSNIQVAAHKILLMPEGIDANILKQSAFAVSELCKRYGFRYTPRLHIDLYGNTRGT

SEQ ID NO: 35054 - protein, 243 aa, Verrucomicrobiales bacterium
  misc_feature (1)..(243): tr|A0A353F334|A0A353F334_9BACT 7-carboxy-7-deazaguanine synthase OS=Verrucomicrobiales bacterium OX=2026801 GN =queE PE=3 SV=1
MKVSRLADGSPEIFHTLQGEGASLGSPAVFLRLSLCNLHCHWCDTPYTWNWKQTPWKHQDDVKFSKTEEIVEISPAEIAPLILSYNCNRLVLTGGEPLLQQDELVKLAELLPEITFIEIETNGTKLLSEDFIDIPTQFNVSPKLSNSGIDEKLRLNFKALELFASLEKAFFKFVVCNQSDLDEIKALHSKLNISPDRIHLMPEGRDAETLQQRSLWLADICRDKGYHFSPRLHVLLWGNKRAK

SEQ ID NO: 35055 - protein, 243 aa, Verrucomicrobiales bacterium; identical to SEQ ID NO: 35050
  misc_feature (1)..(243): tr|A0A3B9GDK7|A0A3B9GDK7_9BACT 7-carboxy-7-deazaguanine synthase OS=Verrucomicrobiales bacterium OX=2026801 GN =queE PE=3 SV=1

SEQ ID NO: 35056 - protein, 238 aa, Verrucomicrobium sp.
  misc_feature (1)..(238): tr|A0A1H2ENY7|A0A1H2ENY7_9BACT 7-carboxy-7-deazaguanine synthase OS=Verrucomicrobium sp. GAS474 OX=1882831 GN= queE PE=3 SV=1
MSSDALPDLSGLNLTINEVFHSIQGESTFAGRPCLFIRLTACDLRCTYCDTEYAFYEGNKRPVADLLAEALAHPCQLVEVTGGEPLLQKNVHPLMTALCDAGKTVLLETSGAHDIGPVDFRVHRIMDLKCPSSGESGRNLAANRPLLTARDEVKFVAGTEEDCLWALAQIRDGLKENGGDGWPQRVAAILFSPVFGKIDLRFLADTLLAAPFPSAVAEKIRLQVQLHKLIWEPTARGV

SEQ ID NO: 35057 - protein, 224 aa, Verrucosispora sp.
  misc_feature (1)..(224): tr|A0A2N7T4T8|A0A2N7T4T8_9ACTN 7-carboxy-7-deazaguanine synthase OS=Verrucosispora sp. ts21 OX=2069341 GN=queE PE=3 SV=1
MKCNLTCGYPRLPRTAEVSALGAMVCDTEHTWNTAEHDLQAVPTMSATEIWDQLARLDPSTDNPGLAPVDLIVVSGGEPLLHPDIVTALAQRASASGRSLEIETNATIAPGAALIEAGAHFNAGLKLASSAVPRGKRIKPQVIEQLQSSGRARWKFVVTGPNDVREIADLQQEFGLTEVWLSPEGTSADVVIDRMRWLADVALTHGWHLTTRQHVLIWGDKRGR

SEQ ID NO: 35058 - protein, 215 aa, Verrucosispora sp.
  misc_feature (1)..(215): tr|A0A2N7T3Q8|A0A2N7T3Q8_9ACTN 7-carboxy-7-deazaguanine synthase OS=Verrucosispora sp. ts21 OX=2069341 GN=queE PE=3 SV=1
MRSAYRVKEIFYTLQGEGKHAGRAAVFCRFTSCNLWTGREKDRRRAICQFCDTDFVGTDGPGGGQFRSAKDLAAAVAKTWAGATHSRGKPYVVCTGGEPLLQLDTAAVEAFHEEGFEVAIETNGTRPAPTGIDWTCVSPKAGTDLILKRGDELKLVYPQRGAEPERFEGLDFDHFLLQPMDGPNQAANTRAAINYCLAHPQWALSLQTHKYIGIA

SEQ ID NO: 35059 - protein, 211 aa, Verticiella sediminum
  misc_feature (1)..(211): tr|A0A556AWM4|A0A556AWM4_9BURK 7-carboxy-7-deazaguanine synthase OS=Verticiella sediminum OX=1247510 GN=queE P E=3 SV=1
MTYSVKEIFYTLQGEGANAGRPAVFCRFAGCNLWTGREEDRGKAICQFCDTDFVGTDGTLGGKFRAAAELAERIAGQWPTADRAHRLVVLTGGEPLLQVDAALIDALHAQGFEIAVETNGSVEAPAGLDWICVSPKAGAPWVQRSGHELKVVWPQPGLDLDELERGDFAHRYLQPMDNAQQRANTEACIAQCMARPAWHLSLQTHKVINIR

SEQ ID NO: 35060 - protein, 213 aa, Vesicomyosocius okutanii
  misc_feature (1)..(213): tr|A5CX03|A5CX03_VESOH 7-carboxy-7-deazaguanine synthas e OS=Vesicomyosocius okutanii subsp. Calyptogena okutan ii (strain HA) OX=412965 GN=queE PE=3 SV=1
MINAKLNINEIFYSIQGEAREVGLPSVFIRLTGCPLKCTYCDTEYAFHGNNLMEIDAIISEIKQYDTTYICVTGGEPLLQKNCYLLLDRLVENNYQVSLETSGSINIQDVNALVSIVMDVKTPSSGESEQNKYTNFKKLTVKDQLKFVIGSHSDFDWSVAILNQYHTTAGVLFSPVFGNITPTQLADWILDQQLNVRLQLQLHKLLWGDEKGK

SEQ ID NO: 35061 - protein, 213 aa, Vespertiliibacter pulmonis
  misc_feature (1)..(213): tr|A0A3N4VUQ0|A0A3N4VUQ0_9PAST 7-carboxy-7-deazaguanine synthase OS=Vespertiliibacter pulmonis OX=1443036 GN=q ueE PE=3 SV=1
MQAVNLINNFANTEYRIVEIFETLQGEGFNTGMPSIFIRFGKCNLACPWCDTNYNQFEIKTLAEIMQAVHSFSAKNVIITGGEPTIQPQIEKLLDVLKAEGYFIAVETNGLKPVPKQIDYIATSPKRIYQKNYLKHHLPFAHEVRIVVDGDVLDFCEQIENAIKADRYYLSPCEISGEMNMLDTITQLGILNQRQSKPRWQLSIQTHKIAGIE

SEQ ID NO: 35062 - protein, 238 aa, Vibrio aerogenes
  misc_feature (1)..(238): tr|A0A1M5XQ42|A0A1M5XQ42_9VIBR 7-carboxy-7-deazaguanine synthase OS=Vibrio aerogenes CECT 7868 OX=1216006 GN=q ueE PE=3 SV=1
MVCDQCSLSCINRVTSLYKINEIFQTIQGEGLFTGVPSVFIRLQGCPVGCAWCDTKQTWDVDEADRREFQDVIVKTQDSPHWCEMTVEEILKRYHELGYTAKHIVITGGEPCIYDLTALSYAFEQIGCQCQIETSGTSEIKTSENTWVTVSPKLGMKGKLPVLTSALLRANEIKHPVGTQKDIEQLDNLLKQAQIPKETIIALQPISQKQRATELCIQICTERNWRLSIQTHKYLSIA

SEQ ID NO: 35063 - protein, 222 aa, Vibrio agarivorans
  misc_feature (1)..(222): tr|A0A2K1CHK0|A0A2K1CHK0_9VIBR 7-carboxy-7-deazaguanine synthase OS=Vibrio agarivorans OX=153622 GN=queE PE=3 SV=1
MYKLNEMFETIQGEGVFTGVPAVFIRLQECPVGCSWCDTKQTWFAEEADKVRIGDILLKKEDSPTWCHVTSDEIIAEYKKQGFNAQHIVITGGEPCIYDLRSLTHAFEELGCQCQIETSGTSEVVASENSWVTLSPKIAMKGKLPVLRSALRRANEIKHPVGTQKDIEQLDHLLSSANLTSQPVIALQPISQKSRATKLCIDTCIERNWRLSIQTHKYLNIA

SEQ ID NO: 35064 - protein, 222 aa, Vibrio alfacsensis
  misc_feature (1)..(222): tr|A0A347UQ80|A0A347UQ80_9VIBR 7-carboxy-7-deazaguanine synthase OS=Vibrio alfacsensis OX=1074311 GN=queE PE=3 SV=1
MYKLNEMFETIQGEGVFTGVPAVFVRLQECPVGCSWCDTKQTWFAQEEDQRSIGDILLKTEDSPTWCFVSADAIVSEYKKQGFNAKHIVITGGEPCIYDLRALTEAFESMGCQCQIETSGTSEVVTSDNTWVTVSPKVAMKGRLPVLRSALERANEIKHPVGTQKDIDHLDELLSSANIEATTVIALQPISQKPRATQLCIDTCVARNWRLSVQTHKYLSIA

SEQ ID NO: 35065 - protein, 226 aa, Vibrio alginolyticus
  misc_feature (1)..(226): tr|D0X1M6|D0X1M6_VIBAL 7-carboxy-7-deazaguanine synthas e OS=Vibrio alginolyticus 40B OX=674977 GN=queE PE=3 SV =1
MSSALYKLNEMFETIQGEGVFTGVPAVFVRLQECPVGCSWCDTKQTWYADENDQRQIGDILVKTEDSPTWCVASAENIVEQYQQQGFNAKHIVITGGEPCIYDLRPLTKAFEDMGCQCQIETSGTSEVITSENTWVTVSPKVAMKGKLPVLNSALERANEIKHPVGTQKDIDHLDDLLANANVAAETIIALQPISQKPRATQLCIDTCIARNWRLSVQTHKYLSIA

SEQ ID NO: 35066 - protein, 222 aa, Vibrio alginolyticus
  misc_feature (1)..(222): tr|A0A1W6WAL9|A0A1W6WAL9_VIBAL 7-carboxy-7-deazaguanine synthase OS=Vibrio alginolyticus OX=663 GN=queE PE=3 S V=1
MYKLNEMFETIQGEGIFTGVPAVFVRLQECPVGCSWCDTKQTWYADENDQRQIGDILVKTEDSPTWCVASAENIVEQYQQQGFNAKHIVITGGEPCIYDLRPLTKAFEDMGCQCQIETSGTSEVITSENTWVTVSPKVAMKGKLPVLNSALERANEIKHPVGTQKDIDHLDDLLANANVAAETIIALQPISQKPRATQLCIDTCIARNWRLSVQTHKYLSIA

SEQ ID NO: 35067 - protein, 222 aa, Vibrio algivorus
  misc_feature (1)..(222): tr|A0A557P8P6|A0A557P8P6_9VIBR 7-carboxy-7-deazaguanine synthase OS=Vibrio algivorus OX=1667024 GN=queE PE=3 S V=1
MYKINEIFETIQGEGYFTGVPSVFIRLQVCPVGCSWCDTKQTWTAEESDKTTLGDIIIKQGDSPSWSPASVEDIVSLYQHQGYTAKHVVITGGEPCIYDLHPLTSAFEAIGCQCQIETSGTSEIICSDNTWVTVSPKIAMKGKLEVLDSALQRANEIKHPVGTQKDIDQLDALLTRAQCESKSNIALQPISQKPRATELCMETCIKRNWRLSIQTHKYLNIA

SEQ ID NO: 35068 - protein, 222 aa, Vibrio anguillarum
  misc_feature (1)..(222): tr|A0A241P3P6|A0A241P3P6_VIBAN 7-carboxy-7-deazaguanine synthase OS=Vibrio anguillarum OX=55601 GN=queE PE=3 S V=1
MYKINEMFETIQGEGVHTGVPAVFIRLQECPVGCAWCDTKQTWDATPQDERPINDVLAKTQDSPTWCSVSAEEMVSLYKTQGYHAKHIVITGGEPCIYDLRPLAQAFEAIGCHIQIETSGTFPVQTSANTWVTVSPKIAMKGKLPVLDSALLRANEIKHPVATAKDIEQLDTLLLRAQVPDSTVIALQPISQKERATQLCIETCIARNWRLSIQTHKYLSIA

SEQ ID NO: 35069 - protein, 222 aa, Vibrio anguillarum
  misc_feature (1)..(222): tr|F7YJS8|F7YJS8_VIBA7 7-carboxy-7-deazaguanine synthas e OS=Vibrio anguillarum (strain ATCC 68554 / 775) OX=88 2102 GN=queE PE=3 SV=1
MYKINEMFETIQGEGVHTGVPAVFIRLQECPVGCAWCDTKQTWDATPQDERPINDVLAKTQDSPTWCSVSAEEMVSIYKTQGYHAKHIVITGGEPCIYDLRPLAQAFEAIGCYIQIETSGTFPVQTSANTWVTVSPKIAMKGKLPVLDSALLRANEIKHPVATAKDIEQLDTLLLRAQVPDSTVIALQPISQKERATQLCIETCIARNWRLSIQTHKYLSIA

SEQ ID NO: 35070 - protein, 226 aa, Vibrio antiquarius
  misc_feature (1)..(226): tr|A7K041|A7K041_VIBAE 7-carboxy-7-deazaguanine synthas e OS=Vibrio antiquarius (strain Ex25) OX=150340 GN=queE PE=3 SV=1
MSSTLYKLNEMFETIQGEGVFTGVPAVFVRLQECPVGCSWCDTKQTWYADENDQRQIGDILVKTEDSPTWCVASAENIVEQYQLQGFNAKHIVITGGEPCIYDLRPLTKAFEDMGCQCQIETSGTSEVITSENTWVTVSPKVAMKGKLPVLNSALERANEIKHPVGTQKDIDHLDELLANANVAVETVIALQPISQKPRATQLCIETCIARNWRLSVQTHKYLSIA

SEQ ID NO: 35071 - protein, 216 aa, Vibrio atlanticus
  misc_feature (1)..(216): tr|A0A558H1Q5|A0A558H1Q5_9VIBR 7-carboxy-7-deazaguanine synthase OS=Vibrio atlanticus OX=693153 GN=queE PE=3 S V=1
MFETIQGEGVFTGVPAVFVRLQICPVGCSWCDTKQTWEALPEDETSLGDIMVKTEDSPTWSAIDAQGIVNEYIKQGYTAKHIVITGGEPCIYDLVPLTEAFEQHGCRCQIETSGTSEVKATNDTWVTVSPKVAMKTKLEILDSALQRANEIKHPVGTGKDIDQLDGLLERADVSSETVIALQPISQKDRATQLCIDTCIERNWRLSIQTHKYLSIA

SEQ ID NO: 35072 - protein, 222 aa, Vibrio atlanticus
  misc_feature (1)..(222): tr|A0A1C3IZT4|A0A1C3IZT4_9VIBR 7-carboxy-7-deazaguanine synthase OS=Vibrio atlanticus OX=693153 GN=queE PE=3 S V=1
MYKINEMFETIQGEGVFTGVPAVFVRLQICPVGCSWCDTKQTWEALPEDETSLGDIMVKTEDSPTWSAIDAQGIVNEYIKQGYTAKHIVITGGEPCIYDLVPLTEAFEQHGCRCQIETSGTSEVKATSDTWITVSPKVAMKAKLEILDSALQRANEIKHPVGTSKDIEQLDGLLERAAVASDTVIALQPISQKDRATQLCIDTCIERNWRLSIQTHKYLSIA

SEQ ID NO: 35073 - protein, 231 aa, Vibrio azureus
  misc_feature (1)..(231): tr|U3ADM5|U3ADM5_9VIBR 7-carboxy-7-deazaguanine synthas e OS=Vibrio azureus NBRC 104587 OX=1219077 GN=queE PE=3 SV=1
MFYKQVSSTLYKLNEMFETIQGEGVFTGVPAVFVRLQVCPVGCSWCDTKQTWFAEETDRVQIGDILLKKEDTPTWCFVTADEIIAEYKKQGFNAQHIVITGGEPCIYDLRPLTHAFEELGCQCQIETSGTSEITTSESSWVTVSPKVAMKGKLPVLHSALRRANEIKHPVGTQKDIEQLDHLLSSANLTSQPVIALQPISQKPRATKLCIDTCIERNWRLSIQTHKYLNIA

SEQ ID NO: 35074 - protein, 226 aa, Vibrio barjaei
  misc_feature (1)..(226): tr|A0A1J4QWF8|A0A1J4QWF8_9VIBR 7-carboxy-7-deazaguanine synthase OS=Vibrio barjaei OX=1676683 GN=queE PE=3 SV= 1
MSNTRFKINEMFETIQGEGMFTGVPAVFIRLQICNVGCSWCDTKQTWEANDEDERSFGEIITKQGDSPTWSDVDAAEIVAMYQSQKFNAKHIVITGGEPCEYDLTALCEAFEAIGCRCQIETSGTSEIRVTPATWVTVSPKVAMKGKLPVLPSSLERADEIKHPVATQKNIDQLDELLQGVKLNSDVVIALQPISQKPRATELCIETCIQRNWRLSVQTHKYLSIA

SEQ ID NO: 35075 - protein, 216 aa, Vibrio bivalvicida
  misc_feature (1)..(216): tr|A0A177XUP9|A0A177XUP9_9VIBR 7-carboxy-7-deazaguanine synthase OS=Vibrio bivalvicida OX=1276888 GN=queE PE=3 SV=1
MFETIQGEGVFTGVPSVFVRLQECPVGCAWCDTKQTWDATPQDERSLDEVLAKTEDSPTWCSVTAEDIVNEYKNQGYTAKHIVITGGEPCIYDLTLLTQAFENNGCKCQIETSGTSEVCVTDTTWVTVSPKVAMKGKLPVLDSALLRANEIKHPVATQKDIDQLDELLTRAGVSEETTIALQPISQKPRATQLCIDVCVARNWRLSIQTHKYLSIA

SEQ ID NO: 35076 - protein, 222 aa, Vibrio brasiliensis
  misc_feature (1)..(222): tr|E8LPE7|E8LPE7_9VIBR 7-carboxy-7-deazaguanine synthas e OS=Vibrio brasiliensis LMG 20546 OX=945543 GN=queE PE =3 SV=1
MYKINEMFQTIQGEGVFTGVPSVFVRLQECPVGCAWCDTKQTWDATPQDECSLDEILAKKEDSPAWCSVSAQDIVNEYQKQGYTARHIVITGGEPCIYDLRPLTAAFEAIGCQCQIETSGTYQVDASENTWVTVSPKVAMKGKLPVIDSALLRANEIKHPVATQKDIDQLDELLTRAQVPQSTTIALQPISQKPRATQLCIDTCVERNWRLSIQTHKYLSIA

SEQ ID NO: 35077 - protein, 215 aa, Vibrio breoganii
  misc_feature (1)..(215): tr|A0A2N7HLM8|A0A2N7HLM8_9VIBR 7-carboxy-7-deazaguanine synthase OS=Vibrio breoganii OX=553239 GN=queE PE=3 SV =1
MFETIQGEGFFTGVPSIFIRLQGCPVGCAWCDTKQTWDVNLEDETDFKTVLLKQGDDERWCSTSESALVAYCLEQYSAKHVVITGGEPCQYDLLPLTTELEANGYRCQIETSGTFEVLATPNTWVTVSPKIGMKGKLPIEPSAMSRANEVKHPVGKESDIDDLKALLEVSTLQDGVEVLLQPISQKPRATKLCIDTCIANNWRLSVQTHKYLDIA

SEQ ID NO: 35078 - protein, 224 aa, Vibrio breoganii
  misc_feature (1)..(224): tr|A0A4U2G8K2|A0A4U2G8K2_9VIBR 7-carboxy-7-deazaguanine synthase OS=Vibrio breoganii OX=553239 GN=queE PE=3 SV =1
MNNVLKINEMFETIQGEGFFTGVPSIFIRLQGCPVGCAWCDTKQTWDVNLEDETDFKTVLLKQGDDERWCSTSESALVAYCLEQYSAKHVVITGGEPCQYDLLPLTTELEANGYRCQIETSGTFEVLATPNTWVTVSPKIGMKGKLPIEPSAMSRANEVKHPVGKESDIDDLKALLEVSTLQDGVEVLLQPISQKPRATKLCIDTCIANNWRLSVQTHKYLDIA

SEQ ID NO: 35079 - protein, 222 aa, Vibrio campbellii
  misc_feature (1)..(222): tr|A0A1Q1P9H5|A0A1Q1P9H5_9VIBR 7-carboxy-7-deazaguanine synthase OS=Vibrio campbellii OX=680 GN=queE PE=3 SV=1
MYKLNEMFETIQGEGVFTGVPAVFVRLQECPVGCSWCDTKQTWYAEEKDQRQIGDILVKTEDSPTWCFASAEDIVAEYKKQGFNAKHIVITGGEPCIYDLRALTAAFEEMGCQCQIETSGTSEVVTSESTWVTVSPKVAMKGKLPVLKSALERANEIKHPVGTQKDIDQLDALLASAEIAEKTVIALQPISQKPRATQLCIDTCVARNWRLSVQTHKYLSIA

SEQ ID NO: 35080 - protein, 216 aa, Vibrio campbellii
  misc_feature (1)..(216): tr|A7MW46|A7MW46_VIBCB 7-carboxy-7-deazaguanine synthas e OS=Vibrio campbellii (strain ATCC BAA-1116 / BB120) O X=338187 GN=queE PE=3 SV=1
MFETIQGEGIFTGVPAVFVRLQECPVGCSWCDTKQTWYAEEKDQRQIGDILVKTEDSPTWCFASAEDIVAEYKKQGFNAKHVVITGGEPCIYDLRALTAAFEEMDCQCQIETSGTSEVVTSESTWVTVSPKVAMKGKLPVLKSALERANEIKHPVGTQKDIDQLDVLLASAEIGEKTVIALQPISQKPRATQLCIDTCVARNWRLSVQTHKYLSIA

SEQ ID NO: 35081 - protein, 238 aa, Vibrio caribbeanicus
  misc_feature (1)..(238): tr|E3BNP5|E3BNP5_9VIBR 7-carboxy-7-deazaguanine synthas e OS=Vibrio caribbeanicus ATCC BAA-2122 OX=796620 GN=qu eE PE=3 SV=1
MSRSCKIFDYELAEKKLYKVNEMFETIQGEGVFTGVPSVFVRLQECPVGCAWCDTKQTWDASPKDERTLKEILSKTTDSPTWCRASANDVVSEYLRQGYTARHIVITGGEPCIYDLIPLTEAFEAINCKCQIETSGTSEVITSPNTWVTVSPKIAMKGKLPVLPSALIRANELKHPVATQKDIDRLDDLLSGVSLSEDTEIALQPISQKPRATELCIEVCIKRNWRLSIQTHKYLSIA

SEQ ID NO: 35082 - protein, 216 aa, Vibrio caribbeanicus
  misc_feature (1)..(216): tr|A0A0A6TAK4|A0A0A6TAK4_9VIBR 7-carboxy-7-deazaguanine synthase OS=Vibrio caribbeanicus OX=701175 GN=queE PE= 3 SV=1
MFETIQGEGVFTGVPSVFVRLQECPVGCAWCDTKQTWDATPQDETSFSEIMNKTQDSPTWCQSSAQGIVDEYRNQEYTAKHIVITGGEPCIYDLAPLTEAFEAIGCQCQIETSGTSEVRATDNTWVTVSPKVAMKGKLPVLDSALVRANEIKHPVATQKDIDQLDDLLERAKVPETTVVALQPISQKPRATQLCIDVCVKRNWRLSIQTHKYLSIA

SEQ ID NO: 35083 - protein, 222 aa, Vibrio casei
  misc_feature (1)..(222): tr|A0A368LHR6|A0A368LHR6_9VIBR 7-carboxy-7-deazaguanine synthase OS=Vibrio casei OX=673372 GN=queE PE=3 SV=1
MYKINEIFQTIQGEGYFTGVPSVFVRLQVCPVGCAWCDTKQTWTAEAQDETTLGDIMLKQSDSPTWSYATAEEIIQQYVMKGYTAKHIVITGGEPCIYDLTSLTEAFESIGCRCQIETSGTSEVLCSSNTWVTVSPKIAMKGKLDVLDSAVQRANEIKHPVGTQKDIDHLDSLLKKANCESKGHIALQPISQKARATELCMEICIQRNWRLSIQTHKYLNIA

SEQ ID NO: 35084 - protein, 222 aa, Vibrio celticus
  misc_feature (1)..(222): tr|A0A1C3JH26|A0A1C3JH26_9VIBR 7-carboxy-7-deazaguanine synthase OS=Vibrio celticus OX=446372 GN=queE PE=3 SV= 1
MYKINEMFETIQGEGVFTGVPAVFVRLQICPVGCSWCDTKQTWEALPEDETSLGDIMVKTEDSPTWSAIDAQGIVNEYIKQGYTAKHIVITGGEPCIYDLVPLTEAFEQHGCRCQIETSGTSEVKATSNTWVTVSPKVAMKAKLEILDSALQRANEIKHPVGTSKDIEQLDGLLERAAVPSDTVIALQPISQKDRATQLCIDTCIERNWRLSIQTHKYLSIA

SEQ ID NO: 35085 - protein, 216 aa, Vibrio chagasii
  misc_feature (1)..(216): tr|A0A2S7VEK2|A0A2S7VEK2_9VIBR 7-carboxy-7-deazaguanine synthase OS=Vibrio chagasii OX=170679 GN=queE PE=3 SV= 1
MFETIQGEGVFTGVPAVFVRLQICPVGCSWCDTKQTWEAFPEDETSLGDIMVKTEDSPTWSSIDAQGIVNEYIKQGYTAKHIVITGGEPCIYDLVPLTEAFEKHGCRCQIETSGTSEVKATPDTWVTVSPKVAMKAKLEILDSALQRANEIKHPVGTGKDIEQLDGLLERAEVSNETVIALQPISQKDRATKLCIDTCIERNWRLSIQTHKYLSIA

SEQ ID NO: 35086 - protein, 245 aa, Vibrio cholerae
  misc_feature (1)..(245): tr|A0A0X1KWH1|A0A0X1KWH1_VIBCO 7-carboxy-7-deazaguanine synthase OS=Vibrio cholerae (strain MO10) OX=345072 GN =queE PE=3 SV=1
MTSIAISIMVCHLQLFIHVRSFILYRINEMFEIIQGEGVFTGVPAVFVRLQGCPVGCAWCDTKQTWETLDSDQTSFSQILLKTNDAPTWCQATAQEVVQRYQAQGYQAKHIVITGGEPCIYDLTELTQAFEAMGCRCQIETSGTYEVCATENTWVTVSPKVAMKGKLPILDSALQRANEIKHPVATEKDIDNLDELLARAQVSAQTAIALQPISQKPRATELCIRTCIARNWRLSIQTHKYLNIA

SEQ ID NO: 35087 - protein, 245 aa, Vibrio cholerae
  misc_feature (1)..(245): tr|A0A544C6N6|A0A544C6N6_VIBCL 7-carboxy-7-deazaguanine synthase OS=Vibrio cholerae OX=666 GN=queE PE=3 SV=1
MTSIAISIMVCHLQLFIHVRSFILYRINEMFETIQGEGVFTGVPAVFVRLQGCPVGCAWCDTKQTWETLDSDQTSFSQILLKTSDAPTWCQATAQEVVQRYQAQGYQAKHIVITGGEPCIYDLTELTQAFEAMGCRCQIETSGTYEVCATENTWVTVSPKVAMKGKLPILDSALQRANEIKHPVATEKDIDNLDELLARAQVSAQTAIALQPISQKPRATELCIRTCIARNWRLSIQTHKYLNIA

SEQ ID NO: 35088 - protein, 216 aa, Vibrio cidicii
  misc_feature (1)..(216): tr|A0A151KRF1|A0A151KRF1_9VIBR 7-carboxy-7-deazaguanine synthase OS=Vibrio cidicii OX=1763883 GN=queE PE=3 SV= 1
MFETIQGEGVFTGVPAVFVRLQVCPVGCSWCDTKQTWQALEQDQRTFGEIILKSGDSPSWCNADAEAIVTQYQLQGFNAKHIVITGGEPCIYDLTSLTEAFEAIGCQCQIETSGTYPVQTSPATWVTVSPKVAMKGKLPVLDSALLRANEIKHPVGTEKDIEQLDRLLARAQVPATTTIALQPISQKARATQLCIETCIARNWRLSVQTHKYLSIA

SEQ ID NO: 35089 - protein, 216 aa, Vibrio cidicii
  misc_feature (1)..(216): tr|A0A151JLD4|A0A151JLD4_9VIBR 7-carboxy-7-deazaguanine synthase OS=Vibrio cidicii OX=1763883 GN=queE PE=3 SV= 1
MFETIQGEGVFTGVPAVFVRLQVCPVGCSWCDTKQTWQALEQDQRTFGEIILKSGDSPSWCNADAEEIVTQYQLQGFNAKHIVITGGEPCIYDLTSLTEAFEAIGCQCQIETSGTYPVQTSPATWVTVSPKVAMKGKLPVLDSALLRANEIKHPVGTEKDIEQLDVLLARAQVPATTTIALQPISQKARATQLCIETCIARNWRLSIQTHKYLSIA

SEQ ID NO: 35090 - protein, 222 aa, Vibrio cincinnatiensis
  misc_feature (1)..(222): tr|A0A1T4RHW3|A0A1T4RHW3_VIBCI 7-carboxy-7-deazaguanine synthase OS=Vibrio cincinnatiensis DSM 19608 OX=112349 1 GN=queE PE=3 SV=1
MYKVNEIFETIQGEGVFTGVPAVFVRLQYCPVGCAWCDTKQTWQAFEQDQRSMEQIIVKQGDSPTWCSVSADEIILQYHRQGYSAKHIVITGGEPCFYDLLPLTQAFEAIGCQCQIETSGTFEVRASEHTWVTVSPKIAMKGKLPVLTSALLRANEIKHPVGTEKDIEQLEALLNQVPLPESTVIALQPLSQKPRATQLCIEACIARNWRLSIQTHKYLNIA

SEQ ID NO: 35091 - protein, 221 aa, Vibrio comitans
  misc_feature (1)..(221): tr|A0A4Y3IPV7|A0A4Y3IPV7_9VIBR 7-carboxy-7-deazaguanine synthase OS=Vibrio comitans NBRC 102076 OX=1219078 GN= ygcF PE=3 SV=1
MLKINEMFETIQGEGFFTGVPSIFIRLQGCPVGCAWCDTKQTWDVNLEDETDFKTVLLKKGDDERWCSTSEAELVAYCLDHYSAKHVVITGGEPCQYDLFPLTTELEAKGFRCQIETSGTFEVQATANTWVTVSPKIGMKGKLPIEPSAMSRANEVKHPVGKESDIDDLKALLKVSELQDGVEVLLQPISQKPRATKLCIDTCIANNWRLSVQTHKYLDIA

SEQ ID NO: 35092 - protein, 222 aa, Vibrio coralliilyticus
  misc_feature (1)..(222): tr|A0A2A2CN35|A0A2A2CN35_9VIBR 7-carboxy-7-deazaguanine synthase OS=Vibrio coralliilyticus OX=190893 GN=queE P E=3 SV=1
MYKLNEMFETIQGEGVFTGVPSVFVRLQICPVGCAWCDTKQTWDATPQDERPLAEVLAKTGDSPTWCSVSGDDIIEQYRQQGYQAKHIVITGGEPCIYDLRPLTEAFEAIGCRCQIETSGTSPVLASENTWVTVSPKVAMKGKLPVLDCALLRANEIKHPVATDKDIEQLDALIERAGVPESTTIALQPISQKPRATQLCIDTCIARNWRLSIQTHKYLSIA

SEQ ID NO: 35093 - protein, 216 aa, Vibrio coralliilyticus
  misc_feature (1)..(216): tr|A0A1V0I7F2|A0A1V0I7F2_9VIBR 7-carboxy-7-deazaguanine synthase OS=Vibrio coralliilyticus OX=190893 GN=queE P E=3 SV=1
MFETIQGEGVFTGVPSVFVRLQICPVGCAWCDTKQTWDATPQDERPLAEVLAKTEDSPTWCSVSGGDIIDQYRQQGYQAKHIVITGGEPCIYDLRPLTEAFEAIGCRCQIETSGTSPVLASENTWVTVSPKVAMKGKLPVLDCALLRANEIKHPVATDKDIEQLDALIERAGVPESTTIALQPISQKPRATQLCIDTCIARNWRLSIQTHKYLSIA

SEQ ID NO: 35094 - protein, 222 aa, Vibrio crassostreae
  misc_feature (1)..(222): tr|A0A4R2GD33|A0A4R2GD33_9VIBR 7-carboxy-7-deazaguanine synthase OS=Vibrio crassostreae OX=246167 GN=queE PE=3 SV=1
MYKINEMFETIQGEGVFTGVPAVFVRLQICPVGCSWCDTKQTWEALPEDETSLGDIMLKTEDSPTWSAIDAQGIVNEYIKQGYTAKHIVITGGEPCIYDLVPLTQAFEQHGCRCQIETSGTSEVKATSDTWVTVSPKVAMKAKLEILDSALQRANEIKHPVGTGKDIEQLDALLERADVSSDTVIALQPISQKDRATQLCIDTCIERNWRLSIQTHKYLSIA

SEQ ID NO: 35095 - protein, 222 aa, Vibrio crassostreae
  misc_feature (1)..(222): tr|A0A0T7D5V1|A0A0T7D5V1_9VIBR 7-carboxy-7-deazaguanine synthase OS=Vibrio crassostreae OX=246167 GN=queE PE=3 SV=1
MYKINEMFETIQGEGVFTGVPAVFVRLQICPVGCSWCDTKQTWEALPEDETSLGDIMVKTEDSPTWSAIDAQGIVNEYIKQGYTAKHIVITGGEPCIYDLVPLTEAFEQHGCRCQIETSGTSEVKATPDTWVTVSPKVAMKAKLEILDSALQRANEIKHPVGTSKDIEQLDGLLDRAAVPSDTVIALQPISQKDRATQLCIDTCIERNWRLSIQTHKYLSIA

SEQ ID NO: 35096 - protein, 222 aa, Vibrio diabolicus
  misc_feature (1)..(222): tr|A0A2L2K979|A0A2L2K979_9VIBR 7-carboxy-7-deazaguanine synthase OS=Vibrio diabolicus OX=50719 GN=queE PE=3 SV =1
MYKLNEMFETIQGEGVFTGVPAVFVRLQECPVGCSWCDTKQTWYADENDQRQIGDILVKTEDSPTWCVASAENIVEQYQLQGFNAKHIVITGGEPCIYDLRPLTEAFEDMGCQCQIETSGTSEVITSENTWVTVSPKVAMKGKLPVLNSALERANEIKHPVGTQKDIDHLDELLANANVTVETVIALQPISQKPRATQLCIETCIARNWRLSVQTHKYLSIA

SEQ ID NO: 35097 - protein, 222 aa, Vibrio diazotrophicus
  misc_feature (1)..(222): tr|A0A329DZP4|A0A329DZP4_VIBDI 7-carboxy-7-deazaguanine synthase OS=Vibrio diazotrophicus OX=685 GN=queE PE=3 SV=1
MYKVNEMFETIQGEGVFTGVPAVFVRLQECPVGCAWCDTKQTWEANEQDQQSFDQVIVKTGDSPNWCSASAQQIIAMYQSQGYTAKHIVITGGEPCIYDLVPLTQAFEEIGCQCQIETSGTFEVRATKDTWVTVSPKVAMKGKLPVIASALLRANEIKHPVATDKDIENLDQLLQSANVPESTVIALQPISQKPRATQLCIDTCVARNWRLSIQTHKYLSIA

SEQ ID NO: 35098 - protein, 216 aa, Vibrio diazotrophicus
  misc_feature (1)..(216): tr|A0A2J8GMF0|A0A2J8GMF0_VIBDI 7-carboxy-7-deazaguanine synthase OS=Vibrio diazotrophicus OX=685 GN=queE PE=3 SV=1
MFETIQGEGVFTGVPAVFVRLQECPVGCAWCDTKQTWEANEQDQLSFDQIIVKTGDSPNWCSASAQQIIAMYQSQGYTAKHIVITGGEPCIYDLVPLTQAFDEIGCQCQIETSGTFEVRATKDTWVTVSPKVAMKGKLPVIESALLRANEIKHPVATDKDIENLDQLLQSANVPESTVIALQPISQKPRATQLCIDTCVARNWRLSIQTHKYLSIA

SEQ ID NO: 35099 - protein, 216 aa, Vibrio europaeus
  misc_feature (1)..(216): tr|A0A178JEE3|A0A178JEE3_9VIBR 7-carboxy-7-deazaguanine synthase OS=Vibrio europaeus OX=300876 GN=queE PE=3 SV =1
MFETIQGEGVFTGVPSVFVRLQECPVGCAWCDTKQTWDATPQDERPLDEILAKKEDSPTWCSVSAMDIVNEYIKQGYTAKHVVITGGEPCIYDLVPLTQAFEEHGCRCQIETSGTSEVKATDNTWVTVSPKVAMKGKLPVLDSALVRANEIKHPVATQKDIDHLDELLERANVPEDTTIALQPISQKPRATQLCIDVCVARNWRLSIQTHKYLSIA

SEQ ID NO: 35100 - protein, 221 aa, Vibrio ezurae
  misc_feature (1)..(221): tr|U3AIB8|U3AIB8_9VIBR 7-carboxy-7-deazaguanine synthas e OS=Vibrio ezurae NBRC 102218 OX=1219080 GN=queE PE=3 SV=1
MFKVNEIFETIQGEGFFTGVPSIFIRLQGCPVGCAWCDTKQTWDVLEEKETDFGTIIVKSGDDEYWCQSSAKDLVDYCIAHYSAKHVVITGGEPCQYDLLPLTSELEAKGYRCQIETSGTFEVQATAETWVTVSPKIGMKGKLPIAASAMSRANEIKHPVGKESDIDELKALLAAHPLSPATEVLLQPISQKPRATKLCIDTCIENNWRLSVQTHKYLNIA

SEQ ID NO: 35101 - protein, 246 aa, Vibrio fluvialis
  misc_feature (1)..(246): tr|A0A120L4F1|A0A120L4F1_VIBFL 7-carboxy-7-deazaguanine synthase OS=Vibrio fluvialis OX=676 GN=queE PE=3 SV=2
MTFTNASFKVSDLQFLDNKLGNFTLYKVNEMFETIQGEGVFTGVPAVFVRLQECPVGCAWCDTKQTWDAEPADERSFDEILVKTEDNPNWCSASAQQIIERYRAQGYSAKHIVITGGEPCIYDLVPLTQAFEAIGCRCQIETSGTFDVQATENTWVTVSPKVAMKGKLPVIDSALRRANEIKHPVATDKDIDNLDQLLARAKVPETTVIALQPISQKPRATQLCIETCIARNWRLSIQTHKYLSIA

SEQ ID NO: 35102 - protein, 224 aa, Vibrio fluvialis
  misc_feature (1)..(224): tr|A0A1L9L8E1|A0A1L9L8E1_VIBFL 7-carboxy-7-deazaguanine synthase OS=Vibrio fluvialis OX=676 GN=queE PE=3 SV=1
MTLYKVNEMFETIQGEGVFTGVPAVFVRLQICPVGCSWCDTKQTWEAAEQDEQSFAEIIVKTGDSPTWCQADASAIVEQYQRQGYSAKHIVITGGEPCLYDLTELTQAFEAIGCQCQIETSGTYEVKASENTWVTVSPKVAMKGKLPILDSALQRANEIKHPVGTQKDIDQLDALLLRAQVPATTVIALQPISQKERATQLCIDTCIKRNWRLSIQTHKYLSIA

SEQ ID NO: 35103 - protein, 216 aa, Vibrio fortis
  misc_feature (1)..(216): tr|A0A066V0S3|A0A066V0S3_9VIBR 7-carboxy-7-deazaguanine synthase OS=Vibrio fortis OX=212667 GN=queE PE=3 SV=1
MFETIQGEGVFTGVPAVFVRLQICPVGCSWCDTKQTWEALAEDETSLGDIMVKTEDSPTWSSVDAQGIVDQYVKQGFNAKHIVITGGEPCIYDLVPLTEAFEKMGCRCQIETSGTSEVKATVKTWVTVSPKVAMKAKLEILDSALQRADEIKHPVGTSKDVDQLDHLLERAKVSSETVIALQPISQKDRATQLCIDTCIERNWRLSIQTHKYLSIA

SEQ ID NO: 35104 - protein, 246 aa, Vibrio furnissii
  misc_feature (1)..(246): tr|F0LUE4|F0LUE4_VIBFN 7-carboxy-7-deazaguanine synthas e OS=Vibrio furnissii (strain DSM 14383 / NCTC 11218 / VL 6966) OX=903510 GN=queE PE=3 SV=1
MTFTNASFKVSDLQFLDNKLGNFTLYKVNEMFETIQGEGVFTGVPAVFVRLQECPVGCAWCDTKQTWDAAPADERSFDEILVKTEDNPNWCSASAQQIIERYRAQGYTAKHIVITGGEPCIYDLVPLTQAFEAIGCRCQIETSGTFAVQATENTWVTVSPKVAMKGKLPVVDVALQRANEIKHPVATEKDIDNLDQLLARAGVPETTVVALQPISQKPRATQLCIDTCIARNWRLSIQTHKYLSIA

SEQ ID NO: 35105 - protein, 216 aa, Vibrio furnissii
  misc_feature (1)..(216): tr|A0A0Q2M9N8|A0A0Q2M9N8_VIBFU 7-carboxy-7-deazaguanine synthase OS=Vibrio furnissii OX=29494 GN=queE PE=3 SV= 1
MFETIQGEGVFTGVPAVFVRLQECPVGCAWCDTKQTWDAAPADERSFDEILVKTEDNPNWCSASAQQIIERYRAQGYTAKHIVITGGEPCIYDLVPLTQAFEAIGCRCQIETSGTFAVQATENTWVTVSPKVAMKGKLPVVDVALQRANEIKHPVATEKDIDNLDQLLARADVPATTVVALQPISQKPRATQLCIDTCIARNWRLSIQTHKYLSIA

SEQ ID NO: 35106 - protein, 216 aa, Vibrio galatheae
  misc_feature (1)..(216): tr|A0A0F4NKP7|A0A0F4NKP7_9VIBR 7-carboxy-7-deazaguanine synthase OS=Vibrio galatheae OX=579748 GN=queE PE=3 SV =1
MFQTIQGEGVYTGVPSVFVRLQECPVGCAWCDTKQTWDATPQDERPLDEILAKQEDSPTWCSVTAEQIVDEYKKQGYTAKHIVITGGEPCIYDLTPLSTAFEAIDCQCQIETSGTSEVRTSENTWVTVSPKIAMKGKLPVLDSALLRANEIKHPVATQKDIDQLDELLVRAGVSAETTIALQPISQKPRATQLCIDVCVARNWRLSIQTHKYLSIA

SEQ ID NO: 35107 - protein, 232 aa, Vibrio gazogenes
  misc_feature (1)..(232): tr|A0A1Z2SBG1|A0A1Z2SBG1_VIBGA 7-carboxy-7-deazaguanine synthase OS=Vibrio gazogenes OX=687 GN=queE PE=3 SV=1
MTAELGFILSIYKVNEIFQTIQGEGVFTGAPAVFVRLQGCPVGCSWCDTKHTWFTEPQDQRSVDDIIVKTQDSPLWCQMSAEAIIDCYHRQGYTAKHIVITGGEPCLYDLTVLTEAFEAIGCRCQIETSGTADVLASAQTWVTVSPKIAMKGRLPVLEGALRRANEIKHPVGTRKDIEQLDHLLHQTPVADDTIIALQPISQKPRATELCIEVCIERNWRLSIQTHKYLSIA

SEQ ID NO: 35108 - protein, 232 aa, Vibrio gazogenes
  misc_feature (1)..(232): tr|A0A1M4ZB81|A0A1M4ZB81_VIBGA 7-carboxy-7-deazaguanine synthase OS=Vibrio gazogenes DSM 21264 = NBRC 103151 O X=1123492 GN=queE PE=3 SV=1
MTAELGFILSIYKVNEIFQTIQGEGVFTGAPAVFVRLQGCPVGCSWCDTKHTWFTEPQDLRSVDDIIVKTQDSSLWCQMSAEAIIDCYHRQGYTAKHIVITGGEPCLYDLTVLTEAFEAIGCRCQIETSGTADVQASVQTWVTVSPKIAMKGRLPVLESALRRANEIKHPVGTRKDIEQLDHLLHQTPVTDDTIIALQPISQKPRATELCIEVCIERNWRLSIQTHKYLSIA

SEQ ID NO: 35109 - protein, 216 aa, Vibrio genomosp.
  misc_feature (1)..(216): tr|A0A1B9QV00|A0A1B9QV00_9VIBR 7-carboxy-7-deazaguanine synthase OS=Vibrio genomosp. F10 OX=723171 GN=queE PE= 3 SV=1
MFETIQGEGYFTGVPSVFVRLQECPVGCAWCDTKQTWDALESDKRTINEILVKTEDNPLWCAISAEGIVEQYQHQGYTAKHVVITGGEPCIYDLRPLTKAFEQIGCRCQIETSGTFEVKATGSTWVTVSPKVAMKGKLPIIDSALERADEIKHPVGTQKDIDHLDELLSRVTIDQKTVIALQPISQKTRSTELCIETCIKRNWRLSVQTHKYLSIA

SEQ ID NO: 35110 - protein, 222 aa, Vibrio genomosp.
  misc_feature (1)..(222): tr|A0A4U1YSM6|A0A4U1YSM6_9VIBR 7-carboxy-7-deazaguanine synthase OS=Vibrio genomosp. F6 OX=723172 GN=queE PE=3 SV=1
MYKINEMFETIQGEGVFTGVPAVFVRLQECPVGCAWCDTKQTWDATPQDERPLAEVLAKTSDSPTWCSVSAADIVNQYQASGFTAKHIVITGGEPCIYDLIPLTEAFEVLGCECQIETSGTSEVKVTPNTWVTVSPKVAMKGKLPILKSAFLRANEIKHPVGTQKDIDHLDDLIETFGTADKAIVALQPISQKDRATQLCIETCVARNWRLSIQTHKYLSIA

SEQ ID NO: 35111 - protein, 221 aa, Vibrio halioticoli
  misc_feature (1)..(221): tr|V5FJH0|V5FJH0_9VIBR 7-carboxy-7-deazaguanine synthas e OS=Vibrio halioticoli NBRC 102217 OX=1219072 GN=queE PE=3 SV=1
MLKINEIFETIQGEGFFTGVPSIFIRLQGCPVGCAWCDTKQTWDVLEEKQTDFGTIIAKSGDDEFWCQQSEQDLVTYCLANYSAKHVVITGGEPCQYDLLPLTTKLEEHGFRCQIETSGTFAIQATANTWVTVSPKIGMKGKLPIQASAMARANEVKHPVGTQSDIEDLKALLASSQLQPNTEILLQPISQKPRATKLCIDTCIANNWRLSVQTHKYLNIA

SEQ ID NO: 35112 - protein, 226 aa, Vibrio hangzhouensis
  misc_feature (1)..(226): tr|A0A1H5YFR0|A0A1H5YFR0_9VIBR 7-carboxy-7-deazaguanine synthase OS=Vibrio hangzhouensis OX=462991 GN=queE PE= 3 SV=1
MTHTRFKINEMFETIQGEGVFTGVPAVFVRLQICNVGCAWCDTKQTWTAEPEQQRSFGDIILKQGDDPTWSEVSADDIVVMYNQQGFNAKHIVITGGEPCEYDLTELCKAFEAIGCQCQIETSGTSEVRVTESTWVTVSPKIAMKGKLPVLTSALERANEVKHPVATEKNISQLDELLAQAALRKDVVIALQPISQKPRATELCIETCIERNWRLSVQTHKYLSIA

SEQ ID NO: 35113 - protein, 222 aa, Vibrio harveyi
  misc_feature (1)..(222): tr|A0A3A1PUW4|A0A3A1PUW4_VIBHA 7-carboxy-7-deazaguanine synthase OS=Vibrio harveyi OX=669 GN=queE PE=3 SV=1
MYKLNEMFETIQGEGVFTGVPAVFVRLQECPVGCSWCDTKQTWYAEEKDQRQIGDILVKTEDSPTWCFASAQDIVAEYKKQGFNAQHIVITGGEPCIYDLRDLTAAFEDMGCQCQIETSGTSEVVTSENTWVTVSPKVAMKGKLPVLKSALERADEIKHPVGTQKDIDHLDDLLAMADIDSKTIIALQPISQKPRATQLCIDTCVARNWRLSVQTHKYLSIA

SEQ ID NO: 35114 - protein, 226 aa, Vibrio harveyi
  misc_feature (1)..(226): tr|D0XI30|D0XI30_VIBH1 7-carboxy-7-deazaguanine synthas e OS=Vibrio harveyi (strain 1DA3) OX=673519 GN=queE PE= 3 SV=1
MSSTLYKLNEMFETIQGEGVFTGVPAVFVRLQVCPVGCSWCDTKQTWYAEEEGQRQIGDILVKTEDSPTWCFASAEDIVAEYKKQGFNAKHIVITGGEPCIYDLRALTAAFEEMGCQCQIETSGTSEVVTSESTWVTVSPKVAMKGKLPVLKSALERANEIKHPVGTQKDIDQLDSLLASADIAEKTVIALQPISQKPRATQLCIDTCVARNWRLSVQTHKYLSIA

SEQ ID NO: 35115 - protein, 216 aa, Vibrio hepatarius
  misc_feature (1)..(216): tr|A0A0M0HWI6|A0A0M0HWI6_9VIBR 7-carboxy-7-deazaguanine synthase OS=Vibrio hepatarius OX=171383 GN=queE PE=3 S V=1
MFETIQGEGVFTGVPSVFVRLQQCPVGCAWCDTKQTWEALADDERNFGEIILKTEDSPTWCSASAEAIVNEYQKQAYTAKHIVITGGEPCIYDLTPLTSAFEAIGCQCQIETSGTSEVLATESTWVTVSPKVAMKGKLPVLDSALQRANEIKHPVATEKDIDQLDELLSRAEVSSQTTIALQPISQKPRATQLCIDVCVKRNWRLSIQTHKYLSIA

SEQ ID NO: 35116 - protein, 215 aa, Vibrio ichthyoenteri
  misc_feature (1)..(215): tr|F9S2J9|F9S2J9_9VIBR 7-carboxy-7-deazaguanine synthas e OS=Vibrio ichthyoenteri ATCC 700023 OX=870968 GN=queE PE=3 SV=1
MFETIQGEGEFTGTPSVFIRLQECGVGCAWCDTQQTWSANPEDEVKLIEVLAKQGDSPTWCRISAEEIVSLYQEKYNARHIVITGGEPCIYDLRPLTLAFESLGCTCQIETSGTSEVVVSDSSWVTVSPKISMKGRLPVLPSSLLRANEIKHPVGTQKDIDQLDELLDGLMISPTTVIALQPISQKERATQLCIDTCIARNWRLSIQTHKYLEIA

SEQ ID NO: 35117 - protein, 221 aa, Vibrio inusitatus
  misc_feature (1)..(221): tr|A0A4Y3HU57|A0A4Y3HU57_9VIBR 7-carboxy-7-deazaguanine synthase OS=Vibrio inusitatus NBRC 102082 OX=1219070 G N=ygcF PE=3 SV=1
MLKINEMFETIQGEGFFTGVPSIFIRLQGCPVGCAWCDTKQTWDVNLEDETDLKTVLLKQGDDERWCSTSEAVLVAYCLEQYSAKHVVITGGEPCQYDLLPLTTKLEANGYRCQIETSGTFEVLATPNTWVTVSPKIGMKGKLPIEPSAMSRANEVKHPVGKESDIDDLKSLLEVSKLQDGVEVLLQPISQKPRATKLCIDTCIANNWRLSVQTHKYLDIA

SEQ ID NO: 35118 - protein, 134 aa, Vibrio ishigakensis
  misc_feature (1)..(134): tr|A0A0B8NNW2|A0A0B8NNW2_9VIBR Queuosine biosynthesis q ueE radical SAM OS=Vibrio ishigakensis OX=1481914 GN=JC M19231_2529 PE=4 SV=1
MITGGEPCQYDLVSLTDALEANGFRCQIETSGTFEVKASKNTWVTVSPKIGMKGKLPIEPQAMTRANEVKHPVGKQADIDALEELLLANPVGEGVEILLQPISQKPRATQLCIDTCIAKNWRLSIQTHKYLQIA

SEQ ID NO: 35119 - protein, 78 aa, Vibrio ishigakensis
  misc_feature (1)..(78): tr|A0A0B8NZW5|A0A0B8NZW5_9VIBR Queuosine biosynthesis q ueE radical SAM OS=Vibrio ishigakensis OX=1481914 GN=JC M19231_2528 PE=4 SV=1
MLKLNEIFETIQGEGFFTGVPSIFIRLQGCPVGCAWCDTKQTWDVLEDKETDFGTIIAKTGMMSFGVISLWIRWWRFV

SEQ ID NO: 35120 - protein, 216 aa, Vibrio jasicida
  misc_feature (1)..(216): tr|A0A2S7VUG4|A0A2S7VUG4_9VIBR 7-carboxy-7-deazaguanine synthase OS=Vibrio jasicida OX=766224 GN=queE PE=3 SV= 1
MFETIQGEGVFTGVPAVFVRLQECPVGCSWCDTKQTWYAEKEDQRQIGDILVKTEDSPTWCFASAEDIVAEYKKQGFNAKHIVITGGEPCIYDLRALTAAFEEMGCQCQIETSGTSEVVTSEGTWVTVSPKVAMKGKLPVLKSALERANEIKHPVGTQKDIDQLDALLASAEIGEKTVIALQPISQKPRATQLCIDTCVARNWRLSVQTHKYLSIA

SEQ ID NO: 35121 - protein, 216 aa, Vibrio kanaloae
  misc_feature (1)..(216): tr|A0A1E5DR50|A0A1E5DR50_9VIBR 7-carboxy-7-deazaguanine synthase OS=Vibrio kanaloae 5S-149 OX=1191299 GN=queE PE=3 SV=1
MFETIQGEGMFTGVPAVFVRLQVCPVGCSWCDTKQTWDALPKDETSLGNIMVKTEDSPTWSAIDAQGIVNEYIKQGYTAKHIVITGGEPCIYDLVPLTEAFEQHGCRCQIETSGTSEVKATSDTWVTVSPKVAMKAKLEILDSALQRANEIKHPVGTSKDIEQLDGLLDRAAVASDTVIALQPISQKDRATQLCIDTCIERNWRLSIQTHKYLSIA

SEQ ID NO: 35122 - protein, 216 aa, Vibrio kanaloae
  misc_feature (1)..(216): tr|A0A4U2CRQ1|A0A4U2CRQ1_9VIBR 7-carboxy-7-deazaguanine synthase OS=Vibrio kanaloae OX=170673 GN=queE PE=3 SV= 1
MFETIQGEGMFTGVPAVFVRLQVCPVGCSWCDTKQTWDALPKDETSLGNIMVKTEDSPTWSAIDAQGIVNEYIKQGYTAKHIVITGGEPCIYDLVPLTEAFEQHGCRCQIETSGTSEVKATPDTWVTVSPKVAMKAKLEILDSALQRANEIKHPVGTSKDIEQLDGLLERAAVASDTVIALQPISQKDRATQLCIDTCIERNWRLSIQTHKYLSIA

SEQ ID NO: 35123 - protein, 216 aa, Vibrio lentus
  misc_feature (1)..(216): tr|A0A2N7IAM2|A0A2N7IAM2_9VIBR 7-carboxy-7-deazaguanine synthase OS=Vibrio lentus OX=136468 GN=queE PE=3 SV=1
MFETIQGEGVFTGVPAVFVRLQICPVGCSWCDTKQTWEALPEDETSLGDIMVKTEDSPTWSAIDAQGIVNEYIKQGYTAKHIVITGGEPCIYDLVPLTEAFEQHGCRCQIETSGTSEVKATPDTWVTVSPKVAMKAKLDILDSALVRANEIKHPVGTGKDIEQLDALIARADVPEKTVIALQPISQKERATQLCIDTCIERNWRLSIQTHKYLSIA

SEQ ID NO: 35124 - protein, 216 aa, Vibrio lentus
  misc_feature (1)..(216): tr|A0A4U2FS97|A0A4U2FS97_9VIBR 7-carboxy-7-deazaguanine synthase OS=Vibrio lentus OX=136468 GN=queE PE=3 SV=1
MFETIQGEGVFTGVPAVFVRLQICPVGCSWCDTKQTWDALPEDETSLGDIMVKTEDSPTWSAIDAQGIVNEYIKQGYTAKHIVITGGEPCIYDLVPLTEAFEQHGCRCQIETSGTSEVKATPDTWVTVSPKVAMKAKLDILDSALVRANEIKHPVGTGKDIEQLDALIARADVPEKTVIALQPISQKERATQLCIDTCIERNWRLSIQTHKYLSIA

SEQ ID NO: 35125 - protein, 232 aa, Vibrio mangrovi
  misc_feature (1)..(232): tr|A0A1Y6IN62|A0A1Y6IN62_9VIBR 7-carboxy-7-deazaguanine synthase OS=Vibrio mangrovi OX=474394 GN=queE PE=3 SV= 1
MTVELGFILSIYKVNEIFQTIQGEGVFTGVPAVFIRLQGCPVGCSWCDTKQTWLTEPKDKRSVEEIIVKTQDSPHWCQMNTEEIIRCYHQQGYTARHIVITGGEPCIYHLTELTKAFEELGCRCQIETSGTAEVQVSEQTWVTVSPKVAMKGRLPVLGSAMLRANEIKHPVGTRKDIEQLEQLLRQNQVSDDTIIALQPISQKPRATELCIEVCTERNWRLSIQTHKYLSIA

SEQ ID NO: 35126 - protein, 226 aa, Vibrio maritimus
  misc_feature (1)..(226): tr|A0A090SP81|A0A090SP81_9VIBR 7-carboxy-7-deazaguanine synthase OS=Vibrio maritimus OX=990268 GN=queE PE=3 SV =1
MSGKQFKINEMFETIQGEGVFTGVPAVFVRLQICNVGCAWCDTKQTWEAKAEDERAFGEIITKQGDSPTWSDVSAQDIVDMYNAQGFNAKHIVITGGEPCEYDLTPLCEAFEAIGARCQIETSGTSEVKVTDATWVTVSPKIAMKGKREVLESALERANEIKHPVATDKNIEQLDELLDGVALKDDVVIALQPISQKPRATELCMSTCIARNWRLSVQTHKYLNIA

SEQ ID NO: 35127 - protein, 226 aa, Vibrio maritimus
  misc_feature (1)..(226): tr|A0A090T340|A0A090T340_9VIBR 7-carboxy-7-deazaguanine synthase OS=Vibrio maritimus OX=990268 GN=queE PE=3 SV =1
MSGKQFKINEMFETIQGEGVFTGVPAVFIRLQICNVGCAWCDTKQTWEAKQEDERTFGEIITKQGDSPTWSDVSADEIVAMYQAQGFTAKHIVITGGEPCEYDLTPLCEAFEAIDARCQIETSGTSEVRVTENTWVTVSPKIAMKGKREVLASALERANEIKHPVATDKNIEQLDALLDGVALKPDVVIALQPISQKPRATELCMSTCIARNWRLSVQTHKYLNIA

SEQ ID NO: 35128 - protein, 226 aa, Vibrio mediterranei
  misc_feature (1)..(226): tr|A0A3G4V547|A0A3G4V547_9VIBR 7-carboxy-7-deazaguanine synthase OS=Vibrio mediterranei OX=689 GN=queE PE=3 SV =1
MSNTRFKINEMFETIQGEGMFTGVPAVFIRLQICNVGCSWCDTKQTWDANNEDQRSFGEIITKQGDSPTWSDVDAAEIVAMYQSQQFNAKHIVITGGEPCEYDLTALCEAFEAIGCRCQIETSGTSEIRVTPVTWVTVSPKVAMKGKLPVLSSSLERADEIKHPVATQKNVDQLDELLHGVELKSDVVIALQPISQKPRATELCIETCIQRNWRLSVQTHKYLSIA

SEQ ID NO: 35129 - protein, 226 aa, Vibrio mediterranei
  misc_feature (1)..(226): tr|A0A2C9PEG9|A0A2C9PEG9_9VIBR 7-carboxy-7-deazaguanine synthase OS=Vibrio mediterranei OX=689 GN=queE PE=3 SV =1
MSNTRFKINEMFETIQGEGMFTGVPAVFIRLQICNVGCSWCDTKQTWDANNEDQRSFGEIITKQGDSPTWSDVDAAEIVAMYQLQQFNAKHIVITGGEPCEYDLTALCEAFEAIGCRCQIETSGTSEIRVTPATWVTVSPKVAMKGKLPVLSSSLERADEIKHPVATQKNVDQLDELLQGVELKSDVVIALQPISQKPRATELCIETCIQRNWRLSVQTHKYLSIA

SEQ ID NO: 35130 - protein, 216 aa, Vibrio metoecus
  misc_feature (1)..(216): tr|A0A0N8VAW7|A0A0N8VAW7_9VIBR 7-carboxy-7-deazaguanine synthase OS=Vibrio metoecus OX=1481663 GN=queE PE=3 SV =1
MFETIQGEGVFTGVPAVFVRLQGCPVGCAWCDTKQTWESLDADQTSFSQILLKTSDAPTWCHASAQDVVQRYQTQGYQAKHIVITGGEPCIYDLTELTQAFESIGCHCQIETSGTYEVRATPLTWVTVSPKVAMKGKLPILDSALQRANEIKHPVATEKDIDNLDELLVRAKVTEKTVVALQPISQKPRATELCISTCIARNWRLSIQTHKYLNIA

SEQ ID NO: 35131 - protein, 216 aa, Vibrio metoecus
  misc_feature (1)..(216): tr|A0A067B5G2|A0A067B5G2_9VIBR 7-carboxy-7-deazaguanine synthase OS=Vibrio metoecus OX=1481663 GN=queE PE=3 SV =1
MFETIQGEGVFTGVPAVFVRLQGCPVGCAWCDTKQTWESLDADQTSFSQILLKTSDAPTWCHASAQDVVQRYQTQGYQAKHIVITGGEPCIYDLTELTQAFESIGCHCQIETSGTYEVRATPLTWVTVSPKVAMKGKLPILDSALQRANEIKHPVATEKDIDNLDELLVRAKVTEKTVVALQPISQKPRATELCIRTCIARNWRLSIQTHKYLNIA

SEQ ID NO: 35132 - protein, 224 aa, Vibrio metschnikovii
  misc_feature (1)..(224): tr|C9P4J3|C9P4J3_VIBME 7-carboxy-7-deazaguanine synthas e OS=Vibrio metschnikovii CIP 69.14 OX=675813 GN=queE P E=3 SV=1
MTLYKVNEIFETIQGEGVFTGVPAVFVRLQQCPVGCAWCDTKQTWDAEPQDQRSFEQIIVKQGDSPTWCQGSAEQIVAQYQQQGYTAKHIVITGGEPCLYDLVPLTEAFEAIGCQCQIETSGTFEIKASAKTWVTVSPKIAMKGKLPIVPSALQRANEIKHPVGTEKDIAQLEALLAQVAISPDTIIALQPISQKPRATQLCIETCITRNWRLSIQTHKYLNIA

SEQ ID NO: 35133 - protein, 224 aa, Vibrio metschnikovii; identical to SEQ ID NO: 35132
  misc_feature (1)..(224): tr|A0A380NVU9|A0A380NVU9_VIBME 7-carboxy-7-deazaguanine synthase OS=Vibrio metschnikovii OX=28172 GN=queE PE=3 SV=1

SEQ ID NO: 35134 - protein, 216 aa, Vibrio mimicus
  misc_feature (1)..(216): tr|D2YJD4|D2YJD4_VIBMI 7-carboxy-7-deazaguanine synthas e OS=Vibrio mimicus VM603 OX=671074 GN=queE PE=3 SV=1
MFETIQGEGVFTGVPAVFVRLQGCPVGCAWCDTKQTWETLESDQTSFPQILLKTSDAPTWCQASAQDVIERYRAQGYQAKHIVITGGEPCIYDLTELTQAFEAIGCQCQIETSGTYEILATPTTWVTVSPKVAMKGKLLILDSALQRANEIKHPVATEKDIDNLDELLVRASVDTKTVIALQPISQKPRATELCIRTCIARNWRLSIQTHKYLNIA

SEQ ID NO: 35135 - protein, 216 aa, Vibrio mimicus
  misc_feature (1)..(216): tr|A0A5B6XH16|A0A5B6XH16_VIBMI 7-carboxy-7-deazaguanine synthase OS=Vibrio mimicus OX=674 GN=queE PE=3 SV=1
MFETIQGEGVFTGVPAVFVRLQGCPVGCAWCDTKQTWETLESDQTSFPQILLKTSDAPTWCQASAQDVIERYRAQGYQAKHIVITGGEPCIYDLTELTQAFEAIGCQCQIETSGTYEILATPTTWVTASPKVAMKGKLPILDSALQRANEIKHPVATEKDIDNLDELLVRASVDAKTVIALQPISQKPRATELCIRTCIARNWRLSIQTHKYLNIA

SEQ ID NO: 35136 - protein, 216 aa, Vibrio mytili
  misc_feature (1)..(216): tr|A0A0C3I918|A0A0C3I918_9VIBR 7-carboxy-7-deazaguanine synthase OS=Vibrio mytili OX=50718 GN=queE PE=3 SV=1
MFETIQGEGIFTGVPAVFIRLQECPVGCSWCDTKQTWEAAESDQRTIGDILVKTGDSPTWCVASASDLVEQYKHQGFNAKHIVITGGEPCIYDLRPLAEAFEIIGCQCQIETSGTYEVITTNNTWVTVSPKVAMKGKLPVLKSALERANEIKHPVGTQKDIDHLDELLASAGVSPKTIVALQPISQKPRATQLCIDTCVERNWRLSIQTHKYLSIA

SEQ ID NO: 35137 - protein, 216 aa, Vibrio natriegens
  misc_feature (1)..(216): tr|A0A1B1ECI5|A0A1B1ECI5_VIBNA 7-carboxy-7-deazaguanine synthase OS=Vibrio natriegens OX=691 GN=queE PE=3 SV=1
MFETIQGEGVFTGVPAVFVRLQECPVGCSWCDTKQTWEAAEEDQRSIGDILIKTEDSPTWCVATAEDIVEQYKKQGFNAKHIVITGGEPCIYDLRPLAQAFEDMGCQCQIETSGTSEVVTTEKTWVTVSPKVAMKGKLPVLKSALERANEIKHPVGTQKDIDHLDELLASAEITPETIIALQPISQKPRATQLCIDTCVARNWRLSIQTHKYLSIA

SEQ ID NO: 35138 - protein, 216 aa, Vibrio navarrensis
  misc_feature (1)..(216): tr|A0A099LV60|A0A099LV60_9VIBR 7-carboxy-7-deazaguanine synthase OS=Vibrio navarrensis OX=29495 GN=queE PE=3 S V=1
MFETIQGEGVFTGVPAVFVRLQVCPVGCSWCDTKQTWQALEQDQRTFGEIILKSGDSPSWCNADAEEIVAQYQQQGFNAKHIVITGGEPCIYDLTSLTEAFEAIGCQCQIETSGTYPVQTSPATWVTVSPKVAMKGKLPVLDSALLRANEIKHPVGTEKDIEQLDLLLARAQVPATTTIALQPISQKARATQLCIETCIARNWRLSVQTHKYLSIA

SEQ ID NO: 35139 - protein, 222 aa, Vibrio neocaledonicus
  misc_feature (1)..(222): tr|A0A4P8G1U7|A0A4P8G1U7_9VIBR 7-carboxy-7-deazaguanine synthase OS=Vibrio neocaledonicus OX=1208308 GN=queE P E=3 SV=1
MYKLNEMFETIQGEGVFTGVPAVFVRLQECPVGCSWCDTKQTWYADENDQRQIGDILVKTEDSPTWCVASAENIVEQYQQQGFNAKHIVITGGEPCIYDLRPLTKAFEDMGCQCQIETSGTSEVITSENTWVTVSPKVAMKGKLPVLNSALERANEIKHPVGTQKDIDHLDDLLANANVAAETIIALQPISQKPRATQLCIDTCIARNWRLSVQTHKYLSIA

SEQ ID NO: 35140 - protein, 216 aa, Vibrio neptunius
  misc_feature (1)..(216): tr|A0A0F4P1U6|A0A0F4P1U6_9VIBR 7-carboxy-7-deazaguanine synthase OS=Vibrio neptunius OX=170651 GN=queE PE=3 SV =1
MFETIQGEGVFTGVPSVFVRLQICPVGCAWCDTKQTWDATPQDERPLAEVLAKTEDSPTWCSVSGDDIIEQYRQQGYQAKHIVITGGEPCIYDLRPLTEAFEALGCSCQIETSGTSPVFASENTWVTVSPKVAMKGKLPVLDCALLRANEIKHPVATDKDIEQLDALIERAGVPESTTVALQPISQKPRATQLCIDTCIARNWRLSIQTHKYLSIA

SEQ ID NO: 35141 - protein, 216 aa, Vibrio nereis
  misc_feature (1)..(216): tr|A0A0M0HV99|A0A0M0HV99_VIBNE 7-carboxy-7-deazaguanine synthase OS=Vibrio nereis OX=693 GN=queE PE=3 SV=1
MFETIQGEGVFTGVPSVFVRLQECPVGCAWCDTKQTWDALPQDERSFGEILVKTEDNTQWCSASADAIVNQYQNQGYTARHIVITGGEPCIYDLRPLTRAFEDIGCKCQIETSGTSEVFATESTWVTVSPKVAMKGKLPVLDSALQRADEIKHPVATQKDIDQLDELLSHVNVSDKTTIALQPISQKPRATELCIDVCVKRNWRLSIQTHKYLSIA

SEQ ID NO: 35142 - protein, 226 aa, Vibrio nigripulchritudo
  misc_feature (1)..(226): tr|U4K5Q4|U4K5Q4_9VIBR 7-carboxy-7-deazaguanine synthas e OS=Vibrio nigripulchritudo OX=28173 GN=queE PE=3 SV=1
MLNSQYKINEMFETIQGEGTFTGVPSVFVRLQECPVGCAWCDTKQTWEAEEQDQVPIGDIMIKTADSPTWCFVSAGDIVEQYQKHGYTAKNIVITGGEPCVYDLVALTKAFEDIGCQCQIETSGTFEVKATDSTWVTVSPKIAMKGKLPVLVSALERANEIKHPVGTQKDIDQLDELIASADVSDETTIALQPISQKPRATKLCIDTCIARNWRLSVQTHKYLDIA

SEQ ID NO: 35143 - protein, 226 aa, Vibrio nigripulchritudo
  misc_feature (1)..(226): tr|U4EEE6|U4EEE6_9VIBR 7-carboxy-7-deazaguanine synthas e OS=Vibrio nigripulchritudo FTn2 OX=1238441 GN=queE PE =3 SV=1
MLNSQYKINEMFETIQGEGTFTGVPSVFVRLQECPVGCAWCDTKQTWEAEEQHQVPIGDIMIKTADSPTWCFVSAGDIVEQYQKHGYTAKNIVITGGEPCVYDLVALTKAFEDIGCQCQIETSGTFEVKATDSTWVTVSPKIAMKGKLPVLVSALERANEIKHPVGTQKDIDQLDELIASADVSDETTIALQPISQKPRATKLCIDTCIARNWRLSVQTHKYLNIA

SEQ ID NO: 35144 - protein, 222 aa, Vibrio orientalis
  misc_feature (1)..(222): tr|C9QHW8|C9QHW8_VIBOR 7-carboxy-7-deazaguanine synthas e OS=Vibrio orientalis CIP 102891 = ATCC 33934 OX=67581 6 GN=queE PE=3 SV=1
MYKINEMFETIQGEGVFTGVPSVFVRLQECPVGCAWCDTKQTWDATPTDERPLNEILAKTEDSPTWCGVSAEDIVNEYKKQGYTAKHIVITGGEPCIYDLRPLTQAFEENGCQCQIETSGTFEVKATTKTWVTVSPKVAMKGKLPVIDSALLRANEIKHPVATQKDIDQLDELLERAKVSEQTTVALQPISQKPRATQLCIDVCVARNWRLSIQTHKYLSIA

SEQ ID NO: 35145 - protein, 216 aa, Vibrio owensii
  misc_feature (1)..(216): tr|A0A0C1Z4T3|A0A0C1Z4T3_9VIBR 7-carboxy-7-deazaguanine synthase OS=Vibrio owensii CAIM 1854 = LMG 25443 OX=12 29493 GN=queE PE=3 SV=1
MFETIQGEGVFTGAPAVFVRLQVCPVGCSWCDTKQTWYAEEEDQRQIGDILVKTEDSPTWCFASAEDIVAEYKKQGFNAKHIVITGGEPCIYDLRALTAAFEEMGCQCQIETSGTSEVVTSESTWVTVSPKVAMKGKLPVLKSALERANEIKHPVGTQKDIDQLDSLLASADIAEKTVIALQPISQKPRATQLCIDTCVARNWRLSVQTHKYLSIA

SEQ ID NO: 35146 - protein, 221 aa, Vibrio owensii
  misc_feature (1)..(221): tr|A0A3G2PUM7|A0A3G2PUM7_9VIBR 7-carboxy-7-deazaguanine synthase OS=Vibrio owensii OX=696485 GN=queE PE=3 SV=1
MLKVNEIFETIQGEGVFTGVPSIFLRLQGCPVGCAWCDTKHTWEVDLEHEVSFDAVIGKCTESEQWGQVSVEQVVKECSERYSAKHVVITGGEPCMYDLTSLTSRLESFGFTCQIETSGTFDVNASEACWVTVSPKIGMKGGLNIQAQAVSRANEIKYPIGTQKDLDNLTDLLSTFETRENVVVALQPISQKKRATELCIEACIQNNWRLSIQTHKYLQIA

SEQ ID NO: 35147 - protein, 224 aa, Vibrio palustris
  misc_feature (1)..(224): tr|A0A1R4B2B0|A0A1R4B2B0_9VIBR 7-carboxy-7-deazaguanine synthase OS=Vibrio palustris OX=1918946 GN=queE PE=3 S V=1
MTLYKINEMFETIQGEGVFTGVPAVFVRLQQCPVGCAWCDTKQTWDATPQDETTFDVIIQKAQDNPQWCQASADDIIQRYQQEGYTARHIVITGGEPCIYDLHALTHAFEAIGCRCQIETSGTFEVKASVDTWVTVSPKVAMKGKLPIIDSALLRANEIKHPVATAKDIDNLDALVSRVDIANSTEIALQPISQKGRATELCIETCIKRNWRLSIQTHKYLSIA

SEQ ID NO: 35148 - protein, 221 aa, Vibrio panuliri
  misc_feature (1)..(221): tr|A0A1Q9HFM1|A0A1Q9HFM1_9VIBR 7-carboxy-7-deazaguanine synthase OS=Vibrio panuliri OX=1381081 GN=queE PE=3 SV =1
MYKLNEMFETIQGEGVFTGVPSVFIRLQYCPVGCAWCDTKHTWSAEPQDERAIEQVLEKTQESATWCAISAEELVAIYQQNYTVKHIVITGGEPCEYDLIPLTHAFESIGCQCQIETSGTADIHASDNTWVTVSPKVAMKAQLPIKSSALARANEIKHPVGTSKDIEQLDQLLARGVASQEVVIALQPISQKPRATQLCIDTCIERNWRLSIQTHKYLDIA

SEQ ID NO: 35149 - protein, 222 aa, Vibrio parahaemolyticus
  misc_feature (1)..(222): tr|A0A2R9VKD0|A0A2R9VKD0_VIBPH 7-carboxy-7-deazaguanine synthase OS=Vibrio parahaemolyticus OX=670 GN=queE PE= 3 SV=1
MYKLNEMFETIQGEGIFTGVPAVFVRLQECPVGCSWCDTKQTWDAEEKDQRPIGDILVKTEDSPTWCTASAEDIVEQYKQQGFNAKHIVITGGEPCIYDLRPLSKAFEDMGCQCQIETSGTSEVVTSEKTWVTVSPKVAMKGKLPVLRSALERANEIKHPVGTQKDIDHLDELLANADIKTETVIALQPISQKPRATQLCIETCIARNWRLSIQTHKYLSIA

SEQ ID NO: 35150 - protein, 222 aa, Vibrio parahaemolyticus
  misc_feature (1)..(222): tr|Q87P79|Q87P79_VIBPA 7-carboxy-7-deazaguanine synthas e OS=Vibrio parahaemolyticus serotype O3:K6 (strain RIM D 2210633) OX=223926 GN=queE PE=3 SV=1
MYKLNEMFETIQGEGIFTGVPAVFVRLQECPVGCSWCDTKQTWDAEEKDQRPIGDILVKTEDSPTWCTASAEDIVEQYKQQGFNAKHIVITGGEPCIYDLRPLSKAFEDMGCQCQIETSGTSEVVTSEKTWVTVSPKVAMKGKLPVLRSALERANEIKHPVGTQKDIDHLDELLANADIKVETVIALQPISQKPRATQLCIETCIARNWRLSIQTHKYLSIA

SEQ ID NO: 35151 - protein, 222 aa, Vibrio pectenicida
  misc_feature (1)..(222): tr|A0A427TZT9|A0A427TZT9_9VIBR 7-carboxy-7-deazaguanine synthase OS=Vibrio pectenicida OX=62763 GN=queE PE=3 S V=1
MYKINEMFETIQGEGVFTGIPSVFIRLQECAVGCSWCDTKHTWDATPQDERSLKEILTKTQDLPTWCSASCVDIIEQYHQLGYQAQHVVITGGEPCIYDLRPLTEAFESIGCQCQIETSGTSPILASEDTWVTVSPKVAMKGKLPILDSALLRANEIKHPVGTMKDIEQLDELIKRADIPETTVIALQPISQKSRATQLCITTCIERNWRLSIQSHKYLNIA

SEQ ID NO: 35152 - protein, 216 aa, Vibrio penaeicida
  misc_feature (1)..(216): tr|A0A432DAN7|A0A432DAN7_9VIBR 7-carboxy-7-deazaguanine synthase OS=Vibrio penaeicida OX=104609 GN=queE PE=3 S V=1
MFETIQGEGTFTGVPSVFVRLQECPVGCAWCDTKQTWEAEEKDLAPIGDIMVKTEDSPTWCFVSAAQIVEQYKLHGFSAKNIVITGGEPCVYDLVNLTEAFEKIGCQCQIETSGTFEVKATDSTWVTVSPKIAMKGKLPVLKSALERADEIKHPVGTQKDIDQLDELIASANVSEKTTIALQPISQKPRATKLCIDTCIERNWRLSVQTHKYLNIA

SEQ ID NO: 35153 - protein, 222 aa, Vibrio ponticus
  misc_feature (1)..(222): tr|A0A090PHX4|A0A090PHX4_9VIBR 7-carboxy-7-deazaguanine synthase OS=Vibrio ponticus OX=265668 GN=queE PE=3 SV= 1
MLYKLNEMFETIQGEGVFTGVPSVFIRLQYCPVGCAWCDTKHTWEVDIKDECETQEILTKSQESSKWANVTAQELVAIYQQRFNAKHIVITGGEPCEYDLRPLTAAFEEIGCQCQIETSGTCDVLTSENTWVTVSPKIAMKGQRDVIASAMARANEIKHPVGTGKDIEQLDQLLEQCPVAKQTIIALQPISQKARATQLCIDTCIERNWRLSIQTHKYLDIA

SEQ ID NO: 35154 - protein, 221 aa, Vibrio ponticus
  misc_feature (1)..(221): tr|A0A3N3DWH9|A0A3N3DWH9_9VIBR 7-carboxy-7-deazaguanine synthase OS=Vibrio ponticus OX=265668 GN=queE PE=3 SV= 1
MYKLNEMFQTIQGEGSFTGVPSVFIRLQLCRVGCAWCDTKQTWQINLDDQTDVSHILSKEEESPKWCSISAQELVELYRQKYTAKHIVITGGEPCEYDLLPLTQAFEAIGCQCQIETSGTSPVSVTADTWVTVSPKIAMKGRLPVLDSALARANEIKHPVGTGKDIEQLDQLLAGVQLKSDAIIALQPISQKPRATQLCIDTCIERNWRLSIQTHKYLNIA

SEQ ID NO: 35155 - protein, 222 aa, Vibrio proteolyticus
  misc_feature (1)..(222): tr|U2ZIM4|U2ZIM4_VIBPR 7-carboxy-7-deazaguanine synthas e OS=Vibrio proteolyticus NBRC 13287 OX=1219065 GN=queE PE=3 SV=1
MYKVNEMFETIQGEGIFTGVPSVFVRLQICPVGCAWCDTKQTWTAEAEDERTIGDILLKTEDSPTWCRQTAEQIVATYKQQGYRAKHIVITGGEPCIYDLRPLSEAFEAIGCQCQIETSGTSEVLTSEKTWVTVSPKVAMKGKLPVLDSALLRANEVKHPVATQKDIDQLDVLLQRAGVPESTPIALQPISQKPRATQLCIDTCIERNWRLSIQTHKYLSIA

SEQ ID NO: 35156 - protein, 222 aa, Vibrio qinghaiensis
  misc_feature (1)..(222): tr|A0A223MX91|A0A223MX91_9VIBR 7-carboxy-7-deazaguanine synthase OS=Vibrio qinghaiensis OX=2025808 GN=queE PE= 3 SV=1
MYKINEMFETIQGEGVYTGVPSVFIRLQECPVGCAWCDTKQTWDATPQDKRPINEVLTKTQDSPAWCSVSADELVLLYKKQGYNAKHIVITGGEPCIYDLRSLAQAFEAMGCHIQIETSGTFPVQTSADTWVTVSPKVAMKGKLPVLDSALLRANEIKHPVATAKDIEQLDALLLRAQVPDSTVIALQPISQKERATQLCIETCIARNWRLSIQTHKYLSIA

SEQ ID NO: 35157 - protein, 238 aa, Vibrio quintilis
  misc_feature (1)..(238): tr|A0A1M7Z2M7|A0A1M7Z2M7_9VIBR 7-carboxy-7-deazaguanine synthase OS=Vibrio quintilis OX=1117707 GN=queE PE=3 S V=1
MVCDQCSLSSVIRMTSLYKINEIFQTIQGEGVFTGVPSVFIRLQGCPVGCAWCDTKQTWETDEADRREFQDVIMKTQDSPAWCEMTPEEIVKRYQEQGYTAKHIVITGGEPCIYDLTALSCAFEHVGCRCQIETSGTSEIKASENTWVTVSPKIGMKGKLPVLTSALLRANEIKHPVGTLKDIEQLDTLLKQARIPEETIIALQPISQKQRATELCIQVCTERNWRLSIQTHKYLSIA

SEQ ID NO: 35158 - protein, 221 aa, Vibrio renipiscarius
  misc_feature (1)..(221): tr|A0A0C2NP25|A0A0C2NP25_9VIBR 7-carboxy-7-deazaguanine synthase OS=Vibrio renipiscarius OX=1461322 GN=queE PE =3 SV=1
MYKLNEMFETIQGEGAFTGVPSVFIRLQQCDVGCSWCDTKQTWSADPEDEVKLVDVMAKQQDSAHWCNVSVEDIVSLYQATYTARHIVITGGEPCLYDLTPLTSAFETLGCVCQIETSGTSEIRTTPNTWVTVSPKVAMKGRLPILNSALVRANEIKHPVATQKDIDILDDLLASVCFDPQRIIALQPISQKERATQLCIETCIKRNWRLSIQTHKYLQIA

SEQ ID NO: 35159 - protein, 216 aa, Vibrio rotiferianus
  misc_feature (1)..(216): tr|A0A2K7SYP6|A0A2K7SYP6_9VIBR 7-carboxy-7-deazaguanine synthase OS=Vibrio rotiferianus OX=190895 GN=queE PE=3 SV=1
MFETIQGEGVFTGVPAVFVRLQECPVGCSWCDTKQTWYAEEEDQRQIGDILVKTEDSPTWCFASAEDIVAEYKKQGFNAKHIVITGGEPCIYDLRALTAAFEEMGCQCQIETSGTSEVVTSESTWVTVSPKVAMKGKLPVLKSALERANEIKHPVGTQKDIDQLDALLASAEIAEKTVIALQPISQKPRATQLCIDTCVARNWRLSVQTHKYLSIA

SEQ ID NO: 35160 - protein, 226 aa, Vibrio rotiferianus
  misc_feature (1)..(226): tr|A0A510I4W4|A0A510I4W4_9VIBR 7-carboxy-7-deazaguanine synthase OS=Vibrio rotiferianus OX=190895 GN=queE PE=3 SV=1
MSSTLYKLNEMFETIQGEGVFTGVPAVFVRLQECPVGCSWCDTKQTWYAEEEDQRQIGDILVKTEDSPTWCFASAEDIVAEYKKQGFNAKHIVITGGEPCIYDLRALTAAFEEMGCQCQIETSGTSEVVTSEGTWVTVSPKVAMKGKLPVLKSALERANEIKHPVGTQKDIDQLDVLLASAEIGEKTVIALQPISQKPRATQLCIDTCVARNWRLSVQTHKYLSIA

SEQ ID NO: 35161 - protein, 232 aa, Vibrio ruber
  misc_feature (1)..(232): tr|A0A1R4LNY1|A0A1R4LNY1_9VIBR 7-carboxy-7-deazaguanine synthase OS=Vibrio ruber DSM 16370 OX=1123498 GN=queE PE=3 SV=1
MTAELGFILSIYRVNEIFQTIQGEGVFTGVPAVFVRLQGCPVGCAWCDTKQTWDTELQDQRAVEEIIVKTQDSPLWCQMSAEAIIDCYHRQGYTAKHIVITGGEPCLYDLTALTTAFETIGCRCQIETSGTADIQVSVHTWVTVSPKIAMKGRLPVLESALLRANEIKHPVGTRKDIEQLDHLLHRTPVADDTIIALQPISQKPRATELCIEVCIERNWRLSIQTHKYLCIA

SEQ ID NO: 35162 - protein, 222 aa, Vibrio rumoiensis
  misc_feature (1)..(222): tr|A0A1E5E513|A0A1E5E513_9VIBR 7-carboxy-7-deazaguanine synthase OS=Vibrio rumoiensis 1S-45 OX=1188252 GN=queE PE=3 SV=1
MYKVNEVFQTIQGEGYFTGVPSVFVRLQVCPVGCAWCDTKQTWTAEIQDETTLGDIMLKQGDSPTWSHATAESIIQQYVAQGYTAKHIVITGGEPCIYDLIPLTQAFEAIGCRCQIETSGTSEILCSSNTWVTVSPKVAMKGQLDVLDSALQRANEIKHPVGTQKDIDHLDALLKKANCEAKEHIALQPISQKPRATELCMDTCIERNWRLSIQTHKYLNIA

SEQ ID NO: 35163 - protein, 231 aa, Vibrio sagamiensis
  misc_feature (1)..(231): tr|A0A511QDV8|A0A511QDV8_9VIBR 7-carboxy-7-deazaguanine synthase OS=Vibrio sagamiensis NBRC 104589 OX=1219064 GN=queE PE=3 SV=1
MFYKQVSSTLYKLNEMFETIQGEGVFTGVPAVFIRLQECPVGCSWCDTKQTWFAEEADKVRIGDILLKKEDSPTWCHVTSDEIIAEYKKQGFNAQHIVITGGEPCIYDLRSLTHAFEELGCQCQIETSGTSEVVASENSWVTLSPKIAMKGKLPVLRSALRRANEIKHPVGTQKDIEQLDHLLSSANLTSQPVIALQPISQKSRATKLCIDTCIERNWRLSIQTHKYLNIA

SEQ ID NO: 35164 - protein, 221 aa, Vibrio scophthalmi
  misc_feature (1)..(221): tr|A0A1E3WNJ0|A0A1E3WNJ0_9VIBR 7-carboxy-7-deazaguanine synthase OS=Vibrio scophthalmi OX=45658 GN=queE PE=3 S V=1
MYKLNEMFETIQGEGAFTGTPSVFIRLQECAVGCAWCDTQQTWSADPEDEVKLVDILAKQGDSPTWCRVSSAEIVALYQQTYRAKHIVITGGEPCIYDLRPLTEAFESIGCVCQIETSGTADIRVSDQTWVTVSPKIAMKGRLEVLEGSLIRANEIKHPVGTQKDIQQLDDLLAGVAIKPSTMIALQPISQKNRATQLCIDTCIARNWRLSIQTHKYLEIA

SEQ ID NO: 35165 - protein, 221 aa, Vibrio scophthalmi
  misc_feature (1)..(221): tr|A0A1B1NNT9|A0A1B1NNT9_9VIBR 7-carboxy-7-deazaguanine synthase OS=Vibrio scophthalmi OX=45658 GN=queE PE=3 S V=1
MYKLNEMFETIQGEGAFTGTPSVFIRLQECAVGCAWCDTQQTWSADPEDEVKLVDILAKRGDSPTWCRVSSTEIVALYQQKYGAKHIVITGGEPCIYDLRPLTEAFESIGCVCQVETSGTADIRVSEQTWVTVSPKVAMKGRLEVLEGSLIRANEIKHPVGTQKDIQQLDDLLAGVAIKPSTVIALQPISQKNRATQLCIDTCIARNWRLSIQTHKYLEIA

SEQ ID NO: 35166 - protein, 226 aa, Vibrio shilonii
  misc_feature (1)..(226): tr|A6D5M8|A6D5M8_9VIBR 7-carboxy-7-deazaguanine synthas e OS=Vibrio shilonii AK1 OX=391591 GN=queE PE=3 SV=1
MSNTRFKINEMFETIQGEGMFTGVPAVFIRLQICNVGCSWCDTKQTWDANNEDQRSFGEIITKQGDSPTWSDVDAAEIVAMYQSQQFNAKHIVITGGEPCEYDLTALCEAFEAIGCRCQIETSGTSEIRVTPVTWVTVSPKVAMKGKLPVLSSSLERADEIKHPVATQKNVDQLDELLQGVELKSDVVIALQPISQKPRATELCIETCIQRNWRLSVQTHKYLSIA

SEQ ID NO: 35167 - protein, 216 aa, Vibrio sinaloensis
  misc_feature (1)..(216): tr|E8M5V6|E8M5V6_9VIBR 7-carboxy-7-deazaguanine synthas e OS=Vibrio sinaloensis DSM 21326 OX=945550 GN=queE PE= 3 SV=1
MFETIQGEGVYTGVPSVFVRLQECPVGCAWCDTKQTWEALPEDETSFDRIMVKTQDSPTWCSTSAEGIVNQYRVQGYTAKHIVITGGEPCVYDLRPLTEAFEAIGCQCQIETSGTSEVLTSDNTWVTVSPKVAMKGKLPVLDSALLRADEIKHPVATEKDIDQLDELIKRAQVPKQTTIALQPISQKPRATQLCIDVCVKRNWRLSIQTHKYLSIA

SEQ ID NO: 35168 - protein, 216 aa, Vibrio sinaloensis
  misc_feature (1)..(216): tr|A0A0A5HQ45|A0A0A5HQ45_9VIBR 7-carboxy-7-deazaguanine synthase OS=Vibrio sinaloensis OX=379097 GN=queE PE=3 SV=1
MFETIQGEGVFTGVPSVFVRLQECPVGCAWCDTKQTWDATPQDETSFSEIMKKTQDSPTWCQSSAQGIVDEYRNQEYTAKHVVITGGEPCIYDLTPLTEAFEAIGCQCQIETSGTSEVRATDNTWVTVSPKVAMKGKLPVLDSALVRANEIKHPVATQKDIDQLDELLERAKVPETTVVALQPISQKPRATQLCIDVCVKRNWRLSIQTHKYLSIA

SEQ ID NO: 35169 - protein, 216 aa, Vibrio sp.
  misc_feature (1)..(216): tr|A0A3N9THW3|A0A3N9THW3_9VIBR 7-carboxy-7-deazaguanine synthase OS=Vibrio sp. LJC006 OX=2487322 GN=queE PE=3 SV=1
MFETIQGEGVFTGVPSVFIRLQVCPVGCAWCDTKQTWDARPDDERVIGDILLKQEDSPTWTSISAPELVEVYREKGFIAKHIVITGGEPCIYDLVALTQAFENIGCRCQIETSGTSEVKVTPDTWVTVSPKIAMKGKLPVLPQALERANEIKHPVGTEKDIEQLDVLLAGVNLKKGVEISLQPISQKSRATKLCIDTCIERNWRLSIQTHKYLNIA

SEQ ID NO: 35170 - protein, 226 aa, Vibrio sp.
  misc_feature (1)..(226): tr|A0A084T4I3|A0A084T4I3_9VIBR 7-carboxy-7-deazaguanine synthase OS=Vibrio sp. ER1A OX=1517681 GN=queE PE=3 SV =1
MSNTRFKINEMFETIQGEGMFTGVPAVFIRLQICNVGCSWCDTKQTWDANNEDQRSFGEIISKQGDSPTWSDVDAAEIVAMYQSQQFNAKHIVITGGEPCEYDLTALCEAFEAIGCRCQIETSGTSEIRVTPATWVTVSPKVAMKGKLPVLSSSLERADEIKHPVATQKNVDQLDELLQGVELKSDVVIALQPISQKPRATELCIETCIQRNWRLSVQTHKYLSIA

SEQ ID NO: 35171 - protein, 232 aa, Vibrio spartinae
  misc_feature (1)..(232): tr|A0A1N6M3X4|A0A1N6M3X4_9VIBR 7-carboxy-7-deazaguanine synthase OS=Vibrio spartinae OX=1918945 GN=queE PE=3 S V=1
MTAELGFILSIYKVNEIFQTIQGEGVFTGVPAVFVRLQGCPVGCSWCDTKHTWFTEPQDQRSVDDIIVKTQDSPLWCPMSAAAIIDCYHRQGYTAKHIVMTGGEPCLYDLTVLTEAFEAIGCHCQIETSGTADVRASAQTWVTVSPKIAMKGRLPVLEGALRRANEIKHPVGTRKDIEQLDHLLHQTPVADDTIIALQPISQKPRATELCIEVCIERNWRLSVQTHKYLAIA

SEQ ID NO: 35172 - protein, 216 aa, Vibrio splendidus
  misc_feature (1)..(216): tr|A0A1E5B8F1|A0A1E5B8F1_VIBSP 7-carboxy-7-deazaguanine synthase OS=Vibrio splendidus ZS-139 OX=617140 GN=queE PE=3 SV=1
MFETIQGEGVFTGVPAVFVRLQICPVGCSWCDTKQTWEALPEDETSLGDIMVKTEDSPTWSAIDAQGVVNEYIKQGYTAEHIVITGGEPCIYDLVPLTEAFEQHGCRCQIETSGTSEVKATSDTWVTVSPKVAMKAKLEILDSALQRANEIKHPVGTGKDIDQLDGLLERADVSSETVIALQPISQKDRATQLCIDTCIERNWRLSIQTHKYLSIA

SEQ ID NO: 35173 - protein, 216 aa, Vibrio splendidus
  misc_feature (1)..(216): tr|A0A0P6YHN6|A0A0P6YHN6_VIBSP 7-carboxy-7-deazaguanine synthase OS=Vibrio splendidus OX=29497 GN=queE PE=3 SV =1
MFETIQGEGVFTGVPAVFVRLQICPVGCSWCDTKQTWEALPEDETSLGDIMVKTEDSPTWSAIDAQGIVNEYIKQGYTAKHIVITGGEPCIYDLVPLTEAFEQHGCRCQIETSGTSEVKATPDTWVTVSPKVAMKAKLDILDSALVRANEIKHPVGTGKDIEQLDALIARADVPENTVIALQPISQKERATQLCIDTCIERNWRLSIQTHKYLSIA

SEQ ID NO: 35174 - protein, 221 aa, Vibrio superstes
  misc_feature (1)..(221): tr|A0A511QU40|A0A511QU40_9VIBR 7-carboxy-7-deazaguanine synthase OS=Vibrio superstes NBRC 103154 OX=1219062 GN =ygcF PE=3 SV=1
MLKINEMFETIQGEGFFTGVPSIFIRLQGCPVGCAWCDTKQTWDVNLEDETDFKTVLLKQGDDERWCSTSESALVAYCLEQYSAKHVVITGGEPCQYDLLPLTTELEANGYRCQIETSGTFEVLATPNTWVTVSPKIGMKGKLPIEPSAMSRANEVKHPVGKESDIDDLKALLEVSTLQDGVEVLLQPISQKPRATKLCIDTCIANNWRLSVQTHKYLDIA

SEQ ID NO: 35175 - protein, 225 aa, Vibrio tapetis
  misc_feature (1)..(225): tr|A0A2N8ZA27|A0A2N8ZA27_9VIBR 7-carboxy-7-deazaguanine synthase OS=Vibrio tapetis subsp. tapetis OX=1671868 G N=ygcF PE=3 SV=1
MTTRYKINEMFETIQGEGSFTGVPSVFVRLQECPVGCAWCDTKQTWTAEPQDEVPLGDIMLKTADTPTWCSVSGQDIVSEYQRQGYTATNIVITGGEPCVYDLIDLCEAFEAIGCQCQLETSGTYEVKVTTTTWVTVSPKVAMKGKLPVLISALERADEIKHPVGTVKDIEQLDELIASANLDSNTSIALQPISQKPRATQLCIDTCIARNWRLSIQTHKYLDIA

SEQ ID NO: 35176 - protein, 222 aa, Vibrio tasmaniensis
  misc_feature (1)..(222): tr|B7VNE0|B7VNE0_VIBTL 7-carboxy-7-deazaguanine synthas e OS=Vibrio tasmaniensis (strain LGP32) OX=575788 GN=qu eE PE=3 SV=1
MYKINEMFETIQGEGVFTGVPAVFVRLQICPVGCSWCDTKQTWEALPEDETSLGDIMVKTEDSPTWTAIDAQGIVNEYIKQGYTAKHIVITGGEPCIYDLVPLTEAFEQHGCRCQIETSGTSEVKATPDTWVTVSPKVSMKAKLDILDSALVRANEIKHPVGTGKDIEQLDALIARADVPENTVIALQPISQKERATQLCIDTCIERNWRLSIQTHKYLSIA

SEQ ID NO: 35177 - protein, 216 aa, Vibrio tasmaniensis; identical to SEQ ID NO: 35173
  misc_feature (1)..(216): tr|A0A2N7NNU9|A0A2N7NNU9_9VIBR 7-carboxy-7-deazaguanine synthase OS=Vibrio tasmaniensis OX=212663 GN=queE PE=3 SV=1

SEQ ID NO: 35178 - protein, 226 aa, Vibrio thalassae
  misc_feature (1)..(226): tr|A0A240EMW0|A0A240EMW0_9VIBR 7-carboxy-7-deazaguanine synthase OS=Vibrio thalassae OX=1243014 GN=queE PE=3 S V=1
MSNTRFRINEMFETIQGEGVFTGVPAVFIRLQICNVGCSWCDTKQTWEAKNEDQRSFGEIIAKQGDSPTWSDVDAAEIVAMYQSQQFNAKHIVITGGEPCEYDLTALCDAFEAIGCRCQIETSGTSEIRVTPATWVTVSPKVAMKGKLPVLPSSLERADEIKHPVATQKNVDQLDELLQGVKLKGDVVIALQPISQKPRATELCIETCIQRNWRLSVQTHKYLSIA

SEQ ID NO: 35179 - protein, 216 aa, Vibrio toranzoniae
  misc_feature (1)..(216): tr|A0A109DAW1|A0A109DAW1_9VIBR 7-carboxy-7-deazaguanine synthase OS=Vibrio toranzoniae OX=1194427 GN=queE PE=3 SV=1
MFETIQGEGMFTGVPAVFVRLQVCPVGCSWCDTKQTWDALPKDETSLGNIMVKTEDSPTWSSIDAQGIVNEYIKQGYTAKHIVITGGEPCIYDLVPLTEAFEQHGCRCQIETSGTSEVKATSDTWVTVSPKVAMKAKLDILDSTLQRANEIKHPVGTSKDIEQLDALLERVDVSSDTIIALQPISQKDRATQLCIDTCIERNWRLSIQTHKYLSIA

SEQ ID NO: 35180 - protein, 216 aa, Vibrio tubiashii
  misc_feature (1)..(216): tr|F9T268|F9T268_9VIBR 7-carboxy-7-deazaguanine synthas e OS=Vibrio tubiashii ATCC 19109 OX=1051646 GN=queE PE= 3 SV=1
MFETIQGEGVFTGVPSVFVRLQECPVGCAWCDTKQTWDATPQDERPLDEILAKKEDSPTWCSVSAMDIVNEYIKQGYTAKHVVITGGEPCIYDLVPLTQAFEAHGCRCQIETSGTSEVKTTDNTWVTVSPKVAMKGKLPVLDSALVRANEIKHPVATQKDIDHLDELLERANVPEETTIALQPISQKPRATQLCIDVCVARNWRLSIQTHKYLSIA

SEQ ID NO: 35181 - protein, 216 aa, Vibrio tubiashii
  misc_feature (1)..(216): tr|A0A0A5I7Z1|A0A0A5I7Z1_9VIBR 7-carboxy-7-deazaguanine synthase OS=Vibrio tubiashii OX=29498 GN=queE PE=3 SV= 1
MFETIQGEGIFTGVPAVFVRLQECPVGCAWCDTKQTWDATPSDERPFDEVLAKREDSPTWCSVTALDIVDQYNKQGYTAKHVVITGGEPCIYDLVPLTQAFEEIGCQCQIETSGTSPVLATENTWVTVSPKVAMKGKLPVLDSALVRANEIKHPVATEKDIDHLDELLARASVPKSTIIALQPISQKLRATQLCIDICIARNWRLSVQTHKYLSIA

SEQ ID NO: 35182 - protein, 195 aa, Vibrio variabilis
  misc_feature (1)..(195): tr|A0A090TF85|A0A090TF85_9VIBR 7-carboxy-7-deazaguanine synthase OS=Vibrio variabilis OX=990271 GN=queE PE=3 S V=1
MFVRLQGCPVGCPWCDTKHTWEVKPEQEATFADIPIKSVENEKWGAITESDLVKFCLDNYSARHIVITGGEPCMYDLTNLTRMFQAYEFTCQVETSGTYEVLVSEQTWITVSPKVNMKGGLALVPQALGRANEIKHPVGTHKDIDNLHELLVNYETKSDVVVALQPISQKERATALVWRSALKTIGDSLYKYTNI

SEQ ID NO: 35183 - protein, 226 aa, Vibrio variabilis; identical to SEQ ID NO: 35126
  misc_feature (1)..(226): tr|A0A090SGH9|A0A090SGH9_9VIBR 7-carboxy-7-deazaguanine synthase OS=Vibrio variabilis OX=990271 GN=queE PE=3 S V=1

SEQ ID NO: 35184 - protein, 224 aa, Vibrio vulnificus
  misc_feature (1)..(224): tr|A0A3Q0L6D6|A0A3Q0L6D6_VIBVU 7-carboxy-7-deazaguanine synthase OS=Vibrio vulnificus (strain CMCP6) OX=216895 GN=queE PE=3 SV=1
MTLYKVNEMFETIQGEGVFTGVPAVFVRLQICPVGCSWCDTKQTWEAAEQDEQSFAEIIVKTGDSPTWCQADAAAIVEQYQRQGYSAKHIVITGGEPCLYDLTELTQAFEAIGCQCQIETSGTYEVKASENTWVTVSPKVAMKGKLPILDSALQRANEIKHPVGTQKDIDQLDALLLRAQVPATTVIALQPISQKERATQLCIDTCIKRNWRLSIQTHKYLSIA

SEQ ID NO: 35185 - protein, 216 aa, Vibrio vulnificus
  misc_feature (1)..(216): tr|A0A087IUC5|A0A087IUC5_VIBVL 7-carboxy-7-deazaguanine synthase OS=Vibrio vulnificus OX=672 GN=queE PE=3 SV=1
MFETIQGEGVFTGVPAVFVRLQICPVGCSWCDTKQTWEAAEQDEQSFAEIIVKTGDSPTWCQADAESIVEQYQRQGYSAKHIVITGGEPCLYDLTELTQAFEAIGCQCQIETSGTYEVKASANTWVTVSPKVAMKGKLPILDSALQRANEIKHPVGTQKDIDQLDALLLRAQVPATTTIALQPISQKERATQLCIDTCIKRNWRLSIQTHKYLSIA

SEQ ID NO: 35186 - protein, 216 aa, Vibrio xiamenensis
  misc_feature (1)..(216): tr|A0A1G7YGH6|A0A1G7YGH6_9VIBR 7-carboxy-7-deazaguanine synthase OS=Vibrio xiamenensis OX=861298 GN=queE PE=3 SV=1
MFETIQGEGTFTGVPSVFVRLQVCPVGCAWCDTKQTWTAEPEDERTFEQIIVKTQDSPTWCAMSAEEIVAQYQQQGYHAKHIVITGGEPCIYDLRPLTAAFEHLGCQCQIETSGTSEVLVSAKTWVTVSPKVAMKGKLPVLNSALERANEIKHPVGTQKDIDQLDVLLAGANIAPNTVIALQPISQKPRATQLCIDTCIERNWRLSVQTHKYLSIA

SEQ ID NO: 35187 - protein, 222 aa, Vibrionales bacterium
  misc_feature (1)..(222): tr|A0A366XP63|A0A366XP63_9GAMM 7-carboxy-7-deazaguanine synthase OS=Vibrionales bacterium C3R12 OX=2267228 GN= queE PE=3 SV=1
MYKINEMFETIQGEGVFTGVPAVFVRLQECPVGCAWCDTKQTWDATPQDERPLAEVLAKTSDSPTWCSVSAADIVNQYQASGFTAKHIVITGGEPCIYDLIPLTEAFEVLGCKCQIETSGTSEVKVTPSTWVTVSPKVAMKGKLPILKSAFLRANEIKHPVGTQKDIDHLDDLIETFGTADKAIVALQPISQKDRATQLCIETCVARNWRLSIQTHKYLSIA

SEQ ID NO: 35188 - protein, 216 aa, Vibrionales bacterium
  misc_feature (1)..(216): tr|A5L8U0|A5L8U0_VIBBS 7-carboxy-7-deazaguanine synthas e OS=Vibrionales bacterium (strain SWAT-3) OX=391574 GN =queE PE=3 SV=1
MFETIQGEGVFTGVPAVFVRLQICPVGCSWCDTKQTWEALPEDETSLGDIMVKTEDSPTWSSIDAQGIVNEYIKQGYTAKHIVITGGEPCIYDLVPLTEAFEKHGCRCQIETSGTSEVKATPDTWVTVSPKVAMKAKLEILDSALQRANEIKHPVGTSKDIEQLDGLLERAEVSDDTVIALQPISQKDRATKLCIDTCIERNWRLSIQTHKYLSIA

SEQ ID NO: 35189 - protein, 193 aa, Vibrionimonas magnilacihabitans
  misc_feature (1)..(193): tr|A0A2S8SGP4|A0A2S8SGP4_9BACT 7-carboxy-7-deazaguanine synthase OS=Vibrionimonas magnilacihabitans OX=669455 GN=queE PE=3 SV=1
MESFYTLQGEGFHQGRAAYFIRLGGCDVGCFWCDVKESWDASQHPLLSVEAIVGEAKKYPGRLAVITGGEPLMHSLDELTHALQEAGFETNIETSGSSPLSGNWNWICLSPKKFKAPLPEIVPLAHELKVIIYNKHDFTWAETYAAQVNPTCKLYLQPEWDQSDKVTPLIIDYIKSNPQWELSLQVHKYIHVP

SEQ ID NO: 35190 - protein, 217 aa, Vicingus serpentipes
  misc_feature (1)..(217): tr|A0A5C6RVY9|A0A5C6RVY9_9FLAO 7-carboxy-7-deazaguanine synthase OS=Vicingus serpentipes OX=1926625 GN=queE PE =3 SV=1
MINEIDLASLKEKELLEKGLKLPIMEEFYSIQGEGYNSGKAAYFIRVGGCDVGCHWCDVKESWNPNTHPLTDISQIVKNIQKFPAKSIVVTGGEPTIYNLEEITTQLLQIGVELFLETSGAYKLTGKWHWICLSPKKNKLPLKENYSLAHELKVIIHNKHDLRWAEEQAEFVNKKCKLYLQPEWSKVDEIMPIIIDYVMENPKWNVSLQTHKYMKIP

SEQ ID NO: 35191 - protein, 241 aa, Victivallales bacterium
  misc_feature (1)..(241): tr|A0A2S0KU47|A0A2S0KU47_9BACT 7-carboxy-7-deazaguanine synthase OS=Victivallales bacterium CCUG 44730 OX=2094 242 GN=queE PE=3 SV=1
MAARSACIGSASANPTTPPSPISRSSIAVRLVESFTSLQGESTHAGRICFFIRLAGCNLDCNYCDTRYGRSFGAGEPASVDELVRRAQESGTKLVEITGGEPLATPETPELCRRLLDAGFEVLLETNCSLPIAEIPREVRKILDCKLPGSGMAERNDFSNYALLAPHDEVKFVISCRADFDAMLEVIRRYDLPSKTANLLASPVWGRVAFTDLAEWVVSSRAPVRMQLQMHKLIWGDRPGV

SEQ ID NO: 35192 - protein, 214 aa, Victivallis vadensis
  misc_feature (1)..(214): tr|A0A2U1B4H8|A0A2U1B4H8_9BACT 7-carboxy-7-deazaguanine synthase OS=Victivallis vadensis OX=172901 GN=queE PE= 3 SV=1
MPRLVEAFLSLQGESTHAGRRCIFLRLAGCNLDCNYCDTMYAHSPESGEERSVDELVAAAASFPCRLVEITGGEPLLTPETPELCRRLLALGFEVLIETNGSLPIAPLPAEVRKILDCKLPGSGMSNRNLYDNYALLQPHDEVKFVVSSREDFDFALDVIRRYDLPGKTANLLFSPVWGRVGFADLARWIVDAGAPGRMQLQLHKLIWGDKPGV

SEQ ID NO: 35193 - protein, 374 aa, Virgibacillus dokdonensis
  misc_feature (1)..(374): tr|A0A2K9IWT5|A0A2K9IWT5_9BACI 7-carboxy-7-deazaguanine synthase OS=Virgibacillus dokdonensis OX=302167 GN=que E PE=4 SV=1
MKQIQAKKQMSPSYDPWEAYLDVEQHGKMTLSNIEFTTTTLCNMRCAHCAVGYTLQTKDPEALPMELLQQRLDEIPHLRTLSITGGEPMMSKKSVREHVVPLLRYAHHRGVKTQMNSNLTLPYSRYEAIIPYLDVLHISHNWGTADEFAETGFAKMERKPSLENRKKYFSRMVENAQRLSKEGVMVSAETMLNRRTYPYLESIHDHVLEMGCARHEIHPMYPVDFASNLETLTLDEIRTGIERLLNHQNQEVWMLFGTLPFYPCSSSQADLELQQRLFTAKNVSVRNDPDGRSRLNVNIFSGDIIVTDFGDEPKLGNVQTTRLPEAYERWLATETASSLNCHCPAVKCLGPNVLVKKTYYKDVDFQQRQAMIKR

SEQ ID NO: 35194 - protein, 240 aa, Virgibacillus massiliensis
  misc_feature (1)..(240): tr|A0A024QEX8|A0A024QEX8_9BACI 7-carboxy-7-deazaguanine synthase OS=Virgibacillus massiliensis OX=1462526 GN=q ueE PE=3 SV=1
MKIPVIEVFGPTIQGEGMVIGRKTMFVRTAGCDYSCSWCDSKFTWDGTEKHHIQMMEAEEIMQDLREKGADQFGHVTISGGNPGLLPQIDQLIDILHDHDLEVALETQGSRWQTWFTKIDDLTLSPKPPSSGMKTNYQTLDFIIDSLKQKQRGKCSLKVVIFNEDDLGYAENIHQRYPDVSLYLQVGNDEITMDNDQALSLYLLQKYEELIDQVMVSTILKDVRVLPQLHTFLWGNKRGV

SEQ ID NO: 35195 - protein, 240 aa, Virgibacillus necropolis
  misc_feature (1)..(240): tr|A0A221MA61|A0A221MA61_9BACI 7-carboxy-7-deazaguanine synthase OS=Virgibacillus necropolis OX=163877 GN=queE PE=3 SV=1
MKIPVLEIFGPTIQGEGMVIGRKTMFIRTAGCDYSCSWCDSKFTWDGSEKSNIQLLEPEEIWEALTEEGGDRFGHVTISGGNPGLLAHLNELVKLLHEKNMNIALETQGSKWQPWFIDIDDLTLSPKPPSSGMQTNFEKLDQIIDRLRQDQNGTFSLKVVIFNEDDLTYAVNMHQRYPDVELFLQVGNDDLETMNNEKLLGHMLRNYEQLIDLVMESHVLKDVRVLPQLHTYLWGNKRGV

SEQ ID NO: 35196 - protein, 240 aa, Virgibacillus phasianinus
  misc_feature (1)..(240): tr|A0A220U301|A0A220U301_9BACI 7-carboxy-7-deazaguanine synthase OS=Virgibacillus phasianinus OX=2017483 GN=qu eE PE=3 SV=1
MKIPVLEIFGPTIQGEGMVIGRKTMFVRTAGCDYSCSWCDSKFTWDGSEKSNIQMMGPEEIWHRLTEQGGDRFGHVTISGGNPALLAHLNELVDLLHKKNIKVALETQGSKWQTWFTSIDDLTLSPKPPSSGMKTNFEILDQIIDGLRRDQKGTFSLKVVIFDQDDLKYAINLHQRYPDVEFFLQVGNDDLETMDNEKLLGQMLRQYEQLIDQVMESNVLKDVRVLPQLHTYLWGNKRGV

SEQ ID NO: 35197 - protein, 240 aa, Virgibacillus soli; identical to SEQ ID NO: 28039
  misc_feature (1)..(240): tr|A0A0Q9Y9K3|A0A0Q9Y9K3_9BACI 7-carboxy-7-deazaguanine synthase OS=Virgibacillus soli OX=480284 GN=queE PE=3 SV=1

SEQ ID NO: 35198 - protein, 243 aa, Virgibacillus sp.
  misc_feature (1)..(243): tr|A0A268I0M6|A0A268I0M6_9BACI 7-carboxy-7-deazaguanine synthase OS=Virgibacillus sp. 7505 OX=2022548 GN=queE PE=3 SV=1
MASKFPVLEVFGPTVQGEGMVVGQKTMFVRTAGCDYSCSWCDSAFTWDGSAKDDIRQLTAEEIWNRLEEVGGDRFRHVTISGGNPALFKNLGEFTQLLKQKEVKVALETQGSRYQPWFLEIDDLTISPKPPSSLMKTDFHRLDEIINNLREAGRLMHVSLKVVIFDEKDLRYATNVHKRYPDVSFYVQVGNHDTATLDDAALKDALLSKYEWLIDQVSASNELNHVRVLPQLHTLVWGNKRGV

SEQ ID NO: 35199 - protein, 209 aa, Vitellibacter aquimaris
  misc_feature (1)..(209): tr|A0A137REN3|A0A137REN3_9FLAO 7-carboxy-7-deazaguanine synthase OS=Vitellibacter aquimaris OX=1548749 GN=queE PE=3 SV=1
MKKEVQQLVDKGVMLPLMEEFYSIQGEGFHKGTAAYFIRVGGCDVGCHWCDVKESWNAELHPPTAIEAIVENAAKYSKTIVITGGEPLTWDMEPLTEMLKEKGMQTHIETSGAYKLTGIWDWICLSPKKMKLPTEEVYKAANELKVIVFNNDDFRFAEEQAAKVGPDCILYLQPEWSKREKMSPLIVDYVMQNPKWKVSLQTHKYLNIP

SEQ ID NO: 35200 - protein, 230 aa, Vitiosangium sp.
  misc_feature (1)..(230): tr|A0A2T4VRF4|A0A2T4VRF4_9DELT 7-carboxy-7-deazaguanine synthase OS=Vitiosangium sp. GDMCC 1.1324 OX=2138576 G N=queE PE=3 SV=1
MPVARPHIEPRRVPTADSVVVKEIYLSVQGESSHAGLLCSFVRLTGCHLRCTYCDSEFAFHGGSRMKIPEVVAQVKALGAPRVEVTGGEPLLQPGVYPLMEELLASGLIVLLETSGAIDVRLVPPAVHKIVDMKTPSSGESDRNDYRNLTTMNANDELKFVIGSREDYEWSKRLITEHRLLEKPYGLLFSTVFGKLTTKALAEWVIEDRLSVRFQLQMHKYIWDPNERGV

SEQ ID NO: 35201 - protein, 211 aa, Vitreoscilla filiformis
  misc_feature (1)..(211): tr|A0A221KIE4|A0A221KIE4_VITFI 7-carboxy-7-deazaguanine synthase OS=Vitreoscilla filiformis OX=63 GN=queE PE=3 SV=1
MTYSVKEIFLTLQGEGINAGRVAVFCRFAGCNLWSGREADRAQALCRFCDTDFVGTDGTLGGKYPQATDLAERIAALWPAGAAGPRLVVLTGGEPLLQVDAALIDALHAQGFEIAVETNGTVPAPAGLDWVCVSPKAGNALAITSGDELKVVVPQAGLDLDALAALPFTHHLVQALDGPDAATHQAAAVALCLADPRWRLSVQTHKLLGIR

SEQ ID NO: 35202 - protein, 211 aa, Vogesella indigofera
  misc_feature (1)..(211): tr|A0A495B1B7|A0A495B1B7_VOGIN 7-carboxy-7-deazaguanine synthase OS=Vogesella indigofera OX=45465 GN=queE PE=3 SV=1
MTIYTVKEIFYTLQGEGRQAGRAAVFCRFSGCNLWSGREEDRSKAICQFCDTDFVGTGDDGGKFAGAAALAARIAAEWRGTGGQPYVVFTGGEPLLQLDDALVDAMHAQGFEVAVETNGSLPAPAGIDWICVSPKAGADWVQKSGHELKLVFPQPTLLPSELPDDLQFEHYYLQPMDSPLQRQNTQEAIAWCMAHPEWRLSVQTHKVINIR

SEQ ID NO: 35203 - protein, 209 aa, Vogesella sp.
  misc_feature (1)..(209): tr|A0A1C6MHR4|A0A1C6MHR4_9NEIS 7-carboxy-7-deazaguanine synthase OS=Vogesella sp. LIG4 OX=1192162 GN=queE PE=3 SV=1
MYTVKEIFYTLQGEGRQAGRAAVFCRFSGCNLWSGREEDRSKAICQFCDTDFVGTGEDGGKFPTAAELAARIAAEWQGAGGQPYVVFTGGEPLLQLDAALVDAMHAVGFEVAVETNGSLPAPAGIDWICVSPKAGADWVQRSGNELKLVYPQPTLLPSELPADLDFEHRYLQPMDSPLQRQNTREAIAWCMAHPEWRLSVQTHKVVNIR

SEQ ID NO: 35204 - protein, 211 aa, Vogesella sp.
  misc_feature (1)..(211): tr|A0A0J5GJ03|A0A0J5GJ03_9NEIS 7-carboxy-7-deazaguanine synthase OS=Vogesella sp. EB OX=1526735 GN=queE PE=3 S V=1
MTIYTVKEIFYTLQGEGRQAGRAAVFCRFSGCNLWSGREEDRSKAICQFCDTDFVGTGDDGGKFAGAAALAARIAAEWRGTGGQPYVVFTGGEPLLQLDDALVDAMHAQGFEVAVETNGSLPAPAGIDWICVSPKAGADWVQKSGHELKLVFPQPTLLPSELPDDLQFEHYYLQPMDSPLQRQNTQEAIAWCMEHPAWRLSVQTHKVINIR

SEQ ID NO: 35205 - protein, 209 aa, Volucribacter psittacicida
  misc_feature (1)..(209): tr|A0A4V2PBT2|A0A4V2PBT2_9PAST 7-carboxy-7-deazaguanine synthase OS=Volucribacter psittacicida OX=203482 GN=qu eE PE=3 SV=1
MPTPALFDPQFNIVEIFESLQGEGFNTGMPSIFIRFGKCNLACPWCDTNYNQYQPYSLSQIMAKVRSFSAKNIIITGGEPTIVPHLSLLLEQLKAEGYFLAIETNGLKPIPPQIDYIATSPKRLYQHKYCQRCIPFAHEVRIVADDDVLAFCEQIETTIEAQHYYLSPCENNGEMNLEQTIRQLGLLNQRPNKPKWQLSIQTHKLVGMR

SEQ ID NO: 35206 - protein, 222 aa, Vulcanibacillus modesticaldus
  misc_feature (1)..(222): tr|A0A1D2YW87|A0A1D2YW87_9BACI 7-carboxy-7-deazaguanine synthase OS=Vulcanibacillus modesticaldus OX=337097 GN =queE PE=3 SV=1
MKFKVVEKFISINGEGKLSGQLAIFIRFAGCNLDCSYCDTRWANEKDVEYEWMTADQIYEYIKVNGVRNVTLTGGEPLLQKGIMELLTVLSLDPELVIEIETNGSIELGPFTKIEKNRPRFTMDYKLGSSQMESKMLTSNFKYLGALDTVKFVVGNIDDLKRAKHIIDQYQLVDKTSVYISPVFGEIEMVQIVEFMKENKMNGVTLQVQLHKIIWDPEKKGV

SEQ ID NO: 35207 - protein, 225 aa, Vulcaniibacterium tengchongense
  misc_feature (1)..(225): tr|A0A3N4VCC1|A0A3N4VCC1_9GAMM 7-carboxy-7-deazaguanine synthase OS=Vulcaniibacterium tengchongense OX=1273429 GN=queE PE=3 SV=1
MSAVPSDAAAAASERLRITEIFLSLQGEARSIGWPTVFVRLTGCPLRCQYCDTAYAFHGGQWWAIDDILAEVARHGARHVCVTGGEPLAQKRCLGLLRRLCDAGYEVSLETSGALDIAEVDPRVSRVLDIKTPGSREAHRNLWSNLARLTPHDQVKFVICSREDYDWAKGVLAEHRPHDVCDVLFSPSFAQVDPTALADWIVADRLPVRFQLQLHKILWHDAPGR

SEQ ID NO: 35208 - protein, 215 aa, Vulgatibacter incomptus
  misc_feature (1)..(215): tr|A0A0K1P941|A0A0K1P941_9DELT 7-carboxy-7-deazaguanine synthase OS=Vulgatibacter incomptus OX=1391653 GN=queE PE=3 SV=1
MSFAVTEIFFSLQGESTRMGRPCVFIRFTGCDLRCGYCDTAYAFHGGTKRSREEILAEVARHPTRYVTLTGGEPLLQRELPALARDLLERGYEVAIETHGQKRWDSLPEQVIKIVDVKTPASGECATEEHLSWLRTLGPRDELKFVIGSREDFDWSADVVRRLQLEGKHAALLFSPTHGQVELSELAAWILESGLDVRMQIQLHKLIWGTEARGV

SEQ ID NO: 35209 - protein, 228 aa, Waddlia chondrophila
  misc_feature (1)..(228): tr|D6YWT8|D6YWT8_WADCW 7-carboxy-7-deazaguanine synthas e OS=Waddlia chondrophila (strain ATCC VR-1470 / WSU 86 -1044) OX=716544 GN=nrdG PE=3 SV=1
MVNSIAMMIERTNNQTLRLIEIFLSIQGETSLTGLPTTFIRLASCNLRCTWCDTPYSFGKGESSSLQSIIETVRSNGASHVCITGGEPLLQSQVYLLMETLCNLDYIVSLETGGSLSTEKVDPRVITILDIKCPGSGMSQKNTWENLERLREQDEVKFVIMNREDYEWSVKICKNRDLFSRSKPPLFSPVHNVLNPQELIQWTLQDTLPVRINLQVHKWVWSPETKGV

SEQ ID NO: 35210 - protein, 222 aa, Waddlia chondrophila
  misc_feature (1)..(222): tr|F8LDY4|F8LDY4_9BACT 7-carboxy-7-deazaguanine synthas e OS=Waddlia chondrophila 2032/99 OX=765953 GN=nrdG PE= 3 SV=1
MMIERTNNQTLRLIEIFLSIQGETSLTGLPTTFIRLASCNLRCTWCDTPYSFGKGESSSLQSIIETVRSNGASHVCITGGEPLLQSQVYLLMETLCNLDYIVSLETGGSLSTEKVDPRVITILDIKCPGSGMSQKNTWENLERLREQDEVKFVIMNREDYEWSVKICKNRDLFSRSKPPLFSPVHNVLNPQELIQWTLQDTLPVRINLQVHKWVWSPETKGV

SEQ ID NO: 35211 - protein, 224 aa, Waddliaceae bacterium
  misc_feature (1)..(224): tr|A0A2E3LZ81|A0A2E3LZ81_9BACT 7-carboxy-7-deazaguanine synthase OS=Waddliaceae bacterium OX=2026802 GN=queE P E=3 SV=1
MSLIQQKSKKSSLFLTELFVSVQGESSLIGLPTTFIRLSACNLRCSWCDSTYSFKRGSSYEIEEIIQEVKDFGAPYICVTGGEPLLQKPVYPLMKALCDEGYNVSIETSGSLPTTDIDPRVRIILDVKCPGSEMEEKNDWTNLDRIRNCDEVKFVLLNREDYEYAKNICIEHHLFHRAGEVLFSPVHGELDNQALVQWILEDRLPVRLNLQIHKFIWTPETKGV

SEQ ID NO: 35212 - protein, 215 aa, Weeksella virosa
  misc_feature (1)..(215): tr|F0P278|F0P278_WEEVC 7-carboxy-7-deazaguanine synthas e OS=Weeksella virosa (strain ATCC 43766 / DSM 16922 / JCM 21250 / NBRC 16016 / NCTC 11634 / CL345/78) OX=8659 38 GN=queE PE=3 SV=1
MIQISGITNEQQQLANEGRLLPVMEHFYTLQGEGAYAGVAAYFIRLGGCDVGCHWCDVKESWDAEIHPLTDIATLAKEAAAICKTIIITGGEPLMWDLTFLTSELHKHGANIHIETSGAYPLTGEIDWVTLSPKKTKLPVESIYQQANELKMIIYNQHDFTFAEEQAAKVKDNCLLYLQVEWSKRDSMSPKLVEFIKQNPKWRITVQTHKYLDIP

SEQ ID NO: 35213 - protein, 208 aa, Wenyingzhuangia fucanilytica
  misc_feature (1)..(208): tr|A0A1B1Y3Z9|A0A1B1Y3Z9_9FLAO 7-carboxy-7-deazaguanine synthase OS=Wenyingzhuangia fucanilytica OX=1790137 GN =queE PE=3 SV=1
MDNKTKELVNKGVMLPLMEEFYTIQGEGAHTGTAAYFIRVGGCDVGCHWCDVKESWDANLHPPTHADIIVKNASPYKTIVITGGEPLMWDMQYLTSSLQNQGLQTHIETSGAYKLSGQWDWICLSPKKTKLPLEEIYPEAHELKMIIHNKSDFEFAEQQAAKVSDKCGLYLQPEWSKKEIMTPMIVDYVMKNPQWKISLQTHKYLNIP

SEQ ID NO: 35214 - protein, 208 aa, Wenyingzhuangia marina
  misc_feature (1)..(208): tr|A0A1M5W678|A0A1M5W678_9FLAO 7-carboxy-7-deazaguanine synthase OS=Wenyingzhuangia marina OX=1195760 GN=queE PE=3 SV=1
MDNKTNELVNKGIMLPLMEEFYTIQGEGAHTGTAAYFIRVGGCDVGCHWCDVKESWDANLHPPTHADLIVKNASPYKTIVITGGEPLMWDMQYLTSSLQNQGLQTHIETSGAYPLSGQWNWICLSPKKTKLPLEGIYPEAHELKMIIYNKSDFEFAEQQAAKVSDKCGLYLQPEWSKKEIMTPMIVDYVMKNPKWKISLQTHKYLNIP

SEQ ID NO: 35215 - protein, 227 aa, Wenzhouxiangella marina
  misc_feature (1)..(227): tr|A0A0K0XT64|A0A0K0XT64_9GAMM 7-carboxy-7-deazaguanine synthase OS=Wenzhouxiangella marina OX=1579979 GN=queE PE=3 SV=1
MTTTTLSSRSEQARTDQRLKITEIFTSIQGESDLSGWPTVFVRLTGCPLRCSWCDTPYSFHGGDWMQIDDIVDQARSARVRHVCVTGGEPLAQKRCLNLLTALCDAGFVVSLETSGALSVAEVDPRVVKVLDLKAPGSGEVGRNDWGNLDHLQAHDQIKLVLADRVDFDWALRQVEAHRLDRWQVLFSPVWGQLEPRQLAEWIVEARAHVRLQLQMHKYLWGEAQGR

SEQ ID NO: 35216 - protein, 211 aa, Wenzhouxiangella sediminis
  misc_feature (1)..(211): tr|A0A3E1K9W7|A0A3E1K9W7_9GAMM 7-carboxy-7-deazaguanine synthase OS=Wenzhouxiangella sediminis OX=1792836 GN=q ueE PE=3 SV=1
MTYTVREIFHTLQGEGLNAGRPAVFLRFAGCNLWSGREQHRHLAICKFCDTQFVGTGGPGGGKFEDGESLAAAVSRRWPHDAQGPKLVVCTGGEPLLQLDRAAIDALHERGFEIAVETNGTIPAPSGIDWLCVSPKAGAELVVEHGDELKLVYPQAGIDPADFEGLDFRHFLLQPMDGPELEGNTRRSIEYCMQHPKWRLSVQTHKLLGLP

SEQ ID NO: 35217 - protein, 211 aa, Wenzhouxiangella sp.
  misc_feature (1)..(211): tr|A0A372BVD5|A0A372BVD5_9GAMM 7-carboxy-7-deazaguanine synthase OS=Wenzhouxiangella sp. 15181 OX=2301224 GN=q ueE PE=3 SV=1
MTYTVREIFHTLQGEGLNAGHPAVFLRFAGCNLWSGREAHRASAICQFCDTEFVGTGGPGGGKFADGQSLATAVARRWPREAQGPKLVVCTGGEPLLQLDEAAIDALHGQGFEVAVETNGTLAAPAGIDWLCVSPKAGADLVLRQGDELKLVFPQAGIEPANLEGLGFRHFLLQPMDGPELKENTRRAIDYCMQHPRWRLSVQTHKLLGLP

SEQ ID NO: 35218 - protein, 265 aa, Westiellopsis prolifica
  misc_feature (1)..(265): tr|A0A4Q9J6V6|A0A4Q9J6V6_9CYAN 7-carboxy-7-deazaguanine synthase OS=Westiellopsis prolifica IICB1 OX=1970206 G N=queE PE=3 SV=1
MTTKIGITPTARLVEVFSAIQGEGLNVGTRQIFIRFALCDLRCQFCDSAHTWNAPTTCRIERSPGKRDFEIYSNPVSLPILLEWIERQNIPCLHDSISLTGGEPLLHAGFLVEFLPQIRAITGLPIYLETGGHRPEQLAMILPYLDSVGMDLKLPSTSGENRWQEHSKFLQLCYESQIEVFVKIIISDQTNPAELERSALLVAQVSPSIPVFLQPVTPLPASEQLTANPVLAPSPEQVLVWQALIKPFVKQVRVIPQTHKMLNQL

SEQ ID NO: 35219 - protein, 208 aa, Westiellopsis prolifica
  misc_feature (1)..(208): tr|A0A4V2JMT5|A0A4V2JMT5_9CYAN 7-carboxy-7-deazaguanine synthase OS=Westiellopsis prolifica IICB1 OX=1970206 G N=queE PE=3 SV=1
MQLQKLESISIHETFQETIQGEGYWFGTPVDFIRLAGCPVGCSWCDTGYSNGGKGLPRIERSFKDLISELKSQRVVISGGEPFIHASLPELVRHVGSTGRQVSIETSGAFWQDIPSWAWVTLSPKEHINPRYPVHSKIWKRANEVKIVIADGKELEFYRKSLLNEPSLVFLQPEWSEREKTIPITLGLLKQYPTYRLSLQLHKMIGVL

SEQ ID NO: 35220 - protein, 208 aa, Williamwhitmania taraxaci
  misc_feature (1)..(208): tr|A0A1G6QC86|A0A1G6QC86_9BACT 7-carboxy-7-deazaguanine synthase OS=Williamwhitmania taraxaci OX=1640674 GN=qu eE PE=3 SV=1
MSDTDVFMGGRMLPLVEDFYTIQGEGYHSGKPAYFIRLGGCDVCCSWCDARFTWNPKSFPPVSVDEIVARATSFPAQAVVVTGGEPTLYQLSLLSDKLQAAGIKTFIETSGAHTLTGSWDWVCLSPKRNQPPLPSVFKQASELKVIITSLADFEWAEENAAHVSDTCMLYLQPEWSVYQQIIEAVVEYAKANPRWNISIQMHKFMHIP

SEQ ID NO: 35221 - protein, 210 aa, Winogradskyella arenosi
  misc_feature (1)..(210): tr|A0A368ZGL3|A0A368ZGL3_9FLAO 7-carboxy-7-deazaguanine synthase OS=Winogradskyella arenosi OX=533325 GN=queE PE=3 SV=1
MTRRERQELIDKGLLLPLMEEFYTIQGEGFHKGTAAYFVRIGGCDVGCHWCDVKESWLAELHPPTATEKIVDNAVKYSNTIIVTGGEPLTWDMGPLTAQLKAKGVQTHIETSGAYKLTGEWDWICLSPKKMKLPTKEVYEKAHELKCIIYNNDDFKFAEEQAEKVNGDCILYLQPEWSKRDKVIPKIVDYVMDHPKWKVSLQTHKYLNIP

SEQ ID NO: 35222 - protein, 210 aa, Winogradskyella aurantia
  misc_feature (1)..(210): tr|A0A265UNB6|A0A265UNB6_9FLAO 7-carboxy-7-deazaguanine synthase OS=Winogradskyella aurantia OX=1915063 GN=que E PE=3 SV=1
MTRREQQELIDKGLLLPLMEEFYTIQGEGYHKGTAAYFIRIGGCDVGCHWCDVKESWLAELHPPTATEQIVENAVKYSNTIVVTGGEPLMWDMNPLTDQLKAKGLQTHIETSGAYKLTGVWDWICLSPKKNKLPTEEVYEKAHELKCIIYNKDDFRFAEEQAAKVNSNCILYLQPEWSKRDKMMPQIVDYVMANPKWKVSLQTHKYLNIP

SEQ ID NO: 35223 - protein, 225 aa, Winogradskyella epiphytica
  misc_feature (1)..(225): tr|A0A2V4XRB7|A0A2V4XRB7_9FLAO 7-carboxy-7-deazaguanine synthase OS=Winogradskyella epiphytica OX=262005 GN=qu eE PE=3 SV=1
MEQSNNAYLLIYLPTMTRRERQELIDKGLLLPLMEEFYTIQGEGFHKGTAAYFIRIGGCDVGCHWCDVKESWLAELHPPTETEKIVENAVKYSNTIVVTGGEPLTWDMGPLTAQLKAKGVQTHIETSGAYKLTGEWDWICLSPKKMKLPTEEVLAKANELKCIIYNKDDFRFAEEYADKVNENCILYLQPEWSKREKMMPMIVDYVMANPKWKVSLQTHKYLNIP

SEQ ID NO: 35224 - protein, 210 aa, Winogradskyella eximia
  misc_feature (1)..(210): tr|A0A3D9GYZ0|A0A3D9GYZ0_9FLAO 7-carboxy-7-deazaguanine synthase OS=Winogradskyella eximia OX=262006 GN=queE P E=3 SV=1
MTRRERQELIDKGLLLPLMEEFYTIQGEGFHKGTAAYFVRIGGCDVGCHWCDVKESWLAELHPPTETEKIVENAVKYSNTIVVTGGEPLMWDMGPLTAQLKAKGVQTHIETSGAYELSGTWDWICLSPKKMKLPTERVYEKAHELKCIIYNKDDFRFAEEQAAKVNKDCILYLQPEWSKRDKVVPMIVDYVMANPKWKVSLQTHKYLNIP

SEQ ID NO: 35225 - protein, 210 aa, Winogradskyella jejuensis
  misc_feature (1)..(210): tr|A0A1M5RW91|A0A1M5RW91_9FLAO 7-carboxy-7-deazaguanine synthase OS=Winogradskyella jejuensis OX=1089305 GN=qu eE PE=3 SV=1
MTRRERQELIDKGLLLPLMEEFYTIQGEGYHKGTAAYFVRIGGCDVGCHWCDVKESWLAELHPPTETEKIVENAVKYSNTIVVTGGEPLMWDMNPLTEQLKAKGVQTHIETSGAYKLSGDWDWICLSPKKNKLPTEEVFAKAHELKCIIYNKDDFRFAEEQAAQVNKDCILYLQPEWSKRDKMMPQIVDYVMANPKWKVSLQTHKYLNIP

SEQ ID NO: 35226 - protein, 210 aa, Winogradskyella pacifica
  misc_feature (1)..(210): tr|A0A3D9LM91|A0A3D9LM91_9FLAO 7-carboxy-7-deazaguanine synthase OS=Winogradskyella pacifica OX=664642 GN=queE PE=3 SV=1
MTRRERQELIDKGLLLPLMEEFYTIQGEGFHKGTAAYFVRIGGCDVGCHWCDVKESWLAELHPPTETEKIVENAVKYSDTIIVTGGEPLTWDMGPLTAQLKAKGVQTHIETSGAYKLTGQWDWICLSPKKMKLPTEEVYEKAHELKCIIYNNDDFKFAEEQAEKVNDNCILYLQPEWSKRDKVIPKIVDYVMANPRWKVSLQTHKYLNIP

SEQ ID NO: 35227 - protein, 210 aa, Winogradskyella psychrotolerans
  misc_feature (1)..(210): tr|S7VJJ6|S7VJJ6_9FLAO 7-carboxy-7-deazaguanine synthas e OS=Winogradskyella psychrotolerans RS-3 OX=641526 GN= queE PE=3 SV=1
MTRRERQELIDKGLLLPLMEEFYTIQGEGFHKGTAAYFIRIGGCDVGCHWCDVKESWLAELHPPTEITKIVENAEKYSKTIVVTGGEPLMWDMDPLTKQLKERGLQTHIETSGAYKLTGDWDWICLSPKKLKLPTEEVLEKAHELKCIIFNKDDFKFAEEQAAKVNKDCILYLQPEWSKSDKMVPQIVDYVMANPKWKVSLQTHKYLNIP

SEQ ID NO: 35228 - protein, 210 aa, Winogradskyella sp.
  misc_feature (1)..(210): tr|A0A1Y0MFK8|A0A1Y0MFK8_9FLAO 7-carboxy-7-deazaguanine synthase OS=Winogradskyella sp. PC-19 OX=754417 GN=que E PE=3 SV=1
MTRRERQELIDKGQLLPLMEEFYTIQGEGYHKGTAAYFVRIGGCDVGCHWCDVKESWLAELHPPTETEKIVDNAVKYSNTIVVTGGEPLMWDMNPLTEQLKAKGVQTHIETSGAYKLSGQWDWICLSPKKNKLPTEEVYAEAHELKCIIYNKDDFRFAEEQAEKVNDNCILYLQPEWSKRDKMVPQIVDYVMANPKWKVSLQTHKYLNIP

SEQ ID NO: 35229 - protein, 210 aa, Winogradskyella sp.
  misc_feature (1)..(210): tr|A0A368MHI0|A0A368MHI0_9FLAO 7-carboxy-7-deazaguanine synthase OS=Winogradskyella sp. KYW1333 OX=2282123 GN= queE PE=3 SV=1
MTRREQQELIDKGLLLPLMEEFYTIQGEGYHKGTAAYFVRIGGCDVGCHWCDVKESWLAELHPPTETSKIVENAVKYSNTIVVTGGEPLTWDMGPLTEQLKAKGVQTHIETSGAYKLTGEWDWICLSPKKKKLPTEEIYSKAHELKCIIYNKDDFKFAEEQAAKVNQNCILYLQPEWSKREKMMSQIVDYVMANPKWKVSLQTHKYLNIP

SEQ ID NO: 35230 - protein, 210 aa, Winogradskyella thalassocola
  misc_feature (1)..(210): tr|A0A1G8IA44|A0A1G8IA44_9FLAO 7-carboxy-7-deazaguanine synthase OS=Winogradskyella thalassocola OX=262004 GN= queE PE=3 SV=1
MTRRERQELIDKGLLLPLMEEFYTIQGEGFHKGTAAYFVRIGGCDVGCHWCDVKESWLAELHPPTETEKIVENAIKYSDTIIVTGGEPLTWDMGPLTAQLKAKGVQTHIETSGAYKLTGQWDWICLSPKKMKLPTEEVYEKAHELKCIIYNNDDFKFAEEQAEKVNDNCILYLQPEWSKRDKVIPKIVDYVMANPRWKVSLQTHKYLNIP

SEQ ID NO: 35231 - protein, 210 aa, Winogradskyella wandonensis
  misc_feature (1)..(210): tr|A0A4R1KTW8|A0A4R1KTW8_9FLAO 7-carboxy-7-deazaguanine synthase OS=Winogradskyella wandonensis OX=1442586 GN= queE PE=3 SV=1
MTRRERQELIDKGLLLPLMEEFYTIQGEGYHKGTAAYFVRIGGCDVGCHWCDVKESWLAELHPPTDTEKIVENAVKYSNTIVVTGGEPLMWDMNPLTTQLKAKGVQTHIETSGAYKLTGNWDWICLSPKKNKLPTEEVSAKANELKCIIYNKDDFRFAEEQAQKVNDKCFLYLQPEWSKRDKMIPQIVDYVMANPKWKVSLQTHKYLNIP

SEQ ID NO: 35232 - protein, 213 aa, Woeseia oceani
  misc_feature (1)..(213): tr|A0A193LFW2|A0A193LFW2_9GAMM 7-carboxy-7-deazaguanine synthase OS=Woeseia oceani OX=1548547 GN=queE PE=3 SV= 1
MTYSVKELFFTLQGEGAHAGRAAVFLRFAGCNLWSGREKDRERAVCRFCDTDFVGTDGEGGGKFVDADTLGDAVMRCWPTDAGGQRYVVCTGGEPMLQLDVAAIDALHARGFEVGVETNGTLPVPKQVDWICVSPKAGATVVQTRGNELKLVYPQAELSAQPDQFEKMAFEHFYLQPMDSPERAANTRLATEYCLRNPRWKLSLQTHKIIGIP

SEQ ID NO: 35233 - protein, 213 aa, Woeseiaceae bacterium
  misc_feature (1)..(213): tr|A0A2D9M280|A0A2D9M280_9GAMM 7-carboxy-7-deazaguanine synthase OS=Woeseiaceae bacterium OX=2026806 GN=queE P E=3 SV=1
  misc_feature (17)..(17): Xaa can be any naturally occurring amino acid
  misc_feature (40)..(40): Xaa can be any naturally occurring amino acid
  misc_feature (44)..(45): Xaa can be any naturally occurring amino acid
  misc_feature (55)..(55): Xaa can be any naturally occurring amino acid
  misc_feature (61)..(61): Xaa can be any naturally occurring amino acid
  misc_feature (68)..(68): Xaa can be any naturally occurring amino acid
  misc_feature (75)..(75): Xaa can be any naturally occurring amino acid
  misc_feature (85)..(85): Xaa can be any naturally occurring amino acid
  misc_feature (88)..(88): Xaa can be any naturally occurring amino acid
  misc_feature (91)..(91): Xaa can be any naturally occurring amino acid
  misc_feature (138)..(138): Xaa can be any naturally occurring amino acid
  misc_feature (145)..(145): Xaa can be any naturally occurring amino acid
  misc_feature (163)..(163): Xaa can be any naturally occurring amino acid
  misc_feature (170)..(170): Xaa can be any naturally occurring amino acid
  misc_feature (185)..(185): Xaa can be any naturally occurring amino acid
  misc_feature (197)..(198): Xaa can be any naturally occurring amino acid
  misc_feature (201)..(201): Xaa can be any naturally occurring amino acid
MLTVNEIFYSIQGESTXTGQPCVFVRLTGCDLRCVWCDTXYAFXXGRKMLIEDVXKEVENXQCGLVEXTGGEPLXQEDVYGLIDXLLXDDXTILVETGGQLSVARLPAKVIKVLDVKCPGSREEKTTHWENFELLTKXDQVKFVXADRADYEYARDTLKRLGXASRCGAXLFSPVHDHLAPQVLXGWVLEDRLPVRXXLQXHKYIWGADVRGV

SEQ ID NO: 35234 - protein, 230 aa, Wohlfahrtiimonas chitiniclastica
  misc_feature (1)..(230): tr|A0A162VSR7|A0A162VSR7_9GAMM 7-carboxy-7-deazaguanine synthase OS=Wohlfahrtiimonas chitiniclastica OX=400946 GN=queE PE=3 SV=1
MEIFGPTVQGEGMVIGRKTCFIRLAACDYQCVWCDSKFTWDGSVKPDVMTIPMIIDAVNQLHEDQVDHVTISGGNPALYKGLDQLVIALNDAGYQTAIETQGSHWNEGLKFIDEVTISPKPPSSGMNTDFKVLDQMIAELDGRNVSLKVVVFDRMDLLYAEIIHQRYPYVPMFVQAGNDQTLEADEANTSLHLLKRYAVLVDEVMRSTVLKNVRVLPQMHALLWGNRRGV

SEQ ID NO: 35235 - protein, 235 aa, Wohlfahrtiimonas chitiniclastica
  misc_feature (1)..(235): tr|A0A256BZB0|A0A256BZB0_9GAMM 7-carboxy-7-deazaguanine synthase OS=Wohlfahrtiimonas chitiniclastica OX=400946 GN=queE PE=3 SV=1
MNFPVLEIFGPTVQGEGMVIGRKTCFIRLAACDYQCVWCDSKFTWDGSVKPDVMTIPMIIDAVNQLHEDQVDHVTISGGNPALYKGLDQLVLALNDAGYQTAIETQGSHWNEGLKFIDEVTISPKPPSSGMNTNFKVLDQMIAELEGRNVSLKVVVFDRMDLLYAEMIHQRYPHVPMFVQAGNDQTLEADEANTSLHLLKRYAVLVDEVMRSTVLKNVRVLPQMHALLWGNRRGV

SEQ ID NO: 35236 - protein, 235 aa, Wohlfahrtiimonas sp.
  misc_feature (1)..(235): tr|A0A256C5L9|A0A256C5L9_9GAMM 7-carboxy-7-deazaguanine synthase OS=Wohlfahrtiimonas sp. G9077 OX=1980118 GN=q ueE PE=3 SV=1
MNFPVLEIFGPTVQGEGMVIGRKTCFIRLAACDYQCVWCDSKFTWDGSVKPDLMTIEMIIEHVNQLHEDQVDHVTISGGNPALYKGLDQLVLALNAAGYQTAIETQGSHWNDGLKLIDEVTLSPKPPSSGMNTDFTVLDEMITQLEGRHISLKVVVFDRMDLLYAEMIHQRYPHLPMFVQAGNDQTLEADEANTSLHLLKRYAVLVDEVMRSTVLKNVRVLPQMHALLWGNRRGV

SEQ ID NO: 35237 - protein, 193 aa, Wolinella succinogenes; identical to SEQ ID NO: 30615
  misc_feature (1)..(193): tr|Q7MR57|Q7MR57_WOLSU 7-carboxy-7-deazaguanine synthas e OS=Wolinella succinogenes (strain ATCC 29543 / DSM 17 40 / LMG 7466 / NCTC 11488 / FDC 602W) OX=273121 GN=que E PE=3 SV=1

SEQ ID NO: 35238 - protein, 211 aa, Xanthobacter autotrophicus
  misc_feature (1)..(211): tr|A7IK77|A7IK77_XANP2 7-carboxy-7-deazaguanine synthas e OS=Xanthobacter autotrophicus (strain ATCC BAA-1158 / Py2) OX=78245 GN=queE PE=3 SV=1
MAYAVKEMFLTLQGEGAQAGRAAVFCRFAGCNLWSGREDDRAEAQCRFCDTDFVGMDGEGGGRFADAATLAAAIAATWGSAAPERRFVVFTGGEPLLQLDTALVDAVHALGFEIAVETNGTVDAPGGIDWICMSPKAGTDLKVTRGHELKLVFPQPGLAPEGLAGLDFTHFFLQPMDGPDRLRNTEAAVAYCLSHPRWRLSLQTHKMIGIP

SEQ ID NO: 35239 - protein, 210 aa, Xanthobacter tagetidis
  misc_feature (1)..(210): tr|A0A3L7AAL3|A0A3L7AAL3_9RHIZ 7-carboxy-7-deazaguanine synthase OS=Xanthobacter tagetidis OX=60216 GN=queE PE =3 SV=1
MAYSVKEMFKTLQGEGAQAGRAAVFCRFAGCNLWTGREEHRAEAQCRFCDTDFVGTDGEGGGRFADAAELARAIAAAWDGDRARRFVVFTGGEPLLQLDAELIAAVHAEGFEIAVETNGTIAAPDGIDWICVSPKAGTALAQRRGQELKLVFPQPDLMPEAAEELDFAHFFLQPMDGPERAAHTQAAVAYCLGHPRWRLSLQTHKMIGIP

SEQ ID NO: 35240 - protein, 24 aa, Xanthomarina gelatinilytica
  misc_feature (1)..(24): tr|A0A3C0F429|A0A3C0F429_9FLAO 7-carboxy-7-deazaguanine synthase QueE (Fragment) OS=Xanthomarina gelatinilytic a OX=1137281 GN=DCM10_09255 PE=4 SV=1
MTRSERQELIDKGLLLPLMEEFYT

SEQ ID NO: 35241 - protein, 210 aa, Xanthomarina gelatinilytica
  misc_feature (1)..(210): tr|A0A3D6BSC8|A0A3D6BSC8_9FLAO 7-carboxy-7-deazaguanine synthase OS=Xanthomarina gelatinilytica OX=1137281 GN= queE PE=3 SV=1
MTRSERQELIDKGLLLPLMEEFYTIQGEGFHKGTAAYFVRIGGCDVGCHWCDVKESWLAELHPPTETEKIVENAVKYSKTIVVTGGEPLTWNMTPLTTQLKEKGLQTHIETSGAYKLTGVWDWICLSPKKLKLPTEEIYGKAHELKMIIYNKSDFKFAEEQAAKVNKDCILYLQPEWSKRDKVVPEIVEYVMANPKWKVSLQTHKYLNIP

SEQ ID NO: 35242 - protein, 210 aa, Xanthomarina sp.; identical to SEQ ID NO: 35241
  misc_feature (1)..(210): tr|A0A2D8CUJ9|A0A2D8CUJ9_9FLAO 7-carboxy-7-deazaguanine synthase OS=Xanthomarina sp. OX=1931211 GN=queE PE=3 S V=1

SEQ ID NO: 35243 - protein, 225 aa, Xanthomonadaceae bacterium
  misc_feature (1)..(225): tr|A0A2M9ECV7|A0A2M9ECV7_9GAMM 7-carboxy-7-deazaguanine synthase OS=Xanthomonadaceae bacterium NML95-0200 OX=2 032577 GN=queE PE=3 SV=1
MNQVSSESAATAADRLRITEIFCSLQGESRSVGWPTVFVRLTGCPLRCGYCDTTYSFHGGQWQTIDDIVAEVRSHGVRHVCVTGGEPLAQKRCIPLLQKLCDAGFEVSLETSGAIDISPVDSRVIRVVDVKTPDSGEASRNHWPNLALLQPRDQVKFVICSRDDYDWSRAVLQEYRLAERCEVLFSPSYAQLPPRELAEWIIADRLPVRFQMQLHKQLWGEEQGR

SEQ ID NO: 35244 - protein, 228 aa, Xanthomonadaceae bacterium
  misc_feature (1)..(228): tr|A0A1E4L6G4|A0A1E4L6G4_9GAMM 7-carboxy-7-deazaguanine synthase OS=Xanthomonadaceae bacterium SCN 69-48 OX=16 60171 GN=queE PE=3 SV=1
MNAVADAAAASAAGQTERLKLTEIFLSLQGEARDAGWPTVFVRLTGCPLRCQYCDTAYAFHGGQWWEIDAILAEVARLGARHVCVTGGEPLAQKRCLALLERLCDAGYVVSLETSGALDIAGVDARVSRVLDIKTPGSGEAARNLWGNLPLLTAHDQVKFVVCSREDYEWAKAVVAEHGLCAICDVLFSPSAAQVAARELADWIVADRLPVRFQMQLHKLLWNDEPGK

SEQ ID NO: 35245 - protein, 210 aa, Xanthomonadales bacterium
  misc_feature (1)..(210): tr|A0A1M3QJD7|A0A1M3QJD7_9GAMM 7-carboxy-7-deazaguanine synthase OS=Xanthomonadales bacterium 66-474 OX=189586 8 GN=queE PE=3 SV=1
MYAIKEIFYTLQGEGFHAGRPAVFCRFSGCNLWSGREQDRATAACDFCDTDFVGTDGANGGKFPDAAVLADVIAGLWPRDRKENRFVVFTGGEPLLQLDTPLLDAMHARGFECAVETNGTLEAPDGLDWITVSPKGTAPVKLKRASELKLVYPQPTALPERFADFAATHFFLQPMDGPHALDNTRAAVDYCKAHPHWRLSLQTHKYLGIP

SEQ ID NO: 35246 - protein, 229 aa, Xanthomonadales bacterium
  misc_feature (1)..(229): tr|A0A1Q4FNE3|A0A1Q4FNE3_9GAMM 7-carboxy-7-deazaguanine synthase OS=Xanthomonadales bacterium 63-13 OX=1895867 GN=queE PE=3 SV=1
MNAIRPLQNETPTPATSRRLRLTEIFCSLQGESDSVGWPTVFVRLTGCPLRCSWCDTEYAFHGGEWHEIDEVVASVAAFGVHRVCVTGGEPLAQKRCLALLEALCNAGHEVSLETSGALDIAEVDPRVRRVMDLKAPGSGEVERNLWSNIAHLQASDQVKIVLADRQDYDWAVARVREHALSARCPVLFSPVQGKLAPRDLADWILADRLPVRFQMQLHKLLWGNEPGR

SEQ ID NO: 35247 - protein, 225 aa, Xanthomonas albilineans
  misc_feature (1)..(225): tr|D2U9H0|D2U9H0_XANAP 7-carboxy-7-deazaguanine synthas e OS=Xanthomonas albilineans (strain GPE PC73 / CFBP 70 63) OX=380358 GN=NrdG PE=3 SV=1
MAAVPSEIVQSPLPRLKLTEIFLSLQGEADSAGWPTVFVRLTGCPLRCSYCDTAYAFHGGQWWDIDAILAEVARHGVRHVCVTGGEPLAQKRCLQLLQSLCDTGYDVSLETSGALDIAEVDPRVSRVLDIKTPASHEAQRNRWENLTLLTARDQIKFVLCGRADYEWARALVAEHQLQARCMVWFSPSKSDLDARELADWIVADRLPVRFQMQLHKLLWNDEPGR

SEQ ID NO: 35248 - protein, 227 aa, Xanthomonas alfalfae
  misc_feature (1)..(227): tr|A0A1S1XI51|A0A1S1XI51_9XANT 7-carboxy-7-deazaguanine synthase OS=Xanthomonas alfalfae OX=366650 GN=queE PE= 3 SV=1
MNAAAVPSEIVQSPLPRLKITEIFLSLQGEAEAAGWPTVFVRLTGCPLRCLYCDTAYAFHGGQWHDIDAIVAEVASHGVRHVCVTGGEPLAQKRCLVLLEKLCDAGYDVSLETSGALDVSAVDPRVSRVVDIKTPASGEEARNRWENLPLLTARDQIKFVICSRADYEWSREIVAAHALDRRCTVWFSPSKSEVSPRQLADWIVADRLPVRFQMQLHKLLWNDEPGR

SEQ ID NO: 35249 - protein, 227 aa, Xanthomonas arboricola
  misc_feature (1)..(227): tr|A0A2S7A6L1|A0A2S7A6L1_9XANT 7-carboxy-7-deazaguanine synthase OS=Xanthomonas arboricola pv. guizotiae OX=48 7867 GN=queE PE=3 SV=1
MNAAAVPSEIVQSPLPRLKITEIFLSLQGEAEAAGWPTVFVRLTGCPLRCHYCDTAYAFHGGEWHDIDAILAEVASHGVRHVCVTGGEPLAQKRCLLLLQKLCDAGFDVSLETSGALDVSAVDPRVSRVVDIKTPASGEEQRNRWENLPLLTARDQIKFVICSRADYEWSRERVAAHALDRRCTVWFSPSKSEVTPRELADWIVADRLPVRFQMQLHKLLWNDEPGR

SEQ ID NO: 35250 - protein, 227 aa, Xanthomonas arboricola
  misc_feature (1)..(227): tr|A0A2S6Z7S6|A0A2S6Z7S6_9XANT 7-carboxy-7-deazaguanine synthase OS=Xanthomonas arboricola pv. populi OX=48782 3 GN=queE PE=3 SV=1
MNAAAVPSEIVQSPLPRLKITEIFLSLQGEAEAAGWPTVFVRLTGCPLRCHYCDTAYAFHGGEWHDIDAIVAEVASHGVRHVCVTGGEPLAQKRCLVLLQKLCDAGFDVSLETSGALDVSAVDPRVSRVVDIKTPASGEEQRNRWENLPLLTARDQIKFVICSRADYEWSRKRVAAHALDRRCTVWFSPSKSEVTPRQLADWIVADRLPVRFQMQLHKLLWNDEPGR

SEQ ID NO: 35251 - protein, 226 aa, Xanthomonas axonopodis
  misc_feature (1)..(226): tr|A0A2S6YG88|A0A2S6YG88_9XANT 7-carboxy-7-deazaguanine synthase OS=Xanthomonas axonopodis pv. begoniae OX=473 403 GN=queE PE=3 SV=1
MNAAVPSEIVQSPLPRLKITEIFLSLQGEADAAGWPTVFVRLTGCPLRCLYCDTAYAFHGGQWHDIDAIVAEVASHGVRHVCVTGGEPLAQKRCLVLLEKLCDAGYDVSLETSGALDVSAVDPRVSRVVDIKTPASGEQARNRWENLPLLTARDQIKFVICSRADYEWSREIVAAHGLDRRCTVWFSPSKSEVSPRQLADWIVADRLPVRFQMQLHKLLWNDEPGR

SEQ ID NO: 35252 - protein, 227 aa, Xanthomonas axonopodis
  misc_feature (1)..(227): tr|M4U0H2|M4U0H2_9XANT 7-carboxy-7-deazaguanine synthas e OS=Xanthomonas axonopodis Xac29-1 OX=1304892 GN=queE PE=3 SV=1
MNAAAVPSEIVQSPLPRLKITEIFLSLQGEAEAAGWPTVFVRLTGCPLRCHYCDTAYAFHGGQWHDIDAIVAEVASHGVRHVCVTGGEPLAQKRCLVLLQKLCDAGFDVSLETSGALDVSAVDSRVSRVVDIKTPASGEEARNRWENLPLLTARDQIKFVICSRADYEWSREIVAAHALDRRCTVWFSPSKSEVSPRQLADWIVADRLPVRFQMQLHKLLWNDEPGR

SEQ ID NO: 35253 - protein, 227 aa, Xanthomonas bromi
  misc_feature (1)..(227): tr|A0A1C3NJD4|A0A1C3NJD4_9XANT 7-carboxy-7-deazaguanine synthase OS=Xanthomonas bromi OX=56449 GN=queE PE=3 SV =1
MNAAAVPSEIIQSPLPRLKITEIFLSLQGEADAAGWPTVFVRLTGCPLRCQYCDTAYAFHGGEWHDIDAIVAEVASHGVRHVCVTGGEPLAQKRCLVLLQKLCDAGYDVSLETSGALDVSAVDPRVSRVVDIKTPASGEQARNRWENLPLLTARDQIKFVICSRADYEWSREIVAAHALHRRCTVWFSPSKSEVSPRQLADWIVADRLPVRFQMQLHKLLWNDEPGR

SEQ ID NO: 35254 - protein, 227 aa, Xanthomonas campestris
  misc_feature (1)..(227): tr|Q3BQG3|Q3BQG3_XANC5 7-carboxy-7-deazaguanine synthas e OS=Xanthomonas campestris pv. vesicatoria (strain 85- 10) OX=316273 GN=queE PE=3 SV=1
MNAAAVPSEIVQSPLPRLKITEIFLSLQGEAEAAGWPTVFVRLTGCPLRCLYCDTAYAFHGGQWHDIDAIVAEVASHGVRHVCVTGGEPLAQKRCLVLLEKLCDAGYDVSLETSGALDVSAVDPRVSRVVDIKTPASGEEARNRWENLPLLTARDQIKFVICSRVDYEWSREIVAAHTLDRRCTVWFSPSKSEVSPRQLADWIVADRLPVRFQMQLHKLLWNDEPGR

SEQ ID NO: 35255 - protein, 227 aa, Xanthomonas campestris
  misc_feature (1)..(227): tr|A0A2S4JSM3|A0A2S4JSM3_XANCA 7-carboxy-7-deazaguanine synthase OS=Xanthomonas campestris OX=339 GN=queE PE=3 SV=1
MNAAAVPSEIVQSPLPRLKITEIFLSLQGEAEAAGWPTVFVRLTGCPLRCTYCDTAYAFHGGEWHDIDAIVAEVASHGVRHVCVTGGEPLAQKRCLALLHKLCDAGFDVSLETSGALDVSAVDARVSRVVDIKTPASGEEHRNRWDNLPLLTARDQIKFVICSRADYEWSRDVVATQALDRRCTVWFSPSKGQVSARELADWIVADRLPVRFQMQLHKILWDDEPGR

SEQ ID NO: 35256 - protein, 227 aa, Xanthomonas cannabis
  misc_feature (1)..(227): tr|A0A0B2CUI6|A0A0B2CUI6_9XANT 7-carboxy-7-deazaguanine synthase OS=Xanthomonas cannabis pv. cannabis OX=18858 94 GN=queE PE=3 SV=1
MNAAAVPSEIVQSQLPRLKITEIFLSLQGEAETAGWPTVFVRLTGCPLRCQYCDTAYAFHGGQWHDIDAIVADVASHGVRHVCVTGGEPLAQKRCLVLLQKLCDAGFDVSLETSGALDVSEVDARVSRVVDIKTPASGEAHRNRWDNLALLTARDQIKFVICSRADYDWSREIVAAHALDRRCTVWFSPSKSEVTPRQLADWIVADRVPVRFQMQLHKILWNDEPGR

SEQ ID NO: 35257 - protein, 227 aa, Xanthomonas citri
  misc_feature (1)..(227): tr|A0A2H1SN04|A0A2H1SN04_XANCI 7-carboxy-7-deazaguanine synthase OS=Xanthomonas citri pv. fuscans OX=366649 GN =queE PE=3 SV=1
MNAAAVPSEIVQSSLPRLKITEIFLSLQGEAEAAGWPTVFVRLTGCPLRCLYCDTAYAFHGGQWHDIDAIVAEVASHGVRHVCVTGGEPLAQKRCLVLLEKLCDAGYDVSLETSGALDVSAVDPRVSRVVDIKTPGSGEEARNCWENLPLLTARDQIKFVICSRADYEWSREIVAAHALDRRCTVWFSPSKSEVSPRQLADWIVADRLPVRFQMQLHKLLWNDEPGR

SEQ ID NO: 35258 - protein, 227 aa, Xanthomonas citri
  misc_feature (1)..(227): tr|A0A220WEV7|A0A220WEV7_XANCI 7-carboxy-7-deazaguanine synthase OS=Xanthomonas citri pv. vignicola OX=473426 GN=queE PE=3 SV=1
MNAAAVPSEIVQSSLPRLKITEIFLSLQGEAEAAGWPTVFVRLTGCPLRCLYCDTAYAFHGGQWHDIDAIVAEVASHGVRHVCVTGGEPLAQKRCLVLLEKLCDAGYDVSLETSGALDVSAVDPRVSRVVDIKTPGSGEEARNRWENLPLLTARDQIKFVICSRADYEWSREIVAAHALDRRCTVWFSPSKSEVSPRQLADWIVADRLPVRFQMQLHKLLWNDEPGR

SEQ ID NO: 35259 - protein, 227 aa, Xanthomonas codiaei
  misc_feature (1)..(227): tr|A0A2S7CYQ9|A0A2S7CYQ9_9XANT 7-carboxy-7-deazaguanine synthase OS=Xanthomonas codiaei OX=56463 GN=queE PE=3 SV=1
MNAAAVPSEIVQSPLPRLKITEIFLSLQGEAEAAGWPTVFVRLTGCPLRCTYCDTAYAFHGGQWHDIDAIVAEVASHGVRHVCVTGGEPLAQKRCLALLQQLCDAGLDVSLETSGALDVAGVDARVSRVVDIKTPESGEAHRNRWDNLPLLTARDQIKFVICSRADYEWARTCVAEHLLDRRCTVWFSPSKGQVSARELADWIVADRLPVRFQMQLHKILWDDEPGR

SEQ ID NO: 35260 - protein, 227 aa, Xanthomonas cucurbitae
  misc_feature (1)..(227): tr|A0A2S7DSZ1|A0A2S7DSZ1_9XANT 7-carboxy-7-deazaguanine synthase OS=Xanthomonas cucurbitae OX=56453 GN=queE PE =3 SV=1
MNAAAVPSEIVQSPLPRLKITEIFLSLQGEADTAGWPTVFVRLTGCPLRCQYCDTAYAFHGGQWHDIDAIVAEVASHGVRHVCVTGGEPLAQKRCLALLKQLCDAGFDVSLETSGALDVAEVDPRVSRVVDIKTPASGEEHRNRWDNLPLLTARDQIKFVICSRADYQWSRERVASHALDRRCTVWFSPSKSEVTPRQLADWIVADRLPVRFQMQLHKLLWNDEPGR

SEQ ID NO: 35261 - protein, 227 aa, Xanthomonas cynarae
  misc_feature (1)..(227): tr|A0A2S7AZY3|A0A2S7AZY3_9XANT 7-carboxy-7-deazaguanine synthase OS=Xanthomonas cynarae OX=109214 GN=queE PE=3 SV=1
MNAAAVPSEIVQSPLPRLKITEIFLSLQGEAEAAGWPTVFVRLTGCPLRCHYCDTAYAFHGGEWHDIDAIVAEVASHGVRHVCVTGGEPLAQKRCLVLLQKLCDAGFDVSLETSGALDVSAVDPRVSRVVDIKTPASGEEQRNRWENLPLLTARDQIKFVICSRADYEWSREIVAAHALDRRCTVWFSPSKSEVTPRELADWIVADRLPVRFQMQLHKLLWNDEQGR

SEQ ID NO: 35262 - protein, 227 aa, Xanthomonas dyei
  misc_feature (1)..(227): tr|A0A2S7BZ72|A0A2S7BZ72_9XANT 7-carboxy-7-deazaguanine synthase OS=Xanthomonas dyei OX=743699 GN=queE PE=3 SV =1
MNAAAVPSEIVQSPLPRLKITEIFLSLQGEAEAAGWPTVFVRLTGCPLRCNYCDTAYAFHGGQWHDIDAIVAEVASHGVRHVCVTGGEPLAQKRCLVLLQKLCDAGFDVSLETSGALDVSEVDARVSRVVDIKTPASGEEQRNRWDNLALLTARDQIKFVICSRADYEWSREIVATHALDRCCTVWFSPSKSEVTPRQLADWIVADRLPVRFQMQLHKILWDDEPGR

SEQ ID NO: 35263 - protein, 227 aa, Xanthomonas euvesicatoria; identical to SEQ ID NO: 35248
  misc_feature (1)..(227): tr|A0A2S7EGU1|A0A2S7EGU1_XANEU 7-carboxy-7-deazaguanine synthase OS=Xanthomonas euvesicatoria pv. citrumelonis OX=189396 GN=queE PE=3 SV=1

SEQ ID NO: 35264 - protein, 227 aa, Xanthomonas floridensis
  misc_feature (1)..(227): tr|A0A1A9MA66|A0A1A9MA66_9XANT 7-carboxy-7-deazaguanine synthase OS=Xanthomonas floridensis OX=1843580 GN=queE PE=3 SV=1
MNAAAVPSEIVQSPLPRLKITEIFLSLQGEAEAAGWPTVFVRLTGCPLRCTYCDTAYAFHGGQWHDIDAIVAEVASHGVRHVCVTGGEPLAQKRCLVLLQKLCDAGFDVSLETSGALDVSEVDARVSRVVDIKTPASGEAQRNRWDNLPLLTARDQIKFVICGRADYEWSREIVAAHALERRCTVWFSPSKSEVTPRELADWIVADRLPVRFQMQLHKILWDDEPGR

SEQ ID NO: 35265 - protein, 227 aa, Xanthomonas fragariae
  misc_feature (1)..(227): tr|A0A1Y6H444|A0A1Y6H444_9XANT 7-carboxy-7-deazaguanine synthase OS=Xanthomonas fragariae OX=48664 GN=queE PE= 3 SV=1
MNAAAVPSEIVQSPLPRLKITEIFLSLQGEARTAGWPTVFVRLTGCPLRCLYCDTAYAFHGGQWHDIDAIVAEVASHGVRHVCVTGGEPLAQKRCVVLLQKLCDAGFDVSLETSGALDVSAVDSRVSRVVDIKTPASGEEQRNRWENLPLLTARDQIKFVICSRADYEWSREIVAAHALDRRCTVWFSPSKSDVTPRELADWIVADRLPVRFQMQLHKVLWNDEPGR

SEQ ID NO: 35266 - protein, 227 aa, Xanthomonas gardneri; identical to SEQ ID NO: 35261
  misc_feature (1)..(227): tr|F0CAX9|F0CAX9_9XANT 7-carboxy-7-deazaguanine synthas e OS=Xanthomonas gardneri ATCC 19865 OX=925777 GN=queE PE=3 SV=1

SEQ ID NO: 35267 - protein, 227 aa, Xanthomonas gardneri
  misc_feature (1)..(227): tr|A0A1L5Y5E1|A0A1L5Y5E1_9XANT 7-carboxy-7-deazaguanine synthase OS=Xanthomonas gardneri OX=90270 GN=queE PE=3 SV=1
MNAAAVPSEIVQSPLPRLKITEIFLSLQGEAEAAGWPTVFVRLTGCPLRCHYCDTAYAFHGGEWHDIDAIVAEVASHGVRHVCVTGGEPLAQKRCLVLLQKLCDAGFDVSLETSGALDVSAVDPRVSRVVDIKTPASGEEQRNRWDNLPLLTARDQIKFVICSRADYEWSREIVAAHALDRRCTVWFSPSKSEVTPRELADWIVADRLPVRFQMQLHKLLWNDEPGR

SEQ ID NO: 35268 - protein, 227 aa, Xanthomonas hortorum
  misc_feature (1)..(227): tr|A0A2S7E0E2|A0A2S7E0E2_9XANT 7-carboxy-7-deazaguanine synthase OS=Xanthomonas hortorum pv. hederae OX=453603 GN=queE PE=3 SV=1
MNAAAVPSEIVQSPLPRLKITEIFLSLQGEAEAAGWPTVFVRLTGCPLRCHYCDTVYAFHGGEWHDIDAIVAEVASHGVRHVCVTGGEPLAQKRCLVLLQKLCDAGFDVSLETSGALDASAVDPRVSRVVDIKTPASGEEQRNRWDNLPLLTARDQIKFVICSRADYEWSREIVAAHALDRRCTVWFSPSKSEVTPRQLADWIVADRLPVRFQMQLHKLLWNDEPGR

SEQ ID NO: 35269 - protein, 227 aa, Xanthomonas hortorum; identical to SEQ ID NO: 35267
  misc_feature (1)..(227): tr|A0A248YFD8|A0A248YFD8_9XANT 7-carboxy-7-deazaguanine synthase OS=Xanthomonas hortorum OX=56454 GN=queE PE=3 SV=1

SEQ ID NO: 35270 - protein, 225 aa, Xanthomonas hyacinthi
  misc_feature (1)..(225): tr|A0A2S7ESX9|A0A2S7ESX9_9XANT 7-carboxy-7-deazaguanine synthase OS=Xanthomonas hyacinthi OX=56455 GN=queE PE= 3 SV=1
MAAVPSDIVQSPLPRLKLTEIFLSLQGEADSAGWPTVFVRLTGCPLRCSYCDTAYAFHGGQWWDIDAILAEVARHGVRHVCVTGGEPLAQKRCLRLLQQLCDAGYDVSLETSGALDIAEVDPRVSRVLDIKTPASREAARNRWENLPLLTARDQIKFVLCGRADYDWARALVAEHRLHERCTVWFSPSKSELAPRELADWIVADRLPVRFQMQLHKLLWNDEPGR

SEQ ID NO: 35271 - protein, 226 aa, Xanthomonas manihotis
  misc_feature (1)..(226): tr|A0A0W7YL80|A0A0W7YL80_XANMN 7-carboxy-7-deazaguanine synthase OS=Xanthomonas manihotis OX=43353 GN=queE PE= 3 SV=1
MNAAVPSEIVQSPLPRLKITEIFLSLQGEADAAGWPTVFVRLTGCPLRCLYCDTAYAFHGGQWHYIDAIVAEVASHGVRHVCVTGGEPLAQKRCLVLLEKLCDAGYDVSLETSGALDVSAVDPRVSRVVDIKTPASGEQARNRWENLPLLTARDQIKFVICSRADYEWSREIVAAHALDRRCTVWFSPSKSEVSARQLADWIVADRLPVRFQMQLHKLLWNDEPGR

SEQ ID NO: 35272 - protein, 227 aa, Xanthomonas melonis
  misc_feature (1)..(227): tr|A0A2S7DHP0|A0A2S7DHP0_9XANT 7-carboxy-7-deazaguanine synthase OS=Xanthomonas melonis OX=56456 GN=queE PE=3 SV=1
MNAAAVPSEIVQSPLPRLKITEIFLSLQGEAEAAGWPTVFVRLTGCPLRCQYCDTAYAFHGGQWHDIDAILADVARHGVRHVCVTGGEPLAQKRCLVLLQKLCDAGFDVSLETSGALDVSEVDPRVSRIVDIKTPASGEQHRNRWDNLPLLTARDQIKFVICNRADYDWSREIVAAHALDRRCTVWFSPSKSEVTPRELADWIVADRLPVRFQMQLHKILWNDEPGR

SEQ ID NO: 35273 - protein, 227 aa, Xanthomonas nasturtii
  misc_feature (1)..(227): tr|A0A3E1KNL8|A0A3E1KNL8_9XANT 7-carboxy-7-deazaguanine synthase OS=Xanthomonas nasturtii OX=1843581 GN=queE P E=3 SV=1
MNAAAVPSEIVQSPLPRLKITEIFLSLQGEAEAAGWPTVFVRLTGCPLRCLYCDTAYAFHGGQWHDIDAIVAEVASHGVRHVCVTGGEPLAQKRCLVLLQKLCDAGFDVSLETSGALDVSAVDPRVSRVVDIKTPASGEEARNRWENLPLLTARDQIKFVICSRADYEWSREIVAAHALDRRCTVWFSPSKSEVTPRQLADWIVADRLPVRFQMQLHKLLWNDEPGR

SEQ ID NO: 35274 - protein, 227 aa, Xanthomonas oryzae
  misc_feature (1)..(227): tr|A0A346MG41|A0A346MG41_XANOO 7-carboxy-7-deazaguanine synthase OS=Xanthomonas oryzae pv. oryzae OX=64187 GN= queE PE=3 SV=1
MNAAIVPSEIIQSPLPRLKITEIFLSLQGEAEAAGWPTVFVRLTGCPLRCVYCDTAYAFHGGEWHDIDDVLAEVATHGVRHVCVTGGEPLAQKRCLVLLQKLCDAGYDVSLETSGALDVSAVDPRVSRVVDIKTPASGEEARNRWENLLLLTARDQIKFVICSRADYEWSREIVAAHALDRRCTVWFSPSKSEVGPRQLADWIVADRLPVRFQMQLHKLLWNDEPGR

SEQ ID NO: 35275 - protein, 227 aa, Xanthomonas oryzae
  misc_feature (1)..(227): tr|A0A0C5UX51|A0A0C5UX51_9XANT 7-carboxy-7-deazaguanine synthase OS=Xanthomonas oryzae pv. oryzicola OX=129394 GN=queE PE=3 SV=1
MNAATVPSEIIQSPLLRLKITEIFLSLQGEAEAAGWPTVFVRLTGCPLRCVYCDTAYAFHGGEWHDIDDVLAEVATHGVRHVCVTGGEPLAQKRCLVLLQKLCDAGYDVSLETSGALDVSAVDPRVSRVVDIKTPASGEEARNRWENLPLLTARDQIKFVICSRADYEWSREIVAAHALDRRCTVWFSPSKSEVGPRQLADWIVADRLPVRFQMQLHKLLWNDEPGR

SEQ ID NO: 35276 - protein, 227 aa, Xanthomonas perforans; identical to SEQ ID NO: 35248
  misc_feature (1)..(227): tr|A0A0G9CWK6|A0A0G9CWK6_9XANT 7-carboxy-7-deazaguanine synthase OS=Xanthomonas perforans OX=442694 GN=queE PE =3 SV=1

SEQ ID NO: 35277 - protein, 226 aa, Xanthomonas phaseoli
  misc_feature (1)..(226): tr|A0A1V9H4B2|A0A1V9H4B2_9XANT 7-carboxy-7-deazaguanine synthase OS=Xanthomonas phaseoli pv. syngonii LMG 9055 OX=1437878 GN=queE PE=3 SV=1
MNAAVPSEIVQSPLPRLKITEIFLSLQGEADAAGWPTVFVRLTGCPLRCLYCDTAYAFHGGQWHDIDAIVAEVASHGVRHVCVTGGEPLAQKRCLILLEKLCDAGYDVSLETSGALDVSAVDPRVSRVVDIKTPASGEQARNRWENLPLLTARDQIKFVICSRADYEWSREIVAAHALDRRCTVWFSPSKSEVSPRQLADWIVADRLPVRFQMQLHKLLWNDEPGR

SEQ ID NO: 35278 - protein, 226 aa, Xanthomonas phaseoli
  misc_feature (1)..(226): tr|A0A0Q0EHM6|A0A0Q0EHM6_9XANT 7-carboxy-7-deazaguanine synthase OS=Xanthomonas phaseoli pv. dieffenbachiae OX =92828 GN=queE PE=3 SV=1
MNAAVPSEIVQSPLPRLKITEIFLSLQGEADAAGWPTVFVRLTGCPLRCLYCDTAYAFHGGQWHDIDAIVAEVASHGVRHVCVTGGEPLAQKRCLLLLEKLCDAGYDVSLETSGALDVSAVDPRVSRVVDIKTPASGEQARNRWENLPLLTARDQIKLVICSRADYEWSREVVAAHGLDRRCTVWFSPSKSEVSARQLADWIVADRLPVRFQMQLHKLLWNDEAGR

SEQ ID NO: 35279 - protein, 227 aa, Xanthomonas pisi
  misc_feature (1)..(227): tr|A0A2S7CRG2|A0A2S7CRG2_9XANT 7-carboxy-7-deazaguanine synthase OS=Xanthomonas pisi OX=56457 GN=queE PE=3 SV= 1
MNAAAVPSEIVQSPLPRLKITEIFLSLQGEAEAAGWPTVFVRLTGCPLRCTYCDTAYAFHGGQWHDIDAIVAEVASHGVRHVCVTGGEPLAQKRCLVLLQKLCDAGFDVSLETSGALDVSEVDARVSRVVDIKTPASGEAQRNRWDNLPLLTARDQIKFVICSRADYEWSREIVATHALERRCTVWFSPSKGEVTPRELADWIVADRLPVRFQMQLHKILWDDEPGR

SEQ ID NO: 35280 - protein, 227 aa, Xanthomonas populi
  misc_feature (1)..(227): tr|A0A2S7EZG3|A0A2S7EZG3_9XANT 7-carboxy-7-deazaguanine synthase OS=Xanthomonas populi OX=53414 GN=queE PE=3 S V=1
MNVAAVPSVIVQSPLPRLKVTEIFLSLQGEADAAGWPTVFVRLTGCPLRCHYCDTAYAFHGGEWNDINAIVAEVASHGVRHVCVTGGEPLAQKRCLVLLQKLCDAGFDVSLETSGALDVSAVDPRVSRVVDIKTPASGEEQRNRWDNVPLLTARDQIKFVICSRTDYEWSRELVAAHALDRRCTVWFSPSKSEVTPRQLADWIVADRLPVRFQMQLHKLLWNDEPGR

SEQ ID NO: 35281 - protein, 227 aa, Xanthomonas prunicola
  misc_feature (1)..(227): tr|A0A2N3RNG7|A0A2N3RNG7_9XANT 7-carboxy-7-deazaguanine synthase OS=Xanthomonas prunicola OX=2053930 GN=queE P E=3 SV=1
MNAAAVPSEIIQSPLPRLKITEIFLSLQGEAEAAGWPTVFVRLTGCPLRCLYCDTAYAFHGGEWHDIDAIVAEVASHGVRHVCVTGGEPLAQKRCLVLLQKLCDAGYDVSLETSGALDVSAVDPRVSRVVDVKTPASGEEARNRWENLPLLTARDQIKFVICSRADYDWSREIVAAHALHRRCTVWFSPSKSEVSPRQLADWIVADRLPVRFQMQLHKLLWNDEPGR

SEQ ID NO: 35282 - protein, 225 aa, Xanthomonas sacchari
  misc_feature (1)..(225): tr|A0A0A8DRT3|A0A0A8DRT3_9XANT 7-carboxy-7-deazaguanine synthase OS=Xanthomonas sacchari OX=56458 GN=queE PE=3 SV=1
MAAVPSDIVQSPLPRLKLTEIFLSLQGEAESAGWPTVFVRLTGCPLRCSYCDTAYAFHGGQWWDIDAILEEVARHGVRHVCVTGGEPLAQKRCLQLLQRLCDAGYDVSLETSGALDIAEVDPRVSRVLDIKTPASQEAHRNRWENLPLLTARDQIKFVLCGRADYEWARAVVAEHRLDTRCTVWFSPSKSELTARDLADWIVADRLPVRFQMQLHKLLWNDEPGR

SEQ ID NO: 35283 - protein, 225 aa, Xanthomonas sacchari
  misc_feature (1)..(225): tr|A0A2P5Z321|A0A2P5Z321_9XANT 7-carboxy-7-deazaguanine synthase OS=Xanthomonas sacchari OX=56458 GN=queE PE=3 SV=1
MAAVPSDIVQSPLPRLKLTEIFLSLQGEAESAGWPTVFVRLTGCPLRCSYCDTAYAFHGGQWWYIDAILDEVARHGVRHVCVTGGEPLAQKRCLQLLQRLCDAGYDVSLETSGALDIAEVDPRVSRVLDIKTPASQEAHRNRWENLPLLTARDQIKFVLCGRADYEWARSVVAEHRLETRCTVWFSPSKSELTARDLADWIVADRLPVRFQMQLHKLLWNDEPGR

SEQ ID NO: 35284 - protein, 227 aa, Xanthomonas sp.
  misc_feature (1)..(227): tr|A0A0Q5GVU4|A0A0Q5GVU4_9XANT 7-carboxy-7-deazaguanine synthase OS=Xanthomonas sp. Leaf131 OX=1736270 GN=queE PE=3 SV=1
MNAAAVPSEIVQSPLPRLKITEIFLSLQGEAEAAGWPTVFVRLTGCPLRCHYCDTAYAFHGGEWHDIDAIVAEVSSHGVRHVCVTGGEPLAQKRCLVLLQKLCDAGFDVSLETSGALDVSAVDPRVSRVVDIKTPASGEEQRNRWDNLPLLTARDQIKFVICSRADYEWSREIVAAHALDRRCTVWFSPSKSEVTPRQLADWIVADRLPVRFQMQLHKLLWNDEPGR

SEQ ID NO: 35285 - protein, 226 aa, Xanthomonas sp.
  misc_feature (1)..(226): tr|A0A3T0G130|A0A3T0G130_9XANT 7-carboxy-7-deazaguanine synthase OS=Xanthomonas sp. ISO98C4 OX=1680158 GN=queE PE=3 SV=1
MNAAVPSEIVQSPLPRLKITEIFLSLQGEADAAGWPTVFVRLTGCPLRCLYCDTAYAFHGGQWHDIDAIVAEVASHGVRHVCVTGGEPLAQKRCLVLLEKLCDAGYDVSLETSGALDVSAVDPRVSRVVDIKTPASGEQARNRWENLPLLTARDQIKFVICSRADYEWSREIVAAHALDRRCTVWFSPSKSEVSARQLADWIVADRLPVRFQMQLHKLLWNDEPGR

SEQ ID NO: 35286 - protein, 225 aa, Xanthomonas theicola
  misc_feature (1)..(225): tr|A0A2S6ZLS5|A0A2S6ZLS5_9XANT 7-carboxy-7-deazaguanine synthase OS=Xanthomonas theicola OX=56464 GN=queE PE=3 SV=1
MAAVPSDIVQSPLPRLKLTEIFLSLQGEADSAGWPTVFVRLTGCPLRCSYCDTAYAFHGGQWWDIGAILAEVARHGVRHVCVTGGEPLAQKRCLHLLRQLCDAGYDVSLETSGALDIAEVDPRVSRVLDIKTPASQEAQRNRWENLPLLTVRDQIKFVLCSRADYDWARAIVAEHRLHERCTVWFSPSKSELAPRDLADWIVADRLPVRFQMQLHKLLWNDEPGR

SEQ ID NO: 35287 - protein, 225 aa, Xanthomonas translucens
  misc_feature (1)..(225): tr|A0A1M4IE73|A0A1M4IE73_XANCT 7-carboxy-7-deazaguanine synthase OS=Xanthomonas translucens pv. graminis OX=13 4874 GN=queE PE=3 SV=1
MAAVPSDIVQSPLPRLKLTEIFLSLQGEADSAGWPTVFVRLTGCPLRCSYCDTAYAFHGGQWWDIDAILAEVARHGVRHVCVTGGEPLAQKRCLRLLEQLCDAGYDVSLETSGALDIADVDPRVSRVLDIKTPASQEAQRNRWENLPLLSARDQIKFVLCGRADYDWARAIVAEHRLHERCTVWFSPSKSELAPRELADWIVADRLPVRFQMQLHKLLWNDEPGR

SEQ ID NO: 35288 - protein, 225 aa, Xanthomonas translucens
  misc_feature (1)..(225): tr|A0A514E9D1|A0A514E9D1_XANCT 7-carboxy-7-deazaguanine synthase OS=Xanthomonas translucens pv. cerealis OX=15 2263 GN=queE PE=3 SV=1
MAAVPSEIVQSPLPRLKLTEIFLSLQGEADSAGWPTVFVRLTGCPLRCSYCDTAYAFHGGQWWDIDAILAEVARHGVRHVCVTGGEPLAQKRCLRLLEQLCDAGYDVSLETSGALDIADVDPRVSRVLDIKTPASQEAQRNRWENLPLLSARDQIKFVLCGRADYDWARAIVAEHRLHERCTVWFSPSKSELAPRELADWIVADRLSVRFQMQLHKLLWNDEPGR

SEQ ID NO: 35289 - protein, 227 aa, Xanthomonas vasicola
  misc_feature (1)..(227): tr|A0A0A3FYP5|A0A0A3FYP5_XANVA 7-carboxy-7-deazaguanine synthase OS=Xanthomonas vasicola OX=56459 GN=queE PE=3 SV=1
MNAAAVPSEIIQSPLPRLKITEIFLSLQGEAEAAGWPTVFVRLTGCPLRCLYCDTAYAFHGGEWHDIDAIVAEVARHGVRHVCVTGGEPLAQKRCLVLLQKLCDAGYDVSLETSGALDVSAVDPRVSRVVDIKTPASGEEARNRWENLPLLTARDQIKFVICSRADYEWSREIVAAHALDRRCTVWFSPSKSEVSPRQLADWIVADRLPVRFQMQLHKLLWNDEPGR

SEQ ID NO: 35290 - protein, 227 aa, Xanthomonas vesicatoria
  misc_feature (1)..(227): tr|F0B8L2|F0B8L2_9XANT 7-carboxy-7-deazaguanine synthas e OS=Xanthomonas vesicatoria ATCC 35937 OX=925775 GN=qu eE PE=3 SV=1
MNAAAVPSEIVQSPLPRLKITEIFLSLQGEAEAAGWPTVFVRLTGCPLRCNYCDTAYAFHGGQWHDIDAIVAEVASHGVRHVCVTGGEPLAQKRCLVLLQKLCDAGFDVSLETSGALDVSEVDTRVSRVVDIKTPASGEEQRNRWDNLALLTARDQIKFVICSRADYEWSRGIVAAHALERRCTVWFSPSKGEVPPRQLADWIVSDRLPVRFQMQLHKILWDDEPGR

SEQ ID NO: 35291 - protein, 227 aa, Xanthomonas vesicatoria; identical to SEQ ID NO: 35290
  misc_feature (1)..(227): tr|A0A1L5QQS1|A0A1L5QQS1_9XANT 7-carboxy-7-deazaguanine synthase OS=Xanthomonas vesicatoria OX=56460 GN=queE P E=3 SV=1

SEQ ID NO: 35292 - protein, 208 aa, Xenococcus sp.
  misc_feature (1)..(208): tr|L8LZ56|L8LZ56_9CYAN 7-carboxy-7-deazaguanine synthas e OS=Xenococcus sp. PCC 7305 OX=102125 GN=queE PE=3 SV= 1
MSGQNAIATNNRNYPIVETFHSVQGEGYWTGANAFFIRLGGCDVHCPWCDTKESWNPERHPQYYVADLAKIAQQTKTEIVIVTGGEPLMHDLLPLTTAIKELGMAVHLETSGAYPYTGSFDWVTFSPKQFKSPHPSIYKHANEIKVVITSEYDLKWAEQQSALVPTQTLKYLQPEWNTPKSKEIIFNYVRNNPQWRISLQTHKMLHIK

SEQ ID NO: 35293 - protein, 211 aa, Xenophilus sp.
  misc_feature (1)..(211): tr|A0A254VF28|A0A254VF28_9BURK 7-carboxy-7-deazaguanine synthase OS=Xenophilus sp. AP218F OX=2014876 GN=queE P E=3 SV=1
MSTYTVKEIFYTLQGEGRQAGRAAVFCRFAGCNLWSGREEDRAKAVCRFCDTDFVGVGPDGGKFASAAELAARIAGEWPEDAGGARYVVCTGGEPLLQLDEALIDALHAEGFEVAVETNGTVAAPRGLDWICVSPKAGAELKLLAGDELKLVYPQAAQLPESVAHLDFATFYLQPMDGPELAANTRAAIAYCLAHPKWRLSVQTHKVVNIR

SEQ ID NO: 35294 - protein, 223 aa, Xenorhabdus beddingii
  misc_feature (1)..(223): tr|A0A1Y2SS62|A0A1Y2SS62_9GAMM 7-carboxy-7-deazaguanine synthase OS=Xenorhabdus beddingii OX=40578 GN=queE PE= 3 SV=1
MIYPINEIFQTLQGEGVFTGVPSVFIRLQGCPVGCSWCDTKHTWEKEADKQQPMENILLKSQDSDIWGIATARQLLNIFTRQGYSARHIVITGGEPCLYDLRPLTETLESEGYRCQIETSGTHAIQCTDKTWVTVSPKVKMRGGYRVLPEAMKRADEIKHPVGRERDIEALDELLKMLDGSPVPIIALQPISQKEEATRLCIETCIARNWRFSMQTHKYLNIA

SEQ ID NO: 35295 - protein, 223 aa, Xenorhabdus bovienii
  misc_feature (1)..(223): tr|D3V503|D3V503_XENBS 7-carboxy-7-deazaguanine synthas e OS=Xenorhabdus bovienii (strain SS-2004) OX=406818 GN =ygcF PE=3 SV=1
MIYPINEIFQTLQGEGVFTGVPSVFIRLQGCPVGCSWCDTKHTWEKEADKQQPMENILVKSQDSDTWGAATARQIINLFIRQGYTARHIVVTGGEPCLYNLRPLTETLESEGYQCQIETSGTHAIQCSEKTWVTVSPKVKMRGGYQVLPEAMNRANEIKHPVGRERDIEALDELLTMLDEKADPVIALQPISQKEEATRLCIETCIARNWRFSMQTHKYLNIA

SEQ ID NO: 35296 - protein, 223 aa, Xenorhabdus bovienii
  misc_feature (1)..(223): tr|A0A077P6H1|A0A077P6H1_XENBV 7-carboxy-7-deazaguanine synthase OS=Xenorhabdus bovienii str. oregonense OX=13 98202 GN=ygcF PE=3 SV=1
MIYPINEIFQTLQGEGVFTGVPSVFIRLQGCPVGCSWCDTKHTWEKEADKQQPMENILVKSQDSDTWGAATARQIINLFIRQGYTARHIVVTGGEPCLYDLRPLTEILESEGYQCQIETSGTHAIWCSEKTWVTVSPKVKMRGGYQVLPEAMNRANEIKHPVGRERDIEALDELLTMLDEKADPVIALQPISQKEEATRLCIETCIARNWRFSMQTHKYLNIA

SEQ ID NO: 35297 - protein, 223 aa, Xenorhabdus budapestensis
  misc_feature (1)..(223): tr|A0A2D0J116|A0A2D0J116_XENBU 7-carboxy-7-deazaguanine synthase OS=Xenorhabdus budapestensis OX=290110 GN=que E PE=3 SV=1
MIYPINEMFQTLQGEGVFTGVPSVFIRLQGCPVGCSWCDTKHTWEKEADKQQPMENILVKSQDSDIWGVATPRQIINLFIRQGYTARHVVITGGEPCLYDLRSLTETLEREGYQCQIETSGTHAIYCSDKTWVTVSPKVKMRGGYKVLPDAMKRANEIKHPVGRERDIEALDELLAMLNEGNAPIIALQPISQKEEATRLCIETCIARNWRFSMQTHKYLNIA

SEQ ID NO: 35298 - protein, 223 aa, Xenorhabdus cabanillasii
  misc_feature (1)..(223): tr|W1JB74|W1JB74_9GAMM 7-carboxy-7-deazaguanine synthas e OS=Xenorhabdus cabanillasii JM26 OX=1427517 GN=ygcF P E=3 SV=1
MIYPINEMFQTLQGEGVFTGVPSVFIRLQGCPVGCSWCDTKHTWEKEADKQQPMENILVKSQDSDIWGVATPRQLINLFTRQGYTARHVVITGGEPCLYDLRPLTETLEREGYQCQIETSGTHAIYCSDKTWVTVSPKVKMRGGYKVLPEAMKRANEVKHPVGRERDIEALDELLAMLNEDNAPVIALQPISQKEEATRLCIETCIARNWRFSMQTHKYLNIA

SEQ ID NO: 35299 - protein, 223 aa, Xenorhabdus cabanillasii; identical to SEQ ID NO: 35298
  misc_feature (1)..(223): tr|A0A3D9UCD1|A0A3D9UCD1_9GAMM 7-carboxy-7-deazaguanine synthase OS=Xenorhabdus cabanillasii OX=351673 GN=queE PE=3 SV=1

SEQ ID NO: 35300 - protein, 223 aa, Xenorhabdus doucetiae
  misc_feature (1)..(223): tr|A0A068QYH5|A0A068QYH5_9GAMM 7-carboxy-7-deazaguanine synthase OS=Xenorhabdus doucetiae OX=351671 GN=ygcF PE =3 SV=1
MIYPINEIFQTLQGEGVFTGVPAVFIRLQGCPVGCSWCDTKHTWEKEADKQQPMENILLKSQDSDRWGVANARQLLSIFTRQGYSAKHIVITGGEPCLYDLRPLTETLESAGYQCQIETSGTHVIQCSDNTWVTVSPKVKMRGGYQVLPEAMKRANEIKHPVGRQRDIEALDELLTMLDGNPAPVIALQPISQKEEATRLCIETCIARNWRFSMQTHKYLNIA

SEQ ID NO: 35301 - protein, 223 aa, Xenorhabdus eapokensis
  misc_feature (1)..(223): tr|A0A1Q5TSG9|A0A1Q5TSG9_9GAMM 7-carboxy-7-deazaguanine synthase OS=Xenorhabdus eapokensis OX=1873482 GN=queE PE=3 SV=1
MIYPINEIFQTLQGEGVFTGVPSVFIRLQGCPVGCSWCDTKHTWEKEADKQQPMENILLKSQDSDLWGVASAKQLLNIFTRQGYSAKHIVITGGEPCLYDLRPLTETLESEGYQCQIETSGTHAIQCSDKTWVTVSPKVKMRGGYQVLPEAMKRANEIKHPVGRQRDIEVLDELLIMLDGNPSPVIALQPISQKEDATRLCIETCIARNWRFSMQTHKYLNIA

SEQ ID NO: 35302 - protein, 223 aa, Xenorhabdus ehlersii
  misc_feature (1)..(223): tr|A0A2D0IVH5|A0A2D0IVH5_9GAMM 7-carboxy-7-deazaguanine synthase OS=Xenorhabdus ehlersii OX=290111 GN=queE PE= 3 SV=1
MIYPINEIFQTLQGEGVFTGVPSVFIRLQGCPVGCSWCDTKHTWEKEADKQQPMENILLKSQDSDLWGIATARQLLSIFTRQGYSAKHIVITGGEPCLYDLCPLTETLESEGYQCQIETSGTHTIQCSDKTWVTVSPKVKMRGGYQVLPEAIKRADEIKHPVGRRRDIEALDELLTMLDGNPTPVIALQPISQKEDATRLCIETCIARNWRFSMQTHKYLNIA

SEQ ID NO: 35303 - protein, 223 aa, Xenorhabdus hominickii
  misc_feature (1)..(223): tr|A0A2G0Q4E8|A0A2G0Q4E8_9GAMM 7-carboxy-7-deazaguanine synthase OS=Xenorhabdus hominickii OX=351679 GN=queE P E=3 SV=1
MIYPINEIFQTLQGEGVFTGVPSIFVRLQGCPVGCSWCDTKHTWEKAADKQQPMDNILLKSQDSDIWGVATARQLLNIFTRQNYSARHVVITGGEPCLYDLRPLTETLESEGYQCQIETSGTHTIQCSDKTWVTVSPKVKMRGGYQVLPEAMKRADEIKHPVGRERDIEALDELLTMLDGNPVPVIALQPISQKEEATRLCIETCIARNWRFSMQTHKYLNIA

SEQ ID NO: 35304 - protein, 223 aa, Xenorhabdus innexi
  misc_feature (1)..(223): tr|A0A1N6MTB8|A0A1N6MTB8_9GAMM 7-carboxy-7-deazaguanine synthase OS=Xenorhabdus innexi OX=290109 GN=ygcF PE=3 SV=1
MIYPINEMFQTLQGEGVFTGVPAVFIRLQGCPVGCSWCDTKHTWEKEADKQQTMENILVKTQDSDTWGVATPQQIINLFARQGYTARHIVITGGEPCLYDLRPLTEALENAGYQCQIETSGTHAILCSDNTWVTVSPKVKMRGGYKVLPEAMNRANEIKHPVGRERDIESLDDLLTMLDESNKPVIALQPISQKEEATRLCIETCIARNWRFSMQTHKYLNIA

SEQ ID NO: 35305 - protein, 223 aa, Xenorhabdus ishibashii
  misc_feature (1)..(223): tr|A0A2D0KEL2|A0A2D0KEL2_9GAMM 7-carboxy-7-deazaguanine synthase OS=Xenorhabdus ishibashii OX=1034471 GN=queE PE=3 SV=1
MIYPINEIFQTLQGEGVFTGVPSVFIRLQGCPVGCSWCDTKHTWEKEADKQQPMENILLKSQESNLWGVASAKQLLSIFTRQGYSAKHIVITGGEPCLYDLRPLTETLESEGYQCQIETSGTHAIQCSDKTWVTVSPKVKMRGGYRVLPEAMKRANEIKHPVGRQRDIEALDELLTMLDGNPTPVIALQPISQKEDATRLCIETCIARNWRFSMQTHKYLNIA

SEQ ID NO: 35306 - protein, 223 aa, Xenorhabdus japonica
  misc_feature (1)..(223): tr|A0A1I5A7J7|A0A1I5A7J7_9GAMM 7-carboxy-7-deazaguanine synthase OS=Xenorhabdus japonica OX=53341 GN=queE PE=3 SV=1
MIYPINEIFQTLQGEGVFTGVPSVFIRLQGCPVGCSWCDTKHTWEKETDKQQSMDNILLKSQDSDLWGVATARQLLSIFTRQGYSAKHIVITGGEPCLYDLRPLTETLESEGYQCQVETSGTHTIQCTDKTWVTVSPKVKMRGGYQVLPEAMKRADEIKHPVGRQRDIEALDELLTMLDGNPIPFIALQPISQKEDATRLCIETCIARNWRFSMQTHKYLNIA

SEQ ID NO: 35307 - protein, 223 aa, Xenorhabdus khoisanae
  misc_feature (1)..(223): tr|A0A0J5FN26|A0A0J5FN26_9GAMM 7-carboxy-7-deazaguanine synthase OS=Xenorhabdus khoisanae OX=880157 GN=queE PE =3 SV=1
MIYPINEIFQTLQGEGVFTGVPSVFIRLQGCPVGCSWCDTKHTWEKEADKQQPMENILLKSQDSDIWGVATAKQLLGIFTRQGYSARHIVITGGEPCLYDLRPLTETLESEGYQCQIETSGTHEIQCSEKTWVTVSPKVKMRGGYRVLPEAMKRANEIKHPVGRERDIEALDELLTMLDGNSAPIIALQPISQKEEATRLCIETCIARNWRFSMQTHKYLNIA

SEQ ID NO: 35308 - protein, 223 aa, Xenorhabdus koppenhoeferi
  misc_feature (1)..(223): tr|A0A1I7ESN3|A0A1I7ESN3_9GAMM 7-carboxy-7-deazaguanine synthase OS=Xenorhabdus koppenhoeferi OX=351659 GN=que E PE=3 SV=1
MIYPINEIFQTLQGEGVFTGVPSVFIRLQGCPVGCSWCDTKHTWEKEADKQQPMQNILLKTQDSDLWGVATARQLINIFTRQGYSARHIVITGGEPCLYDLRPLTETLESEGYQCQIETSGTHTILCSDKTWVTISPKVKMRGGCQVLPEAMKRADEIKHPVGRERDIEALDELLTMLDGNPVPIIALQPISQKEEATRLCIETCIARNWRFSMQTHKYLNIA

SEQ ID NO: 35309 - protein, 223 aa, Xenorhabdus kozodoii
  misc_feature (1)..(223): tr|A0A2D0LCH8|A0A2D0LCH8_9GAMM 7-carboxy-7-deazaguanine synthase OS=Xenorhabdus kozodoii OX=351676 GN=queE PE= 3 SV=1
MIYPINEIFQTLQGEGVFTGVPSVFIRLQGCPIGCSWCDTKHTWEKETDKQRPMENILLKSQDSELWGVATAKQLLNIFTRQGYSANHIVITGGEPCLYDLRPLTETLESEGYQCQIETSGTHVIQCSDKTWVTVSPKVKMRGGYHVLPEAIKRANEIKHPVGRQRDIEALDELLTMLDGNSTPVIALQPISQKEEATRLCIETCIARNWRFSMQTHKYLNIA

SEQ ID NO: 35310 - protein, 223 aa, Xenorhabdus mauleonii
  misc_feature (1)..(223): tr|A0A1I3WMZ5|A0A1I3WMZ5_9GAMM 7-carboxy-7-deazaguanine synthase OS=Xenorhabdus mauleonii OX=351675 GN=queE PE =3 SV=1
MIYPINEIFQTLQGEGVFTGVPSVFIRLQGCPVGCSWCDTKHTWEKEPDKQQPMENIILKTQDSDIWGVATAKQLLNLFAQQGYSARHVVITGGEPCLYDLRPLTELFENEGYGCQIETSGTHTILCSDKTWVTVSPKVKMRGGYKVLPEAMKRADEIKHPVGRARDIEALDELLTMLDGNPTPIVALQPISQKEEATRLCIETCIARNWRFSMQTHKYLNIA

SEQ ID NO: 35311 - protein, 223 aa, Xenorhabdus miraniensis
  misc_feature (1)..(223): tr|A0A2D0JTA0|A0A2D0JTA0_9GAMM 7-carboxy-7-deazaguanine synthase OS=Xenorhabdus miraniensis OX=351674 GN=queE PE=3 SV=1
MIYPINEIFQTLQGEGVFTGVPSVFIRLQGCPVGCSWCDTKHTWEKEADKQQPMENILLKSQDSDTWGMATAKQLLGIFTRQGYSARHIVITGGEPCLYDLRPLTETLENEGYQCQIETSGTHEIQCSEKTWVTVSPKVKMRGGYRVLPEAMKRANEIKHPVGRERDIEALDELLTMLDGSSAPIIALQPISQKEEATRLCIETCIARNWRFSMQTHKYLNIA

SEQ ID NO: 35312 - protein, 223 aa, Xenorhabdus nematophila
  misc_feature (1)..(223): tr|D3VBQ4|D3VBQ4_XENNA 7-carboxy-7-deazaguanine synthas e OS=Xenorhabdus nematophila (strain ATCC 19061 / DSM 3 370 / LMG 1036 / NCIB 9965 / AN6) OX=406817 GN=ygcF PE= 3 SV=1
MIYPINEIFQTLQGEGVFTGVPSVFVRLQGCPVGCSWCDTKHTWEKDADKQQVMENILLKTRDSDLWGVATAKQLINIFTRQGYSARHIVITGGEPCLYDLRPLTETLEREGYQCQIETSGTHSIQCSDKTWVTVSPKVKMRGGYKVLPEAMKRADEIKHPVGRERDIEALDELLVMLDGKSSPVIALQPISQKEEATRLCIETCIARNWRFSMQTHKYLHIA

SEQ ID NO: 35313 - protein, 223 aa, Xenorhabdus nematophila; identical to SEQ ID NO: 35312
  misc_feature (1)..(223): tr|A0A0A8NWY8|A0A0A8NWY8_XENNE 7-carboxy-7-deazaguanine synthase OS=Xenorhabdus nematophila str. Websteri OX=1 437826 GN=ygcF PE=3 SV=1

SEQ ID NO: 35314 - protein, 223 aa, Xenorhabdus poinarii
  misc_feature (1)..(223): tr|A0A068R582|A0A068R582_9GAMM 7-carboxy-7-deazaguanine synthase OS=Xenorhabdus poinarii G6 OX=1354304 GN=ygcF PE=3 SV=1
MIYPINEIFQTLQGEGVFTGVPSVFIRLQGCPVGCSWCDTKHTWEKEADKQQPIENILLKSQESDLWGVATAKQLLNIFIHQGYSAKHIVITGGEPCLYDLRPLTATLESEGYQCQIETSGTHVIQCTDKTWVTVSPKVKMRGGYQVLPEALKRADEIKHPVGRQRDIEALDELLTMLDGNPIPVIALQPISQKEDATRLCIETCIARNWRFSMQTHKYLNIA

SEQ ID NO: 35315 - protein, 223 aa, Xenorhabdus sp.
  misc_feature (1)..(223): tr|A0A2D0KYK7|A0A2D0KYK7_9GAMM 7-carboxy-7-deazaguanine synthase OS=Xenorhabdus sp. KJ12.1 OX=1851571 GN=queE PE=3 SV=1
MIYPINEMFQTLQGEGVFTGVPAVFIRLQGCPVGCSWCDTKHTWEKEADKQQSMENILVKSQDSDTWGAATPEQIINLFTRQGYTARHIVITGGEPCLYDLRPLTESLENAGYQCQIETSGTHAIHCTDKTWVTVSPKVKMRGGYKVLPEAMNRANEIKHPVGRERDIESLDDLLTMLDENNRPVIALQPISQKEEATRLCIETCIARNWRFSMQTHKYLNIA

SEQ ID NO: 35316 - protein, 223 aa, Xenorhabdus sp.
  misc_feature (1)..(223): tr|A0A0M0T679|A0A0M0T679_9GAMM 7-carboxy-7-deazaguanine synthase OS=Xenorhabdus sp. GDc328 OX=742178 GN=queE P E=3 SV=1
MIYPINEIFQTLQGEGVFTGVPSVFIRLQGCPIGCSWCDTKHTWEKEADKQQPMENILLKSQDSDLWGVATARQLLNIFTRQGYSAKHIVITGGEPCLYDLRPLTETLETEGYQCQLETSGTHAIQCSDKTWVTVSPKVKMRGGYQVLPEAMKRANEIKHPVGRQRDIEALDELLTMLDGNPTPVIALQPISQKEDATRLCIETCIARNWRFSMQTHKYLNIA

SEQ ID NO: 35317 - protein, 223 aa, Xenorhabdus stockiae; identical to SEQ ID NO: 35315
  misc_feature (1)..(223): tr|A0A2D0KVX2|A0A2D0KVX2_9GAMM 7-carboxy-7-deazaguanine synthase OS=Xenorhabdus stockiae OX=351614 GN=queE PE= 3 SV=1

SEQ ID NO: 35318 - protein, 223 aa, Xenorhabdus szentirmaii
  misc_feature (1)..(223): tr|W1IX10|W1IX10_9GAMM 7-carboxy-7-deazaguanine synthas e OS=Xenorhabdus szentirmaii DSM 16338 OX=1427518 GN=yg cF PE=3 SV=1
MIYPINEIFQTLQGEGVFTGVPSIFIRLQGCPVGCSWCDTKHTWEKESDKQRPMESILLKSEESDLWGVATVTQLLNIFTRQGYSARHIVITGGEPCLYDLRPLTETLENNGYQCQIETSGTHSILCSEKTWVTLSPKVKMRGGYRVLPESMKRADEIKHPVGRERDIEALDELLMMLNDDHKPVIALQPISQKEDATRLCIETCIARNWRFSMQTHKYLNIA

SEQ ID NO: 35319 - protein, 223 aa, Xenorhabdus thuongxuanensis
  misc_feature (1)..(223): tr|A0A1Q5U5Z3|A0A1Q5U5Z3_9GAMM 7-carboxy-7-deazaguanine synthase OS=Xenorhabdus thuongxuanensis OX=1873484 GN= queE PE=3 SV=1
MIYPINEIFQTLQGEGVFTGVPSVFIRLQGCPVGCSWCDTKHTWEKEADKQQPMENILLKSQDSDLWGVANAKQLLSIFTRQGYSAKHIVITGGEPCLYDLRPLTETLESEGYQCQIETSGTHVIQCSDRTWVTVSPKVKMRGGYQVLPEAIKRADEIKHPVGRQRDIEALDELLTMLDGNPTPVIALQPISQKEDATRLCIETCIARNWRFSMQTHKYLNIA

SEQ ID NO: 35320 - protein, 223 aa, Xenorhabdus vietnamensis
  misc_feature (1)..(223): tr|A0A1Y2SG72|A0A1Y2SG72_9GAMM 7-carboxy-7-deazaguanine synthase OS=Xenorhabdus vietnamensis OX=351656 GN=queE PE=3 SV=1
MIYPINEIFQTLQGEGVFTGVPSVFIRLQGCPVGCSWCDTKYTWEKVADKQQPIENILLKSQDSDLWGVATARQLLSIFTRQGYSAKHIVITGGEPCLYDLRPLTETLESEGYQCQIETSGTHVIQCTDKTWVTVSPKVKMRGGYKVLPEAMKRADEIKHPVGRQRDIEALDELLTMLDGNPIPVIALQPISQKEDATRLCIETCISRNWRFSMQTHKYLNIA

SEQ ID NO: 35321 - protein, 217 aa, Xylella fastidiosa
  misc_feature (1)..(217): tr|B2I4T9|B2I4T9_XYLF2 7-carboxy-7-deazaguanine synthas e OS=Xylella fastidiosa (strain M23) OX=405441 GN=queE PE=3 SV=1
MNATRSQLKISEIFLSLQGEANSVGWPTVFVRLTGCPLRCQYCDTSYAFHGGEWRSIDTIVNEVRSYGVRHVCVTGGEPLAQKRCLLLLEKLCDAGFEVSLETSGALDIAAVDSRVSRVVDIKTPGSGEAHRNHWPNLTLLTPNDQIKFVLCSRVDYEWARTCVAEHELERRCMVWFSPSKQDIAPTLLADWIISDRLGVRFQLQLHKLLWNDEPGR

SEQ ID NO: 35322 - protein, 217 aa, Xylella fastidiosa; identical to SEQ ID NO: 35321
  misc_feature (1)..(217): tr|A0A060HHH4|A0A060HHH4_XYLFS 7-carboxy-7-deazaguanine synthase OS=Xylella fastidiosa MUL0034 OX=1401256 GN=q ueE PE=3 SV=1

SEQ ID NO: 35323 - protein, 226 aa, Xylella taiwanensis
  misc_feature (1)..(226): tr|Z9JGG0|Z9JGG0_9GAMM 7-carboxy-7-deazaguanine synthas e OS=Xylella taiwanensis OX=1444770 GN=queE PE=3 SV=1
MKSTRSGEIADCALPQLKISEIFLSLQGEANSVGWPTVFVRMTGCPLRCQYCDTAYAFHGGEWRSIDDIVTEVRGYCVRHVCVTGGEPLAQKRCLLLLEKLCDANFEVSLETSGALDIAAVDSRVSRVVDIKTPGSGEVHRNYWPNLTLLTPHDQVKFVLCNRADYEWARACVAKHDLERRCMVWFSPSKQDLAPTVLADWIISDRLGVRFQLQLHKLLWNDEPGR

SEQ ID NO: 35324 - protein, 212 aa, Xylophilus ampelinus
  misc_feature (1)..(212): tr|A0A318SFD2|A0A318SFD2_9BURK 7-carboxy-7-deazaguanine synthase OS=Xylophilus ampelinus OX=54067 GN=queE PE=3 SV=1
MSYAVKEIFYTLQGEGGQAGTPAVFCRFAGCNLWSGREQDRDTAVCRFCDTDFVGTDGTLGGKFATPEALAAQIAALWPAHDRGHRLVVLTGGEPLLQIDAALVDALHAQDFRIAVESNGTLAAPEGIDWLCISPKAGAPWVQTRGQELKLVWPQPGFDLEVLESRTDFRHRFLQPMDGPDQAANIERCIATCLARPAWRLSLQTHKLTGIR

SEQ ID NO: 35325 - protein, 212 aa, Xylophilus sp.
  misc_feature (1)..(212): tr|A0A0Q4H1Z4|A0A0Q4H1Z4_9BURK 7-carboxy-7-deazaguanine synthase OS=Xylophilus sp. Leaf220 OX=1735686 GN=queE PE=3 SV=1
MSYAVKEIFYTLQGEGGQAGTPAVFCRFAGCNLWSGREQDRDTAVCRFCDTDFVGTDGTLGGRFATAEALAAQIAALWPAHDRGHRLVVLTGGEPLLQVDAALVDALHAQDFRIAVESNGTLAAPEGIDWLCISPKAGAPWVQRSGQELKLVWPQPGFDLAMLESQTDFRHRFLQPMDGPDQAANIERCIATCLARPAWRLSLQTHKLTGIR

SEQ ID NO: 35326 - protein, 235 aa, Yangia pacifica
  misc_feature (1)..(235): tr|A0A2U8HEL1|A0A2U8HEL1_9RHOB 7-carboxy-7-deazaguanine synthase OS=Yangia pacifica OX=311180 GN=queE PE=3 SV= 1
MVLRIAEIFGPTIQGEGALIGEPTVFVRAGGCDYRCSWCDSLHAVDSAWRHTWTPMSDDEVWAEVTRLSGGRPITVSLSGGNPAIQDFGPVIEMGRAEGYRFACETQGSVARPWFARLDTLVLSPKPPSSGETVDWDIFAACVAAGQGARQVVMKIVIFDAADYVWAKDAHARHPELPLYLQPGNPEVDPQVPVDPQGLAERLLWLTETATADGWFAARILPQLHVLLWGNKRGV

SEQ ID NO: 35327 - protein, 235 aa, Yangia pacifica
  misc_feature (1)..(235): tr|A0A1I6TQJ6|A0A1I6TQJ6_9RHOB 7-carboxy-7-deazaguanine synthase OS=Yangia pacifica OX=311180 GN=queE PE=3 SV= 1
MGLRIAEIFGPTIQGEGVLIGEPTVFVRAGGCDYRCSWCDSLHAVDSAYRHSWIPMSDEEVWGEVTRLSGGRPITVSLSGGNPAIQDFGPMIEMGRAEGYRFACETQGSVARPWFGRLDTLVLSPKPPSSGETVDWDAFAACVAAGRGARQVVMKIVIFDQRDYDWAKDAHARHPELPLYLQPGNPEVDPDVPVDPQSLADRLLWLTETATADHWFAPRILPQLHVLLWGNKRGV

SEQ ID NO: 35328 - protein, 235 aa, Yangia sp.
  misc_feature (1)..(235): tr|A0A2A3JVD9|A0A2A3JVD9_9RHOB 7-carboxy-7-deazaguanine synthase OS=Yangia sp. SAOS 153D OX=1779329 GN=queE PE =3 SV=1
MVLRIAEIFGPTIQGEGALIGEPTVFVRAGGCDYRCSWCDSLHAVDSAFRHSWTPMSDAEVWAEVTRLSGGRPITVSLSGGNPAIQDFGPVVEMGRAEGYRFACETQGSVARPWFGRLDTLVLSPKPPSSGETVDWDSFADCVAAGQAARQVVMKIVIFDAADYAWAKDAHARHPELPLYLQPGNPEVDPEVPVDPQSLADRLLWLTETATADGWFTPRILPQLHVLLWGNKRGV

SEQ ID NO: 35329 - protein, 235 aa, Yangia sp.
  misc_feature (1)..(235): tr|A0A1B1PMI4|A0A1B1PMI4_9RHOB 7-carboxy-7-deazaguanine synthase OS=Yangia sp. CCB-MM3 OX=1792508 GN=queE PE=3 SV=1
MGLRIAEIFGPTIQGEGALIGEPTVFVRAGGCDYRCSWCDSLHAVDSAFRHTWTPMSDAEVWAEVTRLSGGRPITVSLSGGNPAIQDFGPVIEMGRAEGYRFACETQGSVARGWFGRLDTLVLSPKPPSSGETVDWSAFADCVQAGQGARQTVMKIVIFDEADYAWAKDAHARHPDLPLYLQPGNPEVDPDVPVDPQSLADRLLWLTECATADGWFTPRILPQLHVLLWGNKRGV

SEQ ID NO: 35330 - protein, 225 aa, Yersinia aldovae
  misc_feature (1)..(225): tr|A0A0T9TZD0|A0A0T9TZD0_YERAL 7-carboxy-7-deazaguanine synthase OS=Yersinia aldovae OX=29483 GN=queE PE=3 SV= 1
MQMQYPINEMFQTLQGEGYFTGVPAIFVRLQGCPVGCSWCDTKHTWEKEADREVDMQRIMVKTAESDAWGSASEQQLLDLFIQQGYTARHVVITGGEPAIYDLFPLTSQLEQAGYRCQIETSGTHEVRCSATTWVTVSPKVNMRGGLKVLPQALERADEIKHPVGRLRDIEALEALLETLTDDKKRIIALQPISQKDEATKLCIETCIARNWRLSMQTHKYLNIA

SEQ ID NO: 35331 - protein, 223 aa, Yersinia bercovieri
  misc_feature (1)..(223): tr|A0A2G4U799|A0A2G4U799_YERBE 7-carboxy-7-deazaguanine synthase OS=Yersinia bercovieri OX=634 GN=queE PE=3 SV =1
MLYPINEMFQTLQGEGYFTGVPAIFVRLQGCPVGCSWCDTKHTWEKEADREVDMQRIMVKTAESDAWGSASEQQLLAIFSQQGYTARHVVITGGEPAIYDLLPLTSVLEQAGYSCQIETSGTHEVQCSAATWVTVSPKVKMRGGLKILPQALQRADEIKHPVGRLRDIEALEVLLATLHDDKKRIIALQPISQKDDATKLCIETCIARNWRLSMQTHKYLNIA

SEQ ID NO: 35332 - protein, 223 aa, Yersinia enterocolitica
  misc_feature (1)..(223): tr|A1JJS0|A1JJS0_YERE8 7-carboxy-7-deazaguanine synthas e OS=Yersinia enterocolitica serotype O:8 / biotype 1B (strain NCTC 13174 / 8081) OX=393305 GN=queE PE=3 SV=1
MQYPINEMFQTLQGEGYFTGVPAIFVRLQGCPVGCSWCDTKHTWEKEADREVDMQRIMVKTVESDAWATASEQQLLNIFSQQGYTARHVVITGGEPAIYDLFPLTTQLEQAGYSCQIETSGTHEVQCSAATWVTVSPKVNMRGGLKVLPQALQRADEIKHPVGRLRDIEALEQLLETLTDDKKRIIALQPISQKDEATKLCIETCIAKNWRLSMQTHKYLNIA

SEQ ID NO: 35333 - protein, 223 aa, Yersinia enterocolitica
  misc_feature (1)..(223): tr|A0A3S4IYA5|A0A3S4IYA5_YEREN 7-carboxy-7-deazaguanine synthase OS=Yersinia enterocolitica subsp. enterocolit ica OX=150052 GN=queE PE=3 SV=1
MQYPINEMFQTLQGEGYFTGVPAIFVRLQGCPVGCSWCDTKHTWEKAADREVDMQRIMVKTVENDAWGTASEQQLLDIFLQQGYTARHVVITGGEPAIYDLLPLTSQLEQAGYSCQIETSGTHEVQCSAATWVTVSPKVNMRGGLKILPQALQRADEIKHPVGRLRDIEALEALLATLADDKKRIIALQPISQKEEATKLCIETCIAKNWRLSMQTHKYLNIA

SEQ ID NO: 35334 - protein, 223 aa, Yersinia entomophaga
  misc_feature (1)..(223): tr|A0A3S6F2T7|A0A3S6F2T7_YERET 7-carboxy-7-deazaguanine synthase OS=Yersinia entomophaga OX=935293 GN=queE PE= 3 SV=1
MLYPINEMFQTLQGEGFFTGVPAIFVRLQGCPVGCSWCDTKHTWEKNVDREVDVQRILVKTEESDAWGNASEQQLLTLLRQQGYTARHVVITGGEPCIYDLLPLTTLLEQEGFSCQIETSGTYEVQCSEKTWVTVSPKVNMRGGLKVLEQALTRADEVKHPVGRMRDIEALEALLATLHDNKQRIIALQPISQKEEATRLCIETCIARNWRLSMQTHKYLNIA

SEQ ID NO: 35335 - protein, 223 aa, Yersinia frederiksenii
  misc_feature (1)..(223): tr|A0A0T9TVW5|A0A0T9TVW5_YERFR 7-carboxy-7-deazaguanine synthase OS=Yersinia frederiksenii OX=29484 GN=queE PE =3 SV=1
MQYPINEMFQTLQGEGYFTGVPAIFVRLQGCPVGCSWCDTKHTWEKDADREVDMQRIMVKTAESDAWGTATEQQLLDIFIQQGYTARHVVITGGEPAIYDLFPLTSHLEQAGYSCQIETSGTHEVQCSATTWVTVSPKVNMRGGLKVLPQALQRADEIKHPVGRLRDIEALEALLATLEDDKKRIIALQPISQKEDATKLCIETCIAKNWRLSMQTHKYLNIA

SEQ ID NO: 35336 - protein, 223 aa, Yersinia frederiksenii
  misc_feature (1)..(223): tr|A0A380PY45|A0A380PY45_YERFR 7-carboxy-7-deazaguanine synthase OS=Yersinia frederiksenii OX=29484 GN=queE PE =3 SV=1
MQYPINEMFQTLQGEGYFTGVPAIFVRLQGCPVGCSWCDTKHTWEKDANREVDMQRIMVKTAESDAWGTATEQQLLDIFIQQGYTARHVVITGGEPAIYDLFPLTSHLEQAGYSCQIETSGTHEVQCSATTWVTVSPKVNMRGGLKVLPQALQRADEIKHPVGRLRDIEALEALLATLDDDKKRIIALQPISQKEDATKLCIETCIVKNWRLSMQTHKYLNIA

SEQ ID NO: 35337 - protein, 223 aa, Yersinia hibernica
  misc_feature (1)..(223): tr|A0A481QJI9|A0A481QJI9_9GAMM 7-carboxy-7-deazaguanine synthase OS=Yersinia hibernica OX=2339259 GN=queE PE=3 SV=1
MLYPINEMFQTLQGEGYFTGVPAIFVRLQGCPVGCSWCDTKHTWEKAADREVDMQRIMVKTAESDAWGAASEQQLLDIFHQQGYTARHVVITGGEPAIYDLFPLTSLLEHAGYSCQIETSGTHQVQCSAATWVTVSPKVNMRGGLKILPQALQRADEIKHPVGRLRDIEALEALLVTLTDNKKRIIALQPISQKEEATKLCIETCIAKNWRLSMQTHKYLNIA

SEQ ID NO: 35338 - protein, 223 aa, Yersinia intermedia
  misc_feature (1)..(223): tr|A0A0T9TNP1|A0A0T9TNP1_YERIN 7-carboxy-7-deazaguanine synthase OS=Yersinia intermedia OX=631 GN=queE PE=3 SV =1
MQYPINEMFQTLQGEGYFTGVPAIFVRLQGCPVGCSWCDTKHTWEKEADREVDMQRIMVKTAESDAGETASEQQLLDIFSQQGYTARHVVITGGEPAIYDLFPLTSQLEQAGYSCQIETSGTHEVQCSAATWVTVSPKVNMRGGLKVLPQALQRADEIKHPVGRLRDIEALEQLLETLTDDKKRIIALQPISQKDEATRLCIETCIARNWRLSMQTHKYLNIA

SEQ ID NO: 35339 - protein, 223 aa, Yersinia intermedia
  misc_feature (1)..(223): tr|A0A0U1ERS5|A0A0U1ERS5_YERIN 7-carboxy-7-deazaguanine synthase OS=Yersinia intermedia OX=631 GN=queE PE=3 SV =1
MLYPINEMFQTLQGEGYFTGVPAIFVRLQGCPVGCSWCDTKHTWEKEADREVDMQRIMVKTAESDAWGSASEQQLLDLFAQQGYTARHVVITGGEPSIYDLQPLTSLLEQAGFSCQIETSGTHEVRCSAQTWVTVSPKVNMRGGLKILSQALQRADEIKHPVGRLRDIEALEALLATLDDDKKRIIALQPISQKEDATKLCIETCIAKNWRLSMQTHKYLNIA

SEQ ID NO: 35340 - protein, 223 aa, Yersinia kristensenii
  misc_feature (1)..(223): tr|A0A0T9PJ52|A0A0T9PJ52_YERKR 7-carboxy-7-deazaguanine synthase OS=Yersinia kristensenii OX=28152 GN=queE PE= 3 SV=1
MQYPINEMFQTLQGEGYFTGVPAIFVRLQGCPVGCSWCDTKHTWEKEADREVDMQRIMVKTAESDLWGTASEQQLLDIFRQQGYTARHVVITGGEPAIYDLLPLTSQLEQAGYSCQIETSGTHEVQCSATTWVTVSPKVNMRGGLKVLPQALQRADEIKHPVGRLRDIEALEALLVTLTDDKKRIIALQPISQKEEATKLCIETCIAKNWRLSMQTHKYLNIA

SEQ ID NO: 35341 - protein, 223 aa, Yersinia kristensenii
  misc_feature (1)..(223): tr|A0A0T9LIM7|A0A0T9LIM7_YERKR 7-carboxy-7-deazaguanine synthase OS=Yersinia kristensenii OX=28152 GN=queE PE= 3 SV=1
MQYPINEMFQTLQGEGYFTGVPAIFVRLQGCPVGCSWCDTKHTWEKEADREVDMQRIMVKTAESDLWGTASEQQLLDIFRQQGYTARHVVITGGEPAIYDLLPLTSQLEQAGYSCQIETSGTHEVQCSATTWVTVSPKVNMRGGLKVLPQALQRADEIKHPVGRLRDIEALEVLLVTLTDDKKRIIALQPISQKEDATKLCIETCIAKNWRLSMQTHKYLNIA

SEQ ID NO: 35342 - protein, 223 aa, Yersinia massiliensis
  misc_feature (1)..(223): tr|A0A2R4NTH9|A0A2R4NTH9_9GAMM 7-carboxy-7-deazaguanine synthase OS=Yersinia massiliensis OX=419257 GN=queE PE =3 SV=1
MLYPINEMFQTLQGEGYFTGVPAIFVRLQGCPVGCSWCDTKHTWEKEADREVDMQRIMVKTAESDAWGSATEQQLLDIFAQQGYTARHVVITGGEPSIYDLLPLTFALEQAGYSCQIETSGTHEVRCSAETWVTVSPKVNMRGGLKILPQALQRADEIKHPVARLRDIEALEVLLATLHDDKKRVVALQPISQKDEATKLCIETCIAKNWRLSMQTHKYLNIA

SEQ ID NO: 35343 - protein, 223 aa, Yersinia massiliensis
  misc_feature (1)..(223): tr|A0A0T9NPI1|A0A0T9NPI1_9GAMM 7-carboxy-7-deazaguanine synthase OS=Yersinia massiliensis OX=419257 GN=queE PE =3 SV=1
MLYPINEMFQTLQGEGYFTGVPAIFVRLQGCPVGCSWCDTKHTWEKEADREVDMQRIMVKTAESDAWGSATEQQLLDIFAQQGYTARHVVITGGEPSIYDLLPLTSALEQAGYSCQIETSGTHEVRCSAETWVTVSPKVNMRGGLKILPQALQRADEIKHPVARLRDIEALEVLLATLHDDKKRVVALQPISQKDEATKLCIETCIAKNWRLSMQTHKYLNIA

SEQ ID NO: 35344 - protein, 229 aa, Yersinia mollaretii
  misc_feature (1)..(229): tr|C4SCB4|C4SCB4_YERMW 7-carboxy-7-deazaguanine synthas e OS=Yersinia mollaretii (strain ATCC 43969 / DSM 18520 / CIP 103324 / CNY 7263 / WAIP 204) OX=349967 GN=queE PE=3 SV=1
MTIEILMLYPINEMFQTLQGEGYFTGVPAIFVRLQGCPVGCSWCDTKHTWEKEADREVDMQRIMVKTAESDAWGSATEQQLLDIFSQQGYTARHVVITGGEPSIYDLRPLTSLLEQGGYSCQIETSGTHEVQCSATTWVTVSPKVNMRGGLKVLPQALQRADEIKHPVGRLRDIEALEALLATLHDDKKRIIALQPISQKEDATKLCIETCIAKNWRLSMQTHKYLNIA

SEQ ID NO: 35345 - protein, 223 aa, Yersinia mollaretii
  misc_feature (1)..(223): tr|A0A0U1I5A4|A0A0U1I5A4_YERMO 7-carboxy-7-deazaguanine synthase OS=Yersinia mollaretii OX=33060 GN=queE PE=3 SV=1
MLYPINEMFQTLQGEGYFTGVPAIFVRLQGCPVGCSWCDTKHTWEKEADREVDMQRIMVKTTESDAWGSATEQQLLDIFSQQGYTARHVVITGGEPSIYDLRPLTSLLEQAGYSCQIETSGTHEVQCSAATWVTVSPKVNMRGGLKVLPQALQRADEIKHPVGRLRDIEALEALLATLHDDKKRIIALQPISQKEDATKLCIETCIAKNWRLSMQTHKYLNIA

SEQ ID NO: 35346 - protein, 223 aa, Yersinia nurmii
  misc_feature (1)..(223): tr|A0A0T9LMZ5|A0A0T9LMZ5_9GAMM 7-carboxy-7-deazaguanine synthase OS=Yersinia nurmii OX=685706 GN=queE PE=3 SV= 1
MLYPINEMFQTLQGEGFFTGVPAIFVRLQGCPVGCSWCDTKHTWEKNVDREVDVQRILVKTEESDAWGNASEQQLLTILRQQGYTARHVVITGGEPCIYDLLPLTTLLEQEGFSCQIETSGTYEVQCSEKTWVTVSPKVNMRGGLKVLEQALTRADEVKHPVGRMRDIEALDALLATLHDDKQRIIALQPISQKEEATRLCIETCIARNWRLSMQTHKYLNIA

SEQ ID NO: 35347 - protein, 223 aa, Yersinia pekkanenii
  misc_feature (1)..(223): tr|A0A0T9PY24|A0A0T9PY24_9GAMM 7-carboxy-7-deazaguanine synthase OS=Yersinia pekkanenii OX=1288385 GN=queE PE= 3 SV=1
MRYPINEMFQTLQGEGYFTGVPAIFVRLQGCPVGCSWCDTKHTWEKDADREVDMQRIMVKTAESDVWGEASAQQLLDIFSQQGYTARHVVITGGEPAIYDLFPLTSLLEQAGYSCQIETSGTHDVRCSATTWVTVSPKVNMRGGLKVLSQALQRADEIKHPVGRMRDIEALEVLLATLDDDKKRIIALQPISQKDDATKLCIETCIAKNWRLSMQTHKYLNIA

SEQ ID NO: 35348 - protein, 223 aa, Yersinia pestis; identical to SEQ ID NO: 35339
  misc_feature (1)..(223): tr|Q0WBS2|Q0WBS2_YERPE 7-carboxy-7-deazaguanine synthas e OS=Yersinia pestis OX=632 GN=queE PE=3 SV=1

SEQ ID NO: 35349 - protein, 223 aa, Yersinia pestis; identical to SEQ ID NO: 35339
  misc_feature (1)..(223): tr|A0A380PGS3|A0A380PGS3_YERPE 7-carboxy-7-deazaguanine synthase OS=Yersinia pestis OX=632 GN=queE PE=3 SV=1

SEQ ID NO: 35350 - protein, 223 aa, Yersinia pseudotuberculosis; identical to SEQ ID NO: 35339
  misc_feature (1)..(223): tr|Q66ED6|Q66ED6_YERPS 7-carboxy-7-deazaguanine synthas e OS=Yersinia pseudotuberculosis serotype I (strain IP3 2953) OX=273123 GN=ygcF PE=3 SV=1

SEQ ID NO: 35351 - protein, 223 aa, Yersinia pseudotuberculosis; identical to SEQ ID NO: 35339
  misc_feature (1)..(223): tr|A0A0H3B6V4|A0A0H3B6V4_YERPY 7-carboxy-7-deazaguanine synthase OS=Yersinia pseudotuberculosis serotype O:3 ( strain YPIII) OX=502800 GN=queE PE=3 SV=1

SEQ ID NO: 35352 - protein, 223 aa, Yersinia rohdei
  misc_feature (1)..(223): tr|A0A0U1HTS6|A0A0U1HTS6_YERRO 7-carboxy-7-deazaguanine synthase OS=Yersinia rohdei OX=29485 GN=queE PE=3 SV=1
MQYPINEMFQTLQGEGYFTGVPAIFVRLQGCPVGCSWCDTKHTWEKAANREVDLQRILVKTAESDAWGNASEQQVLDIFIQQGYTARHVVITGGEPAIYDLRPLTSHLEQAGYSCQIETSGTHAVQCSPTTWVTVSPKVNMRGGMKVLPQALQRADEIKHPVGRLRDIEALELLLQTLDDDKKRIIALQPISQKEDATKLCIETCIAKNWRLSMQTHKYLNIA

SEQ ID NO: 35353 - protein, 223 aa, Yersinia ruckeri
  misc_feature (1)..(223): tr|A0A380QND1|A0A380QND1_YERRU 7-carboxy-7-deazaguanine synthase OS=Yersinia ruckeri OX=29486 GN=queE PE=3 SV= 1
MLYPINEMFQTLQGEGFFTGVPAIFVRLQGCPVGCSWCDTKHTWEKNVDREVDVQRILVKTEESDAWGNASEQQLLAIFRQQGYTARHVVITGGEPCIYDLSPLTTLLEQEGFSCQIETSGTHEVHCSATTWVTVSPKVNMRGGLTVLDQALIRADEIKHPVGRIRDIEALDILLERLHDDKARIIALQPISQKEEATRLCIETCIARNWRLSMQTHKYLNIA

SEQ ID NO: 35354 - protein, 170 aa, Yersinia ruckeri
  misc_feature (1)..(170): tr|A0A0A8VAA1|A0A0A8VAA1_YERRU Queuosine Biosynthesis Q ueE Radical SAM OS=Yersinia ruckeri OX=29486 GN=CSF007_ 3555 PE=4 SV=1
MQRILVKTEESDAWGNASEQQLLAIFRQQGYTARHVVITGGEPCIYDLSPLTTLLEQEGFSCQIETSGTHEVHCSATTWVTVSPKVNMRGGLTVLDQALIRADEIKHPVGRIRDIEALDILLERLHDDKARIIALQPISQKEEATRLCIETCIARNWRLSMQTHKYLNIA

SEQ ID NO: 35355 - protein, 223 aa, Yersinia similis
  misc_feature (1)..(223): tr|A0A0T9NSU9|A0A0T9NSU9_9GAMM 7-carboxy-7-deazaguanine synthase OS=Yersinia similis OX=367190 GN=queE PE=3 SV =1
MLYPINEMFQTLQGEGYFTGVPAIFVRLQGCPVGCSWCDTKHTWEKEADREVDMQRIMVKTAESDAWGSASEQQLLDLFAQQGYTARHVVITGGEPSIYDLLPLTSLLEQAGFSCQIETSGTHEVRCSAQTWVTVSPKVNMRGGLKILPQALQRADEIKHPVGRLRDIEALEALLATLDDDKKRIIALQPISQKEDATKLCIETCIAKNWRLSMQTHKYLNIA

SEQ ID NO: 35356 - protein, 223 aa, Yersinia wautersii
  misc_feature (1)..(223): tr|A0A0E8XEP9|A0A0E8XEP9_9GAMM 7-carboxy-7-deazaguanine synthase OS=Yersinia wautersii OX=1341643 GN=queE PE=3 SV=1
MLYPINEMFQTLQGEGYFTGVPAIFVRLQGCPVGCSWCDTKHTWEKEADREVDMQRIMVKTAESDAWGSASEQQLLDLFAQQGYTARHVVITGGEPSIYDLLPLTSLLEQAGFSCQIETSGTHEVRCSAHTWVTVSPKVNMRGGLKILPQALQRADEIKHPVGRLRDIEALEALLATLDDDKKRIIALQPISQKEDATKLCIETCIAKNWRLSMQTHKYLNIA

SEQ ID NO: 35357 - protein, 223 aa, Yersiniaceae bacterium
  misc_feature (1)..(223): tr|A0A2N5EKA9|A0A2N5EKA9_9GAMM 7-carboxy-7-deazaguanine synthase OS=Yersiniaceae bacterium 2016Iso3 OX=2060066 GN=queE PE=3 SV=1
MQYPINEMFQTLQGEGYFTGVPAIFVRLQGCPVGCSWCDTKHTWDKLADREVALDEILVKTTETDAWGAASTEDLLAVIERNGYTARHIVITGGEPCIHDLGPLTLLMEKSGFTCQIETSGTHEVRCSPNTWVTVSPKVNMRGGMEVLDQALKRADEIKHPVARERDIEALDALLAKLHDDKYRVVALQPISQKEDATRLCIETCIARNWRLSMQTHKYLNIA

SEQ ID NO: 35358 - protein, 223 aa, Yersiniaceae bacterium
  misc_feature (1)..(223): tr|A0A2N5E9J3|A0A2N5E9J3_9GAMM 7-carboxy-7-deazaguanine synthase OS=Yersiniaceae bacterium 2016Iso4 OX=2060068 GN=queE PE=3 SV=1
MQYPINEMFQTLQGEGYFTGVPAIFIRLQGCPVGCSWCDTKHTWDKLADREVALDEILVKTTETDAWGAATTEDLLAVIERNGYTARHIVITGGEPCIHDLGPLTLLLEKSGFTCQIETSGTHDVRCSPNTWVTVSPKVNMRGGMEVLDQALKRADEIKHPVARERDIEALDALLARLHDDKYRVVALQPISQKEDATRLCIETCIARNWRLSMQTHKYLNIA

SEQ ID NO: 35359 - protein, 223 aa, Yokenella regensburgei
  misc_feature (1)..(223): tr|A0A2X2QC34|A0A2X2QC34_9ENTR 7-carboxy-7-deazaguanine synthase OS=Yokenella regensburgei OX=158877 GN=queE P E=3 SV=1
MQYPINEMFQTLQGEGYFTGVPAIFIRLQGCPVGCAWCDTKHTWDKLSDREVSLFSILAKTKESDKWGAGSADDLLAIIGRQGWTARHVVITGGEPCIHDLTPLTTLLEQNGYSCQIETSGTHEVRCSPETWVTVSPKVNMRGGYDVLEQALLRADEIKHPVGRVRDIEALDELLATLRDDKARIIALQPISQKEDATRLCIETCIARNWRLSMQTHKYLNIA

SEQ ID NO: 35360 - protein, 225 aa, Yokenella regensburgei
  misc_feature (1)..(225): tr|G9Z3N2|G9Z3N2_9ENTR 7-carboxy-7-deazaguanine synthas e OS=Yokenella regensburgei ATCC 43003 OX=1002368 GN=qu eE PE=3 SV=1
MTMQYPINEMFQTLQGEGYFTGVPAIFIRLQGCPVGCAWCDTKHTWDKLSDREVSLFSILAKTKESDKWGAGSADDLLAIIGRQGWTARHVVITGGEPCIHDLTPLTTLLEQNGYSCQIETSGTHEVRCSPETWVTVSPKVNMRGGYDVLEQALLRADEIKHPVGRVRDIEALDELLATLRDDKARIIALQPISQKEDATRLCIETCIARNWRLSMQTHKYLNIA

SEQ ID NO: 35361 - protein, 235 aa, Yoonia maritima
  misc_feature (1)..(235): tr|A0A2T0VT72|A0A2T0VT72_9RHOB 7-carboxy-7-deazaguanine synthase OS=Yoonia maritima OX=1435347 GN=queE PE=3 SV =1
MTLRIAEIFGPTIQGEGALIGEPTVFIRAGGCDYRCVWCDSMHAVDSANRHDWHVMEPVEVWKEVAQLSGGRPLTVSISGGNPAIQDFGPVIALGKADGYKFACETQGSIAKPWFGDLDTLVLSPKPPSSEETVDWAAFDKCLSAAEGGPEIVMKIVIFDDEDYAWAKAASEKYPYLPLYLQPGNSEVDPNEPVDLTATIDRLHWLIEKVTADRWFTPRVLPQLHVLVWGNKRGV

SEQ ID NO: 35362 - protein, 236 aa, Yoonia sediminilitoris
  misc_feature (1)..(236): tr|A0A2T6KC29|A0A2T6KC29_9RHOB 7-carboxy-7-deazaguanine synthase OS=Yoonia sediminilitoris OX=1286148 GN=queE PE=3 SV=1
MSQLRIAEIFGPTIQGEGALIGEPTVFVRTGGCDYRCTWCDSLHAVDTAYRQTWAVMPTDAVWQEVQRLSKGNPLTVSLSGGNPAIQDFTQLIALGHAKGYRFACETQGSIAKPWFSVLDTLVLSPKPPSSGETVDWTAFNACLQAATGAGKIVMKIVVFDDTDYAWARAAADKYPDLPLYLQPGNLEVDPEIAVDPQNLADKLLWLVDKTIADNWFVPRVLPQLHVLLWGNKRGV

SEQ ID NO: 35363 - protein, 239 aa, Yoonia vestfoldensis
  misc_feature (1)..(239): tr|A0A1Y0E734|A0A1Y0E734_9RHOB 7-carboxy-7-deazaguanine synthase OS=Yoonia vestfoldensis OX=245188 GN=queE PE= 3 SV=1
MTALRIAEIFGPTIQGEGALIGAPTVFVRAGGCDYRCSWCDSLHAVDSEYRHDWAKMTTDDIWAKVWDLSGGTPLTVSLSGGNPAIQNFGPLMSMGHAQGYKFALETQGSVAQDWFENLDLLVLSPKPPSSGETVDWDKFDDCLAQAKTARTVLKIVIFDEVDYNWARDVAGRYAALPLYLQPGNHTPPPPDAQDAVIDIDGIIDRMQWLVDKTLGDRWFTPHILPQLHTLIWGNKRGV

SEQ ID NO: 35364 - protein, 217 aa, Zavarzinia sp.
  misc_feature (1)..(217): tr|A0A317ECD5|A0A317ECD5_9PROT 7-carboxy-7-deazaguanine synthase OS=Zavarzinia sp. HR-AS OX=2211142 GN=queE PE =3 SV=1
MPYAVKELFPTLQGEGAQAGRAAVFCRFAGCNLWSGREADRAEATCRFCDTDFVGTDGEGGGKFPDAETLAAAIEACWGEERAYRYVVFTGGEPLLQLDEELIEAMHGRGFEIAIETNGTTRPPSGIDWICVSPKAGANWSLRRGDELKLVFPQAGLMPEAVEEILKPASGNAFRHYFLQPMDGPDQQRNIAAAADYCRRHPRWRLSLQTHKLIGIP

SEQ ID NO: 35365 - protein, 210 aa, Zeaxanthinibacter enoshimensis
  misc_feature (1)..(210): tr|A0A4R6TIP6|A0A4R6TIP6_9FLAO 7-carboxy-7-deazaguanine synthase OS=Zeaxanthinibacter enoshimensis OX=392009 G N=queE PE=3 SV=1
MVTTTILEQVDKGLMLPLMEEFYTIQGEGFHKGTAAYFIRVGGCDVGCHWCDVKESWNAETHPPTAIEQIVENAAKYSKTIVVTGGEPLTWDMGPLTRALKDKGLQIHIETSGAYELTGQWDWICLSPKKNKLPEGPVYDKANELKVIVYNKHDLIFAEEQAAKVNKDCILYLQPEWSVRDKVTPMIVDYVMANPKWKVSLQTHKYLNIP

SEQ ID NO: 35366 - protein, 195 aa, Zetaproteobacteria bacterium
  misc_feature (1)..(195): tr|A0A2A5F7H9|A0A2A5F7H9_9PROT 7-carboxy-7-deazaguanine synthase OS=Zetaproteobacteria bacterium OX=2026807 GN =queE PE=3 SV=1
MPCTFVRLAGCPLRCTYCDTLQAIPFDSGTAMSLDSIVEQVAALSNPLVLVTGGEPLAQKSCISLLQRLCDVMPMVQLETSGALDTSWVPKQVRKIIDVKTPGSGEVKRNRWANLESLQPDDEIKFVLTSRDDYEWSRHLVQTRLQHLPTICLFSPSWGKLDAADLCRWILEDHLPVRLQIQMHKVIWGADKQGV

SEQ ID NO: 35367 - protein, 207 aa, Zetaproteobacteria bacterium
  misc_feature (1)..(207): tr|A0A3M1I0Q6|A0A3M1I0Q6_9PROT 7-carboxy-7-deazaguanine synthase OS=Zetaproteobacteria bacterium OX=2026807 GN =queE PE=3 SV=1
MPCTLVRLAGCPLRCRYCDTPEALPVRSGTEVAIDAIVEEIERRNRPSVLITGGEPLAQKHTRTLLARLAERPRPVLLETAGAHPIADLPRPVHVILDIKTPGSGEVSRNRWENIEHLKPGDEIKFVLTDREDFDWMCRVIAERRLDRLGVPILASPAMPMLSPAQLARWILDARAPVRLQLQLHKYIWPTGEEGSAHLKPRSFAHR

SEQ ID NO: 35368 - protein, 216 aa, Zhongshania aliphaticivorans
  misc_feature (1)..(216): tr|A0A127M3L8|A0A127M3L8_9GAMM 7-carboxy-7-deazaguanine synthase OS=Zhongshania aliphaticivorans OX=1470434 GN =queE PE=3 SV=1
MKANTLRITEIFYSLQGESRTLGLPTVFVRLTGCPLRCVYCDTEYAFHGGERRELDDILAEVAQYSPRYICVTGGEPLAQPECLSLLTALCDAGYEVSLETSGALPIEKVDARVSRVMDLKTPASGEMHRNLMDNIPFLTDHDQVKFVLCNREDYDWARFQLDSYQLNKRAGEVLFSPSFGQLSATDLANWIVTDNLPVRFQMQLHKILWNDAAGH

SEQ ID NO: 35369 - protein, 216 aa, Zhongshania sp.
  misc_feature (1)..(216): tr|A0A3N0CSS2|A0A3N0CSS2_9GAMM 7-carboxy-7-deazaguanine synthase OS=Zhongshania sp. DSW25-10 OX=2304603 GN=que E PE=3 SV=1
MNANTLRITEIFYSLQGESRTLGLPTVFVRLTGCPLRCVYCDTEYAFHGGERRQLDDILKEVASYKPRYVCVTGGEPLAQPECHTLLSALCDAGYQVSLETSGALSVAQVDPRVSKVMDLKTPASGEVHRNLMDNIAFITAHDQIKFVLCDREDYDWARFQLDTHKLSEKAGEVLFSPSFGQLSATDLANWIVEDNLPVRFQMQLHKLLWNDAAGH

SEQ ID NO: 35370 - protein, 216 aa, Zhongshania sp.; identical to SEQ ID NO: 35369
  misc_feature (1)..(216): tr|A0A2S4HC79|A0A2S4HC79_9GAMM 7-carboxy-7-deazaguanine synthase OS=Zhongshania sp. ZX-21 OX=2067667 GN=queE P E=3 SV=1

SEQ ID NO: 35371 - protein, 210 aa, Zhouia amylolytica
  misc_feature (1)..(210): tr|A0A1I6U1T1|A0A1I6U1T1_9FLAO 7-carboxy-7-deazaguanine synthase OS=Zhouia amylolytica OX=376730 GN=queE PE=3 SV=1
MITTATMELVEKGEMLPLMEEFYTIQGEGHHTGTAAYFIRVGGCDVGCHWCDVKESWNAETHPPTEITSIVDNAVKYANTIVITGGEPLTWNMDPLTQRLKERGLKTHIETSGAYPLTGVWDWICLSPKKMKLPKEEVYNAADELKVIVYNQHDFKFAEEQAAKVRESCELYLQPEWSRREKMMPEIVDYVMTHPKWKISLQTHKYLNIP

SEQ ID NO: 35372 - protein, 204 aa, Zhouia amylolytica
  misc_feature (1)..(204): tr|W2US77|W2US77_9FLAO 7-carboxy-7-deazaguanine synthas e OS=Zhouia amylolytica AD3 OX=1286632 GN=queE PE=3 SV= 1
MELVEKGEMLPLMEEFYTIQGEGHHTGTAAYFIRVGGCDVGCHWCDVKESWNAETHPPTEITSIVDNAVKYANTIVITGGEPLTWNMDPLTQRLKERGLKTHIETSGAYPLTGVWDWICLSPKKMKLPKEEVYNAADELKVIVYNQHDFKFAEEQAAKVSESCELYLQPEWSRREKMMPEIVDYVMTHPKWKISLQTHKYLNIP

SEQ ID NO: 35373 - protein, 238 aa, Zobellella denitrificans
  misc_feature (1)..(238): tr|A0A231MVE8|A0A231MVE8_9GAMM 7-carboxy-7-deazaguanine synthase OS=Zobellella denitrificans OX=347534 GN=queE PE=3 SV=1
MIAISEIFGPTIQGEGALIGVPTVFVRTGGCDFRCSWCDTLYAVEPRFKADWQPMDASAILAEVNRLSGGAPLLVTLSGGNPALQPLDALLALGHQQGHTFAMETQGSKAQPWFGMLDHLTLSPKPPSSGMAFNRERFEACLAAAGADTQVSLKLVIADEADYRWARALADDYPQLPLYLQPCNPAPATPEQPERETDTQELNARLRWLVDKVTGDRWYRARVLPQLHVLIWNNERGV

SEQ ID NO: 35374 - protein, 245 aa, Zobellella denitrificans
  misc_feature (1)..(245): tr|A0A291HV23|A0A291HV23_9GAMM 7-carboxy-7-deazaguanine synthase OS=Zobellella denitrificans OX=347534 GN=queE PE=3 SV=1
MGGVPAVSIAISEIFGPTIQGEGALIGVPTVFVRTGGCDFRCSWCDTLYAVEPRFKADWQPMAASAILAEVNRLSGGAPLLVTLSGGNPALQPLDALLALGHQQGHTFAMETQGSKAQPWFRMLDHLTLSPKPPSSGMAFNRERFEACLAAAGADTQVSLKLVIADEADYRWARALADDYPQLPLYLQPCNPAPATPEQPERETDTQELNARLRWLVDKVTGDRWYRARVLPQLHVLIWNNERGV

SEQ ID NO: 35375 - protein, 239 aa, Zobellella endophytica
  misc_feature (1)..(239): tr|A0A2P7RBJ1|A0A2P7RBJ1_9GAMM 7-carboxy-7-deazaguanine synthase OS=Zobellella endophytica OX=2116700 GN=queE PE=3 SV=1
MSIAISEIFGPTIQGEGRLIGMPTVFVRTGGCDFRCSWCDTLYAVEPRFKADWRPMDAGGVLAEVNRLSGGEPILVTLSGGNPALQPLTELLRLGHGQGHAFAMETQGSKAQAWFGMLDHLTLSPKPPSSGMAFNRERFEACLAAAGADTQVSLKLVIADEADYRWARALAADYPQLPLVLQPCNPTPATPEQPELTTDPERLNARLRWLVEKVTADRWYRARVLPQLHVLIWNNERGV

SEQ ID NO: 35376 - protein, 238 aa, Zobellella taiwanensis
  misc_feature (1)..(238): tr|A0A2P7RE18|A0A2P7RE18_9GAMM 7-carboxy-7-deazaguanine synthase OS=Zobellella taiwanensis OX=347535 GN=queE P E=3 SV=1
MIAISEIFGPTIQGEGALTGVPTVFVRTGGCDFRCSWCDTLYAVEPRFKADWAPMSAEAIMAEVERLSGGRPLLVTLSGGNPALQPLGELLTLGHAKGYTFAIETQGSKVQDWFTELDHLTLSPKPPSAGMAFSQHRFDACLAAAGAHTQVTLKLVIADEADYQWARDFAARYPQLPLTLQPCNPAPATPDEPERATDLDALNARLRWLVDRVTADGWFEARVLPQLHVIIWNNERGV

SEQ ID NO: 35377 - protein, 210 aa, Zobellia galactanivorans
  misc_feature (1)..(210): tr|G0L659|G0L659_ZOBGA 7-carboxy-7-deazaguanine synthas e OS=Zobellia galactanivorans (strain DSM 12802 / CCUG 47099 / CIP 106680 / NCIMB 13871 / Dsij) OX=63186 GN=qu eE PE=3 SV=1
MVKDEVLQEVEKGMMLPLMEEFYTIQGEGFHKGTAAYFIRVGGCDVGCHWCDVKESWNAETHPPTDIRQITENASKYSDTIVITGGEPLTWNMQPLTDALKAKNLKIHIETSGAYPLTGTWDWICLSPKKNKLPVDEIYEVAHELKVIVYNKHDLIFAEQEAAKVNGKCILYLQPEWSVRDKVTPMIVDYVMQNPKWKVSLQTHKYLNIP

SEQ ID NO: 35378 - protein, 210 aa, Zobellia uliginosa; identical to SEQ ID NO: 35377
  misc_feature (1)..(210): tr|A0A1N7MGL6|A0A1N7MGL6_9FLAO 7-carboxy-7-deazaguanine synthase OS=Zobellia uliginosa OX=143224 GN=queE PE=3 SV=1

SEQ ID NO: 35379 - protein, 219 aa, Zoogloea ramigera
  misc_feature (1)..(219): tr|A0A4Y4CW51|A0A4Y4CW51_ZOORA 7-carboxy-7-deazaguanine synthase OS=Zoogloea ramigera OX=350 GN=queE PE=3 SV=1
MTQSGRTTSLRITEIFHSLQGETSRSGLPTVFVRLTGCPLRCSWCDTEYSFTGGTTRALDDILTEVASHHCPTVCVTGGEPLAQKGCLALLTALCDAGYSVSLETSGALDIAGVDPRVSRIVDLKAPGSGEEARNLLSNIPLLSPHDELKLVLASEADYEWAKARIAEHRLTERCPVLMAPVQGQLKPAELAAWILRDRLPVRMQVQLHKVIWGNEPGR

SEQ ID NO: 35380 - protein, 219 aa, Zoogloea sp.
  misc_feature (1)..(219): tr|A0A5C7KEP3|A0A5C7KEP3_9RHOO 7-carboxy-7-deazaguanine synthase OS=Zoogloea sp. OX=49181 GN=queE PE=3 SV=1
MPSTGRLPTLRITEIFHSLQGETSRAGLPTVFVRLTGCPLRCSWCDTEYAFNGGTTRSLADILSEVASHHCQTVCVTGGEPLSQKNCLPLLTALCDAGYSVSLETSGAIDIAGVDPRVSRIMDLKAPGSGEEARNLLSNIPLLTLRDELKLVLASEADYEWAKARIAEYGLTERCPVLLAPVQGQLRPAELAAWILRDRLPVRMQVQLHKIIWGNEPGR

SEQ ID NO: 35381 - protein, 220 aa, Zoogloeaceae bacteirum
  misc_feature (1)..(220): tr|A0A2S0QQL5|A0A2S0QQL5_9RHOO 7-carboxy-7-deazaguanine synthase OS=Zoogloeaceae bacteirum Par-f-2 OX=2080469 GN=queE PE=3 SV=1
MNTAPGRNTRLRLTEIFASVQGESTRVGLPTVFVRLTGCPLRCVWCDTAYAFSGGQFYPIDDIVRQVAAFGLRHVCVTGGEPLAQQGCPTLLTALCDAEFDVSLETSGALDISTVDPRVARIMDLKAPGSGEAAKNRWANIDQLRRGDEIKIVIADEADYAWAREQIATHRLTERCEVLFSPVAGQLDPAQLAEWIVRDRLPVRFQLQLHKVLWGDARGK

SEQ ID NO: 35382 - protein, 216 aa, Zooshikella ganghwensis
  misc_feature (1)..(216): tr|A0A4P9VW79|A0A4P9VW79_9GAMM 7-carboxy-7-deazaguanine synthase OS=Zooshikella ganghwensis OX=202772 GN=queE PE=3 SV=1
MSEKQLRLTEIFYSLQGETRTAGLPTVFIRLTGCPLRCGYCDTAYAFSGGQLWSFETIMAEVQQYHPHYVTVTGGEPLAQPNCLPLLKLLADAGYEVSLETSGAMPIEHVDSRIVVVMDLKTPSSGELQRNSYSNIKYLKPQDQVKFVIGSQEDYQWAVFKLDEYNLADRVSDVLFSPVHHQLEPRQLAEWILADRLPVRMQLQLHKYLWNDEPGH

SEQ ID NO: 35383 - protein, 210 aa, Zunongwangia atlantica
  misc_feature (1)..(210): tr|A0A1Y1T5C9|A0A1Y1T5C9_9FLAO 7-carboxy-7-deazaguanine synthase OS=Zunongwangia atlantica 22II14-10F7 OX=1185 767 GN=queE PE=3 SV=1
MITEETQELVDRGIMLPLMEEFYTIQGEGFHKGTAAYFIRIGGCDVGCHWCDVKESWDAGLHPPTHVGEIVENAVKYSKTIVVTGGEPLTWDMTMLTDNLKKQGCQIHIETSGAYPVTGTWDWICLSPKKIKLPEPDIYPIANELKVIIFNKHDFKFAEEQAAQVGEDCILYMQPEWSNRDKMIPLIVDYVMKNPRWKVSLQTHKYLNIP

SEQ ID NO: 35384 - protein, 210 aa, Zunongwangia mangrovi
  misc_feature (1)..(210): tr|A0A1I1K1H7|A0A1I1K1H7_9FLAO 7-carboxy-7-deazaguanine synthase OS=Zunongwangia mangrovi OX=1334022 GN=queE P E=3 SV=1
MITEETQELVDRGIMLPLMEEFYTIQGEGFHKGTAAYFIRIGGCDVGCHWCDVKESWDAGLHPPTHVGEIVEKAVKYSKTIVVTGGEPLTWDMTTLTDNLKKQGCQIHIETSGAYPVTGTWDWICLSPKKIKLPEPDIYPIANELKVIIFNKHDFKFAEEQAAQVGEGCILYMQPEWSNRDKMIPLIVDYVMKNPRWKVSLQTHKYLNIP

SEQ ID NO: 35385 - protein, 223 aa, Zunongwangia profunda
  misc_feature (1)..(223): tr|D5BLH5|D5BLH5_ZUNPS 7-carboxy-7-deazaguanine synthas e OS=Zunongwangia profunda (strain DSM 18752 / CCTCC AB 206139 / SM-A87) OX=655815 GN=queE PE=3 SV=1
MHHKVKDYISLQAMITEETQELVDRGIMLPLMEEFYTIQGEGYHKGTAAYFIRIGGCDVGCHWCDVKESWNAGLHPPTHVGEIVENALKYSKTIVITGGEPLTWDMTTLTDSLKKQGCQIHIETSGAYPLTGIWDWICLSPKKIKLPEPEIYPVANELKVIIFNKHDFKFAEEQAAQVGEHCILYLQPEWSNREKMIPLIVDYVMRNPKWKVSLQTHKYLNIP

SEQ ID NO: 35386 - protein, 210 aa, Zunongwangia profunda
  misc_feature (1)..(210): tr|A0A3D5J398|A0A3D5J398_9FLAO 7-carboxy-7-deazaguanine synthase OS=Zunongwangia profunda OX=398743 GN=queE PE =3 SV=1
MITEETQELVDRGIMLPLMEEFYTIQGEGYHKGTAAYFIRIGGCDVGCHWCDVKESWNAGLHPPTHVGEIVENALKYSKTIVITGGEPLTWDMTTLTDSLKKQGCQIHIETSGAYPLTGIWDWICLSPKKIKLPEPEIYPVANELKVIIFNKHDFKFAEEQAAQVGEHCILYLQPEWSNREKMIPLIVDYVMRNPKWKVSLQTHKYLNIP

SEQ ID NO: 35387 - protein, 210 aa, Zunongwangia sp.
  misc_feature (1)..(210): tr|A0A2E0P3L1|A0A2E0P3L1_9FLAO 7-carboxy-7-deazaguanine synthase OS=Zunongwangia sp. OX=1965325 GN=queE PE=3 S V=1
  misc_feature (124)..(124): Xaa can be any naturally occurring amino acid
MITEETQELVDRGIMLPLMEEFYTIQGEGYHKGTAAYFIRIGGCDVGCHWCDVKESWNAGLHPPTHVGEIVENALKYSKTIVITGGEPLTWDMTTLTDSLKKQGCQIHIETSGAYPLTGIWDWXCLSPKKIKLPEPEIYPVANELKVIIFNKHDFKFAEEQAAQVGEHCILYLQPEWSNREKMIPLIVDYVMRNPKWKVSLQTHKYLNIP

SEQ ID NO: 35388 - protein, 214 aa, Zymobacter palmae
  misc_feature (1)..(214): tr|A0A348HE36|A0A348HE36_9GAMM 7-carboxy-7-deazaguanine synthase OS=Zymobacter palmae OX=33074 GN=queE PE=3 SV =1
MYAIKEAFYSLQGEGARAGRASVFCRFTGCNLWSGRPQDREKSACRFCDTDFIGTDGQNGGKFVTADQLADHLDALWPYLAASGKRYVVFTGGEPLLQLDKALIEAMHARDFEIAVETNGTLPAPEGIDWICVSPKGATTLVQTSGHELKLVYPQADALPERFETLDFQHFYLQPMDLIPLGQQGTTQARALTYCLQHPQWQLSLQMHKIIGID

SEQ ID NO: 35389 - protein, 217 aa, Zymomonas mobilis
  misc_feature (1)..(217): tr|A0A2R9NSX6|A0A2R9NSX6_ZYMMB 7-carboxy-7-deazaguanine synthase OS=Zymomonas mobilis subsp. mobilis NRRL B-12 526 OX=1194424 GN=queE PE=3 SV=1
MSRHYAVKESFLTLQGEGIQAGRRAVFIRFAGCNLWNGREDDREQATCRFCDTDFVGIDGENGGRFTAEELAEQAIRLWKEAIESRYQSVRPFVVLTGGEPLLQVDEALLLALKNQAFEIAIETNGTQPVPSAIDWVCMSPKAGSQIILEKGNEIKLVWPQKGIDIEALEKLDFDHYLIQPMDNEYQKENIQKAIAFVMQRPLWRLSIQSHKLIGVK

SEQ ID NO: 35390 - protein, 217 aa, Zymomonas mobilis
  misc_feature (1)..(217): tr|Q5NMZ1|Q5NMZ1_ZYMMO 7-carboxy-7-deazaguanine synthas e OS=Zymomonas mobilis subsp. mobilis (strain ATCC 3182 1 / ZM4 / CP4) OX=264203 GN=queE PE=3 SV=1
MSRHYAVKESFLTLQGEGIQAGRRAVFIRFAGCNLWNGREDDREQATCRFCDTDFVGIDGENGGRFTAEELAEQAIRLWKEAIESRYQSVRPFVVLTGGEPLLQVDEALLLALKNQAFEIAIETNGTQPVPSAIDWVCMSPKAGSQIILEKGNEIKLVWPQKGIDIEALEKLDFDHYLIQPMDDEYQKENIQKAIAFVMQRPLWRLSIQSHKLIGVK

SEQ ID NO: 35391 - protein, 223 aa, Escherichia coli
  misc_feature (1)..(223): tr|A0A0B1HUD1|A0A0B1HUD1_ECOLX 7-carboxy-7-deazaguanine synthase OS=Escherichia coli OX=562 GN=queE PE=3 SV=1
MQYPINEMFQTLQGEGYFTGVPAIFIRLQGCPVGCAWCDTKHTWEKLEDREVSLFSILAKTKESDKWGSASSEDLLAVIGRQGYTARHVVITGGEPCIHDLLPLTDLLEKNGFSCQIETSGTHEVRCTPNTWVTVSPKLNMRGGYDVLSQALERANEIKHPVGRVRDIEALDELLATLTDDKPRVIALQPISQKDDATRLCIETCIARNWRLSMQTHKYLNIA

SEQ ID NO: 35392 - protein, 223 aa, Escherichia coli; identical to SEQ ID NO: 29987
  misc_feature (1)..(223): sp|P64554|QUEE_ECOLI 7-carboxy-7-deazaguanine synthase OS=Escherichia coli (strain K12) OX=83333 GN=queE PE=3 SV=1

SEQ ID NO: 35393 - protein, 223 aa, Abditibacterium utsteinense
  misc_feature (1)..(223): tr|A0A2S8SSM7|A0A2S8SSM7_9BACT 7-cyano-7-deazaguanine s ynthase OS=Abditibacterium utsteinense OX=1960156 GN=qu eC PE=3 SV=1
MKKAIAIVSGGLDSVTLAHLLAAQGYELQILSFNYGQKHLKELDFARDCANRLNARFNIVDLTSLTPLIGGNALTDASVAVPHGHYAQENMSVTVVPNRNAIFLSLAYGAAVAQNAQVVGFGVHSGDHFIYPDCRPAFVEAFELMQKKAIEGFGDADLKLYTPFLKTDKSGIVTQGAKIGVPFERTWSCYEGGALHCGQCGTCVERKEAFIKAGVKDPTSYAA

SEQ ID NO: 35394 - protein, 217 aa, Abiotrophia defectiva
  misc_feature (1)..(217): tr|W1Q3C4|W1Q3C4_ABIDE 7-cyano-7-deazaguanine synthase OS=Abiotrophia defectiva ATCC 49176 OX=592010 GN=queC P E=3 SV=1
MKCVLLSGGADSSTALALALSRDPQVVAVSIAYNQQHAQAELAAAKAVAQHYGVDHRILDLAAIFADSRSALNAANDLVASQGDYADQEAPNTEVEFRNGVFIAILTSLAMQLGADALYFGAHLDDSGVIYPDCSPDFVAAMDQAVRLGTGGKVRLETPFGQMTKADIVKLGLELGVPYHLTYSCYAGSQPPCGQCGTCIDRRKAFEANGVFETYDQ

SEQ ID NO: 35395 - protein, 229 aa, Abyssibacter profundi
  misc_feature (1)..(229): tr|A0A363UPW6|A0A363UPW6_9GAMM 7-cyano-7-deazaguanine s ynthase OS=Abyssibacter profundi OX=2182787 GN=queC PE= 3 SV=1
MSARAVVLVSGGLDSATTLAIARHEGFECHGLSVHYGQRHLSELQAAKRVCSHLGAVDHREVAVGLDALGGSALTDPNIDVPTRQTDGIPVTYVPARNTVMLSIAMAHAEVIGANAVFIGVNAVDYSGYPDCRPAFIDAFANLSRWATRQGVETGQGLAVHAPLIQLTKADIIRRGVALGVDYAMTVSCYQADAGGAACGVCDSCRIRRDGFAQAGVLDPTLYQSGASG

SEQ ID NO: 35396 - protein, 218 aa, Abyssicoccus albus
  misc_feature (1)..(218): tr|A0A3N5BR20|A0A3N5BR20_9STAP 7-cyano-7-deazaguanine s ynthase OS=Abyssicoccus albus OX=1817405 GN=queC PE=3 S V=1
MLNDNRALVVFSGGQDSTTCLFWALEQYDHVEVITFDYGQRHLKEIEVAKEIANELNVKQHLLNTEILTSYNANSLTNNDIEIDSSNDVPNTFVPGRNMLFLNIASIVAYQIGAKHIVTGVCDTDFSGYPDCRRDFVQSMNETMNLAMDLEFVIDTPLMTLNKKETWQLADELGQLDYIRYRTLTCYNGIVGDGCGVCPSCKLRADGLEAYLNEVGRK

SEQ ID NO: 35397 - protein, 228 aa, Acaryochloris marina
  misc_feature (1)..(228): sp|B0C253|QUEC_ACAM1 7-cyano-7-deazaguanine synthase OS =Acaryochloris marina (strain MBIC 11017) OX=329726 GN= queC PE=3 SV=1
MKAVVLLSGGLDSSTALYKAKADGADCYAISFDYRQRHRQELDSAVAIAQSAQVTQHQIVAFDLTLWGGSALTDTQIDLPSRSIEEMADHIPVTYVPARNSIFLSFALAYAETISAEQVYIGVNQLDYSGYPDCRPDFIQAMQEVFRLGTKLGREGQAIEICTPLINLHKSAIIELGNDLGVPWEQTWSCYSDGGGSPPLACGQCDSCQLRLAAFAQLGLSDPLSYAT

SEQ ID NO: 35398 - protein, 235 aa, Acaryochloris sp.
  misc_feature (1)..(235): tr|A0A2W1K1B5|A0A2W1K1B5_9CYAN 7-cyano-7-deazaguanine s ynthase OS=Acaryochloris sp. RCC1774 OX=1764569 GN=queC _1 PE=3 SV=1
MKAVILLSGGLDSSTVLYRAKAEGLDCYTLSFDYQQRHRQELESAIATAKAANATEHQIINFDLRLWGGSALTDQNIDLPAHRSLDEMSEQIPVTYVPARNTIFLSFALAYAEAISAQQVHIGVNQLDYSGYPDCRPDYIQAMGEVFRLGTKQGREGQPIEIVSPLINLTKVEIIELGNQLGVPWQKTWSCYSDGGGQSPPIACGECDSCQLRLAAFAKLGLQDPLPYRSTQVKN

SEQ ID NO: 35399 - protein, 233 aa, Accumulibacter phosphatis
  misc_feature (1)..(233): tr|C7RIC1|C7RIC1_ACCPU 7-cyano-7-deazaguanine synthase OS=Accumulibacter phosphatis (strain UW-1) OX=522306 GN =queC PE=3 SV=1
MDNKPTSSGGKPAVVLLSGGLDSATTLAIARADGFACHCLSIDYGQRHRAELAAAALLAEALGAREHRQLRLTLEVFGGSALTDERIAVPVDGVHSGIPITYVPARNTVMLSLALAWAEVLGSRDIFVGVNAVDYSGYPDCRPEYIAAYEKMANLATRAAVQGASLTIHAPLMGLGKAEIIQRGITLGVDYGLTVSCYQADRDGRACGVCDSCRLRRAGFSAAGMADPTRYAG

SEQ ID NO: 35400 - protein, 201 aa, Accumulibacter phosphatis
  misc_feature (1)..(201): tr|C7RWC1|C7RWC1_ACCPU 7-cyano-7-deazaguanine synthase OS=Accumulibacter phosphatis (strain UW-1) OX=522306 GN =CAP2UW1_4516 PE=3 SV=1
MTAALLLSGGMDSISIAWWKHPDIAITIDYGQLPAAAEITASQAICRRLRIPHHVLQVDCHSLGSGDMAGLEPNALAPATDWWPYRNQLLITLAAMKAVTLEVRQLWLGTVASDASHRDGTPNFLSAMSALLAVQEGGLTVSAPAIGMSTVDLVRQSGVPLEILAWAHSCHKADVACGACRGCNKYFEVLRELGNELVRSG

SEQ ID NO: 35401 - protein, 229 aa, Acetitomaculum ruminis
  misc_feature (1)..(229): tr|A0A1I0YUQ9|A0A1I0YUQ9_9FIRM 7-cyano-7-deazaguanine s ynthase OS=Acetitomaculum ruminis DSM 5522 OX=1120918 G N=queC PE=3 SV=1
MKAMVLSSGGVDSTTALALAISKYGKENVFALSVSYGQKHDKEIQAAKKVANYYGVEQLFLDLSKIFQFSNCSLLKQSDTEIPKESYSEQIKETKGETPVSTYVPFRNGLFLSSAASIALSKECNVIYYGAHADDACGFAYPDCSSAFNNAMKEAIYEGSGHQLTIEAPFIDKTKAEVVKLGLELKVPYELTWSCYEGGDEPCGECGTCIDRAEAFKLNNVKDPALIKD

SEQ ID NO: 35402 - protein, 249 aa, Acetobacter aceti
  misc_feature (1)..(249): tr|A0A0D6MZ00|A0A0D6MZ00_ACEAC 7-cyano-7-deazaguanine s ynthase OS=Acetobacter aceti NBRC 14818 OX=887700 GN=qu eC PE=3 SV=1
MSFQPSSTDGALVVFSGGQDSATCLAWALDRFSRVETLGFDYGQRHAVELTCRDTLRDGMAALQGDWKERLGPDHTLELDALGKVSDTALTRDTEIQMTESGLPSTFVPGRNLIFLSFAAALAYRRGLRHIVTGVCETDYSGYPDCRDDTIKALQVALNLGMDSRFVLHTPLMWIDKAQTWQLAESLGGEPLVTLINHESHSCYLGTRGTLHAWGHGCGVCPACELRKAGWTAYEALREARTCGNDGHG

SEQ ID NO: 35403 - protein, 249 aa, Acetobacter aceti
  misc_feature (1)..(249): tr|A0A1U9KJQ2|A0A1U9KJQ2_ACEAC 7-cyano-7-deazaguanine s ynthase OS=Acetobacter aceti OX=435 GN=queC PE=3 SV=1
MTLQLSASDGALVVFSGGQDSATCLAWALDRFPRVETLGFDYGQRHAVELTCRDTLRDGMVALQEDWKDRLGPDHTLELDALGKVSDTALTRDTEIRMTATGLPSTFVPGRNLVFLTFAAALAYRRGLRHIVTGVCETDYSGYPDCRDDTIKALQVALNLGMDTRFVLHTPLMWIDKAQTWQLAESLGGEPLVTLINHESHSCYLGTRGTLHAWGHGCGVCPACELRKAGWSAYEALSEDTRSGSDSHG

SEQ ID NO: 35404 - protein, 246 aa, Acetobacter ascendens
  misc_feature (1)..(246): tr|A0A1D8QUN1|A0A1D8QUN1_9PROT 7-cyano-7-deazaguanine s ynthase OS=Acetobacter ascendens OX=481146 GN=queC PE=3 SV=1
MPLPARDKQESALVLFSGGQDSATCLAWALERYGRVETLGFDYGQRHAVELECRASIRQGLAHQNPVWAERLEEDHTLPLHALGEVSETSLTRDAEISMAENGLPNTFVPGRNLIFLTFAAALAARRGIKHIVTGVCETDYSGYPDCRDDTIKALQVALNLGMESRYVLHTPLMWLDKAETWELAEELGGQPLVELINKESHTCYLGERGTLHAWGHGCGTCPACQLRKSGWDEYIVHKKGTQTHA

SEQ ID NO: 35405 - protein, 242 aa, Acetobacter cerevisiae
  misc_feature (1)..(242): tr|A0A149UZ22|A0A149UZ22_9PROT 7-cyano-7-deazaguanine s ynthase OS=Acetobacter cerevisiae OX=178900 GN=queC PE= 3 SV=1
MSTPARASEEAALVLFSGGQDSATCLAWALARFGRVETLGFDYGQRHAVELECRETLRDGLRVQNPLWKERLGMDHTLALGALGDISDTALTRNAEIAMEKDGLPNTFVPGRNIIFLTFAAALAARRGIRHIVTGVCETDYSGYPDCRDDTIKAVQVALNLGMDSRYVLHTPLMWIDKAETWKLAEDLGGAPLVSLINQASHTCYLGDRGTLHPWGHGCGECPACALRRAGWEEYVAEKTNA

SEQ ID NO: 35406 - protein, 242 aa, Acetobacter cerevisiae
  misc_feature (1)..(242): tr|A0A149Q377|A0A149Q377_9PROT 7-cyano-7-deazaguanine s ynthase OS=Acetobacter cerevisiae OX=178900 GN=queC PE= 3 SV=1
MSTPARASDEAALVLFSGGQDSATCLAWALARFGRVETLGFDYGQRHAVELECRETLRDGLRAQNPLWKERLGMDHTLALGALGDISDTALTRNAEIAMEKDGLPNTFVPGRNIIFLTFAAALAARRGIRHIVTGVCETDYSGYPDCRDDTIKAVQVALNLGMDSRYVLHTPLMWIDKAETWKLAEDLGGAPLVSLINEASHTCYLGDRGTLHPWGHGCGECPACALRRAGWEEYVAEKTNA

SEQ ID NO: 35407 - protein, 245 aa, Acetobacter cibinongensis
  misc_feature (1)..(245): tr|A0A0D6N5K9|A0A0D6N5K9_9PROT 7-cyano-7-deazaguanine s ynthase OS=Acetobacter cibinongensis 4H-1 OX=1231339 GN =queC PE=3 SV=1
MAFPEHAQTESALVLFSGGQDSATCLAWALARFGRVETLGFDYGQRHGIELTCRETLREGLKTQNALWADKLGMDHTLALDALGQVSETALTRDAEIAMADGGLPNTFVPGRNIIFLTFAAALAARRGIRHIVTGVCETDYSGYPDCRDDTIKAVQVALNLGMDTRFVLHTPLMWINKAETWALAEELGGDDLVTLVNRESHTCYLGDRTTPVHPWGHGCGHCPACELRRAGWEDYCAKKAGQHA

SEQ ID NO: 35408 - protein, 245 aa, Acetobacter cibinongensis
  misc_feature (1)..(245): tr|A0A1Z5YS34|A0A1Z5YS34_9PROT 7-cyano-7-deazaguanine s ynthase OS=Acetobacter cibinongensis OX=146475 GN=queC PE=3 SV=1
MAFPEHAQTESALVLFSGGQDSATCLAWALARFGRVETLGFDYGQRHGIELTCRETLREGLKTQNALWAEKLGMDHTLALDALGQVSETALTRDAEIAMADGGLPNTFVPGRNIIFLTFAAALAARRGIRHIVTGVCETDYSGYPDCRDDTIKAVQVALNLGMDTRFVLHTPLMWINKAETWALAEELGGDDLVTLINRESHTCYLGDRTTPVHPWGHGCGHCPACELRRAGWEDYCAKRADQHA

SEQ ID NO: 35409 - protein, 242 aa, Acetobacter fabarum
  misc_feature (1)..(242): tr|A0A269Y113|A0A269Y113_9PROT 7-cyano-7-deazaguanine s ynthase OS=Acetobacter fabarum OX=483199 GN=queC PE=3 S V=1
MPLSSKEQTESALVLFSGGQDSATCLAWALARFKHVETVGFDYGQRHAIELECRQSIREGLAALNPQWKERLGPDHTLPLHALNDISDTALTRDAEIAMTQNGLPNTFVPGRNLIFLTFSAALAARRSMRHIVTGVCETDYSGYPDCRDDTIKALQVALNLGMDSRYVLHTPLMWLDKAETWTLADELGGEPLVTLINHESHTCYMGDRTVRHAWGYGCGTCPACQLRRAGWEAYIAEDQHA

SEQ ID NO: 35410 - protein, 242 aa, Acetobacter ghanensis
  misc_feature (1)..(242): tr|A0A0U5F5R1|A0A0U5F5R1_9PROT 7-cyano-7-deazaguanine s ynthase OS=Acetobacter ghanensis OX=431306 GN=exsB PE=3 SV=1
MPLSSKEQTESALVLFSGGQDSATCLAWALSRFGHVETVGFDYGQRHAIELECRQSIRDGLAAANPQWKQRLGPDHTLPLHALNDISDTALTRDAEISMTQSGLPNTFVPGRNLIFLTFSAALAARRGIRHIVTGVCETDYSGYPDCRDDTIKALQVALNLGMDSRYVLHTPLMWLDKAETWTLAEELGGEAVVTLINHESHTCYMGERSTRHAWGYGCGTCPACQLRRAGWEAYKAENQNA

SEQ ID NO: 35411 - protein, 242 aa, Acetobacter indonesiensis
  misc_feature (1)..(242): tr|A0A252AVI8|A0A252AVI8_9PROT 7-cyano-7-deazaguanine s ynthase OS=Acetobacter indonesiensis OX=104101 GN=queC PE=3 SV=1
MPLSSHAQKESALVLFSGGQDSATCLAWALTRFERVETMGFDYGQRHAVELDCREALRDGMRGQNPLWAERLGMDHTIALGALGEISETALTRDAEIALAEGGLPNTFVPGRNIIFLTFAAALAARRGIRHIITGVCETDYSGYPDCRDDTIKAVQVALNLGMDSRYVLHTPLMWINKAETWALAEEIGGEKLVTLINQESHTCYLGDRNTIHPWGHGCGKCPACDLRRTGWEDYQAGKANA

SEQ ID NO: 35412 - protein, 242 aa, Acetobacter indonesiensis; identical to SEQ ID NO: 35411
  misc_feature (1)..(242): tr|A0A0D6NE40|A0A0D6NE40_9PROT 7-cyano-7-deazaguanine s ynthase OS=Acetobacter indonesiensis 5H-1 OX=1231340 GN =queC PE=3 SV=1

SEQ ID NO: 35413 - protein, 54 aa, Acetobacter malorum
  misc_feature (1)..(54): tr|A0A149VIQ8|A0A149VIQ8_9PROT 7-cyano-7-deazaguanine s ynthase (Fragment) OS=Acetobacter malorum OX=178901 GN= AD953_00995 PE=3 SV=1
MSTPARASEEAALVLFSGGQDSATCLAWALARFGRVETLGFDYGQRHAVELECR

SEQ ID NO: 35414 - protein, 242 aa, Acetobacter malorum
  misc_feature (1)..(242): tr|A0A087PMQ4|A0A087PMQ4_9PROT 7-cyano-7-deazaguanine s ynthase OS=Acetobacter malorum OX=178901 GN=queC PE=3 S V=1
MSTPARASEEAALVLFSGGQDSATCLAWALARFGRVETLGFDYGQRHAVELECRETLRDGLRAQNPLWKDRLGMDHTLALGALGDISETALTRNAEIAMEKDGLPNTFVPGRNIIFLTFAAALAARRGIRHIVTGVCETDYSGYPDCRDDTIKAVQVALNLGMDSRYVLHTPLMWIDKAETWKLAEDLGGTPLVSLINQESHTCYLGDRGTMHPWGHGCGECPACALRRAGWEDYVAEKTDA

SEQ ID NO: 35415 - protein, 268 aa, Acetobacter nitrogenifigens
  misc_feature (1)..(268): tr|A0A511X7N0|A0A511X7N0_9PROT 7-cyano-7-deazaguanine s ynthase OS=Acetobacter nitrogenifigens DSM 23921 = LMG 23498 OX=1120919 GN=queC PE=3 SV=1
MTRATTTGASTKGTTGASPAATGGAHEAARNKGALVVFSGGQDSATCLAWALDRFERVETLGFDYGQRHVVELACRDALRDGMGTIDPVWKARLEEDHTLSLDALGAVSDTALTRETEITMSESGLPSTFVPGRNLIFLTFAAALAYRRGLRHIVTGVCETDYSGYPDCRDDTIKSLQATLNLGMETRFVLHTPLMWIDKARTWELARSLGGEALVDLINRDSHSCYLGQRGELHPWGYGCGECPACKLRRAGWEQYQTLRAESAGNV

SEQ ID NO: 35416 - protein, 247 aa, Acetobacter oeni
  misc_feature (1)..(247): tr|A0A511XLU2|A0A511XLU2_9PROT 7-cyano-7-deazaguanine s ynthase OS=Acetobacter oeni OX=304077 GN=queC PE=3 SV=1
MTASANTPASLNSALVVFSGGQDSATCLAWALDRFDRVETLGFDYGQRHAVELTCRDTLRTGMEQIDPTWKTALGPDHTIALDALGKVSETALTRETEITMSESGLPSTFVPGRNLIFLTFAAALAYRRGLRHIVTGVCETDYSGYPDCRDDTIKAMQVALNLGMDTRFVLHTPLMWIDKAQTWALAESLGGEKLVTLINHESHSCYLGTRGTMHPWGHGCGTCPACNLRRSGWEQYEATLTGHPHG

SEQ ID NO: 35417 - protein, 242 aa, Acetobacter okinawensis
  misc_feature (1)..(242): tr|A0A252BWW3|A0A252BWW3_9PROT 7-cyano-7-deazaguanine s ynthase OS=Acetobacter okinawensis OX=1076594 GN=queC P E=3 SV=1
MPLSSKEQTESALVLFSGGQDSATCLAWALSRFGHVETVGFDYGQRHAIELECRQSIRDGLAAQNPEWKKRLGPDHTLPLHALNDISDTALTRDAEISMTQSGLPNTFVPGRNLIFLTFSAALAARRSIRHIVTGVCETDYSGYPDCRDDTIKALQVALNLGMESRYVLHTPLMWLDKAETWTLAEELGGAPLVTLINHESHTCYMGERTQRHAWGYGCGTCPACQLRRAGWEAYRAEDQHA

SEQ ID NO: 35418 - protein, 243 aa, Acetobacter orientalis
  misc_feature (1)..(243): tr|A0A0D6NM45|A0A0D6NM45_9PROT 7-cyano-7-deazaguanine s ynthase OS=Acetobacter orientalis 21F-2 OX=1231341 GN=q ueC PE=3 SV=1
MPLPTQAQNEAALVLFSGGQDSATCLAWALARFGRVETLGFDYGQRHAIELACRATLRAGLQAQNRTWSDRLGMDHTLNLAALGEISDTALTSEAEIAMAEGGLPNTFVPGRNIIFLNFAAALAARRGIRHIVTGVCETDYSGYPDCRDDTIKAVQVALNLGMESRFVVHTPLMWINKAETWQLAEELGGQKLVSLINQESHTCYMGERGTMHPWGHGCGHCPACDLRRNGWEEYQAKVTPNA

SEQ ID NO: 35419 - protein, 243 aa, Acetobacter orientalis; identical to SEQ ID NO: 35418
  misc_feature (1)..(243): tr|A0A252C964|A0A252C964_9PROT 7-cyano-7-deazaguanine s ynthase OS=Acetobacter orientalis OX=146474 GN=queC PE= 3 SV=1

SEQ ID NO: 35420 - protein, 242 aa, Acetobacter orleanensis
  misc_feature (1)..(242): tr|A0A4Y3TJL1|A0A4Y3TJL1_9PROT 7-cyano-7-deazaguanine s ynthase OS=Acetobacter orleanensis OX=104099 GN=queC PE =3 SV=1
MSKPLRALDEAALVLFSGGQDSATCLAWALARFGRVETLGFDYGQRHAVELDCRETLREGLRKQNPLWKERLGMDHTLALGALGDISETALTRNAEITMEKDGLPNTFVPGRNIIFLTFAAALAARRGIRHIVTGVCETDYSGYPDCRDDTIKAVQVALNLGMDSRYVLHTPLMWIDKAETWKLAEELGGPALVSLINQESHTCYLGDRGTMHPWGHGCGECPACALRRAGWEEYVAEKARA

SEQ ID NO: 35421 - protein, 246 aa, Acetobacter pasteurianus
  misc_feature (1)..(246): tr|A0A401X2G3|A0A401X2G3_ACEPA 7-cyano-7-deazaguanine s ynthase OS=Acetobacter pasteurianus NBRC 3278 OX=122666 0 GN=queC PE=3 SV=1
MPLPARDKQESALVLFSGGQDSATCLAWALERYGRVETLGFDYGQRHAVELECRASIRQGLVHQNPVWAERLGEDHTLPLHALGEVSETSLTRDAEISMAENGLPNTFVPGRNLIFLTFAAALAARRGIKHIVTGVCETDYSGYPDCRDDTIKALQVALNLGMESRYVLHTPLMWLDKAETWELAEELGGQPLVELINKESHTCYLGERGTLHAWGHGCGTCPACQLRKSGWDDYVAHKKGTQTHA

SEQ ID NO: 35422 - protein, 246 aa, Acetobacter pasteurianus
  misc_feature (1)..(246): tr|A0A1A0DDD0|A0A1A0DDD0_ACEPA 7-cyano-7-deazaguanine s ynthase OS=Acetobacter pasteurianus OX=438 GN=queC PE=3 SV=1
MPLPARDKQESALVLFSGGQDSATCLAWALERYGRVETLGFNYGQRHAVELECRASIRQGLVHQNPVWAERLGEDHTLPLHALGEVSETSLTRDAEISMAENGLPNTFVPGRNLIFLTFAAALAARRGIKHIVTGVCETDYSGYPDCRDDTIKALQVALNLGMESRYVLHTPLMWLDKAETWELAEELGGQPLVELINKESHTCYLGERGTLHAWGHGCGTCPACQLRKSGWDDYVAHKKGTQTHA

SEQ ID NO: 35423 - protein, 243 aa, Acetobacter peroxydans
  misc_feature (1)..(243): tr|A0A4Y3TNG3|A0A4Y3TNG3_9PROT 7-cyano-7-deazaguanine s ynthase OS=Acetobacter peroxydans OX=104098 GN=queC PE= 3 SV=1
MPLAERDQHESALVLFSGGQDSATCLAWALARFNRVETLGFDYGQRHAVELECRTVLREGMAACNPLWRERLGADHTLPLDALHMVSETALTREAEITITENGLPNTFVPGRNLLFLTFAAALAARRTIRHLITGVCETDYSGYPDCRDDTIKSLQVSLNLGMERRYVIHTPLMWLSKAETWLLAEELGGQALVSLINRESHTCYTGQREVLHPWGYGCGTCPACHLRQTGWEAYQAKKADHA

SEQ ID NO: 35424 - protein, 242 aa, Acetobacter persici
  misc_feature (1)..(242): tr|A0A252AP70|A0A252AP70_9PROT 7-cyano-7-deazaguanine s ynthase OS=Acetobacter persici OX=1076596 GN=queC PE=3 SV=1
MSTPLRALDEAALVLFSGGQDSATCLAWALARFGWVETLGFDYGQRHAVELECRETLREGLRTQNPLWKERLGMDHTLALGALGDISETALTRNAEIAMEKDGLPNTFVPGRNIIFLTFAAALAARRGIRHIVTGVCETDYSGYPDCRDDTIKAVQVALNLGMDSRYVLHTPLMWIDKAETWALAEELGGAALVSLINQESHTCYLGDRESLHPWGHGCGQCPACDLRRAGWDEYVASKTHA

SEQ ID NO: 35425 - protein, 242 aa, Acetobacter persici
  misc_feature (1)..(242): tr|A0A1U9LC50|A0A1U9LC50_9PROT 7-cyano-7-deazaguanine s ynthase OS=Acetobacter persici OX=1076596 GN=queC PE=3 SV=1
MSTPLRAADEAALVLFSGGQDSATCLAWALTRFGRVETLGFDYGQRHTVELECRETLREGLRAQNPLWKERLGMDHTLALGALGDISETALTRNAEIAMEKDGLPNTFVPGRNIIFLTFAAALAARRGIRHIVTGVCETDYSGYPDCRDDTIKAVQVALNLGMDSRYVLHTPLMWIDKAETWALAEELGGAALVSLINQESHTCYLGDRESKHPWGHGCGQCPACDLRRAGWDEYVVSKTHA

SEQ ID NO: 35426 - protein, 246 aa, Acetobacter pomorum
  misc_feature (1)..(246): tr|A0A2G4RAU7|A0A2G4RAU7_9PROT 7-cyano-7-deazaguanine s ynthase OS=Acetobacter pomorum OX=65959 GN=queC PE=3 SV =1
MPLPARDKQESALVLFSGGQDSATCLAWALERYGRVETLGFDYGQRHAVELECRASIRQGLAEQNPVWAQRLGPDHTLPLHALGEVSETSLTRDAEISMAENGLPNTFVPGRNLIFLTFAAALAARRGIKHIVTGVCETDYSGYPDCRDDTIKALQVALNLGMESRYVLHTPLMWLDKAETWELAEELGGQALVELINQKSHTCYLGERGTLHAWGHGCGTCPACQLRKSGWDAYIAHKKGTQTHA

SEQ ID NO: 35427 - protein, 262 aa, Acetobacter pomorum
  misc_feature (1)..(262): tr|F1YQL8|F1YQL8_9PROT 7-cyano-7-deazaguanine synthase OS=Acetobacter pomorum DM001 OX=945681 GN=queC PE=3 SV= 1
MGAFAPDPQAYRNTLIMPLPARDKQESALVLFSGGQDSATCLAWALERYGRVETLGFDYGQRHAVELECRASIRQGLVNQNPTWASRLGDDHTLPLHALGEVSETSLTRDAEISMAENGLPNTFVPGRNLIFLTFAAALAARRGIKHIVTGVCETDYSGYPDCRDDTIKALQVALNLGMESRYVLHTPLMWLDKAETWELAEELGGHPLVELINKESHTCYLGERGILHAWGHGCGTCPACQLRKSGWDDYVAHKKGTQTHA

SEQ ID NO: 35428 - protein, 242 aa, Acetobacter senegalensis
  misc_feature (1)..(242): tr|A0A252EKC3|A0A252EKC3_9PROT 7-cyano-7-deazaguanine s ynthase OS=Acetobacter senegalensis OX=446692 GN=queC P E=3 SV=1
MAFPLNAQKESALVLFSGGQDSATCLAWALARFGRVETMGFDYGQRHAVELECREALREGMRAQNPAWAERLGMDHTLALGALGDISETALTRDAEIAMAEGGLPNTFVPGRNIIFLTFAAALAARRGIRHIVTGVCETDYSGYPDCRDDTIKAVQVALNLGMDARYVLHTPLMWINKAETWKLAEELGGDDLVTLINRESHTCYLGERTAFHAWGHGCGKCPACDLRRAGWEDYEAEKAHA

SEQ ID NO: 35429 - protein, 242 aa, Acetobacter senegalensis
  misc_feature (1)..(242): tr|A0A0U5EYR1|A0A0U5EYR1_9PROT 7-cyano-7-deazaguanine s ynthase OS=Acetobacter senegalensis OX=446692 GN=exsB P E=3 SV=1
MAFPLNAQKESALVLFSGGQDSATCLAWALARFSRVETMGFDYGQRHAVELECREALREGMRAQNPVWAERLGMDHTLALGALGDISETALTRDAEIAMAEGGLPNTFVPGRNIIFLTFAAALAARRGIRHIVTGVCETDYSGYPDCRDDTIKAVQVALNLGMDARYVLHTPLMWINKAETWKLAEELGGDDLVTLINRESHTCYLGERTALHAWGHGCGKCPACDLRRAGWEDYEAEKAHA

SEQ ID NO: 35430 - protein, 234 aa, Acetobacter sp.
  misc_feature (1)..(234): tr|A0A252BXE2|A0A252BXE2_9PROT 7-cyano-7-deazaguanine s ynthase OS=Acetobacter sp. DsW_063 OX=1514894 GN=queC P E=3 SV=1
MVVFSGGQDSATCLAWALDRFERVETLGFDYGQRHVVELACRDALRDGMGALDPVWKARLGEDHTLSLDALGAVSDTALTRETEITMSESGLPSTFVPGRNLIFLTFAAALAYRRGLRHIVTGVCETDYSGYPDCRDDTIKSLQATLNLGMETRFVLHTPLMWIDKAQTWDLARSLGGDALVGLINRDSHSCYLGQRGELHPWGYGCGECPACKLRRTGWEQYQTLRAESVGNV

SEQ ID NO: 35431 - protein, 242 aa, Acetobacter sp.
  misc_feature (1)..(242): tr|A0A252B605|A0A252B605_9PROT 7-cyano-7-deazaguanine s ynthase OS=Acetobacter sp. DsW_54 OX=1670660 GN=queC PE =3 SV=1
MPLSSKEQTESALVLFSGGQDSATCLAWALARFKHVETVGFDYGQRHAIELECRQSIREGLAALNPQWKERLGPDHTLPLHALNDISDTALTRDAEIAMTQNGLPNTFVPGRNLIFLTFSAALAARRSMRHIVTGVCETDYSGYPDCRDDTIKALQVALNLGMDSRYVLHTPLMWLDKAETWTLADELGGEPLVTLINHESHTCYMGDRTVRHAWGYGCGTCPACQLRRAGWDAYIAEDQHA

SEQ ID NO: 35432 - protein, 242 aa, Acetobacter syzygii
  misc_feature (1)..(242): tr|A0A270BW61|A0A270BW61_9PROT 7-cyano-7-deazaguanine s ynthase OS=Acetobacter syzygii OX=146476 GN=queC PE=3 S V=1
MPLSSKEQTESALVLFSGGQDSATCLAWALSRFGHVETVGFDYGQRHAIELECRQSIRDGLSALNPAWKKRLGPDHTLPLHALNDISDTALTRNAEIAMTQSGLPNTFVPGRNLIFLTFSAALAARRSIRHIVTGVCETDYSGYPDCRDDTIKALQVALNLGMDSRYVLHTPLMWLDKAETWILAEELGGAPLVTLINHESHTCYMGERNQRHPWGYGCGTCPACQLRRAGWEAYKAEDQHA

SEQ ID NO: 35433 - protein, 242 aa, Acetobacter tropicalis
  misc_feature (1)..(242): tr|A0A252A9K4|A0A252A9K4_9PROT 7-cyano-7-deazaguanine s ynthase OS=Acetobacter tropicalis OX=104102 GN=queC PE= 3 SV=1
MPFPANAQKESALVLFSGGQDSATCLAWALAHFGRVETIGFDYGQRHAVELDCREALREGMRHQNPLWAERLGMDHTLALGALGDISETALTRDAEIAMAEGGLPNTFVPGRNIIFLTFAAALAARRGIRHIVTGVCETDYSGYPDCRDDTIKAVQVALNLGMDARYVLHTPLMWINKAETWNLAEELGGHDLVTLINRESHTCYLGERTALHSWGHGCGKCPACELRRTGWEEYEAEKAHA

SEQ ID NO: 35434 - protein, 242 aa, Acetobacter tropicalis
  misc_feature (1)..(242): tr|A0A094YJ14|A0A094YJ14_9PROT 7-cyano-7-deazaguanine s ynthase OS=Acetobacter tropicalis OX=104102 GN=queC PE= 3 SV=1
MPFPANAQKESALVLFSGGQDSATCLAWALAHFGRVETMGFDYGQRHAVELDCREALREGMRHQNPLWAERLGMDHTLALGALGDISETALTRDAEIAMAEGGLPNTFVPGRNIIFLTFAAALAARRGIRHIVTGVCETDYSGYPDCRDDTIKAVQVALNLGMDARYVLHTPLMWINKAETWNLAEELGGHDLVTLINRESHTCYLGERTALHSWGHGCGKCPACELRRTGWEEYEAEKAHA

SEQ ID NO: 35435 - protein, 198 aa, Acetobacteraceae bacterium
  misc_feature (1)..(198): tr|A0A327LV08|A0A327LV08_9PROT 7-cyano-7-deazaguanine s ynthase OS=Acetobacteraceae bacterium DB1506 OX=2230885 GN=DOO78_25580 PE=3 SV=1
MSTALLLSGGMDSVAIAWWRRPEIAVTIDYGQRAAAAEVRAAAAVCAELGIEHLVQRVDLAALGSGDMAGRPRLAEAPVPEWWPFRNQMLVTLAAMAVIPRGARRLLIGCLATDGAHADGRAAFVEAMDGLLAMQEGGMRLEAPAIGLTAVELIRASGVPPETLAWAHSCHVAEHACGMCRGCQKHYETLEALGHAPY

SEQ ID NO: 35436 - protein, 234 aa, Acetobacteraceae bacterium
  misc_feature (1)..(234): tr|A0A327M815|A0A327M815_9PROT 7-cyano-7-deazaguanine s ynthase OS=Acetobacteraceae bacterium DB1506 OX=2230885 GN=queC PE=3 SV=1
MREDAALVLFSGGQDSATCLAWALDRFAHVETIGFDYGQRHHVEMLVRGGFRARLRRENPGWAPRLGPDHVLSLDALRAVSDTALTRETEIAMQADGLPNTFVPGRNLLFVTFAAALAYRRGLKHLVAGMCETDYSGYPDCRDDTLKALQVAINLGMQTRFVLHTPLMWRDKAATWALAERLGGTPLVEAIREDTHSCYLGNRQQRHVWGYGCGTCPACELRRHGWEAWRAEHV

SEQ ID NO: 35437 - protein, 233 aa, Acetobacteroides hydrogenigenes
  misc_feature (1)..(233): tr|A0A4R2ECQ1|A0A4R2ECQ1_9BACT 7-cyano-7-deazaguanine s ynthase OS=Acetobacteroides hydrogenigenes OX=979970 GN =queC PE=3 SV=1
MTALEMYEKSVTGKKALVIFSGGQDSTTCLLWALKRFDEVRAISYRYGQRHDVELDLAADICAQLGVVQTVVDLSAQFAELNESALLTATEDVNEETSRGLPASFVPNRNLIFLVYAHTFAQKIGFDTLVTGVCQTDYSGYPDCRYDFVQAAKSTMNMASEVNIEVETPIMWLNKAETFMLADLCGGIDIIVGKTLTCYNAELTMNRYGFGCGKCNACLLREKGYDEYVAMKR

SEQ ID NO: 35438 - protein, 223 aa, Acetohalobium arabaticum
  misc_feature (1)..(223): tr|D9QQY0|D9QQY0_ACEAZ 7-cyano-7-deazaguanine synthase OS=Acetohalobium arabaticum (strain ATCC 49924 / DSM 55 01 / Z-7288) OX=574087 GN=queC PE=3 SV=1
MKKAVVLFSGGLDSTTALYLAKSKGYQVYALSFKYGQSHSRELEAAKRIADQVGVAEHVVVETSLSAWGGSALTDQEMDIPQGEKEREEIPTTYVPARNMIFLSYAASYAEAVGAHDIFIGVSEVDYSGYVDCRQEFIDAMEEAINQGTVCGAEEDNPIKIQAPFINLTKAEEIELGMELGVDYSLTWSCYRGEELACGNCDSCMLRLKAFEEAGYDDPIEYK

SEQ ID NO: 35439 - protein, 272 aa, Acetomicrobium mobile
  misc_feature (1)..(272): tr|I4BZH3|I4BZH3_ACEMN TIGR00268 family protein OS=Acet omicrobium mobile (strain ATCC BAA-54 / DSM 13181 / JCM 12221 / NGA) OX=891968 GN=Anamo_2098 PE=4 SV=1
MSKWVCLLDYISNFSNTVVLLSGGTDSSFLTYACTKAKTNVIAVTFSSMLVSKEEVDAASKVARAFGVPHHIIDSDDLNVTEIRQNHPRRCYFCRKHRDELVKSWLKNLEPEKFVVMDGVTASDVGEYRPGLEAAEEDGVLHPLKEVGLEKWEIRRLAQEFGLPFWDKPSSPCLATRFPYLTTLDEDEIARIAEAESCLMSMGLSNVRVRSYHSGVAVVEVAPDDMEKAWALKDNIKNALFSVGFSVVALDLDGHKSGKMDLLMGGVRHDSV

SEQ ID NO: 35440 - protein, 221 aa, Acetonema longum
  misc_feature (1)..(221): tr|F7NNG9|F7NNG9_9FIRM 7-cyano-7-deazaguanine synthase OS=Acetonema longum DSM 6540 OX=1009370 GN=queC PE=3 SV =1
MANTKHEGAMVVFSGGQDSTTCLFWAMERFQPVTAITFNYNQRHKAEIECAQEICRDLGVEQTILDMALLNQLTANALTRSEIEVKAGAGGTLPSTFVDGRNLLFLSFAAIAAKQKGLRHIITGVCETDFSGYPDCRDMFVKSLNVTLNLAMDYQFVLHTPLMWINKAQTWAMADQLGRLEYVRKNTLTCYNGIMGDGCGECPACQLRNKGLVQYLEQKGK

SEQ ID NO: 35441 - protein, 223 aa, Achromatium sp.
  misc_feature (1)..(223): tr|A0A0M1J3K5|A0A0M1J3K5_9GAMM 7-cyano-7-deazaguanine s ynthase OS=Achromatium sp. WMS2 OX=1604835 GN=queC PE=3 SV=1
MQRAVVLLSGGLDSATTLAMAINAGYVCYALSIDYGQRQRAELDAATRIAIMLQVVEHRIIHLDLGAMGGSALTDPDVAVPTVPSVGIPVTYVPARNTVLLALALGWAEVLKIKHIFVGVNAVDYSGYPDCRPDFIRAFENLANVATKAGVEGTRFEIHAPLLHLSKGEIIHHGVSLGLDYSLTVSCYQADPQGRACGCCDACRLRRQGFIDARIVDPTCYVE

SEQ ID NO: 35442 - protein, 103 aa, Achromatium sp.
  misc_feature (1)..(103): tr|A0A0M1J3R1|A0A0M1J3R1_9GAMM 7-cyano-7-deazaguanine s ynthase (Fragment) OS=Achromatium sp. WMS1 OX=1604834 G N=TI03_05805 PE=3 SV=1
NAVDYSGYPDCRPDFIRAFENLANVATKAGVEGTRFEIHAPLLHLSKGEIIHHGVSLGLDYSLTVSCYQADPQGRACGCCDACRLRRQGFIDARIVDPTCYVE

SEQ ID NO: 35443 - protein, 421 aa, Achromobacter agilis
  misc_feature (1)..(421): tr|A0A446CDA5|A0A446CDA5_9BURK 7-cyano-7-deazaguanine s ynthase OS=Achromobacter agilis OX=1353888 GN=queC_1 PE =4 SV=1
MTKVLCTSVSHLPATLADGERAFTLFKSAKRAGVGTIAQGWRGSLKRKGFAPSAQAWDFVQFCLSVCAADLCCLRNTSADGWTRTIELTVGLHEPLRWAPWKAHVEQMLKVLTGDYWTLHFVEGGVAPPNGRLQPLAHDCISLLSGGLDSLVGGIDLVTSGRQPAFVSQLAHEDSERQRRYATLLGGGATHMQWSHGINFTGRREPSTRGRSLAFYGFAVMAASKIAGQPVQVFVPENGFICVNPPLVPGRVSSLSTRTTHPLFMAMLQELLEVLDIDVRLELPYRFKTKGEMLRECANQTLLDTVASDSTSCGRYRTYNRTHCGRCVPCMIRRAAFLAWGHGRDRTTYTFPSLAGSDKSSGPDDPMAAALAVLSVREQGLDRFLGATLAFAAPGERGSYRGVLQAGLGELEALLQADGLL

SEQ ID NO: 35444 - protein, 239 aa, Achromobacter agilis
  misc_feature (1)..(239): tr|A0A446CX10|A0A446CX10_9BURK 7-cyano-7-deazaguanine s ynthase OS=Achromobacter agilis OX=1353888 GN=queC_2 PE =3 SV=1
MQNHQRRALVLFSGGQDSTTCLAWALDRYAHVETVAFDYGQRHHIELSARLNVLRDIRENFPDWAPRLGEDHLLDLKVLGQVGDTAMTSDRAIEMQANGLPNTFVPGRNLLFLTLAAALGYRRQLDVLVGGMCETDFSGYPDCRDDTIKAQQVALGLGLGSRVTIETPLMWIDKSETWALAHRLGGDALVETIVEESHTCYLGERGARHDWGYGCGECPACKLRKIGWEKWVIASAAQE

SEQ ID NO: 35445 - protein, 242 aa, Achromobacter aloeverae
  misc_feature (1)..(242): tr|A0A4Q1HKE6|A0A4Q1HKE6_9BURK 7-cyano-7-deazaguanine s ynthase OS=Achromobacter aloeverae OX=1750518 GN=queC P E=3 SV=1
MLNHQRRALVLFSGGQDSTTCLAWALDRYAHVETVAFDYGQRHRIELDARLRVLEEFRARLPGPAARLGEDHLLDLSVLGQVADTALTSDRAIEMQANGLPNTFVPGRNLLFLTLAAALGYRRELDVLVGGMCETDFSGYPDCRDDTIKAQQVALGLGLGSRLTIETPLMWLDKAQTWELAQRLGGDDLVDIIVEQSHTCYLGERGARHGWGYGCGKCPACVLRKAGWERWQAGLAAADKSA

SEQ ID NO: 35446 - protein, 239 aa, Achromobacter arsenitoxydans
  misc_feature (1)..(239): tr|H0FFQ7|H0FFQ7_9BURK 7-cyano-7-deazaguanine synthase OS=Achromobacter arsenitoxydans SY8 OX=477184 GN=queC P E=3 SV=1
MQNHQRRALVLFSGGQDSTTCLAWALDRYAHVETVAFDYGQRHHIELSARLNVLREIRANFPDWAPRLGEDHLLDLKVLGQVGDTAMTSDRAIEMQANGLPNTFVPGRNLLFLTLAAALGYRRQLDVLVGGMCETDFSGYPDCRDDTIKAQQVALGLGLGSRVTIETPLMWIDKSETWALAYQLGGDALVETIVEESHTCYLGERGARHDWGYGCGECPACKLRKIGWEKWVVASAAEG

SEQ ID NO: 35447 - protein, 239 aa, Achromobacter denitrificans
  misc_feature (1)..(239): tr|A0A427WVG0|A0A427WVG0_ACHDE 7-cyano-7-deazaguanine s ynthase OS=Achromobacter denitrificans OX=32002 GN=queC PE=3 SV=1
MQNHQRRALVLFSGGQDSTTCLAWALDRYAHVETVAFDYGQRHHIELSARLNVLRDIRANFPDWAPRLGEDHLLDLKVLGQVGDTAMTSDRAIEMQANGLPNTFVPGRNLLFLTLAAALGYRRQLDVLVGGMCETDFSGYPDCRDDTIKAQQVALGLGLGARVTIETPLMWIDKSETWALAYQLGGDALVETIVEESHTCYLGERGARHDWGYGCGECPACKLRKIGWEKWVVASAAEG

SEQ ID NO: 35448 - protein, 239 aa, Achromobacter insolitus
  misc_feature (1)..(239): tr|A0A167BKM0|A0A167BKM0_9BURK 7-cyano-7-deazaguanine s ynthase OS=Achromobacter insolitus OX=217204 GN=queC PE =3 SV=1
MQNHQRRALVLFSGGQDSTTCLAWALDRYAHVETVAFDYGQRHHIELSARLNVLREIRGNFPDWAPRLGEDHLLDLKVLGQVGDTAMTSDRAIEMQANGLPNTFVPGRNLLFLTLAAALGYRRQLDVLVGGMCETDFSGYPDCRDDTIKAQQVALGLGLGSRVTIETPLMWIDKSETWALAHQLGGDALVETIVEESHTCYLGERGARHDWGYGCGECPACKLRKIGWEKWVVASAAEG

SEQ ID NO: 35449 - protein, 237 aa, Achromobacter insuavis
  misc_feature (1)..(237): tr|F7SY36|F7SY36_9BURK 7-cyano-7-deazaguanine synthase OS=Achromobacter insuavis AXX-A OX=1003200 GN=queC PE=3 SV=1
MLNHQRRALVLFSGGQDSTTCLAWALDRYAHVETVAFDYGQRHRIELDARLNVLRDIRARFPQWAPRLGEDHLLDLKVLGQVGDTAMTSDRAIEMQANGLPNTFVPGRNLLFLTLAAALGYRRQLDVLVGGMCETDFSGYPDCRDDTIKAQQVALGLGLGSRVTIETPLMWIDKSETWALAKQLGGDALVDTIVEESHTCYLGERGARHAWGYGCGECPACKLRRAGWDKWQAQGAV

SEQ ID NO: 35450 - protein, 236 aa, Achromobacter marplatensis
  misc_feature (1)..(236): tr|J4J6A4|J4J6A4_9BURK 7-cyano-7-deazaguanine synthase OS=Achromobacter marplatensis OX=470868 GN=queC PE=3 SV =1
MQNHQRRALVLFSGGQDSTTCLAWALDRYAHVETVAFDYGQRHRIELDARLNVLRDIRARFPQWAARLGEDHLLDLKVLGQVGDTAMTSDRAIEMQANGLPNTFVPGRNLLFLTLAATLGYRRQLDVLVGGMCETDFSGYPDCRDDTIKAQQVALGLGLGSRVTIETPLMWIDKSETWALAQTLGGDALVETIVEESHTCYLGERGARHGWGYGCGTCPACKLRRAGWEKWTAARA

SEQ ID NO: 35451 - protein, 361 aa, Achromobacter marplatensis
  misc_feature (1)..(361): tr|J4J8X6|J4J8X6_9BURK N-acetyl sugar amidotransferase OS=Achromobacter marplatensis OX=470868 GN=QWC_04958 PE =4 SV=1
MDTSDPDIVFNDEGCNHCTRYFSRVANEVHRGAQGESMLAQVVERIRAEGKGKDYDCVTGVSGGVDSTYVIYKLKELGLRPLAVHFDNGWNSELAVNNIKNALDKLGIDLHTYVVDWEEFKDLQMSFLRASVPNCEIPTDHAITATLLNTAKRVGTPYVINGSNVVTEGILPISWVYYSHDLKHIRAIHSRFGKTRLKTFPQIGLPAFTLRILTGKYRMVNLLNYLDYDKAAAMHVMQDELGWQYYGGKHYESIYTRWYQGYYLPTKFGFDKRRAHLSALVCAGQITRQQGLEEMEQDPYASNDLASDTEFVLKKFGITRAELDAIIAAPNHKHTDYPNQSQFIEGLSGLRTYIRRRAKSI

SEQ ID NO: 35452 - protein, 239 aa, Achromobacter piechaudii
  misc_feature (1)..(239): tr|A0A0L6IDU0|A0A0L6IDU0_9BURK 7-cyano-7-deazaguanine s ynthase OS=Achromobacter piechaudii OX=72556 GN=queC PE =3 SV=1
MQNHQRRALVLFSGGQDSTTCLAWALDRYAHVETVAFDYGQRHHIELSARLNVLRDIRANFPDWAPRLGEDHLLDLKVLGQVGDTAMTSDRAIEMQANGLPNTFVPGRNLLFLTLAAALGYRRQLDVLVGGMCETDFSGYPDCRDDTIKAQQVALGLGLGSRVTIETPLMWIDKSETWALAYQLGGDALVETIVEESHTCYLGERGARHDWGYGCGECPACKLRKIGWEKWVVASAAEG

SEQ ID NO: 35453 - protein, 239 aa, Achromobacter piechaudii; identical to SEQ ID NO: 35452
  misc_feature (1)..(239): tr|D4X3V7|D4X3V7_9BURK 7-cyano-7-deazaguanine synthase OS=Achromobacter piechaudii ATCC 43553 OX=742159 GN=exs B PE=3 SV=1

SEQ ID NO: 35454 - protein, 239 aa, Achromobacter pulmonis
  misc_feature (1)..(239): tr|A0A2N8KJ88|A0A2N8KJ88_9BURK 7-cyano-7-deazaguanine s ynthase OS=Achromobacter pulmonis OX=1389932 GN=queC PE =3 SV=1
MQNHQRRALVLFSGGQDSTTCLAWALDRYAHVETVAFDYGQRHHIELSARLNVLREIRENFPDWAPRLGEDHLLDLKVLGQVGDTAMTSDRAIEMQANGLPNTFVPGRNLLFLTLAAALGYRRQLDVLVGGMCETDFSGYPDCRDDTIKAQQVALGLGLGSRVTIETPLMWIDKSETWALAHQLGGDALVEIVVEQSHTCYLGERGARHDWGYGCGDCPACKLRKIGWEKWVVASAAEG

SEQ ID NO: 35455 - protein, 237 aa, Achromobacter ruhlandii
  misc_feature (1)..(237): tr|A0A1D8IGK6|A0A1D8IGK6_9BURK 7-cyano-7-deazaguanine s ynthase OS=Achromobacter ruhlandii OX=72557 GN=queC PE= 3 SV=1
MLNHQRRALVLFSGGQDSTTCLAWALDRYAHVETVAFDYGQRHRIELDARLNVLREIRARFPQWAPRLGEDHLLDLKVLGQVGDTAMTSDRAIEMQENGLPNTFVPGRNLLFLTLAAALGYRRQLDVLVGGMCETDFSGYPDCRDDTIKAQQVALGLGLGSRVTIETPLMWIDKSETWALAKQLGGDALVETIVEESHTCYLGERGARHAWGYGCGECPACKLRRAGWDKWQAQGAA

SEQ ID NO: 35456 - protein, 237 aa, Achromobacter ruhlandii
  misc_feature (1)..(237): tr|A0A2M9H1T4|A0A2M9H1T4_9BURK 7-cyano-7-deazaguanine s ynthase OS=Achromobacter ruhlandii OX=72557 GN=queC PE= 3 SV=1
MLNHQRRALVLFSGGQDSTTCLAWALDRYAHVETVAFDYGQRHRIELDARLNVLREIRARFPQWAPRLGEDHLLDLKVLGQVGDTAMTSDRTIEMQENGLPNTFVPGRNLLFLTLAAALGYRRQLDVLVGGMCETDFSGYPDCRDDTIKAQQVALGLGLGSRVTIETPLMWIDKSETWALAKQLGGDALVETIVEESHTCYLGERGARHAWGYGCGECPACKLRRAGWDKWQAQGAA

SEQ ID NO: 35457 - protein, 231 aa, Achromobacter sp.
  misc_feature (1)..(231): tr|A0A0M7MQL5|A0A0M7MQL5_9BURK 7-cyano-7-deazaguanine s ynthase OS=Achromobacter sp. ATCC35328 OX=1806490 GN=qu eC PE=3 SV=1
MKRAVVVFSGGQDSTTCLVQALQQYDEVHCVTFDYGQRHRAEIDVARELALKLGARAHKVLDVTLLNELAVSSLTRDSIPVPDYEPEADGIPNTFVPGRNILFLTLAAIYAYQVKAEAVITGVCETDFSGYPDCRDEFVKALNHAVSLGMAKDIRFETPLMWIDKAETWALADYYGKLDLVRNETLTCYNGFKGDGCGHCAACNLRANGLNHYLADKPTVMAAMKQKTGLR

SEQ ID NO: 35458 - protein, 239 aa, Achromobacter sp.
  misc_feature (1)..(239): tr|A0A1N7PYC1|A0A1N7PYC1_9BURK 7-cyano-7-deazaguanine s ynthase OS=Achromobacter sp. MFA1 R4 OX=1881016 GN=queC PE=3 SV=1
MQNHQRRALVLFSGGQDSTTCLAWALDRYAHVETVAFDYGQRHHIELSARLNVLRDIRANFPDWAPRLGEDHLLDLKVLGQVGDTAMTSDRAIEMQANGLPNTFVPGRNLLFLTLAAALGYRRQLDVLVGGMCETDFSGYPDCRDDTIKAQQVALGLGLGSRVTIETPLMWIDKSETWALAHALGGDALVETIVEESHTCYLGERGARHDWGYGCGECPACKLRKIGWEKWVVASAAEG

SEQ ID NO: 35459 - protein, 239 aa, Achromobacter spanius
  misc_feature (1)..(239): tr|A0A448C3H1|A0A448C3H1_9BURK 7-cyano-7-deazaguanine s ynthase OS=Achromobacter spanius OX=217203 GN=queC PE=3 SV=1
MQNHQRRALVLFSGGQDSTTCLAWALDRYAHVETVAFDYGQRHHIELSARLNVLREIRTNFPDWAPRLGEDHLLDLKVLGQVGDTAMTSDRAIEMQANGLPNTFVPGRNLLFLTLAAALGYRRQLDVLVGGMCETDFSGYPDCRDDTIKAQQVALGLGLGSRITIETPLMWIDKSETWALAHQLGGDALVDIVVEDSHTCYLGERGARHDWGYGCGECPACKLRKIGWEKWMVASAAEG

SEQ ID NO: 35460 - protein, 239 aa, Achromobacter spanius
  misc_feature (1)..(239): tr|A0A3S9Z274|A0A3S9Z274_9BURK 7-cyano-7-deazaguanine s ynthase OS=Achromobacter spanius OX=217203 GN=queC PE=3 SV=1
MQNHQRRALVLFSGGQDSTTCLAWALDRYAHVETVAFDYGQRHHIELSARLNVLREIRANFPDWAPRLGEDHLLDLKVLGQVGDTAMTSDRAIEMQANGLPNTFVPGRNLLFLTLAAALGYRRQLDVLVGGMCETDFSGYPDCRDDTIKAQQVALGLGLGSRITIETPLMWIDKSETWALAHQLGGDALVDIVVEDSHTCYLGERGARHDWGYGCGECPACKLRKIGWEKWVVASAAEG

SEQ ID NO: 35461 - protein, 239 aa, Achromobacter xylosoxidans
  misc_feature (1)..(239): tr|E3HJK6|E3HJK6_ACHXA 7-cyano-7-deazaguanine synthase OS=Achromobacter xylosoxidans (strain A8) OX=762376 GN= queC PE=3 SV=1
MQNHQRRALVLFSGGQDSTTCLAWALERYAHVETVAFDYGQRHHIELSARLNVLRDIRNNFPDWAPRLGEDHLLDLKVLGQVGDTAMTSDRAIEMQANGLPNTFVPGRNLLFLTLAAALGYRRQLDVLVGGMCETDFSGYPDCRDDTIKAQQVALGLGLGSRVTIETPLMWIDKSETWALAHQLGGDALVETIVEESHTCYLGERGARHDWGYGCGECPACKLRKIGWEKWVVASAAEG

SEQ ID NO: 35462 - protein, 245 aa, Acidaminobacter hydrogenoformans
  misc_feature (1)..(245): tr|A0A1G5RZA9|A0A1G5RZA9_9FIRM 7-cyano-7-deazaguanine s ynthase OS=Acidaminobacter hydrogenoformans DSM 2784 OX =1120920 GN=queC PE=3 SV=1
MRKVFNQQRYAEMKKDGKKMKALVLLSGGVDSTTCLGLAVDRHGSENVTALSIAYGQKHLKEIEAAQKITEYYKVEWTHLDLKKIFEYSDSTLMAHSKNEIPKESYAKQLEQLDGKPVSTYVPFRNGLFLSCAASIALSKGCSLIYYGPHRDDAAGNAYPDCSDAFNEAMNQAIFIGSGEQLKVEAPFIAMTKAQVVKTGLDLNVPYALTWSCYEGTDKPCGQCGTCLDRIAAFEKNGVRDPLMD

SEQ ID NO: 35463 - protein, 232 aa, Acidaminococcus fermentans
  misc_feature (1)..(232): tr|A0A1I5GQU4|A0A1I5GQU4_ACIFE 7-cyano-7-deazaguanine s ynthase OS=Acidaminococcus fermentans OX=905 GN=queC PE =3 SV=1
MNKKALVLSSGGVDSTTCVSVAVEEFGKENVSTVSIFYGQKHRKELECARKVAEYYGLSHYELDLSKIFQYSNCSLLDHSTEEIVHESYEQQIAENGEGKVSTYVPFRNGLMLSAVASLAMSIYEKDDVSIFIGAHADDAAGNAYADCSEAFIGAMGKAISLGTYNQCHIVAPFASCSKAGVVKRGLELHTPYELTWSCYEGGDKPCGTCGTCIDRARAFAANGVKDPALED

SEQ ID NO: 35464 - protein, 275 aa, Acidaminococcus fermentans
  misc_feature (1)..(275): tr|D2RJX1|D2RJX1_ACIFV PP-loop domain protein OS=Acidam inococcus fermentans (strain ATCC 25085 / DSM 20731 / V R4) OX=591001 GN=Acfer_1002 PE=4 SV=1
MQNSEDTAKLKQLQAILRDLGSVAVAFSGGVDSTFLLKVAHDTLGDKVLAVTARSCSFPERELKEAKAFCEKEGIRHLVVDSEELSIPGFSHNPTNRCYLCKHELFEKILEVAKENHLAAVVEGSNLDDEGDYRPGLQAIAELKIASPLRRAGLYKKEIRALSKELGLPTWNKQSFACLSSRFVYGEEITPRRLGMVDKAEQLLLDMGFHQLRVRIHGGNLARIEVMPEELRKVLDHRLEITEKLKGYGFAYVTLDLLGYRTGSMNETLSPEKKA

SEQ ID NO: 35465 - protein, 233 aa, Acidaminococcus intestini
  misc_feature (1)..(233): tr|C0WAE7|C0WAE7_9FIRM 7-cyano-7-deazaguanine synthase OS=Acidaminococcus intestini OX=187327 GN=queC PE=3 SV= 1
MSKKALVLSSGGVDSTTCVSVAVHELGRENVATVSIFYGQKHRKELDAAQKVADFYHVPHYELDLSKIFQYSNCSLLSHSTEEIIHESYEDQIAQNGEGKVSTYVPFRNGLMLSAVASLAMSLFEKDDVDIYLGAHADDAAGNAYADCSEAFTDAMGKAISIGTYEQCHLVAPFVEVNKAGIVKKGLELGTPYELTWSCYEGGDRPCGTCGTCIDRARAFAANGVPDPALEEK

SEQ ID NO: 35466 - protein, 233 aa, Acidaminococcus intestini; identical to SEQ ID NO: 35465
  misc_feature (1)..(233): tr|G4Q905|G4Q905_ACIIR 7-cyano-7-deazaguanine synthase OS=Acidaminococcus intestini (strain RyC-MR95) OX=56881 6 GN=queC PE=3 SV=1

SEQ ID NO: 35467 - protein, 232 aa, Acidaminococcus sp.
  misc_feature (1)..(232): tr|R7LU44|R7LU44_9FIRM 7-cyano-7-deazaguanine synthase OS=Acidaminococcus sp. CAG:542 OX=1262687 GN=queC PE=3 SV=1
MNKKALVLSSGGVDSTTCVSVAVEEFGKENVSTVSIFYGQKHRKELECARKVADYYGLPHYELDLSKIFQYSNCSLLDHSTEKIVHKSYEQQIAENGEEKVSTYVPFRNGLMLSAVASLAMSIYEKDDVSIFIGAHADDAAGNAYADCSEAFLDAMGRAISLGTYSQCHIVAPFASCSKAGVVKRGLELYTPYELTWSCYEGGDKPCGTCGTCIDRARAFAANGVKDPALED

SEQ ID NO: 35468 - protein, 249 aa, Acidaminococcus sp.
  misc_feature (1)..(249): tr|A0A415EKY1|A0A415EKY1_9FIRM ATP-dependent sacrificia l sulfur transferase LarE OS=Acidaminococcus sp. AM05-1 1 OX=2291997 GN=larE PE=4 SV=1
MELAEFFKDHPKVALAFSGGVDSSYLLYAALQNGADVHAYYVKSAFQPQFELEDAQKLAKQVGAKLTIMQANVLANETVVANPKNRCYYCKQVIFTGIGKQAAQDGYTTLLDGTNASDDAADRPGMKALQELSVLSPLRLCGLTKTEIRKRSKAAGLFTWDKPSYACLATRIPTGETITAEKLARTEQAENYLFSLGFTDFRVRSLGNTAKLQLPADQLEKLLAHRLAIVKQLKTLYTDVLLDLEARHE

SEQ ID NO: 35469 - protein, 423 aa, Acidibacillus ferrooxidans
  misc_feature (1)..(423): tr|A0A162SLX6|A0A162SLX6_9BACL Uncharacterized protein OS=Acidibacillus ferrooxidans OX=1765683 GN=AYJ22_03385 PE=4 SV=1
MPENNLFAADLSNDHNDLEIVLYGRRSELTQASVGAAIQHIVQRNRLNPAPRAWDLLSIVLSVITADMHVLRSESPDGWTREIELCVSVSDPEFWMSQQKLLEEQLQFLTTDVWKLSFVKCSLPLLPASQIFKPDQDCIVLLSGGLDSLIGAIDLVALDKHPYAVSQVAQGDTNQQRLFASRIGGGLAHLQLNHNAKCRGPHERSQRPRSLAFLAYGVLLATALKRYEEDANVNLYICENGFISINPPLTVSRLGSLSTRTTHPYFLQLFQELLSNAELRVTIANPYQFITKGEMLLGCKDQSLLHQHAHESTSCGRYARNGYKHCGRCVPCLIRRAAFHKWDIDDHTDYVYEDLSIPDRNHAEYDDVRAAAMAVQSVQSVGLENWAGPALSSAILHQADPYKSMVQRGLDELAAFLKTVGVA

SEQ ID NO: 35470 - protein, 240 aa, Acidibacillus ferrooxidans
  misc_feature (1)..(240): tr|A0A162TX40|A0A162TX40_9BACL 7-cyano-7-deazaguanine s ynthase OS=Acidibacillus ferrooxidans OX=1765683 GN=que C PE=3 SV=1
MTTGRDKEQRREGQAGAVVILSGGLDSATCLGIACAEGHHVTALSFDYGQRHHRELAAAARLAAHYGVAHHIYELPFFRQLGGSALTDDAISVPTEGVDKAHIPSTYVPGRNLIFLSIATALAEVTRSEWIYIGVNALDYSGYPDCRPEFMDAFANVATVATRAGVEGMHIEVKTPLLHLTKGEIVARGTALLVPYEMTTSCYVGEEEACGVCDSCRLRLAGFAEAGRVDPIRYQLRAKN

SEQ ID NO: 35471 - protein, 330 aa, Acidibacillus sulfuroxidans
  misc_feature (1)..(330): tr|A0A2U3CVX4|A0A2U3CVX4_9BACL Glutamine amidotransfera se type-2 domain-containing protein (Fragment) OS=Acidi bacillus sulfuroxidans OX=1765684 GN=BM613_13970 PE=4 S V=1
MCSIFGVITNGQPESLIIRNDIEDLIKASINRGRDGLGVRFTHGDHSMHPQRIVSVGKKTSLERLVKVGRIVSHAGAIGSFTMIGNARAEPTTEWVVDKNEWDQQPYHMDGWTIVHNGTIANDKDLRTYALQTKIDSAAIVEQLAECTLSADETCLSDSDYLYNVFHEVIRKLKGSYAILATHDSLPGYVFTACNYRPIWIGKSDTGMYFASQEDMLPTRAIKQMLKPYSCNVVTSTDVCNEVDLIPNKQTQRALVVASGGMDSTVAAQMCKSNGLDVTLINFQYGCRAETNELKAIRKIAEVMEVPLVEFPIPIYDKKDSPLFDQDAAI

SEQ ID NO: 35472 - protein, 232 aa, Acidibacillus sulfuroxidans
  misc_feature (1)..(232): tr|A0A2U3D6S5|A0A2U3D6S5_9BACL 7-cyano-7-deazaguanine s ynthase OS=Acidibacillus sulfuroxidans OX=1765684 GN=qu eC PE=3 SV=1
MKQYEKAVVILSGGLDSTTCLGVAVQEGEEVYALTFDYGQRHRIEIESAKKVAEYYRVKEHQIATLPFLRAIGGSALTDKEIAVPHSGVIANEIPVTYVPGRNLIFLSIATAYAEVVGANAIYLGVNALDYSGYPDCRPAFIESFARTATLATKAGAMGATLQIKTPLLYLSKAEIVTLGTKLGVPYELTSSCYEGGSVACGVCDSCRLRRKGFAEAGLTDPIAYSERIDVV

SEQ ID NO: 35473 - protein, 130 aa, Acidiferrobacter sp.
  misc_feature (1)..(130): tr|A0A2D7VK56|A0A2D7VK56_9GAMM 7-cyano-7-deazaguanine s ynthase (Fragment) OS=Acidiferrobacter sp. OX=1872107 G N=CL386_02795 PE=3 SV=1
MNRVYLLSGGIDSALVLAEADRDRMRHNFEDSLALTFDYGQPHVAEIHAAEQIASHFGVPWRCVDLRDAFAIAPSGLLVGDDQTASGSVVSLRNGIFLSVAASLGPREIFIGSNKGDWEYYPDCRPEFLG

SEQ ID NO: 35474 - protein, 227 aa, Acidiferrobacter sp.
  misc_feature (1)..(227): tr|A0A2Z3R2H3|A0A2Z3R2H3_9GAMM 7-cyano-7-deazaguanine s ynthase OS=Acidiferrobacter sp. SPIII_3 OX=1281578 GN=q ueC PE=3 SV=1
MSVADDKKAVVLLSGGLDSATTLALAREQGFQCHALSFDYGQRHKGELKAAASVAVAGGAHEHRVATLGVGFIGGSALTDLGLAVPQAPTTGIPVTYVPARNTVFLAVALGWAEVLGARDLFIGVNAVDYSGYPDCRPEYLAAFETLANLATRAGVEGGRFHIRAPLLRLTKAEIIRAGLDLGVDYGLTLSCYAPNDAGRVCGTCDACRLRAKGFAEAGVPDPAIVI

SEQ ID NO: 35475 - protein, 189 aa, Acidiferrobacter thiooxydans
  misc_feature (1)..(189): tr|A0A1C2G4X6|A0A1C2G4X6_9GAMM 7-cyano-7-deazaguanine s ynthase OS=Acidiferrobacter thiooxydans OX=163359 GN=A9 R16_00200 PE=3 SV=1
MSVLLLSGGIESATLLHERGRAGNLRALFLDYGQRAARAERSAATALCETTGTPLTVLSLRGLGKALAPPGPFSPHVPLNARNLLAVALAANQALALKTHAVLLGVQRDDRGHNEGALPFITALSDTLAALGLALETPYRDLRKSEVVARGRALGIDYTRTYSCLLGRRAPCGRCPQCRARAQALGPDA

SEQ ID NO: 35476 - protein, 189 aa, Acidiferrobacter thiooxydans
  misc_feature (1)..(189): tr|A0A368HDT3|A0A368HDT3_9GAMM 7-cyano-7-deazaguanine s ynthase OS=Acidiferrobacter thiooxydans OX=163359 GN=C4 900_12400 PE=3 SV=1
MSVLLLSGGIESTTLLHERSGTGDLRALFLDYGQRAARAERSAAIALCETTGTPLTVLSLRGVGKALAPPGPFRPHLPLNARNLLAVALAANQALALKTDAVLLGVQRDDRGHSEGALPFIMALSDTLAALGLTLETPYRDLRKTEVVARGRALGIDYARTYSCLLGRRTPCGHCPQCRARAQALAPGA

SEQ ID NO: 35477 - protein, 226 aa, Acidihalobacter ferrooxidans
  misc_feature (1)..(226): tr|A0A1P8UHU8|A0A1P8UHU8_9GAMM 7-cyano-7-deazaguanine s ynthase OS=Acidihalobacter ferrooxidans OX=1765967 GN=q ueC PE=3 SV=1
MKKAVILLSGGLDSATVLAMARAQGYACYALSFDYGQRHNAELRAAQRVATAGHATEHRLVRLDLSAIGGSALTDVTIAVPETAEEGIPVTYVPARNTVFLSVALGWAEVLGARDIFIGVNAVDYSGYPDCRPAFIEAFEQLANLATKVGVQGGRMTIQAPLIALSKAQIIQTGLALGVDYAQTVSCYQADSDGRACGRCDACRLRAQGFAEAGVNDPTPYQGLAG

SEQ ID NO: 35478 - protein, 198 aa, Acidihalobacter ferrooxidans
  misc_feature (1)..(198): tr|A0A1P8UL40|A0A1P8UL40_9GAMM 7-cyano-7-deazaguanine s ynthase OS=Acidihalobacter ferrooxidans OX=1765967 GN=B W247_06040 PE=3 SV=1
MVLLSGGIDSATALHLEYRRGAVLPLYIDYGQRAAACERAAAEALCADLGLSLDALELGALGTAFRRGHEWQAHVPLPHRNLAVLGLAFSYAADRHARRLCVALNRDDTTAYASAATPFLDAFRRLAATLDDIEIATPLIAWDKAEVIRQGRSLGVNYAHTYSCLLGRSLPCGGCPQCAKRRAGFAEAGHTDPALAGE

SEQ ID NO: 35479 - protein, 215 aa, Acidihalobacter prosperus
  misc_feature (1)..(215): tr|A0A1D8KB09|A0A1D8KB09_9GAMM 7-cyano-7-deazaguanine s ynthase OS=Acidihalobacter prosperus OX=160660 GN=BJI67 _14535 PE=3 SV=1
MKRPIFDDKNRPTLLLLSGGIESGTLLHMLADEGPLIPLFVDYAQRAASRERAAATAQCAVLDLELETLELGSVGETFRRGLSWQPHVPLPQRNLVLLALALSLAEARRATRICLALNREDTADYPSATTGFVHDFAALAGRISGIAVETPLIELDKAAIIRLGVDLGVDYSLTYSCLLGRPAPCGGCPQCLKRHTAFAAAGVTDPATNLPENPP

SEQ ID NO: 35480 - protein, 223 aa, Acidihalobacter prosperus
  misc_feature (1)..(223): tr|A0A1A6C6U1|A0A1A6C6U1_9GAMM 7-cyano-7-deazaguanine s ynthase OS=Acidihalobacter prosperus OX=160660 GN=queC PE=3 SV=1
MNKAVILLSGGLDSATVLAIARAAGFECYALSFDYGQRHAAELHAAHEVAMRGGAAAHRVIKLDLGAIGGSALTDASIDVPELPGEGIPVTYVPARNTVFLSVALGWAEVLEAQDIFVGVNAVDYSGYPDCRPAFVESFERLANVATKAGVEGRRIHVHAPLIEDTKAEIIRRGMALGVDYAQTVSCYQADDAGRACGRCDACRLRAAGFDDAGVPDPTRYQG

SEQ ID NO: 35481 - protein, 236 aa, Acidimicrobiaceae bacterium
  misc_feature (1)..(236): tr|A0A357ZXN4|A0A357ZXN4_9ACTN 7-cyano-7-deazaguanine s ynthase OS=Acidimicrobiaceae bacterium OX=2024894 GN=qu eC PE=3 SV=1
MNKPNAIVLLSGGLDSTTCLAIAKNEGFTPIALSFRYGQRHTGELDCAAAIAHAAGVEHLIADIDLAAFGGSALVDESLEVPKHESVDDLSADSVPITYVPARNTIFLSFATAVAETRGAHDVFIGVNAVDYSGYPDCRPEFIEAFEVMANLATREGVEGGRLRIRTPLIDLTKAEIIQLGLSLGVDYGATMSCYDPAADGGACGHCDACLLRARGFADAAVVDPTRYSNSSTSDL

SEQ ID NO: 35482 - protein, 218 aa, Acidimicrobiaceae bacterium
  misc_feature (1)..(218): tr|A0A2E9JA31|A0A2E9JA31_9ACTN 7-cyano-7-deazaguanine s ynthase OS=Acidimicrobiaceae bacterium OX=2024894 GN=qu eC PE=3 SV=1
MPRIVVVYSGGLDSFTLLNHSMDLGHEVFPITFDYGQKHKKEISYAEDFCQDESLALKVVDITEINSLLKGSALTDNIEVPKGHYEDESMKTTVVPNRNMILISMATAYAVTVNAEEVWYGAHGGDHAIYPDCRPEFVNKINEATLVANYSPISVKAPFIDLSKHEILSIGLKLGLDYSKAWTCYEGKELACGVCGSCAERLEAFKINGSEDPLEYSN

SEQ ID NO: 35483 - protein, 228 aa, Acidimicrobiales bacterium
  misc_feature (1)..(228): tr|A0A2W6C5R4|A0A2W6C5R4_9ACTN 7-cyano-7-deazaguanine s ynthase OS=Acidimicrobiales bacterium OX=2201156 GN=que C PE=3 SV=1
MEGPRVQHVVLASGGLDSTVCLALAQRDGGTAPLALSFDYGQRHAVELERAAAVCARYGAEQLVVSIDARAWGGSALTDPDIEVPAPTGSVSSVPIPTTYVPARNSIFLAVALGVAEARGAEAVYLGVNAVDYSGYPDCRPVFVEAFRRVAEVGQRRGLEGHPVDIRAPLIEASKADIVRLGTELGAPLELTWSCYREGPRPCRGCDACDLRARGFAAAGLADPALAV

SEQ ID NO: 35484 - protein, 237 aa, Acidimicrobiales bacterium
  misc_feature (1)..(237): tr|A0A520XKT6|A0A520XKT6_9ACTN 7-cyano-7-deazaguanine s ynthase OS=Acidimicrobiales bacterium OX=2201156 GN=que C PE=3 SV=1
MNIKIKALVLFSGGQDSATCLAWALSRFDHVETVGFDYEQRHMVEMQCRMDVLAHIKAEFPQWAPKMGKDHIIDIPALGGISETSLTRDIDIDDTGDGLPNTFVPGRNLIFLNFAAAVAYNRGITQLVAGMCEADFSGYPDCRKETLDAAMKAINLGMDADYSLSTPLMHLSKAGAWKLAEDLGGKALVDLIVQKSHTCYTGERGDLHAWGHGCGACPACELRANGWANYVTGTFNR

SEQ ID NO: 35485 - protein, 1822 aa, Acidimicrobiia bacterium
  misc_feature (1)..(1822): tr|A0A520XWJ1|A0A520XWJ1_9ACTN Amino acid adenylation d omain-containing protein OS=Acidimicrobiia bacterium OX =2080302 GN=EX267_05005 PE=4 SV=1
MTEQLGLTSAQRLMLASQNFNPGDPLYNSAFLFVIEGAIDVFAFRLAFAQLVDDAEALRTVIRDPQGAAWQEVRPRVDFNLPVIDVSDRPDPETSAFAWAQEQAKQALDIEATTFDSALLKCADNQFAWYLNQHHLVTDARSVEVLFRRLEERYIAARSGLEDGIEPLPSVAAYVEYESGAAEKRDTNPNLTVVPPPLYGRPTGAAGTDNERIEIELSQRLSDEIGHLIDRPGNGALTRDLGLLQIFATATFAFLKRIGGQETITVVAPAHNRVNRRFASSAGLLMELFPIEVTTDRDETFASLHRKAQSATLDYLRLARPGHADPDINRHVNVVLNYLTMEFASFAGNRVATRWLHPDSVDAHHQLRIQVFDFDRTGRFTVAFDVATGVLGPEQRAALAAHFQSILNAMVEDWDATIEEVDLLGDTERIEVLAHAAGEAPGAAPLDVVAMFLDQVARMPDSAAVREGDITWTYAELDTATERLAARIEPKSVIGVALPRSARAVIAMLGILRAGATYVPIDPAWPVERISYVAADAGCSMIIADESLDVDSSIETLETLLEATAPVGSRPHAAPEDLAYILYTSGSTGEPKGVMVERGSLVNYISWAAGFYGPGLTFPLFTPLTFDLTITSIFVPLASGGSIVAYPSTTEAADLAVLEVFGEDEVDIVKLTPSHLALLADRDLAGSRIRQLILGGEDLPTATAARIHASAGGAIRIHNEYGPTEATVGCIVHTYDPATDQGVSVPIGRPIAGMRAYVLDAAARPVPMGVPGELWLAGTGLARGYVGKPDLTETRFPAVTGLGESKLYITGDLARLRHDGTIEYLGRRDDQVKIKGIRVELGEIEAALASHPDVTATAARLWEHGDPVASEDLIHCVRCGLASDYPGVSFDAERVCNECRAFEDYSGKARVYFKPEGELATVLTSQRGERGKYDCVALLSGGKDSTYVLCRLVDMGLRVLALTLDNGYISDQAKGNIGRVVEALGVEHRYMTTPAMNDIFVDSLQRFGNVCNGCYKTIYTLSMQTALDEDIPYIVTGLSRGQFFETRLTAELFTELTVSSDQIDANVLEARKAYHRVDDAVQRLLDVSMFEDDDVFEKVQFVDFYRFVDVGLDELYTYLDERVPWSRPTDTGRSTNCLINDVGIYYHRKVRGYHNYALPYSWDVRMGHKTRDDALAELDDDIDVAEVARMLDEIGFPEDVTSSESGRMLVLYYVAPEEIPAPELKKHMAATLPRQLVPNKFVRLDVLPLTQNGKVDRRELPSPDHQRPEMETTFIAPRTDNEVALTGIWEQVLGVDGIGIRDNYFDLGGDSISAVQIIARAHRQGLPITMNQLAEQLTIENLAMAVNADALRAERIVGTVSLTPIQHWFFEEVDDVERFHHAVRIATGSGVDLEAVRSALDALVVHHDALRQSFRWNGNGWESSVADQVPSIRLEVLELDDDGPSRQIPLDSPLLAPFDLALAPLMRAALVVSPDGTTELALVAHHLIVDSVSWSHIVDDLGHLTRTVDGARSPVLPAVTTSLRDWTERLSASAPDLDAGQWENIAATDVMGWPSADPGSAERTGHHRIDPDTTSRILAHATEAGLGVDEVLIAGLTSALCASLDTGRTRLFLEGHGRESDSADMDVTRTMGWFTSLFPVVAEVPDASDPKAVAVAVRDQLSTALRSGRDYGVLRYLHPEERVRASVALDHREHLVFNYLGRTTHAGAEEGELVLAGPLQLVRPPESNRIFGAEVNAYIDGEALTIEWATHGAAAERLESIVEQAVDQLLRFVDQPGDDSEAFPLAGLDEAGLGKLASILDSSRGENRQCARRCRTSTMSTR

SEQ ID NO: 35486 - protein, 246 aa, Acidiphilium multivorum
  misc_feature (1)..(246): tr|F0J1M4|F0J1M4_ACIMA 7-cyano-7-deazaguanine synthase OS=Acidiphilium multivorum (strain DSM 11245 / JCM 8867 / NBRC 100883 / AIU301) OX=926570 GN=queC PE=3 SV=1
MTTSPPAASGAALVLFSGGQDSGTCLAWALDRYDRVETIGFFYGQRHAVELECRAPLRAAIAGLRPWRATLGADTMLDISAALATLGATAMTAEIEIETTEAGLPNTFVPGRNLLFLTYAAALAYRRGIGTLVGGMCETDYSGYPDCRNTTMQAMQLALSLGLDRAVTVETPLMYRDKAATWELAAELGGAALVEALRTGSHSCYRGERATLHDWGYGCGTCPACELRAAGWQRWRAARADFVDGA

SEQ ID NO: 35487 - protein, 243 aa, Acidiphilium rubrum
  misc_feature (1)..(243): tr|A0A1N6QPC1|A0A1N6QPC1_ACIRU 7-cyano-7-deazaguanine s ynthase OS=Acidiphilium rubrum OX=526 GN=queC PE=3 SV=1
MTSQAALVLFSGGQDSATCLADALDRFDRVETIGFFYGQRHAVELECRAPLRRTIAALQPWRATLGPDHMLDIAAALAALGETAMTADIEIATTAAGLPNTFVPGRNLLFLTYAAALAYRRGLGVLVGGMCETDYSGYPDCRNDTMRAMQSALGLGLDRPIIIDTPLMYRDKAATWRLAETLGGAALVETIRTESHSCYKGDRAVLHDWGYGCAACPACDLRAAGWARYRAGAAPGGDTMDGT

SEQ ID NO: 35488 - protein, 246 aa, Acidiphilium sp.; identical to SEQ ID NO: 35486
  misc_feature (1)..(246): tr|F7S6S6|F7S6S6_9PROT 7-cyano-7-deazaguanine synthase OS=Acidiphilium sp. PM OX=1043206 GN=exsB PE=3 SV=1

SEQ ID NO: 35489 - protein, 246 aa, Acidiphilium sp.
  misc_feature (1)..(246): tr|A0A257S7I1|A0A257S7I1_9PROT 7-cyano-7-deazaguanine s ynthase OS=Acidiphilium sp. 21-60-14 OX=1970292 GN=queC PE=3 SV=1
MPHQNPPPHATAALVLFSGGQDSATCLADALARYQRVETIGFFYGQRHEIEIDCRAPLRSAIAAASPFGDRLGADHMLNIEPALTALGATAMTSAMEITVTESGLPSTFVPGRNLLFLTYAAALAYRRDLHALVGGMCETDYSGYPDCRATTMAAMQSALTLGLDRPILIDTPLMGLDKAATWRLAERLGGPAMIEAIRVLSHSCYRGDRSHLHGWGYGCDDCPACALRKSGWMRYRNSSNAEAGQ

SEQ ID NO: 35490 - protein, 230 aa, Acidipila dinghuensis
  misc_feature (1)..(230): tr|A0A4Q1SI75|A0A4Q1SI75_9BACT 7-cyano-7-deazaguanine s ynthase OS=Acidipila dinghuensis OX=1560006 GN=queC PE= 3 SV=1
MSFPRTRAVVCLSGGMDSVVCAALTARDHDAYALHFSYGQRTEERELKSARAVAETLGFKDFLHVKFDFFRRIGGSALTDDSIAVPKAPEEEPIGHSVPVTYVPFRNAHFLSAAVSWAEVLGARHIVIGAVEQDSSGYPDCRPAYYEAFQTLIERGTKDGDIKVSTPLIHMRKKEIVALGLELNAPFHLTWSCYSGAEAACGECDSCVLRLRAFREAGLTDPIPYVSSKG

SEQ ID NO: 35491 - protein, 227 aa, Acidipila rosea
  misc_feature (1)..(227): tr|A0A4R1L3H9|A0A4R1L3H9_9BACT 7-cyano-7-deazaguanine s ynthase OS=Acidipila rosea OX=768535 GN=queC PE=3 SV=1
MMTGLKPRAVICLSGGMDSAVCAALAARECEVYALHFSYGQRTEARELKSARGVAEAVGAKQFLHLEIDLFRRIGGSALTDETIAVPAAVEEGIGASVPVTYVPFRNAHFLSAAVSWAEVVGARKIYIGAVEQDSSGYPDCRPAYYEAFQELIRRGTKEGDIEVATPLIHMRKREIVALGLELGAPFNLTWSCYSEQGRACGVCESCVLRLRAFAEAGTVDPVPYAA

SEQ ID NO: 35492 - protein, 242 aa, Acidipila sp.
  misc_feature (1)..(242): tr|A0A372IMB4|A0A372IMB4_9BACT 7-cyano-7-deazaguanine s ynthase OS=Acidipila sp. 4G-K13 OX=2303751 GN=queC PE=3 SV=1
MSTPRTRAVVCLSGGMDSCVCAALAARDYDAYAVHFSYGQRTEERELRAALDVAKALQLEDFLHLRIGLFRTIGGSALTDTKIEVPKASAEAAIGSEIPVTYVPFRNAHFLSAAVSWAEVLEAKKIFIGAVEQDSSGYPDCRPAYYEAFQQLIRTGTRNGDIEVETPLIHMRKSGIVALGLELRAPLHLTWSCYSGTREACGECESCVLRLRAFAQAGAEDPIPYAVRNLQDFRRQLEPSGG

SEQ ID NO: 35493 - protein, 223 aa, Acidisarcina polymorpha
  misc_feature (1)..(223): tr|A0A2Z5FS44|A0A2Z5FS44_9BACT 7-cyano-7-deazaguanine s ynthase OS=Acidisarcina polymorpha OX=2211140 GN=queC P E=3 SV=1
MDSAVCAALAARESEAFGLHFSYGQRTERRELESARNVAKSLGFAEFLPLKIDIFRQIGGSALTDSSIDVPAAPEAEPIGESIPVTYVPFRNAHFLSAAVSWAEVLGAKKVFIGAVEQDSSGYPDCRPAYYEAFQQLIRTGTRDADIEVLTPLIHMRKSEIVLLGLELSAPLHLTWSCYSGEEEACGVCDSCALRLRGFAQAGVEDQIPYRGRRMAGAFSQSV

SEQ ID NO: 35494 - protein, 233 aa, Acidisphaera rubrifaciens
  misc_feature (1)..(233): tr|A0A0D6P4M4|A0A0D6P4M4_9PROT 7-cyano-7-deazaguanine s ynthase OS=Acidisphaera rubrifaciens HS-AP3 OX=1231350 GN=queC PE=3 SV=1
MSDGGALVLFSGGQDSATCLAWALSRFDRVETIGFDYGQRHRIELDVRTRFLGEIRTAFPQWGQRLGNDHLLDLSSLGRISDTALTTGATIAFAKSGLPNTFVPGRNLLFLTYAGAIAYRREIKHLVTGVCETDYSGYPDCRDDTIKVVQVALNLGMDKRFVIHTPLMLIDKAATWSLATQLGGLPLVELIVEHSHTCYEGDRTQRHAWGYGCGACPACNLRAQGYAIWASDA

SEQ ID NO: 35495 - protein, 240 aa, Acidisphaera rubrifaciens
  misc_feature (1)..(240): tr|A0A0D6P909|A0A0D6P909_9PROT 7-cyano-7-deazaguanine s ynthase OS=Acidisphaera rubrifaciens HS-AP3 OX=1231350 GN=queC PE=3 SV=1
MTQPSDRTDAALVLFSGGQDSATCLAWALARYARVETIGFDYGQRHAVELSCRAPLRAGLAGLRDWGARLGPDHLIDLTAGIGALGATAMTAEQAIVMTDEGLPNTFVPGRNLLFLTYAAALAWRRGLRRIVAGVCETDYSGYPDCRDDTIKAMQLPLNLGMQRRFVLETPLMWRDKAATWALADRLGGAPLVSLIVEGTHTCYLGDRTRRHDWGYGCAACPACDLRAGGWARWRSGQGE

SEQ ID NO: 35496 - protein, 228 aa, Acidithiobacillales bacterium
  misc_feature (1)..(228): tr|A0A0S8L0K4|A0A0S8L0K4_9PROT 7-cyano-7-deazaguanine s ynthase OS=Acidithiobacillales bacterium SM1_46 OX=1703 384 GN=queC PE=3 SV=1
MRVGADLPRAVVLVSGGLDSATTLAIARRDGFACYALTFDYGQRHRVELEAARRVAQQLAAADHRIVPLDLSWIGGSALTDRSIAVPTVPGEGIPVTYVPARNTVFLAIALGWAEVLGARALYIGVNAVDYSGYPDCRPEYIEAFQRLANVATRAGVEGQPVSLHAPLIQMTKAQIIQAGTGLGVDFSLTTSCYDPGPGGEACGRCDSCRLRREGFAEAGVADPTRYR

SEQ ID NO: 35497 - protein, 228 aa, Acidithiobacillales bacterium; identical to SEQ ID NO: 35496
  misc_feature (1)..(228): tr|A0A0S8G3X0|A0A0S8G3X0_9PROT 7-cyano-7-deazaguanine s ynthase OS=Acidithiobacillales bacterium SM23_46 OX=170 3385 GN=queC PE=3 SV=1

SEQ ID NO: 35498 - protein, 228 aa, Acidithiobacillus caldus
  misc_feature (1)..(228): tr|A0A060A309|A0A060A309_ACICK 7-cyano-7-deazaguanine s ynthase OS=Acidithiobacillus caldus (strain ATCC 51756 / DSM 8584 / KU) OX=637389 GN=queC PE=3 SV=1
MGDSEKAAIVLLSGGLDSATVLAIAREAGFALHALSFDYGQRHATELQFARKLAEAAGVRSHRVLKMDLRIFGASALTDERIAVPEEPAAAGIPITYVPARNTLFLSYALALAEVLGVLDIFIGVNSQDYSGYPDCRPEFIQRFQELAQVATVLGTEKGQKLSIHAPLQYLSKAQIIRRGLELGVDYAHTRSCYQLDTQGRSCGRCDSCRLRLAGFAELDLRDPAPYI

SEQ ID NO: 35499 - protein, 228 aa, Acidithiobacillus caldus; identical to SEQ ID NO: 35498
  misc_feature (1)..(228): tr|A0A1E7YMY3|A0A1E7YMY3_9PROT 7-cyano-7-deazaguanine s ynthase OS=Acidithiobacillus caldus OX=33059 GN=queC PE =3 SV=1

SEQ ID NO: 35500 - protein, 229 aa, Acidithiobacillus ferridurans
  misc_feature (1)..(229): tr|A0A2Z6IM63|A0A2Z6IM63_9PROT 7-cyano-7-deazaguanine s ynthase OS=Acidithiobacillus ferridurans OX=1232575 GN= queC PE=3 SV=1
MPMPATPAIVLLSGGLDSATVLALMRRDGFAVHALSFDYGQRHKEELRYAALLAQSMGAASHRVLRIDLAAFGGSALTDPQLSVPESGLAPGIPITYVPARNTVFLSLALALAEVLGARDIFLGVNSQDYSGYPDCRPEFVHAFEALAQVATRLGDEARGPRIHAPLQFLNKSEIIRLGSRLGVDYGMTRSCYQLDAEGRSCGRCDSCRLRREGFRQAGIADPTPYQSS

SEQ ID NO: 35501 - protein, 197 aa, Acidithiobacillus ferridurans
  misc_feature (1)..(197): tr|A0A2Z6IKH5|A0A2Z6IKH5_9PROT 7-cyano-7-deazaguanine s ynthase OS=Acidithiobacillus ferridurans OX=1232575 GN= AFERRID_23860 PE=3 SV=1
MSFVNLVSGGLDSTLVGVMAKEDHIDHFPLFIDYGQRAANKEWATCQAVHKQLGLPEPTKMDLSGFGRVIVSGLTSTELDIKNEAFTPGRNLMFLLMGSAYAYQLGASSVAIGLLAEQFSLFPDQRPPFLANAGEAIEAAMGRRIKILTPLIEFGKADVVRLANEKGVSGTYSCHTGDSLPCGRCIACLEFQFNEGE

SEQ ID NO: 35502 - protein, 226 aa, Acidithiobacillus ferrivorans
  misc_feature (1)..(226): tr|A0A257TB41|A0A257TB41_9PROT 7-cyano-7-deazaguanine s ynthase OS=Acidithiobacillus ferrivorans OX=160808 GN=q ueC PE=3 SV=1
MPTPAVVLLSGGLDSATVLALMRRDGFAVHAISFDYGQRHKEELHYAGLLAQAMGAASHRVVNIDLAAFGGSALTDPEISVPETGLTPGIPITYVPARNTVFLALALALAEVLRARDIFLGVNSQDYSGYPDCRPEFVQAFEALAQVATRLGDEARGPRIHAPLQFLNKSEIIRLGSRLGVDYGMTRSCYQLDAEGRSCGRCDSCRLRREGFQKAGIADPTPYQGS

SEQ ID NO: 35503 - protein, 231 aa, Acidithiobacillus ferrivorans
  misc_feature (1)..(231): tr|A0A060UT68|A0A060UT68_9PROT 7-cyano-7-deazaguanine s ynthase OS=Acidithiobacillus ferrivorans OX=160808 GN=q ueC PE=3 SV=1
MTMPTPAIPAIVLLSGGLDSATVLALMRRDGFAVHAISFDYGQRHKEELHYAALLAQAMGAASHRVVNIDLAAFGGSALTDPEISVPETGLTPGIPITYVPARNTVFLALALALAEVLRARDIFLGVNSQDYSGYPDCRPEFVQAFEALAQVATRLGDEARGPRIHAPLQFLNKSEIIRLGSSLGVDYGMTRSCYQLDAEGRSCGRCDSCRLRRDGFQKAGVADPTPYQDV

SEQ ID NO: 35504 - protein, 229 aa, Acidithiobacillus ferrooxidans
  misc_feature (1)..(229): tr|A0A2W1KDK1|A0A2W1KDK1_ACIFR 7-cyano-7-deazaguanine s ynthase OS=Acidithiobacillus ferrooxidans OX=920 GN=que C PE=3 SV=1
MPTPATPAIVLLSGGLDSATVLALMRRDGFAVHALSFDYGQRHKEELRYAALLAQSMGAASHRVLRIDLAAFGGSALTDPQLSIPETGLAPGIPITYVPARNTVFLSLALALAEVLGARDIFLGVNSQDYSGYPDCRAEFVQAFEALAQVATRLGDEARGPRIHAPLQFLNKSEIIRLGSRLGVDYGMTRSCYQLDAEGRSCGRCDSCRLRREGFRQAGIADPTPYQDS

SEQ ID NO: 35505 - protein, 229 aa, Acidithiobacillus ferrooxidans; identical to SEQ ID NO: 35504
  misc_feature (1)..(229): tr|B7J3G9|B7J3G9_ACIF2 7-cyano-7-deazaguanine synthase OS=Acidithiobacillus ferrooxidans (strain ATCC 23270 / DSM 14882 / CIP 104768 / NCIMB 8455) OX=243159 GN=queC PE=3 SV=1

SEQ ID NO: 35506 - protein, 227 aa, Acidithiobacillus sp.
  misc_feature (1)..(227): tr|A0A2I1DMY1|A0A2I1DMY1_9PROT 7-cyano-7-deazaguanine s ynthase OS=Acidithiobacillus sp. SH OX=187490 GN=B1757_ 05315 PE=3 SV=1
MLSLAPMNTRSETATIIRQPESMSPDRRCLLLMSGGIESSTLLFQLAQKENPQPVFLDYAQRAARQEWQAVQTLSLQLHIDPQRYDLSAFGNAVGALRTARYHVPLPHRNFVAIAAVAAIASNLNIKRIVIGLSADDAAVDTCSRPAFQNAIHDTLGSLGLQLETPLIHLGKDAIIQYGNALGVPWAKTYSCLLGRTPACGFCPQCLKREAAFALAGVNDPDMGYDN

SEQ ID NO: 35507 - protein, 101 aa, Acidithiobacillus sp.
  misc_feature (1)..(101): tr|A0A3M8RK60|A0A3M8RK60_9PROT 7-cyano-7-deazaguanine s ynthase OS=Acidithiobacillus sp. CJ-2 OX=1867749 GN=EC5 80_02670 PE=3 SV=1
MLHTPRSAISTKAEVIGQGRNFGVPWQKTYSCLTGRAYHCGICPQCRKRRAAFAQAVPMWMSITPPTSNNRVEEKIPCPQIARAPSGPWRTFPMAPLISRK

SEQ ID NO: 35508 - protein, 238 aa, Acidithiobacillus thiooxidans
  misc_feature (1)..(238): tr|A0A1C2IJ04|A0A1C2IJ04_ACITH 7-cyano-7-deazaguanine s ynthase OS=Acidithiobacillus thiooxidans OX=930 GN=A6M2 3_10070 PE=3 SV=1
MLSSISMNTHTETAAIIRQPDPMSPDPMSLEVARPKTANCLLLMSGGIESSTLLFQLAQTECPQPVFLDYAQRAAQQEWEAVQRLSENQQVQAQRYDLSAFGNAVGALRAERYHVPLPHRNFFAIAAIATIASNLNIQRIVIGLSADDAQVDTCSRPAFQNAITNTLGTLNLQLETPLIQLSKASIILEGNRLHVPWKKTYSCLLGREKHCGFCPQCKKRREAFAQAGANDQDLGYNP

SEQ ID NO: 35509 - protein, 226 aa, Acidithiobacillus thiooxidans
  misc_feature (1)..(226): tr|A0A1C2J309|A0A1C2J309_ACITH 7-cyano-7-deazaguanine s ynthase OS=Acidithiobacillus thiooxidans OX=930 GN=queC PE=3 SV=1
MIETKPAIVLLSGGLDSATVMALMRRDGYAIHAMSFDYGQRHKQELHYAGLVAQAMGVASHRTVHIDLAAFGGSALTDAQLAVPESGIAPGIPITYVPARNTIFLSFALALAEVTGAQDIFIGVNSQDYSGYPDCRPEFISAFEKLAQVATRLGDESRGPRIHAPLQYLDKSEIIQLGTQLGVDYGLTRSCYQLDDQGRSCGRCDSCRLRHAGFLSAGIADPTPYQ

SEQ ID NO: 35510 - protein, 82 aa, Acidithrix ferrooxidans
  misc_feature (1)..(82): tr|A0A0D8HF99|A0A0D8HF99_9ACTN 7-cyano-7-deazaguanine s ynthase OS=Acidithrix ferrooxidans OX=1280514 GN=queC2 PE=3 SV=1
MANLASKAAVERRAHTAINTPLIKLAKVQIIELGIKLNVDYDITHSCYNLKDDGTMCGVCDSCVLSDRGFPAHGMLDPAVLR

SEQ ID NO: 35511 - protein, 229 aa, Acidithrix ferrooxidans
  misc_feature (1)..(229): tr|A0A0D8HI31|A0A0D8HI31_9ACTN 7-cyano-7-deazaguanine s ynthase OS=Acidithrix ferrooxidans OX=1280514 GN=queC1 PE=3 SV=1
MANCVVLLSGGLDSTTVAAFAMSQGFDVHALSFNYGQRHLVELDAARRVARELGLHSHVVCDIDLRVFGGSALTASIDVPHRQSGEAVDFGASKEIPVTYVPARNTIFLSFALALAETISASDIFIGANSIDYSGYPDCRPEYLAAFEAMANLATKASVEKGQKTTIHAPLLTLTKVGIIELGLSLGVDYSITHSCYDPVDFNKPCGSCDSCLIRMGAFESLGMVDPLF

SEQ ID NO: 35512 - protein, 235 aa, Acidobacteria bacterium
  misc_feature (1)..(235): tr|A0A1F2S414|A0A1F2S414_9BACT 7-cyano-7-deazaguanine s ynthase OS=Acidobacteria bacterium RIFCSPLOWO2_02_FULL_ 60_20 OX=1797179 GN=queC PE=3 SV=1
MESNRPKAVVLMSGGMDSCLTAAIAAQQFQLAALHISYGQLTEARERQAFQEIAEFYQIRQRLVIEQPYLARIGGSALTDPRIPLREANLEATDIPTSYVPFRNAHFLAAAVSWGEVIGAEKIFIGAVEPDSSGYPDCRPAYYRIFNELIAVGTRPETRLEIVTPLIQLRKHEIVKKGIELGAPLHLSWSCYRSSEKACGTCDSCALRLRAFEQAGVEDVIPYRFRPKFHLHSAV

SEQ ID NO: 35513 - protein, 238 aa, Acidobacteria bacterium
  misc_feature (1)..(238): tr|A0A1Q7L364|A0A1Q7L364_9BACT 7-cyano-7-deazaguanine s ynthase OS=Acidobacteria bacterium 13_1_40CM_4_58_4 OX= 1803453 GN=queC PE=3 SV=1
MTDSRKAVVLLSGGMDSCVCTAMARERHDAENVALLHAGYGQRTQRRERRAFEEIAEFYSVRERLVVQLDHFRAIGGSALTDEKIAVPANELGAPGPHGSAIPVTYVPFRNAHILSVAVSWAEVIGAGAIYIGAVAEDSSGYPDCRPEYYRVFQELIRVGTRPETQIEMVTPIIRMKKSEIIRRGLELRAPLHLTWSCYQEEEVACGVCDSCLLRLRAFAEAGGTDAVAYRRAASARR

SEQ ID NO: 35514 - protein, 234 aa, Acidobacteriales bacterium
  misc_feature (1)..(234): tr|A0A1Q6XEG6|A0A1Q6XEG6_9BACT 7-cyano-7-deazaguanine s ynthase OS=Acidobacteriales bacterium 13_2_20CM_55_8 OX =1803470 GN=queC PE=3 SV=1
MGKSKQSAVVLLSGGMDSCVCAALANRDYATAAVHVSYGQRTEQRERLAFSAICERLGISDRLVVRTEALRAVGGSALTDALIAVPEAAGTVFGEQRAQIPVTYVPFRNAHFLAVAVSWAEVLGAEKIYIGAVEQDSSGYPDCRPAYYRAYNEVIKAGTKEGQIEVVTPLIGLRKRDIVRLGLELNAPFDLTWSCYSREDSACGVCDSCVLRLRAFHEAGAADPIRYAELAQRA

SEQ ID NO: 35515 - protein, 229 aa, Acidobacteriales bacterium
  misc_feature (1)..(229): tr|A0A1Q7N4K5|A0A1Q7N4K5_9BACT 7-cyano-7-deazaguanine s ynthase OS=Acidobacteriales bacterium 13_1_40CM_3_55_5 OX=1803468 GN=queC PE=3 SV=1
MRDGKHRAVVLLSGGMDSCVCAALARRDYATAAVHISYGQRTEQRERLAFDRVCERLGISDRLVARNEALRAVGGSALTDPRIAVPEAAEIGREVPVTYVPFRNAHLLAVAVSWAEVLGAEKIYIGAVEQDSSGYPDCRPAYYRAYNEVIKAGTKEGRIEIVTPLIGMRKSEIVRLGLELNAPFDLTWSCYSREDSACGVCDSCVLRLQAFHQVGAADPIPYAELVQRA

SEQ ID NO: 35516 - protein, 234 aa, Acidobacteriia bacterium
  misc_feature (1)..(234): tr|A0A321L527|A0A321L527_9BACT 7-cyano-7-deazaguanine s ynthase OS=Acidobacteriia bacterium AA117 OX=2169412 GN =queC PE=3 SV=1
MAGTKPKSVVLLSGGMDSCVCVTLAARDTEAAALHISYGQRTEQREQRAFDGICDRLGIRKRLKVRNEVFPAIGGSALTDEHIAVPEAREEIGFSGIPVTYVPFRNAHFLAAAVSWAEVLGATRVYIGAVEQDSSGYPDCRPAYYRAFNEVIRAGTRAGDIEIVTPLIALRKAEIVKLGLDLGAPFDLTWSCYSREDEACGTCESCMLRLAAFGAAGAQDPLPYAAQVISHTQV

SEQ ID NO: 35517 - protein, 581 aa, Acidobacteriia bacterium
  misc_feature (1)..(581): tr|A0A317J5W7|A0A317J5W7_9BACT Uncharacterized protein OS=Acidobacteriia bacterium OX=2081523 GN=C5B51_08300 P E=4 SV=1
MNRGRTLAGEHVIVCGEAPLPSRVKAHDALRLKLSGDDRNIDLEIVDISRKLATNVPDFVADLVEIAAYIYCADQQIPRGGEGVMDVGASWRRPFVFHIPVRAPGMWSAHPIVEALRRTLTFLSEDTYDFHFSKLTNPIPMQQYLKFEDGHVPAPGVDEVILFSGGLDSLGGAVKEAVREQRRLALVSHRSTPKIFSRQKELVKRLQDVCKTCPPIHVPVWVHKRGLSAREYTQRTRSFLYAVLAFAVAHVFQLQRIRFYENGVVSLNLPISEQAIGARATRTTHPQTLAGFAELFSNLIGADFSVENPFLWNTKAQVVNLIGEAGCGDLISQSVSCMHTHEQTAEHPHCGRCSQCVWRRFATLASAYAEDDCSSLYGVDLLTGMRLEEKDRTLVESFIRVATDLGRMNELQLVQTYGEISRVLRHLAPLSSNQVAENLVGLFSEHASEVCRVMDKAIAEHASEIREGRLPASCAIVLAVAERYRTANSPEITSSKPKLRRSAVNLKPRRKQPEKSIQEIRARIRQMKGENMSAQMMCKSLGNAPRPPAAAWAHLSWPEAWKSVHQNSVKVWLSRNSKIVK

SEQ ID NO: 35518 - protein, 229 aa, Acidobacterium capsulatum
  misc_feature (1)..(229): sp|C1F844|QUEC_ACIC5 7-cyano-7-deazaguanine synthase OS =Acidobacterium capsulatum (strain ATCC 51196 / DSM 112 44 / JCM 7670 / NBRC 15755 / NCIMB 13165 / 161) OX=2400 15 GN=queC PE=3 SV=1
MTPKRERAVVCLSGGMDSCVCAAIAARDYEPYAIHFSYGQRTEARELVSARSVAERLGFKDLLHLKIDLFRRIGGSALTDTSIDVPKAPAEEAAIGAEIPVTYVPFRNAHFLAAAVSWAEVLGASKIVIGAVEQDSSGYPDCRPAYYEAFQHLIETGTKEGSIRVETPLIQLRKREIVRLGLELGAPLDLTWSCYSGAEEACGECESCVLRLRAFEEADAVDPIPYAHR

SEQ ID NO: 35519 - protein, 241 aa, Acidobacterium sp.
  misc_feature (1)..(241): tr|A0A2G4JIX1|A0A2G4JIX1_9BACT 7-cyano-7-deazaguanine s ynthase OS=Acidobacterium sp. OX=1872119 GN=queC PE=3 S V=1
MWRPASAGPRAVVLLSGGLDSYTAAAVAKRDGFALSALSINYGQRHVRELAASRAVAAALGVERHLELALDLSQIGGSSLTSSAMAVPKDSTFAQATVDKPPTVIPNTYVPARNTIFLSMALGWAEVLGAADIVIGVNALDYSGYPDCRPEFIQAFEQLARLATRAGVEGRPLTIQTPLISLSKADIIRLGLSLGLDYGLTHSCYDPPSSGRPCGHCDSCLLRAAGFAEAGATDPLITAAG

SEQ ID NO: 35520 - protein, 227 aa, Acidobacterium sp.
  misc_feature (1)..(227): tr|A0A2G4JJR6|A0A2G4JJR6_9BACT 7-cyano-7-deazaguanine s ynthase OS=Acidobacterium sp. OX=1872119 GN=CK533_06930 PE=3 SV=1
MNTLVLLSGGLDSAVLVAHEAQHATVQPVYVSVGLAWEAGELAMVDRLLSAPAFGGRVLPLARVAFTMRDVYPPTHWAIRGVPPAYDTPDQDVYLAGRNLVLLTTAAVLATQSQAHRIALGPLAGNPFPDARPEFFSAMATALSLGLGHTIEIATPFLEWQKAEVIQRGAELGVPLELTLSCMNPSAGAAGAPPMHCGLCSKCRERRDAFAAAGVADPSVYDHPSPR

SEQ ID NO: 35521 - protein, 234 aa, Acidocella aminolytica
  misc_feature (1)..(234): tr|A0A0D6PHW6|A0A0D6PHW6_9PROT 7-cyano-7-deazaguanine s ynthase OS=Acidocella aminolytica 101 = DSM 11237 OX=11 20923 GN=queC PE=3 SV=1
MDQNAALVLFSGGQDSATCLAWALARFERVETLGFDYGQRHRVELDVRAPLRTDIASLTPDWTDKLGEDHIIDLTVLGQISETALTQNAAIAMQANGLPNTFVPGRNLLFFTFAAAIAYRRGIKHIITGVCETDYSGYPDCRDDTVKALQVALNLGMESRFVLHTPLMWIDKAQTWALARDLGGAALVEAIRTGSHSCYQGTRETLHPWGYGCGTCPACELRAQGWGRFQASPV

SEQ ID NO: 35522 - protein, 239 aa, Acidocella sp.
  misc_feature (1)..(239): tr|A0A257NRT5|A0A257NRT5_9PROT 7-cyano-7-deazaguanine s ynthase OS=Acidocella sp. 20-63-7 OX=1970304 GN=queC PE =3 SV=1
MDKHRKALVLFSGGQDSATCLAWALSRFEAVETVGFAYGQRHAVEMTVRVPLLAAVRGLNPEWAARLGEDHVVDLSVLGQISESSLTKDTEIAMAASGLPNTFVPGRNLVFLTFAAMLAYRRGARHIVGGMCETDYSGYPDCRDDSVKAMQLALNVGMGADFVLHTPLMWIDKAQTWGLAQSLGGKALVELIIEGSHTCYYGDREHRHDWGYGCGVCPSCVLRAQGFAAFSSTESRENK

SEQ ID NO: 35523 - protein, 238 aa, Acidocella sp.
  misc_feature (1)..(238): tr|A0A257Q9A3|A0A257Q9A3_9PROT 7-cyano-7-deazaguanine s ynthase OS=Acidocella sp. 20-57-95 OX=1970301 GN=queC P E=3 SV=1
MVFSVLDDCKALVLFSGGQDSTTCLGWALQNFTTVETIGFAYGQRHAVEMTCREPVRQAIRDINPVWHNRLAEDHVVDLSVLGALGDSALTKDIEIAMTAEGLPTTFVPGRNLAFLTFAAMVAYRRGAKHIVGGMCETDFSGYPDCRDDSVKAMQLALNIGMARQFVLHTPLMWIDKAATWNLAKDLGGQALVDIIINGTHTCYYGDRSTKHAWGFGCGTCPSCALRAQGFQKFSAGT

SEQ ID NO: 35524 - protein, 234 aa, Acidomonas methanolica
  misc_feature (1)..(234): tr|A0A023D1C5|A0A023D1C5_ACIMT 7-cyano-7-deazaguanine s ynthase OS=Acidomonas methanolica NBRC 104435 OX=123135 1 GN=queC PE=3 SV=1
MAHADDTALVLFSGGQDSATCLAWALDRFARVETLGFDYGQRHAVELECRATLRADMATLSPDWAARLGPDHTLDLPVLGALSETALTREADIVMTESGLPSTFVPGRNLIFLSLAAALAVRRHARHIVTGVCETDYSGYPDCRDDTIKALQVALNLGMAQRFVLHTPLMWLDKAQTWRLAEALGGAALVEAINRHSHSCYLGDRRHAHDWGYGCGTCPACELRAKGWAAYVEG

SEQ ID NO: 35525 - protein, 236 aa, Acidovorax anthurii
  misc_feature (1)..(236): tr|A0A328ZKA4|A0A328ZKA4_9BURK 7-cyano-7-deazaguanine s ynthase OS=Acidovorax anthurii OX=78229 GN=queC PE=3 SV =1
MRAGHALVLFSGGQDSTTCLAWALERFERVETIGFDYGQRHHVELQARTTVLAALRAQFPAWDARLGDDHMVDLAVLGQISDTALTRDTAIQMTEAGLPNTFVPGRNLLFFQLAAAVGYRRGLHTLVGGMCETDFSGYPDCRDDTLKALQVALSLGMGQRFTIDTPLMWIDKADTWELAHQLGGDALVRLIVQDTHTCYHGVRGTLHAWGHGCGECPACALRRAGHERWVAQRAAP

SEQ ID NO: 35526 - protein, 236 aa, Acidovorax avenae
  misc_feature (1)..(236): tr|F0Q1W9|F0Q1W9_ACIAP 7-cyano-7-deazaguanine synthase OS=Acidovorax avenae (strain ATCC 19860 / DSM 7227 / JC M 20985 / NCPPB 1011) OX=643561 GN=queC PE=3 SV=1
MRAGHALVLFSGGQDSTTCLAWALERFERVETIGFDYGQRHHVELEARTAVLAALRERFPRWRERLGEDHMVDLAVLGQISDTALTRDTAIQMTEAGLPNTFVPGRNLLFFQLAAAVGYRRGLHTLVGGMCETDFSGYPDCRDDTLKALQVALSLGMGQRFTIETPLMWIDKAATWEMARQLGGDELVRLIVEDTHTCYHGVRGALHAWGHGCGECPACALRRAGYERWTGHATQG

SEQ ID NO: 35527 - protein, 239 aa, Acidovorax avenae
  misc_feature (1)..(239): tr|A0A2R4DK03|A0A2R4DK03_9BURK 7-cyano-7-deazaguanine s ynthase OS=Acidovorax avenae subsp. avenae OX=80870 GN= queC PE=3 SV=1
MRAGHALVLFSGGQDSTTCLAWALERFERVETIGFDYGQRHHVELEARTAVLAALRERFPQWRERLGEDHMVDLAVLGQISDTALTRDTAIQMTEAGLPNTFVPGRNLLFFQLAAAVGYRRGLHTLVGGMCETDFSGYPDCRDDTLKALQVALSLGMGQRFTIETPLMWIDKAATWEMAHELGGDALVDVVVRQSHTCYHGVRDTLHAWGYGCGECPACELRRAGHAQWMEQVTDRRDR

SEQ ID NO: 35528 - protein, 239 aa, Acidovorax caeni
  misc_feature (1)..(239): tr|A0A1I7I3M8|A0A1I7I3M8_9BURK 7-cyano-7-deazaguanine s ynthase OS=Acidovorax caeni OX=343013 GN=queC PE=3 SV=1
MSRRALVLFSGGQDSATCLAWALAHYTHVETLGFDYGQRHRVELDCRARLREGLLGMPWPGHLGEDHLLNVDVLGQLGASAMTDDVAIAMQADGLPNTFVPGRNLLFFTLGAALAYRRGLDVLVGGMSQTDYSGYPDCRDNTLKALQVALSLGVDRPLTVETPLMWCDKAATWALAQELGGEALVELVRRESHTCYLGQREQLHAWGYGCGTCPACELRAKGWAQWRHALAGGRSAQGA

SEQ ID NO: 35529 - protein, 234 aa, Acidovorax carolinensis
  misc_feature (1)..(234): tr|A0A240U7Q8|A0A240U7Q8_9BURK 7-cyano-7-deazaguanine s ynthase OS=Acidovorax carolinensis OX=553814 GN=queC PE =3 SV=1
MRSGHALVLFSGGQDSTTCLAWALEHFAHVETIGFDYGQRHQVELQARQEVLSALRAGFPQWRERLGEDHMIDLAVLGQISDTALTRDTAIVMDAAGLPNTFVPGRNLLFFQLAAAVGYRRGLHTLVGGMCETDFSGYPDCRDDTLKALQVAVSLGMGQRFTFETPLMWLDKADTWQLAHTLGGQALVDIVLEQSHTCYHGVRDTRHAWGYGCGTCPACTLRKAGYERWRATQA

SEQ ID NO: 35530 - protein, 234 aa, Acidovorax carolinensis
  misc_feature (1)..(234): tr|A0A2C9NTH3|A0A2C9NTH3_9BURK 7-cyano-7-deazaguanine s ynthase OS=Acidovorax carolinensis OX=553814 GN=queC PE =3 SV=1
MRPGHALVLFSGGQDSSTCLAWALEHFAHVETIGFDYGQRHQVELQARQEVLSALRAGFPQWRERLGEDHMIDLAVLGQISDTALTRDTAIVMDAAGLPNTFVPGRNLLFFQLAAAVGYRRGLHTLVGGMCETDFSGYPDCRDDTLKALQVAVSLGMGQRFTFETPLMWLDKADTWQLAHTLGGQALVDIVLEQSHTCYHGVRDTRHAWGYGCGTCPACTLRKAGYERWRATQA

SEQ ID NO: 35531 - protein, 239 aa, Acidovorax cattleyae
  misc_feature (1)..(239): tr|A0A1H0VI85|A0A1H0VI85_9BURK 7-cyano-7-deazaguanine s ynthase OS=Acidovorax cattleyae OX=80868 GN=queC PE=3 S V=1
MRAGHALVLFSGGQDSTTCLAWALERFERVETIGFDYGQRHHVELEARTAVLAALREHFPQWRERLGEDHMVDLAVLGQISDTALTRDTAIQMTEAGLPNTFVPGRNLLFFQLAAAVGCRRGLHTLVGGMCETDFSGYPDCRDDTLKALQVALSLGMGQRFTIDTPLMWIDKAATWEMARQLGGNDLVRIIVEDTHTCYHGERGALYAWGHGCGECPACELRRAGFERWTAGANARPYA

SEQ ID NO: 35532 - protein, 237 aa, Acidovorax cavernicola
  misc_feature (1)..(237): tr|A0A3A1W4Z0|A0A3A1W4Z0_9BURK 7-cyano-7-deazaguanine s ynthase OS=Acidovorax cavernicola OX=1675792 GN=queC PE =3 SV=1
MPLHTTALVLFSGGQDSATCLAEALSKYQRVETLGFDYGQRHRVELDVRGTVLAKMRERFPEWAPRLGEDHVLTLAALAQLGGSSLTEEVAFAMQADGLPNTFVPGRNLLFLTLAGALAYRRGLQVIVTGVCETDFSGYPDCRDDTMKAMQLALSLGLERRLVIETPLMWIDKAETWALAHRLGGQPLVDLIVEETHTCYLGDREHRQAWGYGCGECPACDLRKKGWARYSGQAAAG

SEQ ID NO: 35533 - protein, 235 aa, Acidovorax citrulli
  misc_feature (1)..(235): sp|A1TIG3|QUEC_ACIAC 7-cyano-7-deazaguanine synthase OS =Acidovorax citrulli (strain AAC00-1) OX=397945 GN=queC PE=3 SV=1
MRAGHALVLFSGGQDSTTCLAWALERFERVETIGFDYGQRHHVELEARTAVLAALRGRFPAWSARLGDDHMVDLAVLGQISDTALTRDTAIQMTEAGLPNTFVPGRNLLFFQLAAAVGYRRGLHTLVGGMCETDFSGYPDCRDDTLKALQVALSLGMGQRFTIETPLMWIDKAETWEMARQLGGDELVQLIVEDTHTCYHGVRGALHAWGHGCGECPACALRRAGHERWTAQHTA

SEQ ID NO: 35534 - protein, 235 aa, Acidovorax delafieldii
  misc_feature (1)..(235): tr|A0A561XTS6|A0A561XTS6_ACIDE 7-cyano-7-deazaguanine s ynthase OS=Acidovorax delafieldii OX=47920 GN=queC PE=3 SV=1
MRPGHALVLFSGGQDSTTCLAWALENFAHVETIGFDYGQRHHIELQARQTVLSSLRAQFPQWNARLGDDHMLDLAVLGHISDTALTSDTEIQMTAAGLPNTFVPGRNLLFFQLAAAVGYRRGLHTLVGGMCETDFSGYPDCRDDTLKALQVAVSLGMGQRFTFDTPLMWLDKAETWELARALGGKALVDLIVNDSHTCYHGVRDTLHAWGYGCGTCPACALRKSGYERWSGATTA

SEQ ID NO: 35535 - protein, 234 aa, Acidovorax delafieldii
  misc_feature (1)..(234): tr|C5T5E3|C5T5E3_ACIDE 7-cyano-7-deazaguanine synthase OS=Acidovorax delafieldii 2AN OX=573060 GN=queC PE=3 SV =1
MRPGHALVLFSGGQDSTTCLAWALAHFEHVETIGFDYGQRHQVELQARQQVLTALRTAFPQWRERLGDDHMIDLAVLGQISDTALTRETEIVMDAAGLPNTFVPGRNLLFFQLAAAVGYRRGLHTLVGGMCETDFSGYPDCRDDTLKALQVAVSLGMGQRFTFETPLMWLDKAATWEMAHTLGGPALVDIILEQSHTCYHGVREVRHAWGYGCGTCPACALRKAGYERWQAAQT

SEQ ID NO: 35536 - protein, 239 aa, Acidovorax ebreus
  misc_feature (1)..(239): sp|B9MBJ3|QUEC_ACIET 7-cyano-7-deazaguanine synthase OS =Acidovorax ebreus (strain TPSY) OX=535289 GN=queC PE=3 SV=1
MSRLPQRRALVLLSGGQDSATCLAWALARYGHVETLGFDYGQRHRVELDCRQRLIDGVRALPWPGQLGPDHMLTVDVLAQLGGSAMTDDVAIAMQADGLPNTFVPGRNLLFFTLAAALAYRRGLDVLVGGMSETDYSGYPDCRDSTLKALQVALSLGVDRPLTLETPLMWRSKADTWALAQRLGGDALVELIRCESHTCYLGQRGDLHAWGHGCGGCPACELRAQGWEQWTAQRSLNGA

SEQ ID NO: 35537 - protein, 236 aa, Acidovorax kalamii
  misc_feature (1)..(236): tr|A0A235ELH3|A0A235ELH3_9BURK 7-cyano-7-deazaguanine s ynthase OS=Acidovorax kalamii OX=2004485 GN=queC PE=3 S V=1
MRPGHALVLFSGGQDSTTCLAWALENFTHVETIGFDYGQRHHIELQARQTVLTSLRARFPQWNARLGDDHMLDLAVLGHISDTALTSDAEIQMTAAGLPNTFVPGRNLLFFQLAAAVGYRRGLHTLVGGMCETDFSGYPDCRDDTLKALQVAVSLGMGQRFTFDTPLMWLDKAETWELARALGGQALVDLIVNDSHTCYHGVRDTLHAWGYGCGTCPACALRKSGYERWKGSPTSP

SEQ ID NO: 35538 - protein, 240 aa, Acidovorax konjaci
  misc_feature (1)..(240): tr|A0A1I1USV1|A0A1I1USV1_9BURK 7-cyano-7-deazaguanine s ynthase OS=Acidovorax konjaci OX=32040 GN=queC PE=3 SV= 1
MRAGHALVLFSGGQDSTTCLAWALERFERVETIGFDYGQRHHVELQARTAVLAALRAQFPAWAARLGDDHMVDLAVLGQISDTALTRDTAIQMTEAGLPNTFVPGRNLLFFQMAAAVGYRRGLHTLVGGMCETDFSGYPDCRDDTLKALQVALSLGMGQRFTIDTPLMWIDKADTWELARQLGGDALVRLIVQDTHTCYHGVRGALHAWGHGCGECPACALRQAGYERWAARRPAHAASG

SEQ ID NO: 35539 - protein, 235 aa, Acidovorax radicis
  misc_feature (1)..(235): tr|A0A561D1K7|A0A561D1K7_9BURK 7-cyano-7-deazaguanine s ynthase OS=Acidovorax radicis OX=758826 GN=queC PE=3 SV =1
MRPGSALVLFSGGQDSTTCLAWALTHFAHVETVGFDYGQRHHIELTARQTVLAAMRERFPEWAGRLGEDHMLDLAVLGRISDTALTSETEIQMTAAGLPNTFVPGRNLLFFNLAAAVGYRRGLHTLVGGMCETDFSGYPDCRDDTLKALQVAVSLGMGQRFTFETPLMWLDKADTWQLAKDLGGQALVDVVLEESHTCYHGVRGERHAWGYGCGTCPACALRKAGYERWTGNGRS

SEQ ID NO: 35540 - protein, 234 aa, Acidovorax soli
  misc_feature (1)..(234): tr|A0A1H3XU68|A0A1H3XU68_9BURK 7-cyano-7-deazaguanine s ynthase OS=Acidovorax soli OX=592050 GN=queC PE=3 SV=1
MRSGHALVLFSGGQDSTTCLAWALEHFAHVETIGFDYGQRHQVELQARHAVLAALRAGFPQWRERLGEDHMIDLSVLGQISDTALTRETEIVMDAAGLPNTFVPGRNLLFFQLAAAVGYRRGLHTLVGGMCETDFSGYPDCRDDTLKALQVAVSLGMGQRFTFETPLMWLDKAETWQLARTLGGRALVDIVLEQSHTCYHGVRDTRHAWGYGCGTCPACALRKAGYERWQASQA

SEQ ID NO: 35541 - protein, 119 aa, Acidovorax sp.
  misc_feature (1)..(119): tr|A0A0A1VJP2|A0A0A1VJP2_9BURK 7-cyano-7-deazaguanine s ynthase OS=Acidovorax sp. MR-S7 OX=1268622 GN=AVS7_0316 9 PE=3 SV=1
MSVKLDVLVGGMCETDFSGYPDCRDDTIKAQQVALGLGLGARVTIETPLMWIDKSETWALAYQLGGDALVETIVEESHTCYLGERGARHDWGYGCGECPACKLRKIGWEKWVVASAAEG

SEQ ID NO: 35542 - protein, 239 aa, Acidovorax sp.; identical to SEQ ID NO: 35536
  misc_feature (1)..(239): sp|A1W9G0|QUEC_ACISJ 7-cyano-7-deazaguanine synthase OS =Acidovorax sp. (strain JS42) OX=232721 GN=queC PE=3 SV =1

SEQ ID NO: 35543 - protein, 235 aa, Acidovorax temperans
  misc_feature (1)..(235): tr|A0A0D7KAL2|A0A0D7KAL2_9BURK 7-cyano-7-deazaguanine s ynthase OS=Acidovorax temperans OX=80878 GN=queC PE=3 S V=1
MRSGHALVLFSGGQDSTTCLAWALSQFAQVETIGFDYGQRHHVELQARHAVLDAMRAQFPQWSSKLGDDHMLDLSVLGHISDTALTSETEIQMTAAGLPNTFVPGRNLLFFQLAAAVGYRRGLHTLVGGMCETDFSGYPDCRDDTLKALQVAVSLGMGQRFTFETPLMWLDKSQTWDLARTLGGDALVDIVLEQSHTCYHGVREERHAWGYGCGTCPACALRKAGFERWNATQAR

SEQ ID NO: 35544 - protein, 235 aa, Acidovorax temperans
  misc_feature (1)..(235): tr|A0A543KVV4|A0A543KVV4_9BURK 7-cyano-7-deazaguanine s ynthase OS=Acidovorax temperans OX=80878 GN=queC PE=3 S V=1
MRSGHALVLFSGGQDSTTCLAWALSQFAHVETIGFDYGQRHHVELQARHAVLEAMRSQFPQWSSKLGDDHMLDLSVLGHISDTALTSETEIQMTAAGLPNTFVPGRNLLFFQLAAAVGYRRGLHTLVGGMCETDFSGYPDCRDDTLKALQVAVSLGMGQRFTIETPLMWLDKAQTWDLARTLGGDALVDIVLEQSHTCYHGVREERHAWGYGCGTCPACALRKAGFERWNATLAR

SEQ ID NO: 35545 - protein, 234 aa, Acidovorax valerianellae
  misc_feature (1)..(234): tr|A0A1G6XPH1|A0A1G6XPH1_9BURK 7-cyano-7-deazaguanine s ynthase OS=Acidovorax valerianellae OX=187868 GN=queC P E=3 SV=1
MRVGHALVLFSGGQDSTTCLAWALTHFKRVETIGFDYGQRHHVELQARQDVLDGLRAEFPQWADRLGEDHMVDLAVLGQISDTALTRDTAIQMTEAGLPNTFVPGRNLLFFQLAAAVGYRRGLHTLVGGMCETDFSGYPDCRDDTLKALQVAVSLGMGQRFTFETPLMWIDKAATWEMARQLGGDVLVDLIVQRSHTCYHGVRDTLHAWGYGCGTCPACELRRTGYERWKAGYQ

SEQ ID NO: 35546 - protein, 235 aa, Acidovorax wautersii
  misc_feature (1)..(235): tr|A0A1I2AZE5|A0A1I2AZE5_9BURK 7-cyano-7-deazaguanine s ynthase OS=Acidovorax wautersii OX=1177982 GN=queC PE=3 SV=1
MRPGHALVLFSGGQDSTTCLAWALTHFEHVETIGFDYGQRHQVELQARTEVLAAVRERFPQWAGRLGEDHMVDLAVLGQISDTALTRDTAIQMTAAGLPNTFVPGRNLLFFQLAAAVGYRRGLHTLVGGMCETDFSGYPDCRDDTLKALQVAVSLGMGQRFTFETPLMWIDKAATWELARELGGDALVDIIVRQSHTCYHGVRDTLHSWGYGCGECPACALRRAGHEQWAARSGA

SEQ ID NO: 35547 - protein, 223 aa, Acinetobacter albensis
  misc_feature (1)..(223): tr|A0A1C4GW33|A0A1C4GW33_9GAMM 7-cyano-7-deazaguanine s ynthase OS=Acinetobacter albensis OX=1673609 GN=queC PE =3 SV=1
MRARAIVLLSGGLDSTTCLAWAQARYECIAVSFMYGQRSTTELDAARALTQGAGVEHRVIKIDLGNLGGSALTDLSIDIPEQEQEGIPVTYVPARNTIFLSYALAAAEVFGAEAIVIGINAVDYSGYPDCRPEFIDAFERMARLATKVGVEGKPLKFETPLLHLSKANIIRLGIEHGVDYSQTVSCYQADDQGRACGKCDSCRLRKQGFADASVEDPTRYIPS

SEQ ID NO: 35548 - protein, 221 aa, Acinetobacter apis
  misc_feature (1)..(221): tr|A0A217EFW7|A0A217EFW7_9GAMM 7-cyano-7-deazaguanine s ynthase OS=Acinetobacter apis OX=1229165 GN=queC PE=3 S V=1
MRTRAIVLLSGGLDSTTCLAWAQANYDCVALSFQYGQRSSTELEAAKKLAEQSNVPHHIINIDLGRLGGSALTDHSIDVPEQLNEGIPVTYVPARNTIFLSYALAAAEVYEAQAIVIGVNAVDYSGYPDCRPEYIDAFAKLATLATKAGVEGTPLKIETPLLHLSKANIIRLGLEHGVDYSQTVSCYQADSQGQACGKCDSCRLRKDGFAEAGVEDPTRYV

SEQ ID NO: 35549 - protein, 434 aa, Acinetobacter baumannii; identical to SEQ ID NO: 27312
  misc_feature (1)..(434): tr|A0A3D5C6B5|A0A3D5C6B5_ACIBA Multifunctional fusion p rotein OS=Acinetobacter baumannii OX=470 GN=queC PE=3 S V=1
  misc_feature (214)..(214): Xaa can be any naturally occurring amino acid

SEQ ID NO: 35550 - protein, 223 aa, Acinetobacter baumannii
  misc_feature (1)..(223): tr|A0A062FBL6|A0A062FBL6_ACIBA 7-cyano-7-deazaguanine s ynthase OS=Acinetobacter baumannii 754286 OX=1310668 GN =queC PE=3 SV=1
MRPRAIVLLSGGLDSTTCLAWAQARYECIAISFMYGQRSTTELDAAKALAQRAGVEHRVINIDLANLGGSALTDHNIAVPEQLQEGIPVTYVPARNTIFLSYALAASEVFNAEAIVIGINAVDYSGYPDCRPEFIDAFANMARLATKAGVEGKPLKFETPLLHLSKANIIRLGIEHGVDYSQTVSCYQADAQGRACGKCDSCRLRKEGFIDAGVTDPTRYIPQ

SEQ ID NO: 35551 - protein, 229 aa, Acinetobacter baylyi
  misc_feature (1)..(229): sp|Q6F9A3|QUEC_ACIAD 7-cyano-7-deazaguanine synthase OS =Acinetobacter baylyi (strain ATCC 33305 / BD413 / ADP1 ) OX=62977 GN=queC PE=3 SV=1
MNGEFGMRPRAIVLLSGGLDSTTCLAWAQARYECMALSFMYGQRSTTELDAAKAIAQNAGVEHRVINIDLANLGGSALTDHNIDVPEQLQEGIPVTYVPARNTIFLSYALAAAEVFGAEAIVIGVNAVDYSGYPDCRPEYIQAFTNMARLATKAGVEGKPLTFETPLLHLSKANIIRLGIEHGVDYSQTVSCYQADAQGRACGKCDSCRLRKQGFIEAGVTDPTRYIPQ

SEQ ID NO: 35552 - protein, 226 aa, Acinetobacter beijerinckii
  misc_feature (1)..(226): tr|N9E0I8|N9E0I8_9GAMM 7-cyano-7-deazaguanine synthase OS=Acinetobacter beijerinckii CIP 110307 OX=1217648 GN= queC PE=3 SV=1
MENNMRSRAIVLLSGGLDSTTCLAWAQANYECIALSFMYGQRSTTELDAARALAQRAGVEHRVINIDLGNLGGSALTDHNIDVPEQLQEGIPVTYVPARNTIFLSYALAAAEVFDAKAIVIGINAVDYSGYPDCRPEFIDAFANLARLATKAGVEGKPLKIETPLLHLSKANIIRLGIEHGVDYSQTVSCYQADAQGRACGKCDSCRLRQQGFIEAGIADPTRYAE

SEQ ID NO: 35553 - protein, 226 aa, Acinetobacter beijerinckii
  misc_feature (1)..(226): tr|N9E283|N9E283_9GAMM 7-cyano-7-deazaguanine synthase OS=Acinetobacter beijerinckii ANC 3835 OX=1217649 GN=qu eC PE=3 SV=1
MENNMRSRAIVLLSGGLDSTTCLAWAQANYECIALSFMYGQRSTTELDAARALAQRAGVEHRVINIDLGNLGGSALTDHNIDVPEQLQEGIPVTYVPARNTIFLSYALAAAEVFDAKAIVIGINAVDYSGYPDCRPEFIDAFANLARLATKAGVEGKPLKIETPLLHLSKANIIRLGIEHGVDYSQTVSCYQADAQGRACSKCDSCRLRQQGFIEAGIADPTRYAE

SEQ ID NO: 35554 - protein, 223 aa, Acinetobacter bereziniae
  misc_feature (1)..(223): tr|N9EPM1|N9EPM1_ACIBZ 7-cyano-7-deazaguanine synthase OS=Acinetobacter bereziniae LMG 1003 = CIP 70.12 OX=981 324 GN=queC PE=3 SV=1
MRPRAIVLLSGGLDSTTCLAWAQANYDCIALSFMYGQRSTTELDAARALTKNAGVEHRVINIDLGNLGGSALTDHNIDVPDHETDGIPVTYVPARNTIFLSYALAAAEVFDAQAIVIGINAVDYSGYPDCRPEFIEAFANMARLATKVGVEGKPLKFETPLLHLSKANIIRLGIEHGVDYSQTVSCYQADDQGRACGKCDSCRLRKEGFKDAGIADPTRYIPQ

SEQ ID NO: 35555 - protein, 223 aa, Acinetobacter bereziniae; identical to SEQ ID NO: 35554
  misc_feature (1)..(223): tr|A0A0A8TNG8|A0A0A8TNG8_ACIBZ 7-cyano-7-deazaguanine s ynthase OS=Acinetobacter bereziniae OX=106648 GN=queC P E=3 SV=1

SEQ ID NO: 35556 - protein, 223 aa, Acinetobacter bohemicus
  misc_feature (1)..(223): tr|A0A1I6U4I8|A0A1I6U4I8_9GAMM 7-cyano-7-deazaguanine s ynthase OS=Acinetobacter bohemicus OX=1435036 GN=queC P E=3 SV=1
MRPRAIVLLSGGLDSTTCLAWAQARYECIAISFMYGQRSTTELDAARALTQRAGVEHRVINIDLGNLGGSALTDLSIDVPEQEQVGIPVTYVPARNTIFLSYALAAAEVFGAEAIVIGINAVDYSGYPDCRPEFIDAFATMARLATKVGVEGKPLKFETPLLHLSKANIIRLGIEHGVDYSQTVSCYQADDLGRACGKCDSCRLRKQGFVDAGITDPTRYIPS

SEQ ID NO: 35557 - protein, 223 aa, Acinetobacter bohemicus; identical to SEQ ID NO: 35556
  misc_feature (1)..(223): tr|N8QCS0|N8QCS0_9GAMM 7-cyano-7-deazaguanine synthase OS=Acinetobacter bohemicus ANC 3994 OX=1217715 GN=queC PE=3 SV=1

SEQ ID NO: 35558 - protein, 232 aa, Acinetobacter boissieri
  misc_feature (1)..(232): tr|A0A1G6GUW4|A0A1G6GUW4_9GAMM 7-cyano-7-deazaguanine s ynthase OS=Acinetobacter boissieri OX=1219383 GN=queC P E=3 SV=1
MNRALVLFSGGQDSTTCLMWALENFDEVYTVGFEYGQKHHVEMQCRSQILQSIESLKPTWKNKLKLDHIFNLDFLSQVNTTSLTHEVNIEQTEKYPNTFVPGRNLIFLNVASTVAYKHDIEHIVTGVCETDFSGYPDCRDNTMKALQVALSLGLDKKLVIHTPLMWIDKCETWAMTQSLGSQSAVDYVITETHTCYNGDRTHLYPWGYGCNACPACELRKNGFDAFIANKTT

SEQ ID NO: 35559 - protein, 223 aa, Acinetobacter bouvetii
  misc_feature (1)..(223): tr|A0A4V2DP62|A0A4V2DP62_9GAMM 7-cyano-7-deazaguanine s ynthase OS=Acinetobacter bouvetii OX=202951 GN=queC PE= 3 SV=1
MRPRAIVLLSGGLDSTTCLAWAQSQYECIALSFMYGQRSTTELDAARALTAKAGVEHRVINIDLGNLGGSALTDHTIDVPDHEQEGIPVTYVPARNTIFLSYALAAAEVFGAEAIVIGINAVDYSGYPDCRPEFIEAFANMARLATKVGVEGKPLKFETPLLHLSKANIIRLGIEHGVDYSQTVSCYQADDQGRACGTCDSCRLRKQGFADAGVEDPTRYIPK

SEQ ID NO: 35560 - protein, 223 aa, Acinetobacter bouvetii; identical to SEQ ID NO: 35559
  misc_feature (1)..(223): tr|N9DSJ9|N9DSJ9_9GAMM 7-cyano-7-deazaguanine synthase OS=Acinetobacter bouvetii DSM 14964 = CIP 107468 OX=112 0925 GN=queC PE=3 SV=1

SEQ ID NO: 35561 - protein, 223 aa, Acinetobacter brisouii
  misc_feature (1)..(223): tr|V2VTW0|V2VTW0_9GAMM 7-cyano-7-deazaguanine synthase OS=Acinetobacter brisouii CIP 110357 OX=1341683 GN=queC PE=3 SV=1
MRPRAIVLLSGGLDSTTCLAWAQARYECIALSFQYGQRSSTELDAAKALAQRSGVEHRIINIDLGNLGGSALTDHNIAVPEQAQEGIPVTYVPARNTIFLSYALAAAEVFGAEAIVIGVNAVDYSGYPDCRPEFIDAFAQLASLATKAGVEGKPLKIETPLLHLSKGNIIRLGLEHGVDYSQTVSCYQADDQGRACGKCDSCRLRKEGFAQAGVEDPTRYVPQ

SEQ ID NO: 35562 - protein, 198 aa, Acinetobacter calcoaceticus
  misc_feature (1)..(198): tr|A0A380VJD9|A0A380VJD9_ACICA 7-cyano-7-deazaguanine s ynthase OS=Acinetobacter calcoaceticus OX=471 GN=NCTC74 12_00254 PE=3 SV=1
MKKCLLLSGGIDSFCLAFLQRPDIAITIDYGQSAAEAEIRSSEFVCKKLGIIHEIIKVDCSHLGMGDLSNNPMSKYNEFSDWWPYRNQLLITLCAMKAIQLNINEIMIASVANDSSHIDGSQRFINCIDNLISLQEGNLRITAPVNHLTTAELIKASKVNLNVLKSWSHSCHKANYPCGKCRGCYKHYESLELAENLM

SEQ ID NO: 35563 - protein, 223 aa, Acinetobacter calcoaceticus
  misc_feature (1)..(223): tr|A0A1C4HLC7|A0A1C4HLC7_ACICA 7-cyano-7-deazaguanine s ynthase OS=Acinetobacter calcoaceticus OX=471 GN=queC P E=3 SV=1
MRPRAIVLLSGGLDSTTCLAWAQARYECIAISFMYGQRSTTELDAAKALAQRAGVEHRVINIDLANLGGSALTDHNIAVPEQLQEGIPVTYVPARNTIFLSYALAAAEVFNAEAIVIGINAVDYSGYPDCRPEFIDAFANMARLATKAGVEGKPLKFETPLLHLSKANIIRLGIEHGVDYSQTVSCYQADAQGRACGKCDSCRLRKEGFIDAGVTDPTRYIPQ

SEQ ID NO: 35564 - protein, 227 aa, Acinetobacter calcoaceticus
  misc_feature (1)..(227): tr|A0A2S4T6Q9|A0A2S4T6Q9_9GAMM 7-cyano-7-deazaguanine s ynthase OS=Acinetobacter calcoaceticus/baumannii comple x sp. ABNIH27 OX=2080673 GN=queC PE=3 SV=1
MEKNMRPRAIVLLSGGLDSTTCLAWAQARYECIAISFMYGQRSTTELDAAKALAQRAGVEHRVINIDLANLGGSALTDHNIAVPEQLQEGIPVTYVPARNTIFLSYALAAAEVFNAEAIVIGINAVDYSGYPDCRPEFIDAFANMARLATKAGVEGKPLKFETPLLHLSKANIIRLGIEHGVDYSQTVSCYQADAQGRACGKCDSCRLRKEGFIDAGVTDPTRYIPQ

SEQ ID NO: 35565 - protein, 223 aa, Acinetobacter celticus
  misc_feature (1)..(223): tr|A0A1C3CWZ7|A0A1C3CWZ7_9GAMM 7-cyano-7-deazaguanine s ynthase OS=Acinetobacter celticus OX=1891224 GN=queC PE =3 SV=1
MRRRAIVLLSGGLDSTTCLAWAQAQYECIALSFMYGQRSTTELDAARILTKQAGVEHRVINIDLGNLGGSALTDLSIDIPDHEQEGIPITYVPARNTIFLSYALAAAEVFDAEAIVIGINAVDYSGYPDCRPEFIEAFANMARLATKVGVEGKPLKFETPLLHLSKANIIRLGIEHGVNYSQTVSCYQADDQGRACGTCDSCRLRKQGFADAEVQDPTRYIPK

SEQ ID NO: 35566 - protein, 226 aa, Acinetobacter colistiniresistens
  misc_feature (1)..(226): tr|N9R369|N9R369_9GAMM 7-cyano-7-deazaguanine synthase OS=Acinetobacter colistiniresistens OX=280145 GN=queC P E=3 SV=1
MENNMRSRAIVLLSGGLDSTTCLAWAQANYECIALSFMYGQRSTTELDAAKALAQRAGVEHRIINIDLGNLGGSALTDHNIEVPEQLQEGIPVTYVPARNTIFLSYALAAAEVFDAEAIVIGVNAVDYSGYPDCRPEFIDAFANLARLATKAGVEGKPLKIETPLLHLSKANIIRLGIEHGVDYSQTVSCYQADAQGRACGKCDSCRLRQQGFIEAGIADPTRYAE

SEQ ID NO: 35567 - protein, 223 aa, Acinetobacter cumulans
  misc_feature (1)..(223): tr|A0A3A8GIC7|A0A3A8GIC7_9GAMM 7-cyano-7-deazaguanine s ynthase OS=Acinetobacter cumulans OX=2136182 GN=queC PE =3 SV=1
MRPRAIVLLSGGLDSTTCLAWAQSNYECIALSFMYGQRSTTELVAAQQLTKQAGVEHRVINIDLGNLGGSALTDHSIEVPDHEQEGIPVTYVPARNTIFLSYALAAAEVFGAEAIVIGINAVDYSGYPDCRPEFIEAFANMARLATKVGVEGKPLKFETPLLHLSKANIIRLGIEHGVDYSQTVSCYQADDQGRACGKCDSCRLRKQGFADAGVADPTRYIPV

SEQ ID NO: 35568 - protein, 222 aa, Acinetobacter defluvii
  misc_feature (1)..(222): tr|A0A2S2FGV3|A0A2S2FGV3_9GAMM 7-cyano-7-deazaguanine s ynthase OS=Acinetobacter defluvii OX=1871111 GN=queC PE =3 SV=1
MRPRAVVLLSGGLDSTTCLAWAQARYDCIALSFMYGQRSTTELDAARAITQNAGVEHRVINIDLGNLGGSALTDHNIDVPDHETEGIPVTYVPARNTIFLSYALAAAEVFGAEAIVIGINAVDYSGYPDCRPEYIEAFANMARLATKVGIEGKPLKFETPLLHLSKANIIRLGIEHGVDYSQTVSCYQADDQGRACGKCDSCRLRKQGFSDAGVTDPTRYIQ

SEQ ID NO: 35569 - protein, 440 aa, Acinetobacter defluvii
  misc_feature (1)..(440): tr|A0A2S2FA80|A0A2S2FA80_9GAMM Uncharacterized protein OS=Acinetobacter defluvii OX=1871111 GN=DJ533_01460 PE= 4 SV=1
MIELYFDTDTTQLPALSDSLIPVHLYGPPAQNGEYASIGRPLLNEIKRIKEDLDETALDFLTIAMAITAADTFVERNKQAEDGWCREFKLSIPLINPSVWIPQIELLKEILHFLSGDLWHFQFRTGNFVWPDKIKRGRKIPLVGHDSACLFSGGLDSAIGIIDLTSKKINPVLISHAYARDKSKQDNLYNLLGLKNSKFQVIAYPRKAGDIPTDVQMRTRSFNFIAFGTLISTAISQHYQAGKLTTLYVPENGLISINPPLTPRRIGSLSTRTTHPHYMSLLNELFHRVHLPVILDNPYQFMTKGEMMKNCSNTIVLEQIAKDTVSCGKWKRTGIQCGKCVPCIIRRASFHSAAMPDQTVNYVYNDLGLVIKDPDNRDDLMSMILAIRKLKKVKNPKIWISKSGALPTDLKIRRQILDTVVRGFKEVEDYLKSQSLGVNI

SEQ ID NO: 35570 - protein, 224 aa, Acinetobacter equi
  misc_feature (1)..(224): tr|A0A0N7GY78|A0A0N7GY78_9GAMM 7-cyano-7-deazaguanine s ynthase OS=Acinetobacter equi OX=1324350 GN=queC PE=3 S V=1
MRPRAVVLLSGGLDSTTCLAWAQARYDCIALSFRYGQRSSTELDAAKALAERSGVEHRIINIDLGNLGGSALTDHNIDVPDHEQEGIPITYVPARNTIFLSYALAAAEVFGAEAIVIGINAVDYSGYPDCRPEFIDAFANMARLATKVGVEGKPLKFETPLLHLSKANIIRLGVEHGVDYSQTVSCYQADQEGRACGKCDSCRLRKQGFVEAGIEDPTRYIPNN

SEQ ID NO: 35571 - protein, 223 aa, Acinetobacter gandensis
  misc_feature (1)..(223): tr|A0A1A7R9I0|A0A1A7R9I0_9GAMM 7-cyano-7-deazaguanine s ynthase OS=Acinetobacter gandensis OX=1443941 GN=queC P E=3 SV=1
MRPRAIVLLSGGLDSTTCLAWAQARYECIALSFMYGQRSTTELDAAHVLTQQAGVEHRVINIDLGNLGGSALTDHSIEVPDHEQTGIPVTYVPARNTIFLSYALAAAEVFGAEAIVIGINAVDYSGYPDCRPEFIDAFANMARLATKVGVEGKPLKFETPLLHLSKANIIRLGIEHGVDYSQTVSCYQADDQGRACGKCDSCRLRKQGFADAGVEDPTRYIPK

SEQ ID NO: 35572 - protein, 227 aa, Acinetobacter genomosp.; identical to SEQ ID NO: 35564
  misc_feature (1)..(227): tr|A0A1V2UUY3|A0A1V2UUY3_9GAMM 7-cyano-7-deazaguanine s ynthase OS=Acinetobacter genomosp. 33YU OX=1675530 GN=q ueC PE=3 SV=1

SEQ ID NO: 35573 - protein, 223 aa, Acinetobacter gerneri
  misc_feature (1)..(223): tr|N8ZI67|N8ZI67_9GAMM 7-cyano-7-deazaguanine synthase OS=Acinetobacter gerneri DSM 14967 = CIP 107464 OX=1120 926 GN=queC PE=3 SV=1
MRPRAIVLLSGGLDSTTCLAWAQARYECIAISFMYGQRSTTELDAAKALTARAGVEHRVINIDLGNLGGSALTDHNIDVPEEQQEGIPVTYVPARNTIFLSYALAAAEVFDAEAIVIGINAVDYSGYPDCRPEFIEAFANMARLATKVGVEGKPLKFETPLLHLSKANIIRLGIEHGVDYSHTVSCYQADDQGRACGKCDSCRLRKQGFIDAGIADPTRYIPQ

SEQ ID NO: 35574 - protein, 223 aa, Acinetobacter guillouiae
  misc_feature (1)..(223): tr|A0A077L2L8|A0A077L2L8_ACIGI 7-cyano-7-deazaguanine s ynthase OS=Acinetobacter guillouiae OX=106649 GN=queC P E=3 SV=1
MRPRAVVLLSGGLDSTTCLAWAQANYDCIALSFMYGQRSTTELDAARALTQRAGVEHRVINIDLGNLGGSALTDLNIDVPDHETDGIPVTYVPARNTIFLSYALAAAEVFDAQAIVIGINAVDYSGYPDCRPEFIEAFANMARLATKVGVEGKPLKFETPLLHLSKANIIRLGIEHGVDYSQTVSCYQADDQGRACGKCDSCRLRKEGFKDAGIADPTRYIPQ

SEQ ID NO: 35575 - protein, 223 aa, Acinetobacter guillouiae; identical to SEQ ID NO: 35574
  misc_feature (1)..(223): tr|N8Y6U7|N8Y6U7_ACIGI 7-cyano-7-deazaguanine synthase OS=Acinetobacter guillouiae NIPH 991 OX=1217656 GN=queC PE=3 SV=1

SEQ ID NO: 35576 - protein, 226 aa, Acinetobacter gyllenbergii
  misc_feature (1)..(226): tr|V2U8M1|V2U8M1_9GAMM 7-cyano-7-deazaguanine synthase OS=Acinetobacter gyllenbergii NIPH 230 OX=1217658 GN=qu eC PE=3 SV=1
MENNMRSRAIVLLSGGLDSTTCLAWAQANYECIALSFMYGQRSTTELDAAKALAQRAGVEHRIINIDLGNLGGSALTDHNIEVPEQLQEGIPVTYVPARNTIFLSYALAAAEVFDAAAIVIGINAVDYSGYPDCRPEFIDAFANLARLATKAGVEGKPLKIETPLLHLSKANIIRLGIEHGVDYSQTVSCYQADAQGRACGKCDSCRLRQQGFIEAGIADPTRYAE

SEQ ID NO: 35577 - protein, 226 aa, Acinetobacter gyllenbergii; identical to SEQ ID NO: 35576
  misc_feature (1)..(226): tr|A0A1B8UHK2|A0A1B8UHK2_9GAMM 7-cyano-7-deazaguanine s ynthase OS=Acinetobacter gyllenbergii OX=134534 GN=queC PE=3 SV=1

SEQ ID NO: 35578 - protein, 226 aa, Acinetobacter haemolyticus
  misc_feature (1)..(226): tr|D4XS98|D4XS98_ACIHA 7-cyano-7-deazaguanine synthase OS=Acinetobacter haemolyticus ATCC 19194 OX=707232 GN=e xsB PE=3 SV=1
MENNMRSRAIVLLSGGLDSTTCLAWAQARYDCVAISFMYGQRSTTELDAAKALAQRAGVEHRVINIDLGNLGGSALTDHNIDVPEQLQEGIPVTYVPARNTIFLSYALAAAEVFDAEAIVIGVNAVDYSGYPDCRPEFIDAFANLARLATKAGVEGKPLKIETPLLHLSKANIIRLGIEHGVDYSQTVSCYQADAQGRACGKCDSCRLRQQGFIEAGIADPTRYTN

SEQ ID NO: 35579 - protein, 226 aa, Acinetobacter haemolyticus; identical to SEQ ID NO: 35578
  misc_feature (1)..(226): tr|N9FF17|N9FF17_ACIHA 7-cyano-7-deazaguanine synthase OS=Acinetobacter haemolyticus NIPH 261 OX=1217986 GN=qu eC PE=3 SV=1

SEQ ID NO: 35580 - protein, 229 aa, Acinetobacter halotolerans
  misc_feature (1)..(229): tr|A0A4Q6XJ63|A0A4Q6XJ63_9GAMM 7-cyano-7-deazaguanine s ynthase OS=Acinetobacter halotolerans OX=1752076 GN=que C PE=3 SV=1
MENNMRSRAIVLLSGGLDSTTCLAWAQARYECVAISFMYGQRSTTELDAAKTLAQNAGVEHRVINIDLGNLGGSALTDHNIDIPEQLQEGIPVTYVPARNTIFLSYALAAAEVFDAEAIVIGVNAVDYSGYPDCRPEFIDAFANLARLATKAGVEGKPLKIETPLLHLSKANIIRLGIEHGVDYSQTVSCYQADAQGRACGKCDSCRLRHQGFIEAGIADPTRYTEQTI

SEQ ID NO: 35581 - protein, 222 aa, Acinetobacter idrijaensis
  misc_feature (1)..(222): tr|A0A098YEZ0|A0A098YEZ0_9GAMM 7-cyano-7-deazaguanine s ynthase OS=Acinetobacter idrijaensis OX=1507807 GN=queC PE=3 SV=1
MRPRAIVLLSGGLDSTTCLAWAQARYECIALSFRYGQRSTTELDAAKALTQRAGVEHRVINIDLGNLGGSALTDHSIEVPDHEQAGIPITYVPARNTIFLSYALAAAEVFEAEAIVIGINAVDYSGYPDCRPEFIDAFANMARLATKVGVEGQALKFETPLLHLSKANIIRLGIEHGVDYSQTVSCYQADDQGRACGKCDSCRLRKQGFADAGVEDPTRYIP

SEQ ID NO: 35582 - protein, 222 aa, Acinetobacter indicus
  misc_feature (1)..(222): tr|V2VP54|V2VP54_9GAMM 7-cyano-7-deazaguanine synthase OS=Acinetobacter indicus CIP 110367 OX=1341679 GN=queC PE=3 SV=1
MRPRAIVLLSGGLDSTTCLAWAQARYECIALSFRYGQRSTTELDAAKALTQRAGVEHRVINIDLGNLGGSALTDHNIEVPEQEQDGIPVTYVPARNTIFLSYALAAAEVFDAEAIVIGINAVDYSGYPDCRPEFIEAFANMARLATKVGVEGKPLKFETPLLHLSKANIIRLGLDHGVDYSQTVSCYQADDQGRACGKCDSCRLRKQGFLDAGVADPTRYIP

SEQ ID NO: 35583 - protein, 222 aa, Acinetobacter indicus; identical to SEQ ID NO: 35582
  misc_feature (1)..(222): tr|A0A0F3LQL3|A0A0F3LQL3_9GAMM 7-cyano-7-deazaguanine s ynthase OS=Acinetobacter indicus OX=756892 GN=queC PE=3 SV=1

SEQ ID NO: 35584 - protein, 222 aa, Acinetobacter johnsonii
  misc_feature (1)..(222): tr|A0A0U3SRR2|A0A0U3SRR2_ACIJO 7-cyano-7-deazaguanine s ynthase OS=Acinetobacter johnsonii XBB1 OX=1242245 GN=q ueC PE=3 SV=1
MRPRAIVLLSGGLDSTTCLAWAQAQYDCTALSFMYGQRSTTELDAARELAKKAGVEHRVINIDLGNLGGSALTDHSIDVPDHEQDGIPVTYVPARNTIFLSYALAAAEVLDAEAIVIGINAVDYSGYPDCRPEFIEAFANMARLATKVGVEGKPLKFETPLLHLSKANIIRLGIEHGVDYSQTVSCYQADDQGRACGKCDSCRLRKEGFADAGVTDPTRYIP

SEQ ID NO: 35585 - protein, 222 aa, Acinetobacter johnsonii
  misc_feature (1)..(222): tr|A0A0W8H1F0|A0A0W8H1F0_ACIJO 7-cyano-7-deazaguanine s ynthase OS=Acinetobacter johnsonii OX=40214 GN=queC PE= 3 SV=1
MRPRAIVLLSGGLDSTTCLAWAQAQYDCTALSFMYGQRSTTELDAARELTKKAGVEHRVINIDLGNLGGSALTDHSIDVPDHEQVGIPVTYVPARNTIFLSYALAAAEVLDAEAIVIGINAVDYSGYPDCRPEFIEAFANMARLATKVGVEGKPLKFETPLLHLSKANIIRLGIEHGVDYSQTVSCYQADDQGRACGKCDSCRLRKEGFADAGVTDPTRYIP

SEQ ID NO: 35586 - protein, 226 aa, Acinetobacter junii
  misc_feature (1)..(226): tr|D0SK35|D0SK35_ACIJU 7-cyano-7-deazaguanine synthase OS=Acinetobacter junii SH205 OX=575587 GN=queC PE=3 SV= 1
MENNMRSRAIVLLSGGLDSITCLAWAQANYDCIALSFMYGQRSTTELDAAKALAQRAGVEHRVINIDLGNLGGSALTDHNIDVPEQLQEGIPVTYVPARNTIFLSYALAAAEVFDAEAIVIGVNAVDYSGYPDCRPEFIDAFANLARLATKAGVEGKPLKIETPLLHLSKANIIRLGIEHGVDYSKTVSCYQADAQGRACGKCDSCRLRQQGFIEAGVADPTRYAE

SEQ ID NO: 35587 - protein, 226 aa, Acinetobacter junii
  misc_feature (1)..(226): tr|A0A3R9GS35|A0A3R9GS35_ACIJU 7-cyano-7-deazaguanine s ynthase OS=Acinetobacter junii OX=40215 GN=queC PE=3 SV =1
MENNMRSRAIVLLSGGLDSTTCLAWAQAKYDCIALSFMYGQRSTTELDAAKALAQRAGVEHRVINIDLGHLGGSALTDHNIDVPEQLQEGIPVTYVPARNTIFLSYALAAAEVFDAAAIVIGVNAVDYSGYPDCRPEFIDAFANLARLATKAGVEGKPLKIETPLLHLSKANIIRLGIEHGVDYSQTVSCYQADAQGRACGKCDSCRLRQQGFIEAGVADPTRYAE

SEQ ID NO: 35588 - protein, 223 aa, Acinetobacter kookii
  misc_feature (1)..(223): tr|A0A1G6H0T5|A0A1G6H0T5_9GAMM 7-cyano-7-deazaguanine s ynthase OS=Acinetobacter kookii OX=1226327 GN=queC PE=3 SV=1
MRPRAIVLLSGGLDSTTCLAWAQARYECIALSFMYGQRSTTELDAARALTQRAGVEHRVINIDLGNLGGSALTDHNIDVPEHEQEGIPVTYVPARNTIFLSYALAAAEVFGAEAIVIGINAVDYSGYPDCRPEFIEAFANMARLATKVGVEGKPLKFETPLLHLSKANIIRLGIEHGVDYSQTVSCYQADDQGRACGKCDSCRLRKQGFADAGIADPTRYIPS

SEQ ID NO: 35589 - protein, 223 aa, Acinetobacter kyonggiensis
  misc_feature (1)..(223): tr|A0A1H3HHT0|A0A1H3HHT0_9GAMM 7-cyano-7-deazaguanine s ynthase OS=Acinetobacter kyonggiensis OX=595670 GN=queC PE=3 SV=1
MRPRAIVLLSGGLDSTTCLAWAQARYECIAISFMYGQRSTTELDAARALTQRAGVEHRVINIDLGNLGGSALTDLSIDVPEQEQVGIPVTYVPARNTIFLSYALAAAEVFGAEAIIIGINAVDYSGYPDCRPEFIDAFATMARLATKVGVEGKPLKFETPLLHLSKANIIRLGIEHGVDYSQTVSCYQADDLGRACGKCDSCRLRKQGFVDAGITDPTRYIPS

SEQ ID NO: 35590 - protein, 222 aa, Acinetobacter lactucae
  misc_feature (1)..(222): tr|R8YW94|R8YW94_9GAMM 7-cyano-7-deazaguanine synthase OS=Acinetobacter lactucae OX=1785128 GN=queC PE=3 SV=1
MRPRAIVLLSGGLDSTTCLAWAQARYECIAISFMYGQRSTTELDAAKALAQRSGVEHRVINIDLANLGGSALTDHNIAVPEQLQEGIPVTYVPARNTIFLSYALAAAEVFNAEAIVIGINAVDYSGYPDCRPEFIDAFANMARLATKAGVEGKPLKFETPLLHLSKANIIRLGIEHGVDYSQTVSCYQADAQGRACGKCDSCRLRKEGFIDAGVTDPTRYIP

SEQ ID NO: 35591 - protein, 226 aa, Acinetobacter lactucae
  misc_feature (1)..(226): tr|A0A3R9Y6Z4|A0A3R9Y6Z4_9GAMM 7-cyano-7-deazaguanine s ynthase OS=Acinetobacter lactucae OX=1785128 GN=queC PE =3 SV=1
MEKNMRSRAIVLLSGGLDSTTCLAWAQARYECIAISFMYGQRSTTELDAAKALAQRSGVEHRVINIDLANLGGSALTDHNIAVPEQLQEGIPVTYVPARNTIFLSYALAAAEVFNAEAIVIGINAVDYSGYPDCRPEFIDAFANMARLATKAGVEGKPLKFETPLLHLSKANIIRLGIEHGVDYSQTVSCYQADAQGRACGKCDSCRLRKEGFIDAGVTDPTRYIP

SEQ ID NO: 35592 - protein, 224 aa, Acinetobacter larvae
  misc_feature (1)..(224): tr|A0A1B2LXK0|A0A1B2LXK0_9GAMM 7-cyano-7-deazaguanine s ynthase OS=Acinetobacter larvae OX=1789224 GN=queC PE=3 SV=1
MRARAIVLLSGGLDSTTCLAWAQARYECIALSFLYGQRSTTELDAAKAMCQDLGVEHRTIQIDLGQLGGSALTDHSIDVPEQEQSGIPITYVPARNTIFLSYALAAAEVYAAQAIVIGINAVDYSGYPDCRPEFIAAFEQLAQLATKVGVEGNALKIETPLLHLSKANIIRLGLEHGVDYSKTVSCYQADNQGRACGKCDSCRLRKQGFTDAGIADPTRYIPNK

SEQ ID NO: 35593 - protein, 222 aa, Acinetobacter lwoffii
  misc_feature (1)..(222): tr|N9HIS4|N9HIS4_ACILW 7-cyano-7-deazaguanine synthase OS=Acinetobacter lwoffii ATCC 9957 = CIP 70.31 OX=13118 04 GN=queC PE=3 SV=1
MRPRAIVLLSGGLDSTTCLAWAQACYECIALSFRYGQRSTTELDAAKALTQRAGVEHRVINIDLGNLGGSALTDHSIEVPDHEQAGIPITYVPARNTIFLSYALAAAEVFEAEAIVIGINAVDYSGYPDCRPEFIDAFANMARLATKVGVEGQALKFETPLLHLSKANIIRLGIEHGVDYSQTVSCYQADDQGRACGKCDSCRLRKQGFADAGVEDPTRYIP

SEQ ID NO: 35594 - protein, 222 aa, Acinetobacter lwoffii
  misc_feature (1)..(222): tr|N9G9H3|N9G9H3_ACILW 7-cyano-7-deazaguanine synthase OS=Acinetobacter lwoffii NIPH 478 OX=1217668 GN=queC PE =3 SV=1
MRPRAIVLLSGGLDSTTCLAWAQARYECIALSFRYGQRSTTELDAAKALTQRAGVEHRVINIDLGNLGGSALTDHSIEVPDHEQAGIPITYVPARNTIFLSYALAAAEVFEAEAIVIGINAVDYSGYPDCRPEFIEAFANMARLATKVGVEGQALKFETPLLHLSKANIIRLGIEHGVDYSQTVSCYQADDQGRACGKCDSCRLRKQGFADAGVEDPTRYIP

SEQ ID NO: 35595 - protein, 222 aa, Acinetobacter marinus
  misc_feature (1)..(222): tr|A0A1G6J642|A0A1G6J642_9GAMM 7-cyano-7-deazaguanine s ynthase OS=Acinetobacter marinus OX=281375 GN=queC PE=3 SV=1
MRQRAVVLLSGGLDSSTCLAWAASQYDCYAISFMYGQRSTSELEAAKTIAEKYALDHRIINIDLGNIGGSALTDHNLDVPDQLQDGIPITYVPARNTIFLSYALALAEVKDAQAIVIGVNAVDYSGYPDCRPEYIDAFTKMANLATKAGVEGHPIKIETPLLHLSKANIIRLGVEHGLDYAQTVSCYQADADGRACGKCDSCRLRHQGFIEAEIADPTRYVN

SEQ ID NO: 35596 - protein, 222 aa, Acinetobacter nectaris
  misc_feature (1)..(222): tr|V2TS61|V2TS61_9GAMM 7-cyano-7-deazaguanine synthase OS=Acinetobacter nectaris CIP 110549 OX=1392540 GN=queC PE=3 SV=1
MRPRAIVLLSGGLDSTTCLAWAQSSYDCIALSFQYGQRSSTELEAAKNLAQQANIPHRVINIDLGNLGGSALTDHTIDVPEQAQTGIPITYVPARNTIFLSYALAAAEVFQAEAIVIGVNAVDYSGYPDCRPEFVEAFANLAALATKAGVEGKPLKIETPLLHLSKGNIIRLGIEHGVDYSQTVSCYQADEQGRACGKCDSCRLRKEGFLEAKVDDPTRYVS

SEQ ID NO: 35597 - protein, 223 aa, Acinetobacter nosocomialis; identical to SEQ ID NO: 35563
  misc_feature (1)..(223): tr|A0A0E2GC81|A0A0E2GC81_ACINO 7-cyano-7-deazaguanine s ynthase OS=Acinetobacter nosocomialis NIPH 386 OX=12179 85 GN=queC PE=3 SV=1

SEQ ID NO: 35598 - protein, 227 aa, Acinetobacter nosocomialis; identical to SEQ ID NO: 35564
  misc_feature (1)..(227): tr|A0A1V0YWZ5|A0A1V0YWZ5_ACINO 7-cyano-7-deazaguanine s ynthase OS=Acinetobacter nosocomialis OX=106654 GN=queC PE=3 SV=1

SEQ ID NO: 35599 - protein, 442 aa, Acinetobacter oleivorans
  misc_feature (1)..(442): tr|A0A2T5QCA1|A0A2T5QCA1_9GAMM 7-cyano-7-deazaguanine s ynthase OS=Acinetobacter oleivorans OX=1148157 GN=DBL02 _09425 PE=3 SV=1
MIELYFDTDNTKLPAMTDTLLPVYMFGKSAVSGKYNSIGGAALLEFRRLQEEADETAFDLMMLSLAVTAADTFVERDSRAEDAWCRRFKINLPLLNPTLWDRQKNLLKEVLHFLSGDLWDFEFRQSDFVIPRMMNGGIRTKKIYIKGHDSVCLFSGGLDSTIGAIDLKAQGKKSVLVSHAYPKDRQKQDHVYHDLKLNNARFQVVANPRKVKEFPADVQMRTRSFNFIAFGALIATALSKNHFSNKIIKLYIPENGLISINPPLTPRRIGALSTRTTHPYFLQKLNILFKNVGLPVEIENPYQYKTKGEMMLECKDQSSLKKIAATTVSCGKWKRSGMQCGKCLPCLIRRASFDKFQYKDSTQYQYSHLSDVVKHANKRDDLMSMVMAIHKIRGSSNTNLWVAKSGFLPTEPNERQLIIDTVLRGFKEVEQYLKKENLGINI

SEQ ID NO: 35600 - protein, 222 aa, Acinetobacter oleivorans
  misc_feature (1)..(222): tr|D8JEE0|D8JEE0_ACISD 7-cyano-7-deazaguanine synthase OS=Acinetobacter oleivorans (strain JCM 16667 / KCTC 23 045 / DR1) OX=436717 GN=queC PE=3 SV=1
MRPRAIVLLSGGLDSTTCLAWAQARYECIAISFMYGQRSTTELDAAKALAQRAGVEHRVINIDLANLGGSALTDHNIAVPEQLQEGIPVTYVPARNTIFLSYALAAAEVFNAEAIVIGINAVDYSGYPDCRPEFIDAFANMARLATKAGVEGKPLKFETPLLHLSKANIIRLGIEHGVDYSQTVSCYQADAQGRACGKCDSCRLRKEGFIEAGVADPTRYIP

SEQ ID NO: 35601 - protein, 226 aa, Acinetobacter parvus
  misc_feature (1)..(226): tr|N8RH14|N8RH14_9GAMM 7-cyano-7-deazaguanine synthase OS=Acinetobacter parvus NIPH 1103 OX=1217671 GN=queC PE =3 SV=1
MENNMRSRAIVLLSGGLDSTTCLAWAQANYDCIALSFMYGQRSTTELDAAKSLAQRAGVEHRVINIDLGNLGGSALTDHNIDVPEQLQEGIPVTYVPARNTIFLSYALAAAEVFDAEAIVIGVNAVDYSGYPDCRPEFIDAFANLARLATKAGVEGKPLKIETPLLHLSKANIIRLGIEHGVDYSQTVSCYQADAQGRACSKCDSCRLRQQGFIEAGIADPTRYTE

SEQ ID NO: 35602 - protein, 226 aa, Acinetobacter parvus
  misc_feature (1)..(226): tr|N8QBP4|N8QBP4_9GAMM 7-cyano-7-deazaguanine synthase OS=Acinetobacter parvus DSM 16617 = CIP 108168 OX=98133 3 GN=queC PE=3 SV=1
MENNMRSRAIVLLSGGLDSTTCLAWAQANYDCIAISFMYGQRSTTELDAAKALAQRAGVEHRVINIDLGNLGGSALTDHNIDVPEQLQEGIPVTYVPARNTIFLSYALAAAEVFDAEAIVIGVNAVDYSGYPDCRPEFIDAFANLARLATKAGVEGKPLKIETPLLHLSKANIIRLGIEHGVDYSQTVSCYQADAQGRACSKCDSCRLRQQGFIEAGIADPTRYTE

SEQ ID NO: 35603 - protein, 222 aa, Acinetobacter piscicola
  misc_feature (1)..(222): tr|A0A4Q4H542|A0A4Q4H542_9GAMM 7-cyano-7-deazaguanine s ynthase OS=Acinetobacter piscicola OX=2006115 GN=queC P E=3 SV=1
MRPRAVVLLSGGLDSTTCLAWAQANYDCIALSFMYGQRSTTELDAARAITKNAGIEHRVINIDLGNLGGSALTDHNIDVPDHETDGIPVTYVPARNTIFLSYALAAAEVFDAQAIVIGINAVDYSGYPDCRPEFIEAFANMARLATKVGIEGKPLKFETPLLHLSKANIIRLGIEHGVDYSQTVSCYQADDQGRACGKCDSCRLRKQGFNDAGVADPTRYIQ

SEQ ID NO: 35604 - protein, 222 aa, Acinetobacter pittii
  misc_feature (1)..(222): tr|R8YNS5|R8YNS5_ACIPI 7-cyano-7-deazaguanine synthase OS=Acinetobacter pittii ANC 4050 OX=1217691 GN=queC PE= 3 SV=1
MRSRAIVLLSGGLDSTTCLAWAQARYECIAISFMYGQRSTTELDAAKALAQHSGVEHRVINIDLANLGGSALTDHNIAVPEQLQEGIPVTYVPARNTIFLSYALAAAEVFNAEAIVIGINAVDYSGYPDCRPEFIDAFANMARLATKAGVEGKPLKFETPLLHLSKANIIRLGIEHGVDYSQTVSCYQADAQGRACGKCDSCRLRKEGFKEAGVADPTRYIP

SEQ ID NO: 35605 - protein, 226 aa, Acinetobacter pittii; identical to SEQ ID NO: 35591
  misc_feature (1)..(226): tr|A0A1C2QQM9|A0A1C2QQM9_ACIPI 7-cyano-7-deazaguanine s ynthase OS=Acinetobacter pittii OX=48296 GN=queC PE=3 S V=1

SEQ ID NO: 35606 - protein, 222 aa, Acinetobacter populi
  misc_feature (1)..(222): tr|A0A1Z9Z140|A0A1Z9Z140_9GAMM 7-cyano-7-deazaguanine s ynthase OS=Acinetobacter populi OX=1582270 GN=queC PE=3 SV=1
MRPKAVVLLSGGLDSSTCLAWAAAHYDCYAISFMYGQRSTSELKAAQILAQQFALEHRIINIDLGNIGGSALTDHNLDVPEQLQDGIPITYVPARNTIFLSYALALAEVKEAEAIVIGVNAVDYSGYPDCRPEYIDAFTKMANLATKAGIEGHPIKIETPLLHLSKANIIQLGLKHGLDYSQTVSCYQADDQGRACGKCDSCRLRHQGFIEANVADPTRYIM

SEQ ID NO: 35607 - protein, 223 aa, Acinetobacter pragensis
  misc_feature (1)..(223): tr|A0A151Y1W1|A0A151Y1W1_9GAMM 7-cyano-7-deazaguanine s ynthase OS=Acinetobacter pragensis OX=1806892 GN=queC P E=3 SV=1
MRPRAIVLLSGGLDSTTCLAWAQSQYECIALSFMYGQRSTTELDAARELTAKAGVEHRVINIDLGNLGGSALTDHTIDVPDHEQEGIPVTYVPARNTIFLSYALAAAEVFGAEAIVIGINAVDYSGYPDCRPEFIEAFANMARLATKVGVEGKPLKFETPLLHLSKANIIRLGIEHGVDYSQTVSCYQADDQGRACGKCDSCRLRKQGFADAGVEDPTRYIPK

SEQ ID NO: 35608 - protein, 226 aa, Acinetobacter proteolyticus
  misc_feature (1)..(226): tr|A0A2N0WFT8|A0A2N0WFT8_9GAMM 7-cyano-7-deazaguanine s ynthase OS=Acinetobacter proteolyticus OX=1776741 GN=qu eC PE=3 SV=1
MENNMRSRAIVLLSGGLDSTTCLAWAQANYECIALSFMYGQRSTTELDAAKALAQRAGVEHRIINIDLGNLGGSALTDHNIEVPEQLQEGIPVTYVPARNTIFLSYALAAAEVFDAAAIVIGINAVDYSGYPDCRPEFIDAFANLACLATKAGVEGKPLKIETPLLHLSKANIIRLGIEHGVDYSQTVSCYQADAQGRACGKCDSCRLRQQGFIEAGIADPTRYAE

SEQ ID NO: 35609 - protein, 226 aa, Acinetobacter proteolyticus
  misc_feature (1)..(226): tr|A0A1E7RAG8|A0A1E7RAG8_9GAMM 7-cyano-7-deazaguanine s ynthase OS=Acinetobacter proteolyticus OX=1776741 GN=qu eC PE=3 SV=1
MENNMRSRAIVLLSGGLDSTTCLAWAQANYECIALSFMYGQRSTTELDAAKALAQRAGVEHRVINIDLGNLGGSALTDHNIEVPEQLQEGIPVTYVPARNTIFLSYALAAAEVFDAAAIVIGINAVDYSGYPDCRPEFIDAFANLARLATKAGVEGKPLKIETPLLHLSKANIIRLGIEHGVDYSQTVSCYQADAQGRACGKCDSCRLRQQGFIEAGIADPTRYAE

SEQ ID NO: 35610 - protein, 222 aa, Acinetobacter puyangensis
  misc_feature (1)..(222): tr|A0A240E7D4|A0A240E7D4_9GAMM 7-cyano-7-deazaguanine s ynthase OS=Acinetobacter puyangensis OX=1096779 GN=queC PE=3 SV=1
MRPKAVVLLSGGLDSSTCLAWAAAQYDCYAISFMYGQRSTSELKAAQTLAQQFALEHRIINIDLGNIGGSALTDHNLDVPEQLEDGIPITYVPARNTIFLSYALALAEVKEAEAIVIGVNAVDYSGYPDCRPEYIDAFTKMANLATKAGIEGHPIKIETPLLHLSKANIIQLGLKHGLDYSQTVSCYQADDQGRACGKCDSCRLRHQGFVEANVTDPTRYIM

SEQ ID NO: 35611 - protein, 222 aa, Acinetobacter qingfengensis
  misc_feature (1)..(222): tr|A0A1E7RDT1|A0A1E7RDT1_9GAMM 7-cyano-7-deazaguanine s ynthase OS=Acinetobacter qingfengensis OX=1262585 GN=qu eC PE=3 SV=1
MRPRAVVLLSGGLDSSTCLAWASAHYDCYAISFMYGQRSTSELKAAQNLAKKYALEHRIINIDLGNIGGSALTDHNLEVPDHAQEGIPITYVPARNTIFLSYALALAEVKEAQAIVIGVNAVDYSGYPDCRPEYIDAFTKMANLATKAGVEGHPVKIETPLLHLSKGNIIRLGLEHGLDYAQTVSCYQADDQGYACGKCDSCRLRHQGFIEAGVADPTRYIN

SEQ ID NO: 35612 - protein, 201 aa, Acinetobacter radioresistens
  misc_feature (1)..(201): tr|A0A3F3GXW0|A0A3F3GXW0_ACIRA 7-cyano-7-deazaguanine s ynthase OS=Acinetobacter radioresistens NIPH 2130 OX=12 17674 GN=F940_00706 PE=3 SV=1
MKSVLLLSGGMDSTAIAWWKRPDYALTIDYGQLAAKAEIAASQSICRYLNIPHEILTVDCRNIGSGDMAGTIESKHAPASDWWPYRNQLLITLAGMKMLPFNISKILIGTVKTDNGHTDGSHEFIDAMNQLMFLQEGHITVEAPAINLSTKELIQLSNIPAELLAWSHSCHKSEVTCGNCRGCNKYFEIFEQVGYDLGKLG

SEQ ID NO: 35613 - protein, 222 aa, Acinetobacter radioresistens
  misc_feature (1)..(222): tr|A0A2T1J1W8|A0A2T1J1W8_ACIRA 7-cyano-7-deazaguanine s ynthase OS=Acinetobacter radioresistens OX=40216 GN=que C PE=3 SV=1
MRSRAIVLLSGGLDSTTCLAWAQARYECIAISFMYGQRSTTELDAAKALTQRAGVEHRVINIDLGNLGGSALTDHNIDVPVQEQSGIPVTYVPARNTIFLSYALAAAEVFDAEAIVIGINAVDYSGYPDCRPEFIEAFANMARLATKVGVEGKPLKFETPLLHLSKANIIRLGIEHGVDYSQTVSCYQADDQGRACGQCDSCRLRKQGFQEAGIEDPTRYIP

SEQ ID NO: 35614 - protein, 223 aa, Acinetobacter rudis
  misc_feature (1)..(223): tr|S3NB68|S3NB68_9GAMM 7-cyano-7-deazaguanine synthase OS=Acinetobacter rudis CIP 110305 OX=421052 GN=queC PE= 3 SV=1
MRPRAIVLLSGGLDSTTCLAWAQARYECIAISFMYGQRSNTELDAAKALTKAAGVEHRVINIDLGQLGGSALTDHSIDVPVQEQEGIPVTYVPARNTIFLSYALAAAEVYQADAIVIGINAVDYSGYPDCRPEFIEAFAQLAALATKAGVEGKPLKIETPLLHLSKAAIIGLGLEHGVDYAQTVSCYQADNQGRACGQCDSCRLRKQGFIDAGVTDPTRYIPQ

SEQ ID NO: 35615 - protein, 441 aa, Acinetobacter schindleri
  misc_feature (1)..(441): tr|N8Z8V0|N8Z8V0_9GAMM 7-cyano-7-deazaguanine synthase OS=Acinetobacter schindleri CIP 107287 OX=1217988 GN=F9 55_00353 PE=3 SV=1
MIELYFETDSAKLPPLSDRLLPVLMFGKSAVSGKYNSIGGAALIEFRRLQEESDETAFDLMMLSLAVTAADTFVERDSRAEDAWCRQLKINLPMLNPTLWDKQKPLLKETLHFLSGDLWDFEFRQSDFQIPEMMKGMKARKIFINKHDSVCLFSGGLDSTIGAIDLQFQGKKSVLVSHAYPKDRQKQDGVYHKLRLSNARFQVVANPRKVKEIPADVQMRTRSFNFIAFGALIATALSKNHHSNKIIPLYIPENGLISINPPLTPRRIGSLSTRTTHPYFLKKLNELFSSIDLPVELLNPYQFKTKGEMMLECKDQKLLKKVATDTVSCGKWKRSGVQCGKCLPCLIRRASFNASQFKDLTDYQYSVLSDVIKRDKQRDDLMSMVMAISKIKNTGNTNLWVAKSGFLPIEPKERQQIIDTVLRGFAEVEQYLKKENLGVNI

SEQ ID NO: 35616 - protein, 222 aa, Acinetobacter schindleri
  misc_feature (1)..(222): tr|A0A1P8PLA8|A0A1P8PLA8_9GAMM 7-cyano-7-deazaguanine s ynthase OS=Acinetobacter schindleri OX=108981 GN=queC P E=3 SV=1
MRPRAIVLLSGGLDSTTCLAWAQARYECIALSFMYGQRSTTELDAARALTGRAGVEHRVINIDLGNLGGSALTDHSIDVPDQLQEGIPVTYVPARNTIFLSYALAAAEVFGAEAIVIGINAVDYSGYPDCRPEFIEAFANMAHLATKVGVEGQALKFETPLLHLSKANIIRLGLDHGVDYSQTVSCYQADDQGRACGTCDSCRLRKQGFADAGVEDPTRYIP

SEQ ID NO: 35617 - protein, 227 aa, Acinetobacter seifertii; identical to SEQ ID NO: 35564
  misc_feature (1)..(227): tr|A0A2M8MIJ1|A0A2M8MIJ1_9GAMM 7-cyano-7-deazaguanine s ynthase OS=Acinetobacter seifertii OX=1530123 GN=queC P E=3 SV=1

SEQ ID NO: 35618 - protein, 442 aa, Acinetobacter seifertii
  misc_feature (1)..(442): tr|N8SAC9|N8SAC9_9GAMM 7-cyano-7-deazaguanine synthase OS=Acinetobacter seifertii OX=1530123 GN=F985_03631 PE= 3 SV=1
MIELYFDTDNTKLPLMTDKLLPVYMFGRSAVSGKYNSIGGAALLEFRRLQEEADETAFDLMMLSLAVTAADTFVERDSRAEDAWCRQFKINLPLLNPTLWDGQKNLLKEVLHFLSGDLWDFEFRQSDFVIPRMMNGGIRTKKIYIKGHDSVCLFSGGLDSTIGAIDLKAQGKKSVLVSHAYPKDRQKQDHVYHDLKLNNARFQVVANPRKVKEIPADVQMRTRSFNFIAFGALIATALSKNHFSNKIIKLYIPENGLISINPPLTPRRIGALSTRTTHPYFLQKLNILFKNVGLPVEIENPYQYKTKGEMMLECKDQSSLKKIAATTVSCGKWKRFGMQCGKCLPCLIRRASFDKFQYKDLTQYQYSHLSDVVKHANKRDDVMSMVMAIHKIRGSSNTNLWVAKSGFLPTEPNERQLIIDTVLRGFKEVEQYLKKENLGINI

SEQ ID NO: 35619 - protein, 223 aa, Acinetobacter soli
  misc_feature (1)..(223): tr|N9BSM0|N9BSM0_9GAMM 7-cyano-7-deazaguanine synthase OS=Acinetobacter soli NIPH 2899 OX=1217677 GN=queC PE=3 SV=1
MRPRAIVLLSGGLDSTTCLAWAQARYECMALSFMYGQRSSTELDAAKALTQRAGVEHRVINIDLGNLGGSALTDHNIDVPEQQQDGIPVTYVPARNTIFLSYALAAAEVFGAEAIVIGVNAVDYSGYPDCRPEYIEAFTNMARLATKAGVEGKPLTFETPLLHLSKANIIRLGIEHGVDYSQTVSCYQADTQGRACGKCDSCRLRKEGFIEAGVADPTRYIPQ

SEQ ID NO: 35620 - protein, 223 aa, Acinetobacter soli; identical to SEQ ID NO: 35619
  misc_feature (1)..(223): tr|A0A1P8EEZ2|A0A1P8EEZ2_9GAMM 7-cyano-7-deazaguanine s ynthase OS=Acinetobacter soli OX=487316 GN=queC PE=3 SV =1

SEQ ID NO: 35621 - protein, 222 aa, Acinetobacter sp.
  misc_feature (1)..(222): tr|A0A241V0F0|A0A241V0F0_9GAMM 7-cyano-7-deazaguanine s ynthase OS=Acinetobacter sp. ANC 4204 OX=1977884 GN=que C PE=3 SV=1
MRPRAIVLLSGGLDSTTCLAWAQAQYDCTALSFMYGQRSTTELDAARELTKKAGVEHRVINIDLGNLGGSALTDHSIDVPDHEQVGIPVTYVPARNTIFLSYALAAAEVLDAEAIVIGINAVDYSGYPDCRPEFIEAFANMARLATKVGVEGKPLKFETPLLHLSKANIIRLGIEHGVDYSQTVSCYQADDQGRACGKCDSCRLRKEGFADAGVEDPTRYIP

SEQ ID NO: 35622 - protein, 222 aa, Acinetobacter sp.; identical to SEQ ID NO: 35594
  misc_feature (1)..(222): tr|A0A1E3GMB7|A0A1E3GMB7_9GAMM 7-cyano-7-deazaguanine s ynthase OS=Acinetobacter sp. 51m OX=1856846 GN=queC PE= 3 SV=1

SEQ ID NO: 35623 - protein, 222 aa, Acinetobacter tandoii
  misc_feature (1)..(222): tr|A0A515BDL7|A0A515BDL7_9GAMM 7-cyano-7-deazaguanine s ynthase OS=Acinetobacter tandoii OX=202954 GN=queC PE=3 SV=1
MRTRAIVLLSGGLDSTTCLAWAQARYECMAISFMYGQRSTTELDAAKALAQRAGVEHRIINIDLSNLGGSALTDHSIDVPEQLQEGIPVTYVPARNTIFLSYALAAAEVFGAEAIVIGVNAVDYSGYPDCRPEYIEAFANMARLATKVGVEGKPLKFETPLLHLSKANIIRLGIEHGVDYSQTVSCYQADDQGRACGKCDSCRLRKQGFEDAGVADPTRYIP

SEQ ID NO: 35624 - protein, 222 aa, Acinetobacter tandoii
  misc_feature (1)..(222): tr|R9AXI6|R9AXI6_9GAMM 7-cyano-7-deazaguanine synthase OS=Acinetobacter tandoii DSM 14970 = CIP 107469 OX=1120 927 GN=queC PE=3 SV=1
MRPRAIVLLSGGLDSTTCLAWAQARYECMAISFMYGQRSTTELDAAKALTQRVGVEHRIINIDLGNLGGSALTDHSIDVPEQLQEGIPVTYVPARNTIFLSYALAAAEVFGAEAIVIGINAVDYSGYPDCRPEYIEAFANMARLATKVGVEGKALKFETPLLHLSKANIIRLGIEHGVDYSQTVSCYQADDQGRACGKCDSCRLRKQGFEDAGVADPTRYIP

SEQ ID NO: 35625 - protein, 226 aa, Acinetobacter tjernbergiae
  misc_feature (1)..(226): tr|V2V6M6|V2V6M6_9GAMM 7-cyano-7-deazaguanine synthase OS=Acinetobacter tjernbergiae DSM 14971 = CIP 107465 OX =1120928 GN=queC PE=3 SV=1
MENNMRSRAIVLLSGGLDSTTCLAWAQANYACIALSFMYGQRSTTELDAARALAQRAGVEHRVINIDLGNLGGSALTDHNIDVPEQLQEGIPVTYVPARNTIFLSYALAAAEVFDAAAIVIGINAVDYSGYPDCRPEFIDAFANLARLATKAGVEGKPLKIETPLLHLSKANIIRLGIEHGVDYSQTVSCYQADAQGRACGKCDSCRLRQQGFIEAGITDPTRYTE

SEQ ID NO: 35626 - protein, 223 aa, Acinetobacter towneri
  misc_feature (1)..(223): tr|N9BBD1|N9BBD1_9GAMM 7-cyano-7-deazaguanine synthase OS=Acinetobacter towneri DSM 14962 = CIP 107472 OX=1120 929 GN=queC PE=3 SV=1
MRPRAIVLLSGGLDSTTCLAWAQARYECIALSFMYGQRSTTELDAARALTKNAGIEHRVINIDLGNLGGSALTDHSIEVPDYEQEGIPVTYVPARNTIFLSYALAAAEVFDAEAIVIGINAVDYSGYPDCRPEFIDAFANMARLATKVGVEGKPLKFETPLLHLSKANIIRLGIEHGVDYSQTVSCYQADDQGRACGKCDSCRLRKQGFADAGVADPTRYIPS

SEQ ID NO: 35627 - protein, 223 aa, Acinetobacter towneri
  misc_feature (1)..(223): tr|A0A1E8E227|A0A1E8E227_9GAMM 7-cyano-7-deazaguanine s ynthase OS=Acinetobacter towneri OX=202956 GN=queC PE=3 SV=1
MRHRAIVLLSGGLDSTTCLAWAQARYECIALSFMYGQRSTTELDAARALTKYAGIEHRVINIDLGNLGGSALTDHSIEVPDHEQEGIPVTYVPARNTIFLSYALAAAEVFDAEAIVIGINAVDYSGYPDCRPEFIDAFANMARLATKVGVEGKPLKFETPLLHLSKANIIRLGIEHDVDYSQTVSCYQADDQGRACGTCDSCRLRKQGFADAGVADPTRYIPS

SEQ ID NO: 35628 - protein, 222 aa, Acinetobacter ursingii
  misc_feature (1)..(222): tr|N9DFB4|N9DFB4_9GAMM 7-cyano-7-deazaguanine synthase OS=Acinetobacter ursingii ANC 3649 OX=1257043 GN=queC P E=3 SV=1
MRPRAIVLLSGGLDSTTCLAWAQARYECMALSFMYGQRSTTELDAAKAIAQNAGVEHRVINIDLGNLGGSALTDHNIDVPDHEQEGIPITYVPARNTIFLSYALAAAEVFGAEAIVIGVNAVDYSGYPDCRPEYIEAFTNMARLATKAGVEGKPLTFETPLLHLSKANIIRLGIEHCVDYSQTVSCYQADAEGRACGKCDSCRLRKQGFMEAGIADPTRYIP

SEQ ID NO: 35629 - protein, 222 aa, Acinetobacter ursingii
  misc_feature (1)..(222): tr|N9SAV1|N9SAV1_9GAMM 7-cyano-7-deazaguanine synthase OS=Acinetobacter ursingii NIPH 706 OX=1217716 GN=queC P E=3 SV=1
MRPRAIVLLSGGLDSTTCLAWAQARYECMALSFMYGQRSTTELDAAKAIAQNAGVEHRVINIDLGNLGGSALTDHNIDVPDHEQEGIPITYVPARNTIFLSYALAAAEVFGAEAIVIGVNAVDYSGYPDCRPEYIEAFTNMARLATKAGVEGKPLTFETPLLHLSKANIIRLGIEHGVDYSQTVSCYQADAEGRACGKCDSCRLRKQGFMEAGIADPTRYIP

SEQ ID NO: 35630 - protein, 222 aa, Acinetobacter variabilis
  misc_feature (1)..(222): tr|A0A427LLE7|A0A427LLE7_9GAMM 7-cyano-7-deazaguanine s ynthase OS=Acinetobacter variabilis OX=70346 GN=queC PE =3 SV=1
MRPRAIVLLSGGLDSTTCLAWAQARYECIALSFMYGQRSTTELDAARALAQRSGVEHRVINIDLGNLGGSALTDHSIEVPDQLQEGIPVTYVPARNTIFLSYALAAAEVFGAEAIVIGINAVDYSGYPDCRPEFIEAFANMARLATKVGVEGQALKFETPLLHLSKANIIRLGLEHGVDYSQTVSCYQADDQGRACGTCDSCRLRKQGFADAGVEDPTRYYL

SEQ ID NO: 35631 - protein, 222 aa, Acinetobacter variabilis
  misc_feature (1)..(222): tr|N9MEC0|N9MEC0_9GAMM 7-cyano-7-deazaguanine synthase OS=Acinetobacter variabilis OX=70346 GN=queC PE=3 SV=1
MRPRAIVLLSGGLDSTTCLAWAQARYECIALSFMYGQRSTTELDAARALAQRSGVEHRVINIDLGNLGGSALTDHSIEVPDQLQEGIPVTYVPARNTIFLSYALAAAEVFSAEAIVIGINAVDYSGYPDCRPEFIEAFANMARLATKVGVEGQALKFETPLLHLSKANIIRLGLEHGVDYSQTVSCYQADDQGRACGTCDSCRLRKQGFADAGVEDPTRYYL

SEQ ID NO: 35632 - protein, 226 aa, Acinetobacter venetianus
  misc_feature (1)..(226): tr|N8YMB5|N8YMB5_ACIVR 7-cyano-7-deazaguanine synthase OS=Acinetobacter venetianus (strain ATCC 31012 / CIP 11 0063 / RAG-1) OX=1191460 GN=queC PE=3 SV=1
MENNMRSRAIVLLSGGLDSTTCLAWAQANYECIALSFMYGQRSTTELDAAKALAKRAGVEHRVINIDLGNLGGSALTDHNIDVPEQLQEGIPVTYVPARNTIFLSYALAAAEVFDAEAIVIGVNAVDYSGYPDCRPEFIDAFANLARLATKAGVEGKPLKIETPLLHLSKANIIRLGIEHGVDYSQTVSCYQADAQGRACGKCDSCRLRQQGFIEAGIADPTRYTE

SEQ ID NO: 35633 - protein, 226 aa, Acinetobacter venetianus; identical to SEQ ID NO: 35632
  misc_feature (1)..(226): tr|A0A150I0Y8|A0A150I0Y8_9GAMM 7-cyano-7-deazaguanine s ynthase OS=Acinetobacter venetianus OX=52133 GN=queC PE =3 SV=1

SEQ ID NO: 35634 - protein, 222 aa, Acinetobacter wuhouensis
  misc_feature (1)..(222): tr|A0A3G2T489|A0A3G2T489_9GAMM 7-cyano-7-deazaguanine s ynthase OS=Acinetobacter wuhouensis OX=1879050 GN=queC PE=3 SV=1
MRPRAIVLLSGGLDSTTCLAWAQANYECIALSFMYGQRSTTELDAARALAQRAGVEHRGINIDLGNLGGSALTDHNIDIPDHETDGIPVTYVPARNTIFLSYALAAAEVFDAQAIVIGINAVDYSGYPDCRPEFIDAFANMARLATKVGVEGKPLKFETPLLHLSKANIIRLGIEHGVDYSQTVSCYQADDQGRACGKCDSCRLRKQGFMDAGVADPTRYIP

SEQ ID NO: 35635 - protein, 223 aa, Acinetobacter wuhouensis
  misc_feature (1)..(223): tr|A0A385C5K4|A0A385C5K4_9GAMM 7-cyano-7-deazaguanine s ynthase OS=Acinetobacter wuhouensis OX=1879050 GN=queC PE=3 SV=1
MRPRAIVLLSGGLDSTTCLAWAQANYECIALSFMYGQRSTTELDAARALAQRAGVEHRVINIDLGNLGGSALTDHNIDIPDHETDGIPVTYVPARNTIFLSYALAAAEVFDAQAIVIGINAVDYSGYPDCRPEFIDAFANMARLATKVGVEGKPLKFETPLLHLSKANIIRLGIEHGVDYSQTVSCYQADDQGRACGKCDSCRLRKQGFMDAGVADPTRYIPQ

SEQ ID NO: 35636 - protein, 245 aa, Actinoalloteichus hoggarensis
  misc_feature (1)..(245): tr|A0A221W7H0|A0A221W7H0_9PSEU 7-cyano-7-deazaguanine s ynthase OS=Actinoalloteichus hoggarensis OX=1470176 GN= queC PE=3 SV=1
MLDGVVAVFAEAYMLRPPRHAVLVASGGLDSTVLAYWLVACNSEVTMLSFDYGQRHRIELRHAAGIADLLAVEHQVVDLTSLASLLSGSALTDEAVTVPDGHYTEESMKATVVPNRNAIMLAVAVGLAVVRQADAVAFGAHAGDHTVYPDCRPAFVERFTEAARRGNEGFLPENFTVLAPFLSQSKTDIVKLGAALGVPFGKTWSCYRGATVHCGTCGTCVERAEAFAFAGVADPTCYAAGRCEE

SEQ ID NO: 35637 - protein, 222 aa, Actinobacillus delphinicola
  misc_feature (1)..(222): tr|A0A448TSY4|A0A448TSY4_9PAST 7-cyano-7-deazaguanine s ynthase OS=Actinobacillus delphinicola OX=51161 GN=queC PE=3 SV=1
MNFLNPNHNRKALVIFSGGQDSTTCLLQAIADYGVENVETVTFAYGQRHAIELEKAKWIAQDLGVKQTFIDTSLMKAITHNALMSEQEIKTGDNGLPNTFVDGRNALFLLYAAIYAKGQGISDIITGVCETDFSGYPDCRDVFIKSMNVTLNLAMAYDFRIITPLMYLTKAQTWQMADELGQLDYVRHHTHTCYMGVEGGCGECPSCKLREKGLAEYLASKK

SEQ ID NO: 35638 - protein, 53 aa, Actinobacillus equuli
  misc_feature (1)..(53): tr|A0A448QTP0|A0A448QTP0_ACTEU 7-cyano-7-deazaguanine s ynthase OS=Actinobacillus equuli OX=718 GN=queC_1 PE=3 SV=1
MNSTPKAVVIFSGGQDSTTCLFQAIQEFGVENVEVVTFQYGQRHAIELEKPHG

SEQ ID NO: 35639 - protein, 222 aa, Actinobacillus equuli
  misc_feature (1)..(222): tr|A0A0A7MFW9|A0A0A7MFW9_ACTEU 7-cyano-7-deazaguanine s ynthase OS=Actinobacillus equuli subsp. equuli OX=20294 7 GN=queC PE=3 SV=1
MNSTPKAVVIFSGGQDSTTCLFQAIQEFGVENVEVVTFQYGQRHAIELEKAAWIAKDLGVKQTLIDTSVIKAITSNAMMEEREIKQEGNTPNTFVDGRNALFLLYTAIYAKGQGIQTIFTGVCETDFSGYPDCRDVFVKSMNVTLNLAMDYNFNIRTPLMYLTKKQTWELADKLGAFDYIRQHTHTCYLGVEGGCHTCPSCVLREKGLNEYLSEKTSGQKNV

SEQ ID NO: 35640 - protein, 219 aa, Actinobacillus indolicus
  misc_feature (1)..(219): tr|A0A4P7CEB9|A0A4P7CEB9_9PAST 7-cyano-7-deazaguanine s ynthase OS=Actinobacillus indolicus OX=51049 GN=queC PE =3 SV=1
MNKNKKAIVIFSGGQDSTTCLFLTIQAFGKSNVEAITFQYGQRHAIELEKAQWIAQDLGIKQTIVDTSVIKTITSNALMDEQSEIRQIGNTPNTFVDGRNALFLLYTAIYAKSQGIQTIYTGVCETDFSGYPDCRDVFVKSMNVTLNLAMDYNFNILTPLMYLTKKETWALADQLEVFDYIQAYTHTCYLGVEDGCHTCPSCLLREKGLNEYLEEKQNS

SEQ ID NO: 35641 - protein, 222 aa, Actinobacillus lignieresii
  misc_feature (1)..(222): tr|A0A380TXU4|A0A380TXU4_ACTLI 7-cyano-7-deazaguanine s ynthase OS=Actinobacillus lignieresii OX=720 GN=queC PE =3 SV=1
MNSTPKAVVIFSGGQDSTTCLFQAIQEFGVENVEVVTFQYGQRHAIELEKAAWIAKDLGVKQTLIDTSVIKAITSNAMMEERKIKQEGNTPNTFVDGRNALFLLYTAIYAKGQGIRTIFTGVCETDFSGYPDCRDVFVKSMNVTLNLAMDYNFNIRTPLMYLTKKQTWALADKLGAFDYIRQHTHTCYLGVEGGCHTCPSCVLREKGLNEYLSEKTSGQKNV

SEQ ID NO: 35642 - protein, 221 aa, Actinobacillus minor
  misc_feature (1)..(221): tr|C5S1U1|C5S1U1_9PAST 7-cyano-7-deazaguanine synthase OS=Actinobacillus minor NM305 OX=637911 GN=queC PE=3 SV =1
MQQPQKAIVIFSGGQDSTTCLFQAIAEFGKENVEVITFQYGQRHAIELEKAQWIAQDLGIKQTLIDTSLIKAITSNALMDDQAKIEQQGDKPNTFVDGRNALFLLYAAIYAKGQGIQTIFTGVCETDFSGYPDCRDVFVKSMNVTLNLAMDYNFNIRTPLMYFTKKETWRLADQLGAFDYIRQHTHTCYLGVEGGCHTCPSCLLREKGLNEYLAERGEKHV

SEQ ID NO: 35643 - protein, 222 aa, Actinobacillus pleuropneumoniae
  misc_feature (1)..(222): sp|A3N1A3|QUEC_ACTP2 7-cyano-7-deazaguanine synthase OS =Actinobacillus pleuropneumoniae serotype 5b (strain L2 0) OX=416269 GN=queC PE=3 SV=1
MNSTPKAVVIFSGGQDSTTCLFQAIQEFGVENVEVVTFQYGQRHAIELEKAAWIAKDLGVKQTLIDTSVIKAITSNAMMEEHEIKQEGNTPNTFVDGRNALFLLYTAIYAKGQGIRTIFTGVCETDFSGYPDCRDVFVKSMNVTLNLAMDYNFNIRTPLMYLTKKQTWALADKLGAFDYIRQHTHTCYLGVEGGCHTCPSCVLREKGLNEYLSEKTSGQKNV

SEQ ID NO: 35644 - protein, 222 aa, Actinobacillus pleuropneumoniae
  misc_feature (1)..(222): sp|B0BQ32|QUEC_ACTPJ 7-cyano-7-deazaguanine synthase OS =Actinobacillus pleuropneumoniae serotype 3 (strain JL0 3) OX=434271 GN=queC PE=3 SV=1
MNSTPKAVVIFSGGQDSTTCLFQAIQEFGVKNVEVVTFQYGQRHAIELEKAAWIAKDLGVKQTLIDTSVIKAITSNAMMEEREIKQEGNTPNTFVDGRNALFLLYTAIYAKGQGIRTIFTGVCETDFSGYPDCRDVFVKSMNVTLNLAMDYNFNIRTPLMYLTKKQTWALADKLGAFDYIRQHTHTCYLGVEGGCHTCPSCVLREKGLNEYLSEKTSGQKNV

SEQ ID NO: 35645 - protein, 227 aa, Actinobacillus porcinus
  misc_feature (1)..(227): tr|A0A4V6M354|A0A4V6M354_9PAST 7-cyano-7-deazaguanine s ynthase OS=Actinobacillus porcinus OX=51048 GN=queC PE= 3 SV=1
MKILNPNNNRKVVVIHSGGQDSTTCLLLAIQEYGVENVHAMTFQYGQRHHIELEKAKWICQDLGVKHHILDMSAMQVFAPNAMMNETEIKTGDNGVPNTLVDGRNALFLLYAAIYAKSQGMTDIMTGVCETDFSGYPDCRDVFIKSMNVTLNLAMDYNFNIRTPLMYLTKAQTWQLADKLGALDYVREHTHTCYMGVEGGCGECPSCILREKGLAEYLEQKSAVKNV

SEQ ID NO: 35646 - protein, 221 aa, Actinobacillus porcitonsillarum
  misc_feature (1)..(221): tr|A0A2U8FJ52|A0A2U8FJ52_9PAST 7-cyano-7-deazaguanine s ynthase OS=Actinobacillus porcitonsillarum OX=189834 GN =queC PE=3 SV=1
MQQPQKAIVIFSGGQDSTTCLFQAIAEFGKENVEVITFQYGQRHAIELEKAQWIAQDLGVKQTLVDTSLIKAITSNALMDEQAKIEQQGDKPNTFVDGRNALFLLYAAIYAKGQGIQTIFTGVCETDFSGYPDCRDVFVKSMNVTLNLAMDYNFNIRTPLMYLTKKETWRLADQLGAFDYIREHTHTCYLGVEGGCHTCPSCLLREKGLNEYLAERGEKHV

SEQ ID NO: 35647 - protein, 227 aa, [Actinobacillus] rossii
  misc_feature (1)..(227): tr|A0A380TN55|A0A380TN55_9PAST 7-cyano-7-deazaguanine s ynthase OS=[Actinobacillus] rossii OX=123820 GN=queC PE =3 SV=1
MKILNPNNNRKVVVIHSGGQDSTTCLLLAIKEYGVENVHAMTFKYGQRHSIELEKAKWICQDLGVNHHILDMSAMQVFAPNAMMNETEIKTGENGVPNTLVDGRNALFLLYAAIYAKSQGMTDIMTGVCETDFSGYPDCRDVFIKSMNVTLNLAMDYNFNIRTPLMYLTKAQTWQLADELGRLDYVREHTHTCYMGVEGGCGQCPSCILREKGLEEYLEQKSAVKNV

SEQ ID NO: 35648 - protein, 230 aa, Actinobacillus seminis
  misc_feature (1)..(230): tr|A0A263HDG1|A0A263HDG1_9PAST 7-cyano-7-deazaguanine s ynthase OS=Actinobacillus seminis OX=722 GN=queC PE=3 S V=1
MQISKILNPNNDRKAVVIFSGGQDSTTCLLLTIEEYGVENVHAMTFQYGQRHHIELQKAQWICQDLGVKQHILDMTAMQVFAPNAMMNETKIVKNEKGVPNTMVDGRNALFLLYAAIYAKSQGMTDIITGVCETDFSSYPDCRDVFIKSMNVTLNLSMDYNFNIRTPLMYLTKAQTWQLADDLGRLDYVREHTHTCYVGVDGGCGECPSCILREKGLAEYLAQKSAVKNV

SEQ ID NO: 35649 - protein, 235 aa, Actinobacillus succinogenes
  misc_feature (1)..(235): sp|A6VQW6|QUEC_ACTSZ 7-cyano-7-deazaguanine synthase OS =Actinobacillus succinogenes (strain ATCC 55618 / DSM 2 2257 / 130Z) OX=339671 GN=queC PE=3 SV=1
MNISNPNGNRKAVVIFSGGQDSTTCLLQAIRDYGPNNVEAVTFQYGQRHAIELQKAQWIAQDLGVKQTLIDTSVIKTITTNAMMSDAQIKQDENGMPNTFVDGRNALFLLYAAIYAKGQGITDIITGVCETDFSGYPDCRNVFIKSMNVTLNLAMDYQFNIRTPLMYLTKAQTWQLADELGALDYVRQYTHTCYLGVEGGCGTCPSCLLREKGLKQYLAQKSAVEKSSVLTAKEA

SEQ ID NO: 35650 - protein, 222 aa, Actinobacillus suis
  misc_feature (1)..(222): tr|K0G6F6|K0G6F6_ACTSU 7-cyano-7-deazaguanine synthase OS=Actinobacillus suis H91-0380 OX=696748 GN=queC PE=3 SV=1
MNSTPKAVVIFSGGQDSTTCLFQAIQEFGVENVEVVTFQYGQRHAIELEKAAWIAKDLGVKQTLIDTSVIKAITSNAMMEEREIKQEGNTPNTFVDGRNALFLLYTAIYAKGQGIQTIFTGVCETDFSGYPDCRDVFVKSMNVTLNLAMDYNFNIRTPLMYLTKKQTWALADKLGAFDYIRQHTHTCYLGVEGGCHTCPSCVLREKGLNEYLSEKTSGQKNV

SEQ ID NO: 35651 - protein, 222 aa, Actinobacillus ureae
  misc_feature (1)..(222): tr|E8KIR2|E8KIR2_9PAST 7-cyano-7-deazaguanine synthase OS=Actinobacillus ureae ATCC 25976 OX=887324 GN=queC PE =3 SV=1
MNSIPKAVVIFSGGQDSTTCLFQAIQEFGVENVEVVTFQYGQRHAIELEKAAWIAKDLGVKQTLIDTSVIKAITSNAMMEVREIKQEGNTPNTFVDGRNALFLLYTAIYAKGQDIQTIFTGVCETDFSGYPDCRDVFVKSMNVTLNLAMDYNFNIRTPLMYLTKKQTWALADKLGAFDYIRQHTHTCYLGVEGGCHTCPSCILREKGLNEYLSEKTSGQKNV

SEQ ID NO: 35652 - protein, 426 aa, Actinobacteria bacterium
  misc_feature (1)..(426): tr|A0A2N3GS82|A0A2N3GS82_9ACTN 7-cyano-7-deazaguanine s ynthase OS=Actinobacteria bacterium HGW-Actinobacteria- 11 OX=2013646 GN=CVT61_06005 PE=3 SV=1
MRHFKLLLDTAEASDGEESFYWTRDADSTFLGSLGSSLGSVGAVPSLNIDLVRIAVGVYAADRSVPRKYGGSDWNQREISLTLPLLNVDHWTSRERELASMLDFLSGDSWTLKFVESTPPDEDVALTTVDAARVVLFSGGADSAIGALKSKKELSEKGHHVLVSHYSANHIAPIQKALEAHLAAVSPRRSQSHEVFHLARRAVRLDGSEFESEPSSRSRSFLFLALGLATAAVHGVDLWIPENGFASINPPLGPGRRGSLSTRTTHPAFLKAFNSLLSGSGINSRIRNPFASWTKGEMVAWAIQVLGKERASVYLSTSNSCSSTGQRSFGVPLRVHCGVCFGCVLRRSSFAAADLADKTEYADSRSNAGLANWLERISVVPAVREFVSTGVRPRDLMALSLPHDYKLADALDLTSRGIAELKEYVR

SEQ ID NO: 35653 - protein, 232 aa, Actinobacteria bacterium
  misc_feature (1)..(232): tr|A0A538LRB2|A0A538LRB2_9ACTN 7-cyano-7-deazaguanine s ynthase OS=Actinobacteria bacterium OX=1883427 GN=queC PE=3 SV=1
MSPSRHVVILSGGLDSTTCMALAARDGGRPPLALCFDYGQSHRIELEHAAKVASHYGAERLVVDIDARAWGGSALTDASVDIPQSTGSPDSGQPDPLDIPVTYVPARNIIFLAVALGVAEARDADAVYLGVNALDYSGYPDCRPAFVDAFRAVAAVGQKRALAGRPVGIRTPLIDLTKPQIVRLALDLGAPVELTWSCYRPGPVPCQACDACQLRARGFADAGVSDPALTTP

SEQ ID NO: 35654 - protein, 202 aa, Actinokineospora auranticolor
  misc_feature (1)..(202): tr|A0A2S6GJ53|A0A2S6GJ53_9PSEU 7-cyano-7-deazaguanine s ynthase OS=Actinokineospora auranticolor OX=155976 GN=C LV40_115115 PE=3 SV=1
MKIVAMVSGGTDSVVMAHHLATQGHHLHLLAIDYGQHHRKELIFAAATAHRLDTPYDEIDLRALRALHRGTPHTGHIPNRNAVLLSIAFALATSTTARAVAIGTRAQDPDTTPELLRRFRDMQLTADPEPLDLLTPLIELPKTGVIALGTELGIPWEQTWTCLHGDEVHCGTCAACTERRAAFTTLGLTDPIPYREPLPNHP

SEQ ID NO: 35655 - protein, 230 aa, Actinokineospora cianjurensis
  misc_feature (1)..(230): tr|A0A421BAJ6|A0A421BAJ6_9PSEU 7-cyano-7-deazaguanine s ynthase OS=Actinokineospora cianjurensis OX=585224 GN=q ueC PE=3 SV=1
MTATKPKAVVLLSGGLDSATVLAIAAADGFETYALSFRYGQRHSVELEAAGRVATALGASKHVVADIDLRVFGGSALTDDSIDVPHHDSVDGVTQDIPITYVPARNTIFLSFALAWAETLGSQDIFIGVNALDYSGYPDCRPEYIEAYQAMANLATKAGVEGSQNLTIHMPLVALTKAETIQRGLELGVDYGLTHSCYDPVDGRACGSCDSCLLRDRGFADLGLTDPALA

SEQ ID NO: 35656 - protein, 233 aa, Actinokineospora spheciospongiae
  misc_feature (1)..(233): tr|W7ILF6|W7ILF6_9PSEU 7-cyano-7-deazaguanine synthase OS=Actinokineospora spheciospongiae OX=909613 GN=queC P E=3 SV=1
MERPAIVLLSGGLDSTTVLAIARDQGFTPYALSFRYGQRHSIELQAAERVATTQGAARHVVADIDLRVFGGSALTSDISVPKHDSVEQIEADTIPVTYVPARNTIFLSFALAYAEVVGATDIFTGVTAVDFSGYPDCRPEYMDAFATMANLATKAGVEGKTRLELHSPLIDLSKADIIRKGLSLGVDYSITSSCYDPDAQGRACGHCDTCLLRLKGFAEVGIDDPAPYQNAGA

SEQ ID NO: 35657 - protein, 230 aa, Actinokineospora terrae
  misc_feature (1)..(230): tr|A0A1H9NYD4|A0A1H9NYD4_9PSEU 7-cyano-7-deazaguanine s ynthase OS=Actinokineospora terrae OX=155974 GN=queC PE =3 SV=1
MTATKPKAVVLLSGGLDSATVLAIAAADGFETYALSFRYGQRHSVELEAAGRVATALGASKHVVADIDLRVFGGSALTDDSIDVPHHDSVAGVTQDIPITYVPARNTIFLSFALAWAETLGSQDIFIGVNALDYSGYPDCRPEYIEAYQAMANLATKAGVEGSQNLTIHMPLVALTKAETIQRGLELGVDYGLTHSCYDPVDGRACGSCDSCLLRDRGFADLGLTDPALA

SEQ ID NO: 35658 - protein, 231 aa, Actinokineospora terrae
  misc_feature (1)..(231): tr|A0A1H9WRK9|A0A1H9WRK9_9PSEU 7-cyano-7-deazaguanine s ynthase OS=Actinokineospora terrae OX=155974 GN=SAMN044 87818_11173 PE=3 SV=1
MMIERPEHRHLEHAVVIASDGLDSTARAYWLAARHSRPTLVLFDYGQRHRVELGHAAEIARLHLSPHRIIDRTSLGALLPGSALTDSPVAVPDGHYTAESIAATVVPNRNAIMLDITVAVAIVVLADAVAFGANAGDHAIYSDCLPEFAERFARSALVANERLLVPGFQVLAPFLPLTKIDIDGVGEALTVPFARTWSCYRGRGAHCGTGTERREAFLDNNIADPAIYRAA

SEQ ID NO: 35659 - protein, 273 aa, Actinomadura echinospora
  misc_feature (1)..(273): tr|A0A1H6E998|A0A1H6E998_9ACTN 7-cyano-7-deazaguanine s ynthase OS=Actinomadura echinospora OX=1992 GN=queC PE= 3 SV=1
MPYDRISPLRAQGERLGVSDRSRRAPAGGGAVINVESTGIRHAVVIASGGLDSTTLAYWLKAEGTQQLTLLGVDYGQRHRVELSYLKRTAAKLGAWHVQLGVPDLGKLLAGSALTDPQVQVPSGHYTDVSMRATVVPNRNALLLDLAVGLAISAKADAVAFGAHAGDQPIYPDCRPAFVDAYTRMAAVANEGFLTVGFKVVAPFLTWTKADIVRVAAALGVPFGDTWSCYRGDTWHCGRCGTCAERKKAFARAGLVDPTHYQDATGPGHRPVR

SEQ ID NO: 35660 - protein, 226 aa, Actinomadura mexicana
  misc_feature (1)..(226): tr|A0A238VVX1|A0A238VVX1_9ACTN 7-cyano-7-deazaguanine s ynthase OS=Actinomadura mexicana OX=134959 GN=queC PE=3 SV=1
MLLSGGLDSTTVLAIAREQDYETYALSFRYGQRHTEELDAAKKVAAELGAAQHVIADINLAVFGGSALTDDALAVPHHESVNDVSADEIPITYVPARNTIFLSFALAWAETLGSSDIFIGVNAMDYSGYPDCRPEFIEAYEHMANRATKAGVEGTQRLKIHTPLIELTKAQTIQRGLDLGVDYSWTHSCYDPVDGRACETCDSCLLRGRGFAELGLVDPSFSSANA

SEQ ID NO: 35661 - protein, 248 aa, Actinomadura parvosata
  misc_feature (1)..(248): tr|A0A2P9IXC7|A0A2P9IXC7_9ACTN 7-cyano-7-deazaguanine s ynthase OS=Actinomadura parvosata subsp. kistnae OX=195 5414 GN=KIS93_12115 PE=3 SV=1
MRLPRSAPRPDGTPAPLAVVLFSGGLDSTVLAVHYARTHRLLLLSFDYGQRHRAPELAAGADVAADLEAEHHTVTITGLSPLLTGCSLTDPDEQVPTLVPSDAALRSITIPNRNAFILDMAVAVATARQAEVVALGVHHTREGYPMPDGRPDFFEAYQEMVRLASRGFHTPRIEVPFISMQKEDIVAYGARLGAPMHKSWTCYLDGPVHCGTCIACMTRRSAYARSATPDPTHYDREALDDASDPGPP

SEQ ID NO: 35662 - protein, 249 aa, Actinomadura sp.
  misc_feature (1)..(249): tr|A0A372GNU3|A0A372GNU3_9ACTN 7-cyano-7-deazaguanine s ynthase OS=Actinomadura sp. LHW52907 OX=2303421 GN=queC PE=3 SV=1
MRLQFPRSRQDGEQQVRTDKRRAVVLLSGGLDSTTVLAIARDEEYETYALSFRYGQRHTEELDAAQKVARELGATDHVIADINLAVFGGSALTDESLAVPHHANADELGEEIPVTYVPARNTVFLSFALAWAETLGSSDVFIGVNAMDYSGYPDCRPEYIQAYERMANLATKAGVEGTQKLKIHTPLIDLTKAQTIERGLSLGVDYGWTHSCYDPVDGRACETCDSCLLRSRGFAELGLADPSFTSAKA

SEQ ID NO: 35663 - protein, 224 aa, Actinomadura sp.
  misc_feature (1)..(224): tr|A0A5C4J9E0|A0A5C4J9E0_9ACTN 7-cyano-7-deazaguanine s ynthase OS=Actinomadura sp. 14C53 OX=2508997 GN=queC PE =3 SV=1
MSGGLDSTTVLAIARDEGYETHALSFRYGQRHTEELEAAEKVAVELGATQHVIADINLAVFGGSALTDDALDVPHHDSVEAVCVEEIPITYVPARNTVFLSFALAWAETLGSSDVFIGVNAMDYSGYPDCRPEYIEAYERMANLATKAGVEGTQQLKIHTPLIELTKAQTIQRGLELGVDYSWTHSCYDPVGGRACETCDSCLLRSRGFAELGMVDPSFSSANA

SEQ ID NO: 35664 - protein, 554 aa, Actinomyces bowdenii
  misc_feature (1)..(554): tr|A0A3P1V2Z6|A0A3P1V2Z6_9ACTO Uncharacterized protein OS=Actinomyces bowdenii OX=131109 GN=EII10_08900 PE=4 S V=1
MNDLEVDLRLISPHWREGGAGAGTGGAAAPGAPGLWVRGDLPCPAPTDPAALRAHPGRLAAVEVGADEVVLAQDRLRSWPLFWSIQPSAPGRPRRLVISDDAAAMRAALEAPALDERACREMVDAGFVSGADTLLRDVFQVEQGSMVRIDLRSGRASTTSHSLGRFDEDGVIEDPQAFSDLLEGALDAVMGRLVDRLGEARIVLPLSGGLDSRLLVAWLALHGLGDRVVSFTYGRPGAREMEVSRAVAQAVGMQWHAVDYEPRALRGAWGTQEAADFLAQSYALSALPHVQDWYALTRLMDRGVVRPGDVVLPGHTLVGNMHDEHLLEAGRVRRSEVARALCWHHQDLQGRQARAWADPYRAAKLKDFLALRPFTGEARDVQSILESYNLRERQTKYINNSVRAYEHLGLDWALPMLDVEFWDAWHRGGVGLTATRDFYGVLIGRLWDRATGSGQGGQEDLPYFAVTRVDEATRSRLKSALAATGLLPLAERSFSTWSTLHDSMAFDALITDTPRPVAAAQLMAGRKLLGFWTSAFLADTWCPASRLFSDLPRI

SEQ ID NO: 35665 - protein, 507 aa, Actinomyces naeslundii
  misc_feature (1)..(507): tr|J3ABP5|J3ABP5_ACTNH Queuosine biosynthesis protein Q ueC-like protein OS=Actinomyces naeslundii (strain ATCC 12104 / DSM 43013 / JCM 8349 / NCTC 10301 / Howell 279 ) OX=1115803 GN=HMPREF1129_2128 PE=4 SV=1
MAPKADDVEAVRQQQPERRAGAWTLVEESDGVLRLTTDRTRSHHLVFTRAGGTWVVSDDPQELRRHVPTWVRDEQAAEVFLHAGFTPGARTLAREVYATAPGTVVELRPDGTWSSRPWETYHYDPEPVTSPQEFSDVLRTALDVVVERLLQDTGDRQLLVPLSGGLDSRLLAVWLKRHGARNVVAFTYGVPGSAEVAISRGVAEALKMDWFTVDLDPTEVARTWAGPDGVEFQERTWGLTSLPHVQDWYALLQMRRHALVDTDAVFLPGHTIVGNMHDEHLLESRPSREDVLTAIARHHSLLQGDHKAWRHLPLLRRAVLQGAEELSFPTGQDEMNGSGRAIQELLEWVNLQERQSKYINGSFKAYEAFGYGWALPMLDTEMWGAWLRGSEELTATRDWYAQFTAEAFAEATGTASRLFEAPAERIPAGARRLLMTALTVTGTRTAMSRAVSMRTKLHHPMAFEAFNAPMPRSEQILRMARGATSTGLWAQLFLDGTWGAHPVAPMG

SEQ ID NO: 35666 - protein, 431 aa, Actinomyces naeslundii
  misc_feature (1)..(431): tr|A0A2Z5QQT1|A0A2Z5QQT1_ACTNA Asparagine synthetase OS =Actinomyces naeslundii OX=1655 GN=AN27039_1733 PE=4 SV =1
MSAIEVDLRLRSPHWSRVTTSVDTVNDGNGLWVRADHDCSDPTDPEVLVSHPGRLTAIQIDGDEVVLAQDRLRSWPLFWSLEDGMSDAQRLVISDDATLMREAVSAPRLDARARREFLDAGFVTGSDTLLAGIHQTEQGTVVRIDRATGRVRTINHSVAQFSEETDAVVAPEEFSDLLTEALDAVMGRLLVDLDRRPGTPRLVIPLSGGLDSRLLVAWLTLHDALDRAVAFTYGRPGAREVEISRKVAQAVGLEWHAVDYDPAVLREAWQTQEAADFLTDGYALGPCHTSRTGGRCAPSWHAGRCGPVTSCCRGTRSWATCTTSICSTGLPPPAARWPKRSSPTTRGSRVSRTRPGLTPTGPGRSRNSWRCGRSPAAPATYRASWSPTTSASDRPSTSTTRCAPTSTWAWNGPCPCWTRSSGTPGTTAPSS

SEQ ID NO: 35667 - protein, 572 aa, Actinomyces oris
  misc_feature (1)..(572): tr|A0A120KQB0|A0A120KQB0_9ACTO Uncharacterized protein OS=Actinomyces oris OX=544580 GN=AXE84_07700 PE=4 SV=1
MSAIEVDLRLRSPHWSRVTTSVDTVNDGNGLWVRADHDCSDPTDPEVLVSHPGRLTAIQIDEDEVVLAQDRLRSWPLFWSLEDGMSDAQRLVISDDATLMREAVSAPRLDARARREFLDAGFVTGSDTLLAGIHQTEQGTVVRIDRATGRVRTINHSVAQFSEETDAVVAPEEFSDLLTEALDAVMGRLLVDLDRRPGTPRLVIPLSGGLDSRLLVAWLTLHDALDRAVAFTYGRPGAREVEISRKVAQAVGLEWHAVDYDPAVLREAWQTQEAADFLTDGYALGALPHVQDWWALRTLLARGTVRPGDILLPGHTIVGNMHDEHLLDGPPATRSQVAKAIITHHQGLQGEQNQAWADPYRTRKVKEFLALRPFTGSPRDVQSILESYNVRERQTKYINNSVRAYEHLGLEWALPMLDVEFWDAWHRGAVELTATRDFYAVFIGRLWAQATARASGQEQTSQADLAYFTPTQVNETTRSRLKAVLSRLHLLHLAERTASSWATLHSPMSFDAFITDTSRPAAAVQLMTGRTLLGFWARAFITDTWCRRCRLFTDLPVADVPPAAADSSGQKA

SEQ ID NO: 35668 - protein, 572 aa, Actinomyces oris
  misc_feature (1)..(572): tr|A0A1Q8W8L7|A0A1Q8W8L7_9ACTO Uncharacterized protein OS=Actinomyces oris OX=544580 GN=BKH22_11650 PE=4 SV=1
MSAIEVDLRLRSPHWSRVTTSADTVTDGNGLWVRADYDCSDPTDPEVLASHPGRLAAIRIDGDEVVLAQDRLRSWPLFWSLEDGLSGAQRLVVSDDAALMREAVSAPRLDARARREFLDAGFVTGSDTLLAGIHQTEQGTVVRIDRATGRARTINHSVARFCEGTDTVVDPEDFSGLLCEALDVVLGRVLAEMDRRAGTPRLVVPLSGGLDSRLLVAWLTLHDALDRTVAFTYGRPGAREVEISRKVAQAVGLEWHAVDYDPAALREAWQTQEAADFLKDGYTLGALPHIQDWWALRTLLARGTVRPGDIVLPGHTIVGNMHDEQLLDGPPATRGQVAKAIITHHQELQGEQNQAWADPYRAGKVKNFLALRPFTGSPRDVQSILESYNVRERQTKYINNSVRAYEHLGLEWALPMLDVEFWNAWHRGAVELTATRDFYAVFIGRLWAQATARASGQEQTAQADLAYFTPTKVNETTRSRLKAVLSRLHLLHLAERTASSWATLHSPMSFDAFITDASRPAAAVQLMMGRTLLGFWARAFITDTWCRRCRLFTDLPVVDVPPTVADSSELKA

SEQ ID NO: 35669 - protein, 571 aa, Actinomyces sp.
  misc_feature (1)..(571): tr|F3P5U1|F3P5U1_9ACTO Conserved domain protein OS=Acti nomyces sp. oral taxon 170 str. F0386 OX=762963 GN=HMPR EF9056_00399 PE=4 SV=1
MNVIDVELRLTSPQWQQTGPSDGTAESLWMRCDTSCPDPTDPEVLASHPGRLTAIRVNDDEVILAQDRLRSWPLFWALENGADGRRLIISDDATAMRGALSAPRLDPRARREFLDAGFISGTDTLLAGVHQTEQGAIVHIDRDTGRARTVTHSLARFSEESAMVTDPEEFSGLLLAALDAGMGRVLEDLAARPGSPRLVLPLSGGLDSRLLVAWLTLHGTLDRAVAFTYGRPGTREVEVSRKVAEAVGLEWHAVDYVPAELREAWQTQDAADFLEYGYALGALPHVQDWYALRSLLERGVVRPGDVVLPGHTIVGNMHDEHLLEEPRVTRGRVARAILVHHQELQGDQRRAYADPYRAAKVRDFLALWPFTGSPRDVQSILESYNVRERQTKYINNSMRAYEHLGLEWALPMLDVEFWEAWHRGAVELTATRDFYAVFIGRLWARATALAAGAEADAAGRDAEADLPYFAATEVSEETRSRLKTVLSRLHLLGLAERTFSAWASLHSTMAFEAFITDTPLPVAAAELMGGRKLLGFWTRAFVNDAWCRRCRLFTDLPVASPAELEAAASEE

SEQ ID NO: 35670 - protein, 572 aa, Actinomyces sp.
  misc_feature (1)..(572): tr|A0A1F1FAC9|A0A1F1FAC9_9ACTO Uncharacterized protein OS=Actinomyces sp. HMSC075C01 OX=1739387 GN=HMPREF2883_ 07290 PE=4 SV=1
MSAIEVDLRLRSPHWSRVTTSADTVTDGNGLWVRADHDCSDPTDPEVLTSHPGRLAAIRIDGDEVVLAQDRLRSWPLFWSLEDGLSGAQRLVVSDDATLMREAVSAPRLDARARQEFLDAGFVTGSDTLLAGIHQTEQGTVVRIDRATGRARTINHSVARFCEGTDTVVDPEDFSGLLCEALDVVLGRVLAEMDRRAGSPRLVVPLSGGLDSRLLVAWLTLHDALDRTVAFTYGRPGAREVEISRKVAQAVGLEWHAVDYDPAALREAWQTQEAADFLKDGYTLGALPHIQDWWALRTLLARGTVRPGDIVLPGHTIVGNMHDEQLLDGPPATRGQVAKAIITHHQELQGEQNQAWADPYRAGKVKSFLALRPFTGSPRDVQSILESYNVRERQTKYINNSVRAYEHLGLEWALPMLDVEFWNAWHRGAVELTATRDFYAVFIGRLWAQATARASGQEQTAQADLAYFTPTKVNETTRSRLKAVLSRLHLLHLAERTASSWATLHSPMSFDAFITDASRPAAAVQLMMGRTLLGFWARAFITDTWCRRCRLFTDLPVVDVPPTVADSSELKA

SEQ ID NO: 35671 - protein, 451 aa, Actinophytocola xanthii
  misc_feature (1)..(451): tr|A0A1Q8CKZ5|A0A1Q8CKZ5_9PSEU 7-cyano-7-deazaguanine s ynthase OS=Actinophytocola xanthii OX=1912961 GN=BU204_ 24320 PE=3 SV=1
MKERCYEFTSYGPRHRGADWIAISERDFRERETRVDLLTRLVSTAPLWSSDLLRIARAVFLVDKRFLRSETADRWTRVIRLSVQLNEPETWTPSVLETLNTVLAQLTGDHWSVEVHPGATAQTLLDDEPVGEVALFSGGLDSTAYAAHAVRNATTPLLLISFDDGLQSRQQEIRRYVEQISRRPVTSQQLAQTVQSEPGEDLEPSSRSRGFLYLAAAVCSAASHRLERVSLPENGQLAVNPPLTPGRLGALSTRSAHPNTIALLNQVIRGVGGTVRVTNPLLDRTKGEVCALALESGLTAAALGRTISCGNPRRTKMKADFNCGYCYPCLLRRAGLLQALGEDPTEYQHNVADLPIDDRKARDLTALAQWLNNPFGLRDVVADSPYPDEVPPPAVLPVLLRGRTEFSAMLTRVLPADHPLRTASAGLFEGDGAATQAAASRESVGHHGGVA

SEQ ID NO: 35672 - protein, 434 aa, Actinoplanes lutulentus
  misc_feature (1)..(434): tr|A0A327YXX3|A0A327YXX3_9ACTN 7-cyano-7-deazaguanine s ynthase in queuosine biosynthesis OS=Actinoplanes lutul entus OX=1287878 GN=B0I29_129105 PE=4 SV=1
MPKDYNIVVNDCASPPVLGLTHLRTRATPYGGRNFTSSFQDIIGGLPERLTPIQQDWLHILTSIFAADVASKRGAGDDWSRRIQLWIGVREPDHWKPLKPQIELVFKSLTYDQFAVTFVADPDAPPTPRQDREAFPRADSVALVSGGIDSLTGAARLLDLHRTPLFISHQNSGAVSDALQAVDEGLARIGQHAGRRSFTAQKEGIDGTESSQRSRSLLYMGVACLAAACLDISDVYLNENGIMAINVPLTPARIGSFSTHTCNPTIVYDVAKIAGQALGWTGTIHNIIVTSTKPEVVLEAATLGLRDVLPKTVSCWQIGRTRRHCGYCVPCLIRQISFEHAGLSDTSHEIYPLDTIPNGGIRQQTAIDNVTHLAAHVLALSQSDEFELELDFTEIINCDGQLTRRQSMDMHYRWAEQCLSVLERHPHSAHLLGR

SEQ ID NO: 35673 - protein, 230 aa, Actinoplanes sp.
  misc_feature (1)..(230): tr|R4LCI3|R4LCI3_9ACTN 7-cyano-7-deazaguanine synthase OS=Actinoplanes sp. N902-109 OX=649831 GN=exsB PE=3 SV= 1
MPKTIAIVSGGLDSVTMAYHLKDRGHKLHLLSVDYGQRHLVEHEFAAKAARVLGVPHDVADLGAVGKLLGGSSLTDPAVDVPARKSEEMTGGSPNVVPNRNALLLAVAFAVAVAEQAQAVAIGVIDDAQAAPDCTPEFLDFFLTMEKIATRGYAHPDLTLTAPLAKLRKSGVVALGEKLGVPWTDTWTCFRGTTLHCGRCAACWERQEAFLEAGVADPTDYQTSHSKEPA

SEQ ID NO: 35674 - protein, 226 aa, Actinoplanes teichomyceticus
  misc_feature (1)..(226): tr|A0A561WR03|A0A561WR03_ACTTI 7-cyano-7-deazaguanine s ynthase OS=Actinoplanes teichomyceticus OX=1867 GN=FHX3 4_1011274 PE=3 SV=1
MPKIVAIVSGGMDSVTMAHQLKEQGHDLHLLSVDYGQRHRKEHRFAAAAAERLGAVHQVADLSAMGALLRGSSLTDPTVDVPEQTWTGYGESPNIVPNRNALLLSVAFAVAVAEKAQAVAIGIMADDTVSVPDSTPAFLESFIAMERIATAGYAHPDLDLLAPLSGLGKKDVVTLGERLGVPWTETWTCLRGQDDHCARCAACWERQEAFTAAGVQDPTIYQEHQS

SEQ ID NO: 35675 - protein, 233 aa, Actinosynnema pretiosum
  misc_feature (1)..(233): tr|A0A290Z0Y8|A0A290Z0Y8_9PSEU 7-cyano-7-deazaguanine s ynthase OS=Actinosynnema pretiosum OX=42197 GN=queC PE= 3 SV=1
MGRPAIVLLSGGLDSTTVLAIAKDQGFTPYALSFRYGQRHSAELVAAERVAKTLGAARHVVADIDLRVFGGSALTDDISVPKHDSVEEISSDTVPVTYVPARNTIFLSFALAYAEVVGSTDIFTGVTAVDYSGYPDCRPEYMAAYEAMANLATKASMEGGSPLKLHSPLITMSKADIIREGLRLGVDYSMTSSCYDPDAQGRACGHCDTCLLRLKGFTEAGVVDPAPYRPSNA

SEQ ID NO: 35676 - protein, 236 aa, Actinosynnema pretiosum
  misc_feature (1)..(236): tr|A0A347Q2H2|A0A347Q2H2_9PSEU 7-cyano-7-deazaguanine s ynthase OS=Actinosynnema pretiosum subsp. pretiosum OX= 103721 GN=queC PE=3 SV=1
MTDELDAHRVPAHAVVIASGGLDSTVLAHWLADRGSRVTLLSFDYGQRHRVELEYAAEAAKRLGARHEVVELTSLGRLLSGSALTDPAVDVPDGHYAADSMRSTVVPNRNAVMLDIAVSVAIAVGADAVAFGAHAGDHTVYPDCRPEFVEHFTRSAFTANEGLLPSWFQVLAPFLSLTKAQIVRLGAELGVLFERTWSCYRGEELHCGRCGTCVERKEAFSAHDLVDPVAYQGGRS

SEQ ID NO: 35677 - protein, 234 aa, Actinosynnema sp.
  misc_feature (1)..(234): tr|A0A1V2P5Q1|A0A1V2P5Q1_9PSEU 7-cyano-7-deazaguanine s ynthase OS=Actinosynnema sp. ALI-1.44 OX=1933779 GN=que C PE=3 SV=1
MPIGTPAHRHPRHAVVIASGGLDSTVLAYWLAARGAELTLLSFDYGQRHRVELEHAAEIARLLNCPHETVELSMLGRLLVGSALTDTDVPVPDGYYTDESMRATVVPNRNAIMLDIAVSVAVARKADVVAFGAHAGDHAVYPDCRPEFVERFTRSVRTANEGLLVDDFEILAPFLTQSKTDIVRIGAALEVPFERTWSCYRGEATHCGTCGTCTERKEAFQQNGMTDPTSYRCA

SEQ ID NO: 35678 - protein, 236 aa, Actinosynnema sp.
  misc_feature (1)..(236): tr|A0A1V2QFN3|A0A1V2QFN3_9PSEU 7-cyano-7-deazaguanine s ynthase OS=Actinosynnema sp. ALI-1.44 OX=1933779 GN=que C PE=3 SV=1
MNGNGDRGDSTLVLLSGGLDSTVLTTELLRTGAVVQAVSVHYGQRHAVELEAAAAVASRLGIPHEIVDLGVLRQHLRSALTGAGDIPHGHYTADTMTATVVPNRNAIMLMVAAGIAAARGLRRVATAVHSGDHPIYPDCRPEFIAAANLAAMLGTETVRVEAPYMRLTKAEIAAKGALHNAPMELSWSCYEGGDFAGRHCGRCGTCVERAEAFHLAGVRDPTDYADTAFWREQVTV

SEQ ID NO: 35679 - protein, 201 aa, Actinotalea fermentans
  misc_feature (1)..(201): tr|A0A511YXH4|A0A511YXH4_9CELL 7-cyano-7-deazaguanine s ynthase OS=Actinotalea fermentans OX=43671 GN=queC PE=3 SV=1
MSRLLLLSGGLDSTAIAAMTRPDQCLTIDYGQVAAQAEARAAKQVATLLGIHWSMITVPAREVGAGLMTGTATDPQGPPDAAPEWWPFRNQLLITLAAAWGVTRGITVVEVGTVASDGARHLDGTSLFLEAIDHVVASQEGHIRVRAPAAKLGAVELLTTSPVTEDVLAWTHSCHRANLPCGACPGCTKRRETLAAVGLLQ

SEQ ID NO: 35680 - protein, 227 aa, Adhaeribacter aerolatus
  misc_feature (1)..(227): tr|A0A512B2I2|A0A512B2I2_9BACT 7-cyano-7-deazaguanine s ynthase OS=Adhaeribacter aerolatus OX=670289 GN=queC PE =3 SV=1
MENERRDAAVVLLSGGQDSTTCLFWAKQIFNHVEGLGFDYGQKHNVELEQAGIIAAKAGVEFTIFNIQGTLSGSSLIEYNKDIAEPHERNKNLPSSFVPGRNALFLTIAASYAYNKGITNLVGGMCETDYSGYPDCRRAFLDSLQTSLSLAMDTDVSIHTPLMYLSKAETWKMAKELGVLDIVRFDSHTDYNGNRNVLNEWGYGQLDNPASILRARGFEEAKAKGWI

SEQ ID NO: 35681 - protein, 239 aa, Adlercreutzia equolifaciens
  misc_feature (1)..(239): tr|A0A3E2EQR8|A0A3E2EQR8_9ACTN ExsB family transcriptio nal regulator OS=Adlercreutzia equolifaciens OX=446660 GN=DX903_03550 PE=4 SV=1
MEVTKVAEIEEKSVETAVDFESVVAEDTEDVGPGQHLFGEPLEMYLLREPKLAVAFSGGCDSALLLAAAKLAGCEVRAYLVKTAFQPDFELDDARAVAAALDVPLTVVEADVLAQEAICANPADRCYRCKRFIFGEVRRAAAADGFTVIVDGTNATDDPERRPGFKALAEAGVVSPLRRAGMTKANVRHVLASLEERFGLPSGALMSAKPSFPCLAVYVPQGESITEASLREAARMRGL

SEQ ID NO: 35682 - protein, 229 aa, Adlercreutzia equolifaciens
  misc_feature (1)..(229): tr|A0A3E2EFT1|A0A3E2EFT1_9ACTN 7-cyano-7-deazaguanine s ynthase OS=Adlercreutzia equolifaciens OX=446660 GN=que C PE=3 SV=1
MTNNKALVLCSGGVDSTTLLARAVSKYGAENVYALSISYGQKHVREIEAARAVAAHYGVEQRFLDLGAIFADSDCSLLAHSDAAIPESSYADQQAEGDGGPVSTYVPFRNGLFLSSAASMALSLGCSTVYYGAHHDDWAGNAYPDCSLEFVEAMNRAIVEGTGGELCLEAPFVTWSKADIVREGLALGVPYELTWSCYEGGEAPCGRCATCLDRAAAFAANGVEDPAMR

SEQ ID NO: 35683 - protein, 235 aa, Advenella incenata
  misc_feature (1)..(235): tr|A0A4Q7VEK1|A0A4Q7VEK1_9BURK 7-cyano-7-deazaguanine s ynthase OS=Advenella incenata OX=267800 GN=queC PE=3 SV =1
MNNKALVLFSGGQDSTTCLAWALDRYQYVETIGFSYGQRHAIELTCRDQVIEQLRVHFPAWSARLGNDHMLDLSVLGQISDTALTQDKAIEFEQSGLPNTFVPGRNLLFFNFAAALAYRRGLEVLVGGMCETDYSGYPDCRDNTLKSLQVSLSLGLDRPMVIETPLMWIDKEKTWHMASTLGGQPLVQLIEEHTHTCYLGDRQHRHPWGYGCNQCPACDLRRKGYELYKSAHENH

SEQ ID NO: 35684 - protein, 235 aa, Advenella kashmirensis
  misc_feature (1)..(235): tr|I3UGG9|I3UGG9_ADVKW 7-cyano-7-deazaguanine synthase OS=Advenella kashmirensis (strain DSM 17095 / LMG 22695 / WT001) OX=1036672 GN=queC PE=3 SV=1
MNNKALVLFSGGQDSTTCLAWALDRYQYVETIGFSYGQRHAIELTCRDQVIKQLRLHFPDWSARLGNDHMLDLSVLGQISDTALTQDKAIEFEQSGLPNTFVPGRNLLFFNFAAALAYRRGLEVLVGGMCETDYSGYPDCRDNTLKSLQVSLSLGLDRPMVIETPLMWIDKEKTWHMARTLGGQPLVQLIEEHTHTCYLGDREHRHPWGYGCNQCPACDLRRKGYELYKSAHENH

SEQ ID NO: 35685 - protein, 235 aa, Advenella kashmirensis
  misc_feature (1)..(235): tr|A0A356LCL0|A0A356LCL0_9BURK 7-cyano-7-deazaguanine s ynthase OS=Advenella kashmirensis OX=310575 GN=queC PE= 3 SV=1
MNNKALVLFSGGQDSTTCLAWALDRYQYVETIGFSYGQRHAIELTCRDQVIEQLRVHFPAWSAKLGDDHMLDLSVLGQISDTALTQDKAIEFEQSGLPNTFVPGRNLLFFNFAAALAYRRGLEVLVGGMCETDYSGYPDCRDNTLKSLQVSLSLGLDRPMVIETPLMWIDKEKTWDMARTLGGQPLVQLIEEHTHTCYLGDRQHRHPWGYGCNQCPACDLRRKGYELYKSAHENH

SEQ ID NO: 35686 - protein, 235 aa, Advenella mimigardefordensis
  misc_feature (1)..(235): tr|W0PJH4|W0PJH4_9BURK 7-cyano-7-deazaguanine synthase OS=Advenella mimigardefordensis DPN7 OX=1247726 GN=queC PE=3 SV=1
MNNKALVLFSGGQDSTTCLAWALDRYQYVETIGFSYGQRHAVELTCREQVIEQLRLQFPDWSARLGNDHMLDLSVLGQISDTALTQDKAIEFEQSGLPNTFVPGRNLLFFNFAAALAYRRGLEVLVGGMCETDYSGYPDCRDNTLKSLQVSLSLGLDRPMVIETPLMWIDKEKTWHMASTLGGPALVQLIEEYTHTCYLGDREHRHPWGYGCNQCPACDLRRKGYELYQSAHANH

SEQ ID NO: 35687 - protein, 235 aa, Advenella sp.
  misc_feature (1)..(235): tr|A0A2M9TJB5|A0A2M9TJB5_9BURK 7-cyano-7-deazaguanine s ynthase OS=Advenella sp. S44 OX=1982755 GN=queC PE=3 SV =1
MNHRALVLFSGGQDSTTCLAWALDRYEYVETIGFAYGQRHAVELACREQVIEQIRMQFPVWGAKLGDDHMLDLSVLGQISDTALTQDKAIEFEQSGLPNTFVPGRNLLFFNFAAALAYRRGLQVLVGGMCETDYSGYPDCRDNTLKSLQVSLSLGLDRPMVIETPLMWIDKEATWRMAGLLGGQPLVQLIEEHTHTCYLGDREHRHPWGYGCNRCPACELRRHGYELYQRAHENR

SEQ ID NO: 35688 - protein, 186 aa, Aequorivita antarctica
  misc_feature (1)..(186): tr|A0A5C6Z030|A0A5C6Z030_9FLAO 7-cyano-7-deazaguanine s ynthase OS=Aequorivita antarctica OX=153266 GN=ESU54_11 110 PE=3 SV=1
MDSIALAYWKKPAHSITIDYGQKAANAEIKAAEQISKYLNIKHHIIKVDCSKLGSGDMNGSKSLSISPITEWWPYRNQLLVTLACMKGVSLGIKELIVGSVSTDGAHKDGTRIFYDYLSTLIEYQEGQIKITCPGIEMSTVELIKRAKLPISLLYWAHSCHTANEPCMNCNGCKKYLYTLQMLGLD

SEQ ID NO: 35689 - protein, 219 aa, Aeribacillus composti
  misc_feature (1)..(219): tr|A0A559TXK0|A0A559TXK0_9BACI 7-cyano-7-deazaguanine s ynthase OS=Aeribacillus composti OX=1868734 GN=queC PE= 3 SV=1
MDNKKAVVVFSGGQDSTTCLFWAKKQFDEVTAVTFHYNQRHAQEIEAAKNIANEAGIPHYVLDMSLLNQMAPNALTRSNMEIEQKEGELPNTFVPGRNLVFLTFAAILAKQLGAKHIVTGVCETDFSGYPDCRDVFVKSCNVTINLAMEEDFVIHTPLMWINKAETWKFADELGVFDIIREKTLTCYNGIIGDGCGECPACLLRKRGLEQYLAEKGANT

SEQ ID NO: 35690 - protein, 219 aa, Aeribacillus pallidus; identical to SEQ ID NO: 35689
  misc_feature (1)..(219): tr|A0A165WDA4|A0A165WDA4_9BACI 7-cyano-7-deazaguanine s ynthase OS=Aeribacillus pallidus OX=33936 GN=queC PE=3 SV=1

SEQ ID NO: 35691 - protein, 214 aa, Aerococcaceae bacterium
  misc_feature (1)..(214): tr|A0A3D0CKA2|A0A3D0CKA2_9LACT 7-cyano-7-deazaguanine s ynthase OS=Aerococcaceae bacterium OX=2053495 GN=queC P E=3 SV=1
MKLVLLSGGVDSSTALALAKATDPDILAITFTYNQQHEQMELLAAQKVSEYYQVRHKIMDLSSIFSDSQSALSLNNDIPIAEGAYGESNELNTEVEFRNGVFLAILASLAKQYRADEIYFGAHQDESGTVYPDCSPEFIQTMNQAIQLGTNNSVSIKAPFMTRLKKDIVATGIELEVPYELTYSCYKGTDPACGVCGTCIDRKKAFEANGLEVA

SEQ ID NO: 35692 - protein, 232 aa, Aeromicrobium sp.
  misc_feature (1)..(232): tr|A0A0S9RDQ7|A0A0S9RDQ7_9ACTN 7-cyano-7-deazaguanine s ynthase OS=Aeromicrobium sp. Leaf289 OX=1736324 GN=queC PE=3 SV=1
MGRKAVVLLSGGLDSTTVLAVAKDQGFEPYAISFRYGQRHVVELESARRVAAGVGAAGHVVCDIDLRVFGGSALTADVDVPKHGSADELSDSEIPITYVPARNTVFLSFALAYAEVIGSTDIFIGVSALDYSGYPDCRPEYIAAYEQMANLATRAGVEGNEVKIHTPLIDLTKAQTVELGMRLGVDYSLTLSCYDPDVEGRACGHCDSCLLRLRGFADAGLADPVRYQEGTE

SEQ ID NO: 35693 - protein, 227 aa, Aeromicrobium sp.
  misc_feature (1)..(227): tr|A0A3B7DBB1|A0A3B7DBB1_9ACTN 7-cyano-7-deazaguanine s ynthase OS=Aeromicrobium sp. A1-2 OX=2107713 GN=queC PE =3 SV=1
MKPKAIVLLSGGLDSSTVLAHALNEGYDVKALSFRYGQRHAIELKAAERVAKAFEVTEHVVCDIDLGVFGGSALTADIEVPKHESAEELNSDIPVTYVPARNTVFLSFALAFAEVSGANDIFIGVSALDYSGYPDCRPEFIEAFERMANLATKAGVEGSGIRIKTPLINLTKAQTVEMGLRLGVDYSLTSTCYDPAADGTPCGQCDSCHLRIKGFEELGLKAPLVYR

SEQ ID NO: 35694 - protein, 235 aa, Aeromonas allosaccharophila
  misc_feature (1)..(235): tr|A0A1Q5VW33|A0A1Q5VW33_9GAMM 7-cyano-7-deazaguanine s ynthase OS=Aeromonas allosaccharophila OX=656 GN=queC P E=3 SV=1
MKKAVVVFSGGQDSTTCLVQALAQYDEVHAITFDYGQRHREEIDTARRLGSALGIAAHKVMDVTLLNELAVSALTRDDIPVSCELQDNGLPNTFVPGRNILFLTLASIYAYQVGAEAVITGVCETDFSGYPDCRDEFVKALNQAVSLGLGRGIRFDTPLMWLDKAETWALADHYGHLDTVRQQTLTCYNGIAGDGCGTCPACELRSRGLNNYLADKAGIMARLYDKTGLGEKSAE

SEQ ID NO: 35695 - protein, 235 aa, Aeromonas allosaccharophila
  misc_feature (1)..(235): tr|A0A0T6V0P6|A0A0T6V0P6_9GAMM 7-cyano-7-deazaguanine s ynthase OS=Aeromonas allosaccharophila OX=656 GN=queC P E=3 SV=1
MKKAVVVFSGGQDSTTCLVQALAQYDEVHAITFDYGQRHREEIDTARRLGSALGIAAHKVMDVTLLNELAVSALTRDDIPVSCELQDNGLPNTFVPGRNILFLTLASIYAYQVGAEAVITGVCETDFSGYPDCRDEFVKALNQAVSLGLGRDIRFDTPLMWLDKAETWALADHYGHLDTVRQQTLTCYNGIAGDGCGTCPACELRSRGLNNYLADKAGIMTRLYEKTGLGEKSAE

SEQ ID NO: 35696 - protein, 230 aa, Aeromonas cavernicola
  misc_feature (1)..(230): tr|A0A2H9U3N4|A0A2H9U3N4_9GAMM 7-cyano-7-deazaguanine s ynthase OS=Aeromonas cavernicola OX=1006623 GN=queC PE= 3 SV=1
MNKAVVVFSGGQDSTTCLVQALAQYDEVHAITFDYGQRHRQEIDTARDLAKKLGVTAHKVMDANMLGELAVSALTRDDIPVSGELQDNGLPNTFVPGRNILFLTLAAIYAYQVGAQVVITGVCETDFSGYPDCRNEFVKSLNQAVSLGLDRTIRFATPLMWLDKAETWALADHYGHLDTVRQHTLTCYNGIAGDGCGTCPACELRGRGLARYLADKGGVQATLRKKLGLQ

SEQ ID NO: 35697 - protein, 235 aa, Aeromonas caviae
  misc_feature (1)..(235): tr|A0A3G9I513|A0A3G9I513_AERCA 7-cyano-7-deazaguanine s ynthase OS=Aeromonas caviae OX=648 GN=queC PE=3 SV=1
MKKAVVVFSGGQDSTTCLVQAQARYDEVHAITFDYGQRHRAEIDTARHLATALGIAAHKVMDVTMFGELAISALTRDDIPVSFELQENGLPNTFVPGRNILFLTLAAIYAYQVGAEAVITGVCETDFSGYPDCRDDFVKALNQAVSLGLDRPIRFETPLMWLDKAETWALADHYGHLDTVRHQTLTCYNGIQGDGCGACPACELRRRGLDHYLADKTGIRARLYEKSGLGEKSGS

SEQ ID NO: 35698 - protein, 235 aa, Aeromonas caviae
  misc_feature (1)..(235): tr|A0A3S5WT93|A0A3S5WT93_AERCA 7-cyano-7-deazaguanine s ynthase OS=Aeromonas caviae OX=648 GN=queC PE=3 SV=1
MKKAVVVFSGGQDSTTCLVQAQARYDEVHAITFDYGQRHRAEIDTARHLATALGIAAHKVMDVTMLGELAISALTRDDIPVSFELQENGLPNTFVPGRNILFLTLAAIYAYQVGAEAVITGVCETDFSGYPDCRDDFVKALNQAVSLGLDRPTRFETPLMWLDKAETWALADHYGHLDTVRHQTLTCYNGIQGDGCGACPACELRRRGLDHYLADKSGIRARLYEKSGLGEKSGS

SEQ ID NO: 35699 - protein, 235 aa, Aeromonas dhakensis
  misc_feature (1)..(235): tr|K1JR55|K1JR55_9GAMM 7-cyano-7-deazaguanine synthase OS=Aeromonas dhakensis OX=196024 GN=queC PE=3 SV=1
MKKAVVVFSGGQDSTTCLVQALSRYDEVHAITFDYGQRHSEEIETARRLASRLGIAAHKVMDVTMLGELAISALTRDEIPVSFELQENGLPNTFVPGRNILFLTLAAIYAYQVGAEAVITGVCETDFSGYPDCRDEFVKALNQAVSLGLDRAIRFETPLMWLDKAETWALADHYGHLDTVRQQTLTCYNGIAGEGCGACPACDLRSRGLQQYLADKAGVLARLHQKTGLGEKSGC

SEQ ID NO: 35700 - protein, 235 aa, Aeromonas dhakensis
  misc_feature (1)..(235): tr|A0A433GCG3|A0A433GCG3_9GAMM 7-cyano-7-deazaguanine s ynthase OS=Aeromonas dhakensis OX=196024 GN=queC PE=3 S V=1
MKKAVVVFSGGQDSTTCLVQALSCYDEVHAITFDYGQRHSEEIETARRLASRLGIAAHKVMDVTMLGELAISALTRDEIPVSFELQENGLPNTFVPGRNILFLTLAAIYAYQVGAEAVITGVCETDFSGYPDCRDEFVKALNQAVSLGLDRAIRFETPLMWLDKAETWALADHYGHLDTVRQQTLTCYNGIAGDGCGACPACDLRSRGLQQYLADKAGVLVRLHQKTGLGEKSGC

SEQ ID NO: 35701 - protein, 231 aa, Aeromonas diversa
  misc_feature (1)..(231): tr|N9VIJ5|N9VIJ5_9GAMM 7-cyano-7-deazaguanine synthase OS=Aeromonas diversa CDC 2478-85 OX=1268237 GN=queC PE= 3 SV=1
MSIAVVVFSGGQDSTTCLVQALQTYDEVHAITFDYGQRHVAEIEVAKALTERLGVKAHKVMDVSLLGELALSSLTRDDIPVSRELQDNGLPNTFVPGRNILFLTLAAIYAYQVGAEAVITGVCETDFSGYPDCRDEFVKALNRAVVLGMERPVRFETPLMWLDKAETWALADRCGHLETVRHHTLTCYNGIQGDGCGECPACLLRARGLQEYLEQGEAVRARLAVKLAPAS

SEQ ID NO: 35702 - protein, 235 aa, Aeromonas encheleia
  misc_feature (1)..(235): tr|A0A448KWS7|A0A448KWS7_9GAMM 7-cyano-7-deazaguanine s ynthase OS=Aeromonas encheleia OX=73010 GN=exsB_1 PE=3 SV=1
MKKAVVVFSGGQDSTTCLVQALARYDEVHAITFDYGQRHREEIDTARRLASEFGIAAHKVMDVTMLGELAVSALTRDEIPVSGELQDNGLPNTFVPGRNILFLTLASIYAYQVGAETVITGVCETDFSGYPDCRDEFVKALNQAVSLGLDRGIRFETPLMWLDKAETWALADHYGQLDRVRQQTLTCYNGILGDGCGSCPACELRSRGLNHYLADRVGVMARLREKTGLGEKSGS

SEQ ID NO: 35703 - protein, 229 aa, Aeromonas enteropelogenes
  misc_feature (1)..(229): tr|A0A175VL29|A0A175VL29_AEREN 7-cyano-7-deazaguanine s ynthase OS=Aeromonas enteropelogenes OX=29489 GN=queC P E=3 SV=1
MKKAVVVFSGGQDSTTCLVQALARYDEVHAITFDYGQRHREEIDTARRLASQLGVAAHKVMDVTLLNELAVSALTRDDIPVSGELQDNGLPNTFVPGRNILFLTLASIYAYQVGAEAVITGVCETDFSGYPDCRDEFVKALNQGVSLGLDRGIRFETPLMWLDKAETWALADHYGHLETVRQQTLTCYNGIPGDGCGSCPACELRSRGLNHYLADKAGVTTRLREKTGL

SEQ ID NO: 35704 - protein, 235 aa, Aeromonas hydrophila
  misc_feature (1)..(235): sp|A0KJA0|QUEC_AERHH 7-cyano-7-deazaguanine synthase OS =Aeromonas hydrophila subsp. hydrophila (strain ATCC 79 66 / DSM 30187 / JCM 1027 / KCTC 2358 / NCIMB 9240) OX= 380703 GN=queC PE=3 SV=1
MKKAVVVFSGGQDSTTCLVQALSRYDEVHAITFDYGQRHREEIETARRLASQLGIAAHKVMDVTMLGELAISALTRDEIPVSFELQDNGLPNTFVPGRNILFLTLAAIYAYQVGAEAVITGVCETDFSGYPDCRDEFVKALNQAVSLGLDRAIRFETPLMWLDKAETWALADHYGHLDTVRQQTLTCYNGIAGDGCGACPACDLRSRGLQQYLADKAGVAARLHQKTGLGEKSGC

SEQ ID NO: 35705 - protein, 235 aa, Aeromonas hydrophila
  misc_feature (1)..(235): tr|A0A454GF94|A0A454GF94_AERHY 7-cyano-7-deazaguanine s ynthase OS=Aeromonas hydrophila OX=644 GN=queC PE=3 SV= 1
MKKAVVVFSGGQDSTTCLVQALSRYDEVHAITFDYGQRHREEIETARRLASGLGIAAHKVMDVTMLGELAISALTRDEIPVSFELQDNGLPNTFVPGRNILFLTLAAIYAYQVGAEAVITGVCETDFSGYPDCRDEFVKALNQAVSLGLDRAIRFETPLMWLDKAETWALADHHGHLDTVRQQTLTCYNGIAGDGCGACPACDLRSRGLQQYLADKAGVTARLHQKTGLGEKSGC

SEQ ID NO: 35706 - protein, 235 aa, Aeromonas jandaei
  misc_feature (1)..(235): tr|A0A3N6V4H9|A0A3N6V4H9_AERJA 7-cyano-7-deazaguanine s ynthase OS=Aeromonas jandaei OX=650 GN=queC PE=3 SV=1
MKKAVVVFSGGQDSTTCLVQALANYDEVHAITFDYGQRHREEIDTARHLVQLLGVTAHKVMDVTLLNELAISALTRDDIPVSCDLQDNGLPNTFVPGRNILFLTLASIYAYQVGAEAVITGVCETDFSGYPDCRDEFVKALNQAVSLGLDRGIRFETPLMWLDKAETWALADHYGHLETVRQQTLTCYNGIAGDGCGTCPACNLRSRGLHGYLTDKAGIMANMREKIGLGEKSGA

SEQ ID NO: 35707 - protein, 235 aa, Aeromonas jandaei
  misc_feature (1)..(235): tr|A0A2S5FGD1|A0A2S5FGD1_AERJA 7-cyano-7-deazaguanine s ynthase OS=Aeromonas jandaei OX=650 GN=queC PE=3 SV=1
MKKAVVVFSGGQDSTTCLVQALANYDEVHAITFDYGQRHREEIDTARHLVQLLGVTAHKVMDVTLLNELAISALTRDDIPVSCDLQDNGLPNTFVPGRNILFLTLASIYAYQVGAEAVITGVCETDFSGYPDCRDEFVKALNQAVSLGLDRGIRFETPLMWLDKAETWALADHYGHLDTVRQQTLTCYNGIAGDGCGTCPACNLRSRGLDGYLADKAGIMAKMHVKTGLGEKSGA

SEQ ID NO: 35708 - protein, 229 aa, Aeromonas lusitana
  misc_feature (1)..(229): tr|A0A2M8HCM4|A0A2M8HCM4_9GAMM 7-cyano-7-deazaguanine s ynthase OS=Aeromonas lusitana OX=931529 GN=queC PE=3 SV =1
MKKAVVVFSGGQDSTTCLVQAQAKYGEVHAITFDYGQRHREEIDTARRLAKSFGIKAHKVMDVTMLGELAVSALTRDEIPVSGELQDNGLPNTFVPGRNILFLTLASIYAYQVGADTVITGVCETDFSGYPDCRDEFVKALNQAVSLGLDRGIRFETPLMWLDKAETWALADHYGHLDTVRQQTLTCYNGIQGDGCGTCPACELRSRGLNQYLADRVGVMGRLHTKTGL

SEQ ID NO: 35709 - protein, 229 aa, Aeromonas media
  misc_feature (1)..(229): tr|A0A023RH45|A0A023RH45_AERME 7-cyano-7-deazaguanine s ynthase OS=Aeromonas media WS OX=1208104 GN=queC PE=3 S V=1
MKKAVVVFSGGQDSTTCLVQALALYDEVHAITFDYGQRHREEIETARRLAGQLGIAAHKVMDVTMLGELAVSALTRDDIPVSGELQDNGLPNTFVPGRNILFLTLAAIYAYQVGADTLITGVCETDFSGYPDCRDDFVKALNQAVSLGLDRAIRFETPLMWLDKAETWALADHYGHLETVRQQTLTCYNGIQGDGCGTCPACELRSRGLNQYLADRVGVMARLHKKTGL

SEQ ID NO: 35710 - protein, 86 aa, Aeromonas molluscorum
  misc_feature (1)..(86): tr|R1GPR5|R1GPR5_9GAMM 7-cyano-7-deazaguanine synthase (Fragment) OS=Aeromonas molluscorum 848 OX=1268236 GN=G 113_18222 PE=3 SV=1
AVALGLDRGLRFETPLMWLDKAETWALADTFGQLNLVREQTLTCYNGLIGDGCGTCPACILRRRGLDQYLADRVGVNLRLQHKQGR

SEQ ID NO: 35711 - protein, 40 aa, Aeromonas molluscorum
  misc_feature (1)..(40): tr|R1GPL0|R1GPL0_9GAMM 7-cyano-7-deazaguanine synthase (Fragment) OS=Aeromonas molluscorum 848 OX=1268236 GN=G 113_18454 PE=3 SV=1
MKKAVVVFSGGQDSTTCLVQAKAQYDEVHAITFDYGQRHL

SEQ ID NO: 35712 - protein, 229 aa, Aeromonas rivipollensis
  misc_feature (1)..(229): tr|A0A2P1PL48|A0A2P1PL48_9GAMM 7-cyano-7-deazaguanine s ynthase OS=Aeromonas rivipollensis OX=948519 GN=queC PE =3 SV=1
MKKAVVVFSGGQDSTTCLVQALALYDEVHAITFDYGQRHREEIETARRLAGQLGVAAHKVMDVTMLGELAVSALTRDDIPVSGELQDNGLPNTFVPGRNILFLTLAAIYAYQVGADTLITGVCETDFSGYPDCRDDFVKALNQAVSLGLDRAIRFETPLMWLDKAETWALADHYGHLETVRQQTLTCYNGIQGDGCGTCPACELRSRGLQRYLCDKAGIMASLREKTGL

SEQ ID NO: 35713 - protein, 235 aa, Aeromonas salmonicida
  misc_feature (1)..(235): tr|A0A290VQG4|A0A290VQG4_AERSA 7-cyano-7-deazaguanine s ynthase OS=Aeromonas salmonicida subsp. masoucida OX=19 7700 GN=queC PE=3 SV=1
MKKAVVVFSGGQDSTTCLVQALAHYDEVHAITFDYGQRHREEIETARRLATQFGIAAHKVMDVTLLNELAVSALTRDEIPVSGELQDNGLPNTFVPGRNILFLTLASIYAYQVGAEAVITGVCETDFSGYPDCRDEFVKSLNQAVSLGLDRGIRFETPLMWLDKAETWALADYYGHLETVRQQTLTCYNGIAGDGCGTCPACELRSRGLDLYLADKAGIMARLYEKTGLCEKSVL

SEQ ID NO: 35714 - protein, 237 aa, Aeromonas salmonicida
  misc_feature (1)..(237): sp|A4SLT2|QUEC_AERS4 7-cyano-7-deazaguanine synthase OS =Aeromonas salmonicida (strain A449) OX=382245 GN=queC PE=3 SV=1
MNVKKAVVVFSGGQDSTTCLVQALAHYDEVHAITFDYGQRHREEIETARRLATQFGIAAHKVMDVTLLNELAVSALTRDEIPVSGELQDNGLPNTFVPGRNILFLTLASIYAYQVGAEAVITGVCETDFSGYPDCRDEFVKSLNQAVSLGLDRCIRFETPLMWLDKAETWALADYYGHLETVRQQTLTCYNGIAGDGCGTCPACELRSRGLDLYLADKAGIMARLYEKTGLCEKSVL

SEQ ID NO: 35715 - protein, 231 aa, Aeromonas schubertii
  misc_feature (1)..(231): tr|A0A0S2SDX9|A0A0S2SDX9_9GAMM 7-cyano-7-deazaguanine s ynthase OS=Aeromonas schubertii OX=652 GN=queC PE=3 SV= 1
MSIAVVVFSGGQDSTTCLVQALQHYDEVHAITFDYGQRHVAEIEVARALAERLGVKAHKVMDVSLLGELALSSLTRDEIPVSRELQENGLPNTFVPGRNILFLTLAAIYAYQVGAEAVITGVCETDFSGYPDCRDEFVQALNRAVVLGMDRPVRFETPLMWLDKAETWALADRCGHLDTVRHHTLTCYNGIQGDGCGECPACLLRARGLQEYLEQGEAVRARLATKLAPAS

SEQ ID NO: 35716 - protein, 230 aa, Aeromonas simiae
  misc_feature (1)..(230): tr|A0A5J6WWK0|A0A5J6WWK0_9GAMM 7-cyano-7-deazaguanine s ynthase QueC OS=Aeromonas simiae OX=218936 GN=queC PE=4 SV=1
MGIAVVVFSGGQDSTTCLVQALQHYDEVHAITFDYGQRHVAEIEVAKALAVRLGVKAHKVMDVSLLGELALSSLTRDDIPVSRELQDNGLPNTFVPGRNILFLTLAAIYAYQVGAEAVITGVCETDFSGYPDCRDEFVKALNHAVALGMDRPVRFETPLMWLDKAETWALADRYGHLDTVRQHTLTCYNGIQGDGCGECPACLLRARGLNEYLEQGEAVRARLATKLAAA

SEQ ID NO: 35717 - protein, 235 aa, Aeromonas sobria
  misc_feature (1)..(235): tr|A0A1S2D448|A0A1S2D448_AERSO 7-cyano-7-deazaguanine s ynthase OS=Aeromonas sobria OX=646 GN=queC PE=3 SV=1
MKKAVVVFSGGQDSTTCLVQALAQYDEVHAITFDYGQRHREEIDTARRLGSALGIAAHKVMDVTLLNELAVSALTRDDIPVSCELQDNGLPNTFVPGRNILFLTLASIYAYQVGAEAVITGVCETDFSGYPDCRDEFVKALNQAVSLGLGRGIRFETPLMWLDKAETWALADHYGHLDTVRQQTLTCYNGIAGDGCGTCPACELRSRGLNNYLADKAGIMTRLFEKTGLGEKSAE

SEQ ID NO: 35718 - protein, 235 aa, Aeromonas sobria
  misc_feature (1)..(235): tr|A0A2N3IWE9|A0A2N3IWE9_AERSO 7-cyano-7-deazaguanine s ynthase OS=Aeromonas sobria OX=646 GN=queC PE=3 SV=1
MKKAVVVFSGGQDSTTCLVQALAQYDEVHAITFDYGQRHRQEIDTARDLGSALGIAAHKVMDVTLLNELAVSALTRDDIPVSCELQDNGLPNTFVPGRNILFLTLASIYAYQVGAEAVITGVCETDFSGYPDCRDEFVKALNQAVSLGLDRGIRFETPLMWLDKAETWALADHYGHLETVRQQTLTCYNGIAGDGCGTCPACELRSRGLNNYLADKAGIMAKLFEKTGLGEKSAE

SEQ ID NO: 35719 - protein, 235 aa, Aeromonas sp.; identical to SEQ ID NO: 35695
  misc_feature (1)..(235): tr|A0A1Q8D6A8|A0A1Q8D6A8_9GAMM 7-cyano-7-deazaguanine s ynthase OS=Aeromonas sp. YN13HZO-058 OX=1921564 GN=queC PE=3 SV=1

SEQ ID NO: 35720 - protein, 235 aa, Aeromonas sp.
  misc_feature (1)..(235): tr|A0A2R7MUF8|A0A2R7MUF8_9GAMM 7-cyano-7-deazaguanine s ynthase OS=Aeromonas sp. HMWF017 OX=2056853 GN=queC PE= 3 SV=1
MKKAVVVFSGGQDSTTCLVQALARYDEVHAITFDYGQRHREEIDTARRLGSALGIAAHKVMDVTLLNELAVSALTRDDIPVSCELQDNGLPNTFVPGRNILFLTLASIYAYQVGAEAVITGVCETDFSGYPDCRDEFVKALNQAVSLGLDRGIRFETPLMWLDKAETWALADHYGHLDTVRQQTLTCYNGIAGDGCGTCPACVLRRRGLNNYLADKAGIMARLFEKTGLGEKSAE

SEQ ID NO: 35721 - protein, 235 aa, Aeromonas taiwanensis
  misc_feature (1)..(235): tr|A0A5F0KE11|A0A5F0KE11_9GAMM 7-cyano-7-deazaguanine s ynthase OS=Aeromonas taiwanensis OX=633417 GN=queC PE=3 SV=1
MKKAVVVFSGGQDSTTCLVQAQALYDEVHAITFDYGQRHRAEIETARRLAGALGIAAHKVMDVTMLGELAISALTRDDIPVSGELQDNGLPNTFVPGRNILFLTLASIYAYQVGAEAVITGVCETDFSGYPDCRDEFVKALNQAVSLGLDRAIRFETPLMWLDKAETWALADHYGHLDTVRHQTLTCYNGIQGDGCGACPACELRRRGLDLYLADRAAIAARLYKKTRLGEKSGS

SEQ ID NO: 35722 - protein, 235 aa, Aeromonas veronii
  misc_feature (1)..(235): tr|A0A1Q8F209|A0A1Q8F209_9GAMM 7-cyano-7-deazaguanine s ynthase OS=Aeromonas veronii OX=654 GN=queC PE=3 SV=1
MKKAVVVFSGGQDSTTCLVQALAQYDEVHAITFDYGQRHREEIDIARRLGSALGIAAHKVMDVTLLNELAVSALTRDDIPVSCELQDNGLPNTFVPGRNILFLTLASIYAYQVGAEAVITGVCETDFSGYPDCRDEFVKALNQAVSLGLDRGIRFETPLMWLDKAETWALADHYGHLDTVRQQTLTCYNGIAGDGCGTCPACELRSRGLNNYLADKAGIMARLFEKTGLGEKSAE

SEQ ID NO: 35723 - protein, 235 aa, Aeromonas veronii
  misc_feature (1)..(235): tr|A0A3A9IWQ2|A0A3A9IWQ2_9GAMM 7-cyano-7-deazaguanine s ynthase OS=Aeromonas veronii OX=654 GN=queC PE=3 SV=1
MKKAVVVFSGGQDSTTCLVQALARYDEVHAITFDYGQRHREEIDIARRLGSALGIAAHKVMDVTLLNELAVSALTRDDIPVSCELQDNGLPNTFVPGRNILFLTLASIYAYQVGAEAVITGVCETDFSGYPDCRDEFVKALNQAVSLGLDRGIRFETPLMWLDKAETWALADHYGHLDTVRQQTLTCYNGIAGDGCGTCPACELRSRGLNNYLADKAGIMARLFEKTGLGEKSAE

SEQ ID NO: 35724 - protein, 219 aa, Aestuariibacter sp.
  misc_feature (1)..(219): tr|A0A506RV37|A0A506RV37_9ALTE 7-cyano-7-deazaguanine s ynthase OS=Aestuariibacter sp. GS-14 OX=2590670 GN=queC PE=3 SV=1
MSEKVIVIYSGGMDSFTVLNKAIEEGKTPYALSFDYGQRHKKELDYAANVCKELGISHKIVDISAINSLVGGSALTDDIDVPEGHYAEPSMKQTVVPNRNMILLSLAVGYAVSMDANKVYYGAHTGDHAIYPDCRPEFVEKMNAVCAIANYEAIEIVTPYLKVSKTAILTDGLRMGLDYNKSWTCYNGRELACGKCGACQERLEAFRDNNATDPLQYES

SEQ ID NO: 35725 - protein, 219 aa, Aestuariibacter sp.
  misc_feature (1)..(219): tr|A0A2D6XYK4|A0A2D6XYK4_9ALTE 7-cyano-7-deazaguanine s ynthase OS=Aestuariibacter sp. OX=1872400 GN=queC PE=3 SV=1
  misc_feature (40)..(41): Xaa can be any naturally occurring amino acid
  misc_feature (51)..(51): Xaa can be any naturally occurring amino acid
  misc_feature (58)..(58): Xaa can be any naturally occurring amino acid
  misc_feature (118)..(118): Xaa can be any naturally occurring amino acid
MSEKVIVIYSGGMDSYTVLNKAIEDGKTPYALSFDYGQRXXKELDYAANVXKELGISXKIVDISAINSLVGGSALTDDIEVPEGHYEEPSMKQTVVPNRNMILLSLAVGYAVSMEANXVYYGAHSGDHAIYPDCRPEFVEKMNDVCAIANYEAIEIVTPYLKVSKTAILTDGLRMGLDYGKSWTCYNGREHACGKCGACQERLEAFRDNNATDPLEYES

SEQ ID NO: 35726 - protein, 236 aa, Aestuariispira insulae
  misc_feature (1)..(236): tr|A0A3D9HH68|A0A3D9HH68_9PROT 7-cyano-7-deazaguanine s ynthase OS=Aestuariispira insulae OX=1461337 GN=queC PE =3 SV=1
MKTIVICSGGLDSVTLAHKVAKEHELLALVTFDYGQRHKKEMDFAKACAERLEVPFIPVDMANIGALLSGSALTDDIDVPDGHYAEETMKITVVPNRNAIMLAIAFGIASARGADAVAAAVHGGDHFIYPDCRPAFVEAFETMQKHALEGMNEIQLYTPFVHVPKSEIAAEGARLGVPFAETWSCYKGGEDQCGRCGTCVERIEAFVEAGVEDPTHYADTEFWREAVAKAHEKAGA

SEQ ID NO: 35727 - protein, 242 aa, Afipia broomeae
  misc_feature (1)..(242): tr|K8PND6|K8PND6_9BRAD 7-cyano-7-deazaguanine synthase OS=Afipia broomeae ATCC 49717 OX=883078 GN=queC PE=3 SV =1
MTELSQNNAALVLFSGGQDSATCLAWALARFERVETIGFSYGQRHAVELESRATLIGGMKALHPEWAARLGESHTLDIPTLGDISETALTRDTAIEMGEGGLPNTFVPGRNLVFLTFAAALAYRRGITHIVGGMCETDFSGYPDCRDDTIKALNIALNLGMARPFELHTPLMWRDKGETWALAEELGGKGLVDLIVEHSHTCYLGERGARHDWGYGCGECPACSLRSKGWAAYSAKAKTEKQ

SEQ ID NO: 35728 - protein, 238 aa, Afipia broomeae
  misc_feature (1)..(238): tr|A0A2M8ZU52|A0A2M8ZU52_9BRAD 7-cyano-7-deazaguanine s ynthase OS=Afipia broomeae OX=56946 GN=queC PE=3 SV=1
MGASLNASAALVSFSGGQDSTTALAWALSRYDIVETIGFRYGQKHFVEMECRPAVREAIARLNPVWKERLGPDHVIELDLIGQLAKNVISPDGYTPTPGEGIEAGTRYIPGRNLVMLSMCASVAFRRNIGALVCGTSETEYSGYPDCRDASMKAVETAINMSSGKHFKIECPLMWRDKKGVWQLAESLGGADLIKIVREDTHTCYQGSRDNLHDWGYGCGACPACNLRAKGWREFTNH

SEQ ID NO: 35729 - protein, 242 aa, Afipia clevelandensis
  misc_feature (1)..(242): tr|K8PNL9|K8PNL9_9BRAD 7-cyano-7-deazaguanine synthase OS=Afipia clevelandensis ATCC 49720 OX=883079 GN=queC P E=3 SV=1
MTELGPNNAALVLFSGGQDSATCLAWALSRFERVETIGFSYGQRHAIELDSRGKLIAGMTALRPEWAARLGDSHTLDIPTLGDVSETALTRETAIEMNDDGLPNTFVPGRNLVFLTFAAALAYRRGITHIVGGMCETDFSGYPDCRDDTIKALNVALNLGMARPFELHTPLMWLDKSETWALAETLGGRGLVDLIVEHSHTCYLGERGARHDWGYGCGECPACSLRARGWVAYAAKAKIEAR

SEQ ID NO: 35730 - protein, 240 aa, Afipia felis
  misc_feature (1)..(240): tr|A0A380W7X8|A0A380W7X8_AFIFE 7-cyano-7-deazaguanine s ynthase OS=Afipia felis OX=1035 GN=queC PE=3 SV=1
MVDRAMDKTPENAALVLFSGGQDSATCLAWALSRFERVETVGFDYGQRHAIELECRAALIDGFKSIKTEWRARLGEAHTLAIPTLAEISDTALTRDIAIEMKEDGLPNTFVPGRNLLFLTFAAALGYRRGIRHIVGGMCETDYSGYPDCRDETIKSLNAAINQGMGREFELHTPLMWRDKAQTWELADELGGEALVDLIIQHSHTCYLGERGALHDWGYGCGECPACRLRAAGWAKYKAA

SEQ ID NO: 35731 - protein, 76 aa, Afipia felis
  misc_feature (1)..(76): tr|A0A090MKU4|A0A090MKU4_AFIFE 7-cyano-7-deazaguanine s ynthase OS=Afipia felis OX=1035 GN=queC PE=3 SV=1
MGRDFELHTPLMWRDKAQTWALAHELGGEALVDLIVQHSHTCYLGERGALHDWGYGCGECPACRLRAAGWEKYKAA

SEQ ID NO: 35732 - protein, 242 aa, Afipia massiliensis
  misc_feature (1)..(242): tr|A0A4U6BRU8|A0A4U6BRU8_9BRAD 7-cyano-7-deazaguanine s ynthase OS=Afipia massiliensis OX=211460 GN=queC PE=3 S V=1
MTELGQNNAALVLFSGGQDSATCLAWALARFTRVETIGFSYGQRHAVELDSRAKLIDGMMALRPEWASKLGENHTLDVPTLGDISETALTRDTAIEMGEGGLPNTFVPGRNLVFLTFAAALAYRRGVTHIVGGMCETDFSGYPDCRDETIKALNVALNLGMARPFELHTPLMWRDKADTWALAEELGGKGLVDLIVEHSHTCYLGERGARHDWGYGCGECPACSLRAKGWAAYAAHAVPEAR

SEQ ID NO: 35733 - protein, 236 aa, Afipia sp.
  misc_feature (1)..(236): tr|A0A1H0TCZ4|A0A1H0TCZ4_9BRAD 7-cyano-7-deazaguanine s ynthase OS=Afipia sp. GAS231 OX=1882747 GN=queC PE=3 SV =1
MSDQSKSETALVLFSGGQDSTTCLAWALQRFARVEMIGFSYGQRHAIELECRDRLLSGITSLRPEWATRLGENHTLEIPTLAEISDTALTRDVAIEMGADGLPNTFVPGRNLVFLTFAAALAYRRGIRHIIGGMCETDYSGYPDCRDETIKALQSALNLGMAKNFELHTPLMWLDKASTWKLAHELGGAGLVDLIREHSHTCYLGERGAQHDWGYGCGECPACALRAKGWREYAEE

SEQ ID NO: 35734 - protein, 235 aa, Afipia sp.
  misc_feature (1)..(235): tr|D6V6F5|D6V6F5_9BRAD 7-cyano-7-deazaguanine synthase OS=Afipia sp. 1NLS2 OX=666684 GN=queC PE=3 SV=1
MDKTPENAALVLFSGGQDSATCLAWALSRFARVETLGFDYGQRHAIELECRATLIEGFKRLKPEWKTKLGEAHMLAIPTLAEISDTALTRDIAIEMEEGGLPNTFVPGRNLLFLTFAAALGYRRGIRHIVGGMCETDYSGYPDCRDETIKSLNVALNQGMGRDFELHTPLMWRDKAQTWALAHELGGEALVDLIVQHSHTCYLGERGALHDWGYGCGECPACRLRAAGWEKYKAA

SEQ ID NO: 35735 - protein, 218 aa, Agarivorans albus
  misc_feature (1)..(218): tr|R9PQQ7|R9PQQ7_AGAAL 7-cyano-7-deazaguanine synthase OS=Agarivorans albus MKT 106 OX=1331007 GN=queC PE=3 SV =1
MKEKAVVIYSGGMDSFTVLHKTLQLGLQPYALSFNYGQRHVKELEYAQKVTEELGIEHKIVDITAINQLLAGSSLTSDIDIPEGDYQEESMKSTVVPNRNMILLSLAIGYAVSIGAKKVFYGAHSGDHAIYPDCRPEFVKKMNDVSLIANYEAVEVISPYLEQSKIDILSDGLAMGLDYAKTWTCYNGREQACGKCGACQERLEAFKLNAVTDPLNYE

SEQ ID NO: 35736 - protein, 218 aa, Agarivorans sp.
  misc_feature (1)..(218): tr|A0A4D4IXY2|A0A4D4IXY2_9ALTE 7-cyano-7-deazaguanine s ynthase OS=Agarivorans sp. Toyoura001 OX=2283141 GN=que C PE=3 SV=1
MKEKAVVIYSGGMDSYTVLHKTLQLGLQPFALSFNYGQRHIKELEYAKNVCDELSVGHKIVDISSINQLLEGSSLTSDIDIPEGDYQEESMKSTVVPNRNMILLSLAIGYAVSIGAKKVFYGAHSGDHAIYPDCRPEFVRKMNEVSLIANYEAVEVISPYLEQSKIDILSDGLAMNLDYAKTWTCYNGRDLACGKCGACQERLEAFKLNEVNDPLSYE

SEQ ID NO: 35737 - protein, 228 aa, Agathobacter ruminis
  misc_feature (1)..(228): tr|A0A2G3E256|A0A2G3E256_9FIRM 7-cyano-7-deazaguanine s ynthase OS=Agathobacter ruminis OX=1712665 GN=queC PE=3 SV=1
MKALVLISGGIDSTTCLALAVKEYGHENVIGLSIFYGQRHDKEIEAANAVCEYYQVEHITLDLSTMFQFSDCTLLSHSDGEIPEESYAEQLEKTDGKPVSTYVPFRNGLFLSSASAIALSKGCSKIYYGAHADDAAGNAYPDCSEAFNQAMNTAIYEGSGKQLQIEAPFINKNKAGVVALGLSLNVPYHLTWSCYEGHDKACGKCGTCIDRKQAFIENGTTDPIEYES

SEQ ID NO: 35738 - protein, 228 aa, Agathobaculum butyriciproducens
  misc_feature (1)..(228): tr|A0A2U1BEM6|A0A2U1BEM6_9FIRM 7-cyano-7-deazaguanine s ynthase OS=Agathobaculum butyriciproducens OX=1628085 G N=queC PE=3 SV=1
MSEKAMVLCSGGVDSTTCLALAIEKHGKENVCALSIYYGQKHVKEIQAAKAVLEYYGIEGTSLDLTPVFAYSDCSLLSHSTEDIPEESYAEQLAQRGGKPVTTYVPFRNGLFLSAAASVALSKNCSVIYYGAHHDDAAGNAYPDCSEDFVNAMNHSIVLGSGGDVRIEAPFVRWNKAQIVAEGLRLQVPYQLTWSCYEGGDKPCGKCGTCLDRIRAFEANGVTDPAMR

SEQ ID NO: 35739 - protein, 232 aa, Aggregatibacter actinomycetemcomitans
  misc_feature (1)..(232): tr|G4A8N9|G4A8N9_AGGAC 7-cyano-7-deazaguanine synthase OS=Aggregatibacter actinomycetemcomitans serotype e str . SC1083 OX=907488 GN=queC PE=3 SV=1
MSNQPNKALVIFSGGQDSTTCLFLAIQEFGAENVEVITFQYGQRHAIELEKARWIAQDLKVKQTVLDTSVIKAITHNALMDPSAQISQNDNELPNTFVDGRNALFLLYAAIYAKSQGICVIYTGVCETDFSGYPDCRDVFIKSMNVTLNLAMDYPFEIRTPLMWLDKKATWALADQLGAFDYIRQHTHTCYNGVEGGCGECPSCVLRERGLKAYLPEREANTPKKKTALLRE

SEQ ID NO: 35740 - protein, 232 aa, Aggregatibacter actinomycetemcomitans
  misc_feature (1)..(232): tr|H0KFL2|H0KFL2_AGGAC 7-cyano-7-deazaguanine synthase OS=Aggregatibacter actinomycetemcomitans RhAA1 OX=10894 47 GN=queC PE=3 SV=1
MSNQPNKALVIFSGGQDSTTCLFLAIQEFGAENVEVITFQYGQRHAIELEKARWIAQDLKVKQTVLDTSVIKAITYNALMDPSAQISQNDNELPNTFVDGRNALFLLYAAIYAKSQGIRVIYTGVCETDFSGYPDCRDVFIKSMNVTLNLAMDYPFEIRTPLMWLDKKETWALADQLGAFDYIRRHTHTCYNGVEGGCGKCPSCVLRERGLKGYLPEREAKTPKKTAALLRE

SEQ ID NO: 35741 - protein, 223 aa, Aggregatibacter aphrophilus
  misc_feature (1)..(223): tr|A0A3S4PSE9|A0A3S4PSE9_AGGAP 7-cyano-7-deazaguanine s ynthase OS=Aggregatibacter aphrophilus ATCC 33389 OX=98 5008 GN=queC PE=3 SV=1
MSNQPNKALVIFSGGQDSTTCLFLAIKEFGAENVEVITFQYGQRHAIELEKARWIAQDLKVKQTLLDTSVIKAITHNALMDPNAQISQKDDELPNTFVDGRNALFLLYAAIYAKSQGIRVIYTGVCETDFSGYPDCRDVFVKSMNVTLNLAMDYPFDIRTPLMWLDKKDTWALADQLGAFDYIRQHTHTCYNGVEGGCGECPSCILRERGLNAYLQARDTKNV

SEQ ID NO: 35742 - protein, 223 aa, Aggregatibacter aphrophilus; identical to SEQ ID NO: 35741
  misc_feature (1)..(223): tr|A0A336N9X9|A0A336N9X9_AGGAP 7-cyano-7-deazaguanine s ynthase OS=Aggregatibacter aphrophilus OX=732 GN=queC P E=3 SV=1

SEQ ID NO: 35743 - protein, 226 aa, Agitococcus lubricus
  misc_feature (1)..(226): tr|A0A2T5IWI1|A0A2T5IWI1_9LACT 7-cyano-7-deazaguanine s ynthase OS=Agitococcus lubricus OX=1077255 GN=queC PE=3 SV=1
MNLSTKPRAVVLLSGGLDSATCLAIANQHYDCYALSFAYGQRHNSELLAAQRIAQALGVCEHRIISIDLAGIGGSALTDLSIAVPEQASEGIPVTYVPARNTIFLAYALGFAEVIGAQHIVIGVNAVDYSGYPDCRPEYIAAFQHLADLATKSGVEGQSLRIETPLLHLSKADIIQTGIQLGVDYSLTVSCYQADTEGRACGKCDSCRLRKEGFASAQCPDPTHYQ

SEQ ID NO: 35744 - protein, 236 aa, Agrobacterium arsenijevicii
  misc_feature (1)..(236): tr|A0A0D8KT24|A0A0D8KT24_9RHIZ 7-cyano-7-deazaguanine s ynthase OS=Agrobacterium arsenijevicii OX=1585697 GN=qu eC PE=3 SV=1
MKTIVICSGGLDSVSLAHKIAAEHELLALVSFDYGQRHKKELDFAADCARRLGVPHHVIDIRTIGAHLTGSALTDDIAVPDGHYAEETMRSTVVPNRNAIMLTIAFGLAAAQQADAVAIAVHGGDHFIYPDCRPGFIDSFNAMQAHALEGYADVKLFAPYVTVSKAAIVTDGVKYGTPFGETWSCYKGGLRHCGRCGTCVERREAFHLAGVTDPTDYEDPDFWVAATHAYAAQEVR

SEQ ID NO: 35745 - protein, 236 aa, Agrobacterium bohemicum
  misc_feature (1)..(236): tr|A0A135P8M7|A0A135P8M7_9RHIZ 7-cyano-7-deazaguanine s ynthase OS=Agrobacterium bohemicum OX=2052828 GN=queC P E=3 SV=1
MKTIVICSGGLDSVSLAHKIAAENELVALVSFDYGQRHKKELDFAALCASRLAVPHHIIDIRTIGAHLTGSALTDDVAVPDGHYAEETMRSTVVPNRNAIMLTIAFGLAAAQQADAVAIAVHGGDHFIYPDCRPGFIDSFNDMQRHALDGYASVKLYAPYVAGSKADIVTDGASHDTPFAETWSCYKGGMRHCGRCGTCVERREAFHLAGVNDPTDYEDPDFWLAATSAYAAQEVN

SEQ ID NO: 35746 - protein, 236 aa, Agrobacterium deltaense
  misc_feature (1)..(236): tr|A0A1S7QZR5|A0A1S7QZR5_9RHIZ 7-cyano-7-deazaguanine s ynthase OS=Agrobacterium deltaense RV3 OX=1183426 GN=qu eC PE=3 SV=1
MKTIVICSGGLDSVSLAHKIAAEHELLALVSFDYGQRHRKELEYAADCARRLGVPHHIIDIRTIGAHLTGSALTDDVEVPDGHYAEETMRSTVVPNRNAIMLTIAFGLAAAQQADAVAIAVHGGDHFIYPDCRPGFIDSFNAMQAHALEGYADVKLFAPYVTVSKAAIVTDGAKYGTPFGETWSCYKGGLRHCGRCGTCVERREAFHLAGVTDPTDYEDPDFWVAATHAYAAQEVR

SEQ ID NO: 35747 - protein, 196 aa, Agrobacterium deltaense
  misc_feature (1)..(196): tr|A0A1S7U764|A0A1S7U764_9RHIZ 7-cyano-7-deazaguanine s ynthase OS=Agrobacterium deltaense NCPPB 1641 OX=118342 5 GN=AGR7A_pAt10093 PE=3 SV=1
MSIVTLVSGGLDSTLVAKLAQEEGLSIHPLFIDYGQRSRDRELAACRGIMKRLGLPEPKVADLSGYGALIRSGLTDRSLHIVDDAFTPGRNMLFLLTAAAYAFQRNADAVSIGLLHEETSLFPDQTSAFLRDAEQMIARCLGRSIRVLAPLSQFHKIDVVELARQKGIVGTYSCHEGGDEACGECIACNEFKFERA

SEQ ID NO: 35748 - protein, 236 aa, Agrobacterium fabrum
  misc_feature (1)..(236): sp|Q8UAM7|QUEC_AGRFC 7-cyano-7-deazaguanine synthase OS =Agrobacterium fabrum (strain C58 / ATCC 33970) OX=1762 99 GN=queC PE=3 SV=1
MKTIVICSGGLDSVSLAHKIAAEHELLALVSFDYGQRHKKELDFAADCAKRLGVPHHLIDIGTIGAHLTGSALTDDIDVPDGHYAEETMRSTVVPNRNAIMLTIAFGLAAAQQADAVAIAVHGGDHFIYPDCRPGFIGSFNAMQAHALEGYADVTLFAPYVTVSKAAIVTDAVKYGTPFGETWSCYKGGLRHCGRCGTCVERREAFHLAGVTDPTEYEDPDFWVAATQAYAAQEVH

SEQ ID NO: 35749 - protein, 236 aa, Agrobacterium fabrum; identical to SEQ ID NO: 35748
  misc_feature (1)..(236): tr|A0A3G2CUU9|A0A3G2CUU9_9RHIZ 7-cyano-7-deazaguanine s ynthase OS=Agrobacterium fabrum OX=1176649 GN=exsB PE=3 SV=1

SEQ ID NO: 35750 - protein, 236 aa, Agrobacterium genomosp.
  misc_feature (1)..(236): tr|A0A1S7MZI5|A0A1S7MZI5_9RHIZ 7-cyano-7-deazaguanine s ynthase OS=Agrobacterium genomosp. 1 str. TT111 OX=1183 430 GN=queC PE=3 SV=1
MKTIVICSGGLDSVSLAHKIAAEHELLALVSFDYGQRHKKELDFAADCAKRLGVPHHLIDITTIGAHLTGSALTDDIDVPDGHYAEETMRSTVVPNRNAIMLTIAFGLAAAQQADAVAIAVHGGDHFIYPDCRPGFIDSFNAMQAHALEGYADVTLFAPYVTVSKAAIVTDAVKYGTPFGETWSCYKGGSRHCGRCGTCVERREAFHLAGVTDPTDYEDPDFWVAATHAYAAQEVR

SEQ ID NO: 35751 - protein, 458 aa, Agrobacterium genomosp.
  misc_feature (1)..(458): tr|A0A1S7R0N0|A0A1S7R0N0_9RHIZ Uncharacterized protein OS=Agrobacterium genomosp. 5 str. CFBP 6626 OX=1183435 GN=AGR5A_Lc10003 PE=4 SV=1
MREAILLKRPTLALDVIASSERRREDVQVCLIGRDISFKTAALESFAFRNWNNIVFDALVVAATIEFCDRALARKAVIWGREFDLRIAVHDAELWSSSKVYEPLIACLELLTGDRWQIDFVSRTVPEESPRQIVMEFPRDAEAVIAYSDGMDSRAVAGLERAKRGDKLVLVRLGGSDTGVTNAERNKRPFTAVPYKVVLGRDNAENSARSRGFKFAMIAAIGSFLVKAPVVIVPESGQGSLGPALLPVGQGYPDYRNHPAFTARMEALCRGLFDHIVRYEFPQIWNTKGETLAAFSKLGSNDADWIGTRSCWQQARHVSVDEHRRQCGICAACILRRLSVHAAGLSEPTSTYVWENLSAPVFEDGANSNFEKITPALRQYAIASVMHFDHMAGLRASPEYKLVQGRFVHGLAQGLREERSVVANKLDQLLARHEKEWSSFIDNIGAQSFLNAWISNRP

SEQ ID NO: 35752 - protein, 236 aa, Agrobacterium larrymoorei
  misc_feature (1)..(236): tr|A0A4Z1Q0Z8|A0A4Z1Q0Z8_9RHIZ 7-cyano-7-deazaguanine s ynthase OS=Agrobacterium larrymoorei OX=160699 GN=queC PE=3 SV=1
MKTIVICSGGLDSVSLAHRIAAEHELLALLSFDYGQRHKKELDFAAACATRLGVPHHIIDIRTIGAHLTGSALTDDVDVPDGHYAEETMRSTVVPNRNAIMLTIAFGLAAAQQADAVAIAVHGGDHFIYPDCRPGFIDAFNTMQAHALEGYANVKLYAPYVTVTKADIVTDGARHSTPFAETWSCYKGGIRHCGRCGTCVERREAFHLAGINDPTDYEDPDFWVAATSAYAAQEVR

SEQ ID NO: 35753 - protein, 197 aa, Agrobacterium larrymoorei
  misc_feature (1)..(197): tr|A0A4D7E2X0|A0A4D7E2X0_9RHIZ 7-cyano-7-deazaguanine s ynthase OS=Agrobacterium larrymoorei OX=160699 GN=CFBP5 473_21300 PE=3 SV=1
MRLLLFSGGLDSTALAWSQRPDLCLTVDYGQRPAQGEIRAASGLSGLMGLRHEVVTVDLAHLGSGSLAGSETATVGSAPEWWPYRNQMLITLAAMKFVGQGLKEIMFGAVATDVHADGKKPFVDAISSLVSLQEGAVRVTAPAIDSDPVDLIRGSGLPASLLGATFSCHVAEYPCGRCRGCEKHSDTMRELAGAAHP

SEQ ID NO: 35754 - protein, 236 aa, Agrobacterium radiobacter
  misc_feature (1)..(236): sp|B9JLH9|QUEC_AGRRK 7-cyano-7-deazaguanine synthase OS =Agrobacterium radiobacter (strain K84 / ATCC BAA-868) OX=311403 GN=queC PE=3 SV=1
MKTIVVCSGGLDSVSLAHKVAAEQQLIGLVSFDYGQRHRKELDFAAACAKRLGVPHEIIDITTIGKHLTGSALTDDVDVPDGHYAEETMKATVVPNRNAIMLAIAFGLAAAQKADAVAVAVHGGDHFIYPDCRPGFIDAFQQMQNQALDGYASVSLYAPFVMTSKADIVTDGARHKTPFAETWSCYKGGERHCGRCGTCVERREAFHLAGVEDPTDYEDPDFWVTATSGFSAQEVK

SEQ ID NO: 35755 - protein, 236 aa, Agrobacterium radiobacter
  misc_feature (1)..(236): tr|W1L2D0|W1L2D0_RHIRD 7-cyano-7-deazaguanine synthase OS=Agrobacterium radiobacter DSM 30147 OX=1336745 GN=qu eC PE=3 SV=1
MKTIVICSGGLDSVSLAHKIAAEHELLALVSFDYGQRHRKELEYAADCARRLGVPHHVIDIRTIGAHLTGSALTDDVEVPDGHYAEETMRSTVVPNRNAIMLTIAFGLAAAQQADAVAIAVHGGDHFIYPDCRPGFIDSFNAMQAHALEGYANVKLFAPYVTVSKAAIVTDGVKYGTPFGETWSCYKGGLRHCGRCGTCVERREAFHLAGVTDPTDYEDPDFWVAATHAYAAQEVS

SEQ ID NO: 35756 - protein, 236 aa, Agrobacterium rhizogenes
  misc_feature (1)..(236): tr|A0A546XBD2|A0A546XBD2_AGRRH 7-cyano-7-deazaguanine s ynthase OS=Agrobacterium rhizogenes OX=359 GN=queC PE=3 SV=1
MKTIVICSGGLDSVSLAHKIAAEHELLALVSFDYGQRHRKELDFAADCARRLGVPHHIIDIRTIGAHLTGSALTDDIDVPDGHYAEETMRSTVVPNRNAIMLTIAFGLAAAQQADAVAIAVHGGDHFIYPDCRPGFIGSFNAMQAHALEGYADVTLFAPYVTVSKAAIVTDAVKYGTPFGETWSCYKGGLRHCGRCGTCVERREAFHLAGVTDPTDYEDPDFWVAATHAFAAQEVR

SEQ ID NO: 35757 - protein, 236 aa, Agrobacterium rhizogenes
  misc_feature (1)..(236): tr|A0A178GZI4|A0A178GZI4_AGRRH 7-cyano-7-deazaguanine s ynthase OS=Agrobacterium rhizogenes OX=359 GN=queC PE=3 SV=1
MKTIVICSGGLDSVSLAHKIAAEHELLALVSFDYGQRHRKELEYAADCARRLGVPHHVIDIRTIGAHLTGSALTDDVEVPDGHYAEETMRSTVVPNRNAIMLTIAFGLAAAQQADAVAIAVHGGDHFIYPDCRPGFIDSFNAMQAHALEGYADVKLFAPYVTVSKAAIVTDGAKYGTPFGETWSCYKGGLRHCGRCGTCVERREAFHLAGVTDPTDYEDPDFWVAATHAFAAQEVR

SEQ ID NO: 35758 - protein, 236 aa, Agrobacterium rosae
  misc_feature (1)..(236): tr|A0A2S4EAJ3|A0A2S4EAJ3_9RHIZ 7-cyano-7-deazaguanine s ynthase OS=Agrobacterium rosae OX=1972867 GN=queC PE=3 SV=1
MKTIVICSGGLDSVSLAHKIAAENELIALVSFDYGQRHKKELDFAALCASRLGVPHHIIDVRTIGAHLTGSALTDDVAVPDGHYAEETMRSTVVPNRNAIMLTIAFGLAAAQQADAVAIAVHGGDHFIYPDCRPGFIDSFNDMQRHALEGYANVKLYAPYVTGSKADIVTDGARHDTPFAETWSCYKGGMRHCGRCGTCVERREAFHLAGVDDPTDYEDPDFWLAATSAYVAQEVN

SEQ ID NO: 35759 - protein, 236 aa, Agrobacterium rubi
  misc_feature (1)..(236): tr|A0A081CSB0|A0A081CSB0_9RHIZ 7-cyano-7-deazaguanine s ynthase OS=Agrobacterium rubi TR3 = NBRC 13261 OX=13684 15 GN=queC PE=3 SV=1
MKTIVICSGGLDSVSLAHKIASEHELLALVSFDYGQRHKKELDFAARCATRLGVPHHIIDIRTIGAHLTGSALTDNVEVPDGHYAEETMRSTVVPNRNAIMLTIAFGLAAAQQADAVAIAVHGGDHFIYPDCRPGFIDSFNDMQRHALEGYASVKLYAPYVTGSKADIVTDGAKHETPFAETWSCYKGGMRHCGRCGTCVERREAFQLAGVDDLTDYEDPDFWIAATSAYAAQAVK

SEQ ID NO: 35760 - protein, 236 aa, Agrobacterium rubi
  misc_feature (1)..(236): tr|A0A1B9TX34|A0A1B9TX34_9RHIZ 7-cyano-7-deazaguanine s ynthase OS=Agrobacterium rubi OX=28099 GN=queC PE=3 SV= 1
MKTIVICSGGLDSVSLAHKIASEHELLALVSFDYGQRHKKELDFAARCATRLSVPHHIIDIRTIGAHLTGSALTDDVEVPDGHYAEETMRSTVVPNRNAIMLTIAFGLAAAQQADAVAIAVHGGDHFIYPDCRPGFIDSFNKMQRHALEGYASVKLYAPYVTGSKADIVTDGAKHDTPFAETWSCYKGGMRHCGRCGTCVERREAFQLAKVDDPTDYEDPDFWIAATSAYAAQAVK

SEQ ID NO: 35761 - protein, 236 aa, Agrobacterium salinitolerans
  misc_feature (1)..(236): tr|A0A4Z1R6B8|A0A4Z1R6B8_9RHIZ 7-cyano-7-deazaguanine s ynthase OS=Agrobacterium salinitolerans OX=1183413 GN=q ueC PE=3 SV=1
MKTIVICSGGLDSVSLAHKIAAEHELLALVSFDYGQRHRKELDFAADCARRLGVPHHIIDIRTIGAHLTGSALTDDVEVPDGHYAEETMRSTVVPNRNAIMLTIAFGLAAAQQADAVAIAVHGGDHFIYPDCRPGFIDSFNSMQAHALEGYADVKLFAPYVTVSKAAIVTDGAKYGTPFGETWSCYKGGLRHCGRCGTCVERREAFHLAGVTDPTDYEDPDFWVAATHAFAAQEVR

SEQ ID NO: 35762 - protein, 236 aa, Agrobacterium salinitolerans
  misc_feature (1)..(236): tr|A0A1S7UCE8|A0A1S7UCE8_9RHIZ 7-cyano-7-deazaguanine s ynthase OS=Agrobacterium salinitolerans str. Hayward 03 63 OX=1183434 GN=queC PE=3 SV=1
MKTIVICSGGLDSVSLAHKIAAEHELLALVSFDYGQRHRKELDFAADCARRLGVPHHIIDIRTIGAHLTGSALTDDVEVPDGHYAEETMRSTVVPNRNAIMLTIAFGLAAAQQADAVAIAVHGGDHFIYPDCRPGFIDSFNAMQAHALEGYADVKLFAPYVTVSKAAIVTDGAKYGTPFGETWSCYKGGLRHCGRCGTCVERREAFHLAGVTDPTDYEDPDFWVAATHAYAAQEVR

SEQ ID NO: 35763 - protein, 236 aa, Agrobacterium sp.
  misc_feature (1)..(236): tr|A0A3R9CJP5|A0A3R9CJP5_9RHIZ 7-cyano-7-deazaguanine s ynthase OS=Agrobacterium sp. FDAARGOS_525 OX=2420311 GN =queC PE=3 SV=1
MKTIVICSGGLDSVSLAHKIAAEHELLALVSFDYGQRHRKELDFAADCARRLGVPHHVIDIRTIGAHLTGSALTDDVEVPDGHYAEETMRSTVVPNRNAIMLTIAFGLAAAQQAEAVAIAVHGGDHFIYPDCRPGFIDSFNAMQAHALEGYADVKLFAPYVTVSKAAIVTDGAKYGTPFGETWSCYKGGLRHCGRCGTCVERREAFHLAGVTDPTDYEDPDFWVAATHAFAAQEVR

SEQ ID NO: 35764 - protein, 236 aa, Agrobacterium sp.
  misc_feature (1)..(236): tr|A0A0X7A016|A0A0X7A016_9RHIZ 7-cyano-7-deazaguanine s ynthase OS=Agrobacterium sp. D14 OX=1336743 GN=queC PE= 3 SV=1
MKTIVICSGGLDSVSLAHKIAAEHELLALVSFDYGQRHRKELEYAADCARRLGVPHHVIDIRTIGAHLTGSALTDDVEVPDGHYAEETMRSTVVPNRNAIMLTIAFGLAAAQQADAVAIAVHGGDHFIYPDCRPGFIDSFNAMQAHALEGYADVKLFAPYVTVSKAAIVTDGAKYGTPFGETWSCYKGGLRHCGRCGTCVERREAFHLAGVTDPTDYEDPDFWVAATHAYAAQEVS

SEQ ID NO: 35765 - protein, 236 aa, Agrobacterium tumefaciens
  misc_feature (1)..(236): tr|A0A1S7RK87|A0A1S7RK87_RHIRD 7-cyano-7-deazaguanine s ynthase OS=Agrobacterium tumefaciens str. Kerr 14 OX=11 83424 GN=queC PE=3 SV=1
MKTIVICSGGLDSVSLAHKIAAEHELLALVSFDYGQRHKKELDFAADCARRLGVPHHVIDIRAIGAHLTGSALTDDIAVPDGHYAEETMRSTVVPNRNAIMLTIAFGLAAAQQADAVAIAVHGGDHFIYPDCRPGFIDSFNAMQAHALEGYADVKLFAPYVTVSKAAIVTDGVKYGTPFGETWSCYKGGLRHCGRCGTCVERREAFHLAGVTDPTDYEDPDFWVAATHAYAAQEVR

SEQ ID NO: 35766 - protein, 236 aa, Agrobacterium tumefaciens; identical to SEQ ID NO: 35750
  misc_feature (1)..(236): tr|H0H3F0|H0H3F0_RHIRD 7-cyano-7-deazaguanine synthase OS=Agrobacterium tumefaciens 5A OX=1107544 GN=queC PE=3 SV=1

SEQ ID NO: 35767 - protein, 235 aa, Agrobacterium vitis
  misc_feature (1)..(235): sp|B9JS46|QUEC_AGRVS 7-cyano-7-deazaguanine synthase OS =Agrobacterium vitis (strain S4 / ATCC BAA-846) OX=3114 02 GN=queC PE=3 SV=1
MKILVVCSGGLDSVSLADKMAAEHELIGLISFDYGQRHKKELDFAALAAKRLGVPHQIIDMTNIGASLTGSALTDDLDVPDGHYAEETMKITVVPNRNAIMLAIAFGVAAAKKADAVALAVHGGDHFIYPDCRPGFIDAFQIMQAHALEGYADVKLLAPFVTVSKADIVTEGAKYGTPFDQTWSCYKGGARHCGRCGTCVERREAFHLAGVTDPTDYEDPDFWVSATSGFQAREV

SEQ ID NO: 35768 - protein, 235 aa, Agrobacterium vitis
  misc_feature (1)..(235): tr|A0A560YX87|A0A560YX87_AGRVI 7-cyano-7-deazaguanine s ynthase OS=Agrobacterium vitis OX=373 GN=queC PE=3 SV=1
MKTLVVCSGGLDSVSLAYKIASEQQLIGLLSFDYGQRHKKELEFAARAAKALGVPHQIIDISTIGKSLTGSALTDDLDVPDGHYAEDTMKITVVPNRNAIMLAIAFGVAAAKKADAVAVAVHGGDHFIYPDCRPGFIDAFQTMQNHALEGYADLTLLSPFVTVPKSEIVVEGAKYGTPFADTWSCYKGGARHCGRCGTCVERREAFHLAGVVDPTEYEDPDFWRAATSGFKAEGV

SEQ ID NO: 35769 - protein, 425 aa, Agrococcus baldri
  misc_feature (1)..(425): tr|A0A1I6MKW8|A0A1I6MKW8_9MICO 7-cyano-7-deazaguanine s ynthase (Queuosine biosynthesis) OS=Agrococcus baldri O X=153730 GN=SAMN04487783_2245 PE=4 SV=1
MRYLSVPKLDGTDRSGDQTPIVLFGRDGNGDLLTAGWSAAEKVRRQKLMPDAAAWDLLAIALSVVVADGTTLRSSSPDGWTRQIELEIALSDPDRWSPHADAIATALRFLTTDRWTISFRDGGTIPTPPKKPRYPTSDAVALLSGGLDSLIGAIDLTAAGTTLLAVSQTVRGDAAKQDRFAQRIGGGIDHLQLNHNASTPRGQKETSQRSRSLIFLAFAVLAATATRRHAYGQPVPLYVCENGFIAINPPLTTARVGSLSTRTAHPEFLGRMQSIFDAVGLNVQIKNPYAEKTKGEMLRECLDQDLLSTEAPISTSCGRFQRFNYRHCGRCVPCQIRRASFEAWGRPDPTEYVYDNLAIQDEDHAAFDDVRSVAIALLTIEQDGFDRWLGPTLSSPLIHNRLELRDMLQRGFGELRTVHERYGLV

SEQ ID NO: 35770 - protein, 231 aa, Agromyces ramosus
  misc_feature (1)..(231): tr|A0A4Q7M950|A0A4Q7M950_9MICO 7-cyano-7-deazaguanine s ynthase OS=Agromyces ramosus OX=33879 GN=queC PE=3 SV=1
MSKRKAIVLLSGGLDSTTVLALAKNQGYEPYALSFRYGQRHVVELEAAKRVAKAQGVAQHVVCDIDLRTFGGSALTSETEVPKHENAGDLSAEEIPVTYVPARNTIFLSFALAFAEVVGATDVFIGVNALDYSGYPDCRPEYIEAYETMANLATRAGVEGARLKIHTPLISMTKADIVQTGTELGVDYSLTLSCYDPDDEGRSCGHCDSCLLRIRGFQEAGFADPVSYQAA

SEQ ID NO: 35771 - protein, 224 aa, Agromyces sp.
  misc_feature (1)..(224): tr|A0A542JR00|A0A542JR00_9PSED 7-cyano-7-deazaguanine s ynthase OS=Agromyces sp. SLBN-50 OX=744977 GN=queC PE=3 SV=1
MTDKKAVVLLSGGLDSATILAQANAAGFACYSMSFDYGQRHRAELQAAERVAQQMGVVEHKVIGLNLNGIGGSALTDSSIAVPEAPTEGIPVTYVPARNTVFLSLALGWAEVLGAHDIFIGVNAVDYSGYPDCRPEFIEAFERVANLATREGVEGRGFRIQAPLQNLSKAQIVQIGVQHGVDYGLTVSCYQADDDGRACGKCDSCRLRAAGFAAAGVADPTRYA

SEQ ID NO: 35772 - protein, 221 aa, Ahniella affigens
  misc_feature (1)..(221): tr|A0A2P1PW31|A0A2P1PW31_9GAMM 7-cyano-7-deazaguanine s ynthase OS=Ahniella affigens OX=2021234 GN=queC PE=3 SV =1
MKHAVVLVSGGMDSALTLAIARQMGFVCHALSVDYGQRHHAELDAAKRVAEAMGAVEHHVQMLDLRRFGGSALTADIAVPEAPSQGIPVTYVPARNTIMLSLALAWAETLGSDDIFCGVNAVDYSGYPDCRPAFIEAFEHLARVATKAGVNGELISIHAPLIAMSKADIARKGHELDVDYGITVSCYQADDQGRACGKCDACRLRAQGFHDAGLPDPTRYR

SEQ ID NO: 35773 - protein, 452 aa, Ahniella affigens
  misc_feature (1)..(452): tr|A0A2P1PRE9|A0A2P1PRE9_9GAMM ATPase OS=Ahniella affig ens OX=2021234 GN=C7S18_09435 PE=4 SV=1
MKPLASLAVDVLDAGSRPRAGRTPCHIGTNLTFTTELLESYCLREWEPIIYDALIVMGAVEFCDRIFRRPVQHWGREIELRIPVHEPERWNASEVSRALHDALCFVTGDRWSLSFIARRTPFTLPKQVPIPIASDIDAVIPFSDGLDSCAVAGLMHKQMGDRMMRVRLGTKRFCSPESTEKQPFTSIPYKVKRTNSKFVESSARSRGFKFAMVSGLAAYLVQANRIIVPESGQGALGPALVPVGQTYEDYRNHPMFMSRMEKVLFALYGRRICYAFPRIWYTKGETLDSFVKECCDGPAWATTWSCWQPNYQVSVEHKKRQCGVCAACQLRRMSVHAAGLSERPDTYVWENLKASSFNEGAAGGFTHVLKAQYQYAIAGTLHLAELSALQEDQMNNGTIKLAASQLAKALSLTESEAGARLARLLSQHKREWNGFLDALGESSFIVKWTRRS

SEQ ID NO: 35774 - protein, 457 aa, Ahrensia sp.
  misc_feature (1)..(457): tr|A0A2E2RSC6|A0A2E2RSC6_9RHOB Uncharacterized protein OS=Ahrensia sp. OX=1872419 GN=CL535_16745 PE=4 SV=1
MSSGTAQIRIPERSIEVVENGGATPRGWVPFDLGRDFEFSTEALETYAFASWEPVIYDAMVVAAAIEYGDRILKRPPRGWARRIALRIPVHDPDRWNDSELSAALLDAAGFLTGDYWSVEFVARAKAAPSPHSDYLNLPVPTEAVLAFSDGMDSRAVAGLIGSGLGPKLVRVRVGSNKIGRPDKKNRREPFTMVPYDVPCNMPNREASARSRGFKFALISGIAAYLSGAGEIVIPESGQGAIGPAIAPVVHAYPDYRNHPRFTQRMERLLKALFGKEIRYVFPRLWNTKGETLRSFAALPEGSDWHATRSCWRSNRWSSVNGKRRQCGVCAACMLRRLSVHAAGLTEADDAYVCTDLTAVSLEEAVDPDFTRMTPAYRQYAIAGVLHMDHLADLASKDGLPVVRRHAALLGPALGLGKEQTEESLTRMLSEHAGEWKEFVRSMGSNSFIRQWVRAGL

SEQ ID NO: 35775 - protein, 232 aa, Aidingimonas halophila
  misc_feature (1)..(232): tr|A0A1H3B974|A0A1H3B974_9GAMM 7-cyano-7-deazaguanine s ynthase OS=Aidingimonas halophila OX=574349 GN=queC PE= 3 SV=1
MSTSPSDASQDDDAVVIYSGGMDSFTVLHHAIHLGYRIHALSFHYGQRHARELDVAAQVCRQLKVPHQVVDIRSIHGLIDRSALTDSDRDMPGGEYDHDTMAATVVPNRNMILLSLAIAKAVNIGARRVFYGAHGGDHVLYPDCRPAFVQRMNDVAAIANFDAVDIVAPYLEYDKADILADGLAMGLDYRDTWTCYLGEEKACGDCGSCRERLAAFNANGVVDPLPYRQGGR

SEQ ID NO: 35776 - protein, 223 aa, Akkermansia glycaniphila
  misc_feature (1)..(223): tr|A0A1C7PC70|A0A1C7PC70_9BACT 7-cyano-7-deazaguanine s ynthase OS=Akkermansia glycaniphila OX=1679444 GN=queC PE=3 SV=1
MTAPQTVAVLLSGGLDSTVALHWAARQGRVACALSFDYASNHAQQELACARWQADSLGIPHRVIDITAISRHLDSALLRGADAVPTENYGTDNMKQTVVPFRNGIFLAIAAGIAESDGCGGIVIAAHSGDHSIYPDCRETFMSAMSSAIREGTYAHLEILRPFIDSTKGEIVRIGQQLGVDFAHTYSCYRGKERHCGICATCRERREAFADAHTDDPTVYEQQ

SEQ ID NO: 35777 - protein, 223 aa, Akkermansia muciniphila
  misc_feature (1)..(223): tr|A0A2N8IKE5|A0A2N8IKE5_9BACT 7-cyano-7-deazaguanine s ynthase OS=Akkermansia muciniphila OX=239935 GN=queC PE =3 SV=1
MDKMETAVLLSGGLDSSVALHWTHRNHSVRVALSFDYASNHAERELECAAWQAASLGIEHRVIDISSISSHLKSALLSGADDIPDGSYDEELMKQTVVPFRNGIFLSIAAGVAESCGAQQLVIAAHSGDHSIYPDCREEFMAAMTEAIRLGTYAGLGILRPFIHMSKGGIAAMGQDLGVDFSRTYSCYKGGAVHCGVCSTCMERREAFREAGIPDPTAYAPAG

SEQ ID NO: 35778 - protein, 223 aa, Akkermansia muciniphila
  misc_feature (1)..(223): tr|A0A2N8IH98|A0A2N8IH98_9BACT 7-cyano-7-deazaguanine s ynthase OS=Akkermansia muciniphila OX=239935 GN=queC PE =3 SV=1
MDKMETAVLLSGGLDSSVALHWAHRNHRVRVALSFDYASNHAERELKCAAWQAASLGIEHRVIDISSISSHLKSALISGADDIPDGSYDEELMKQTVVPFRNGIFLSIAAGVAESCGAQQLVIAAHSGDHSIYPDCREEFMAAMTEAIRLGTYAGLGILRPFIHMSKGGIAAMGQDLGVDFSRTYSCYKGGAVHCGVCSTCMERREAFREAGIPDPTAYAPAE

SEQ ID NO: 35779 - protein, 222 aa, Akkermansia sp.
  misc_feature (1)..(222): tr|A0A5B6A3K7|A0A5B6A3K7_9BACT 7-cyano-7-deazaguanine s ynthase OS=Akkermansia sp. BIOML-A43 OX=2584599 GN=queC PE=3 SV=1
MERMETAVLLSGGLDSSAALHWAHKNHHVKLALSFDYASNHAARELECAAWQAASLGVEHRIIDITPIAAHLKSALLSGADNIPDGKYDTELMKQTVVPFRNGIFLSMAAGIAESHGAQQLVIAAHSGDHSIYPDCREEFMAAMTDAIRLGTYAGLGILRPFIHTSKGGIVRTGHELGVDFSRTYSCYKGGRIHCGACSTCLERREAFREAGIPDPTVYADQ

SEQ ID NO: 35780 - protein, 222 aa, Akkermansia sp.
  misc_feature (1)..(222): tr|A0A139TUX4|A0A139TUX4_9BACT 7-cyano-7-deazaguanine s ynthase OS=Akkermansia sp. KLE1798 OX=1574265 GN=queC P E=3 SV=1
MERMETAVLLSGGLDSSAALHWAHKNHHVKLALSFDYASNHAARELECAAWQAASLGVEHRIIDITPIAAHLKSALLSGADDIPDGKYDTELMKQTVVPFRNGIFLSMAAGIAESHGAQQLVIAAHSGDHSIYPDCREEFMAAMTDAIRLGTYAGLGILRPFIHTSKGGIVRTGHELGVDFSRTYSCYKGGRIHCGACSTCLERREAFREAGIPDPTVYADQ

SEQ ID NO: 35781 - protein, 232 aa, Albidiferax sp.
  misc_feature (1)..(232): tr|A0A1H0WB44|A0A1H0WB44_9BURK 7-cyano-7-deazaguanine s ynthase OS=Albidiferax sp. OV413 OX=1855285 GN=queC PE= 3 SV=1
MHSRALVLFSGGQDSTTCLALALSKYDHVETVAFDYGQRHHVELQARLQVLAHIKAQFPQWAGKMGEDHLLDLSVLGQVSETSLTRDMVFKMEESGLPNTFVPGRNLLFLTLAAALAYRRNLEVIVTGVCETDFSGYPDCRDDTMKAMQLALSLGMDKRYLIETPLMWIDKAQTWQLAHQLGGQALVDLIVEDTHTCYLGDRVHRHAWGYGCGQCPACELRARGFERFIAQT

SEQ ID NO: 35782 - protein, 230 aa, Alcaligenaceae bacterium
  misc_feature (1)..(230): tr|A0A2G4J511|A0A2G4J511_9BURK 7-cyano-7-deazaguanine s ynthase OS=Alcaligenaceae bacterium OX=2021368 GN=queC PE=3 SV=1
MSKKAVCLLSGGLDSTTVVAMAQHEGYEVYALSFRYGQRHSIELERAAAFAKLRGVARHAILDIDLRSFGGSALTADIDVPKGHSVVDISAGIPITYVPARNTIFLSFALGWAEVLGAQDIFVGVNAMDYSGYPDCRPEFIEAFEHLGNLATKAGVEGAQRLKIRAPLISMSKADIIRKGLELGVDFSETTSCYDPAPTGAPCKQCDSCLLRAKGFAQVGIKDPLDGKFA

SEQ ID NO: 35783 - protein, 247 aa, Alcaligenaceae bacterium
  misc_feature (1)..(247): tr|A0A516WEQ5|A0A516WEQ5_9BURK 7-cyano-7-deazaguanine s ynthase OS=Alcaligenaceae bacterium SJ-26 OX=2593958 GN =queC PE=3 SV=1
MTSRALVLFSGGQDSTTCLAWALDRYDHVETIGFDYGQRHRVELECRQTVLQALRDDFPQWAGKLGEDHMLDMSVLGHISDTALTQDKAIEFEQGGLPNTFVPGRNLMFFNFAAAVAWRRGLEVLVGGMCETDYSGYPDCRDNTLKALQVALSLGLDARMVIETPLMWLDKRETWQLARTLGGEALVQLVRESTHTCYMGDRSHRHAWGYGCGECPACALRASGHAAFVSSAASDTATPPAAEPSAH

SEQ ID NO: 35784 - protein, 243 aa, Alcaligenes aquatilis
  misc_feature (1)..(243): tr|A0A3G2HX45|A0A3G2HX45_9BURK 7-cyano-7-deazaguanine s ynthase OS=Alcaligenes aquatilis OX=323284 GN=queC PE=3 SV=1
MKPHTPRRRALVLFSGGQDSATCLAWALDRFAFVETVGFDYGQRNHAELQCRQTLRDKLCQQFPHWAERLGQDHVLDASVLAQIGGSAMTESMTIAMQEDGLPNTFVPGRNLLFFTLAGALAYRRGLDTLVGGMSETDYSGYPDCRDNTLKALQVALSLGIERPLTVETPLMWLDKADTWELAHRLGSDALVQLIREDSHTCYQNNRETLHDWGYGCGRCPACELRAKGYADWRIQDRTARRS

SEQ ID NO: 35785 - protein, 243 aa, Alcaligenes aquatilis
  misc_feature (1)..(243): tr|A0A3R9AR99|A0A3R9AR99_9BURK 7-cyano-7-deazaguanine s ynthase OS=Alcaligenes aquatilis OX=323284 GN=queC PE=3 SV=1
MKPHTPHRRALVLFSGGQDSATCLAWALDRFAFVETVGFDYGQRNHAELQCRQTLKDKLCQRFPHWAERLGQDHVLDAHVLAQIGGSAMTESMTIAMQEDGLPNTFVPGRNLLFFTLAGALAYRRGLDTLVGGMSETDYSGYPDCRDNTLKALQVALSLGIERPLTVETPLMWLDKADTWELAHQLGSDALVQLIREDSHTCYQNNRETLHDWGYGCGQCPACELRAKGYADWRIQDRTARRS

SEQ ID NO: 35786 - protein, 243 aa, Alcaligenes faecalis
  misc_feature (1)..(243): tr|A0A2U2BMM9|A0A2U2BMM9_ALCFA 7-cyano-7-deazaguanine s ynthase OS=Alcaligenes faecalis OX=511 GN=queC PE=3 SV= 1
MKPHTPRRRALVLFSGGQDSATCLAWALDRFAFVETVGFDYGQRNHAELQCRQTLREKLCQQFPHWAERLGQDHVLDASVLAQIGGSAMTESMTIAMQEDGLPNTFVPGRNLLFFTLAGALAYRRGLDTLVGGMSETDYSGYPDCRDNTLKALQVALSLGIERPLTVETPLMWLDKADTWELAHQLGSDALVKLIQEDSHTCYENERETLHDWGYGCGQCPACELRAKGYTEWQAQAGATRHP

SEQ ID NO: 35787 - protein, 237 aa, Alcaligenes faecalis
  misc_feature (1)..(237): tr|A0A4P8JM27|A0A4P8JM27_ALCFA 7-cyano-7-deazaguanine s ynthase OS=Alcaligenes faecalis OX=511 GN=queC PE=3 SV= 1
MKPHTPRRRALVLFSGGQDSATCLAWALDRFAFVETVGFDYGQRNHAELQCRQTLRDKLYQQFPHWAERLGQDHVLDASVLAQIGGSAMTESMTIAMQEDGLPNTFVPGRNLLFFTLAGALAYRRGLDTLVGGMSETDYSGYPDCRDNTLKALQVALSLGIERPLTVETPLMWLDKADTWELAHQLGSDALVKLIQEDSHTCYQNERETLHDWGYGCGQCPACELRAKGYGDWKLWG

SEQ ID NO: 35788 - protein, 237 aa, Alcaligenes sp.
  misc_feature (1)..(237): tr|U1YFE0|U1YFE0_9BURK 7-cyano-7-deazaguanine synthase OS=Alcaligenes sp. EGD-AK7 OX=1386079 GN=queC PE=3 SV=1
MKPHTPRRRALVLFSGGQDSATCLAWALDRFAFVETVGFDYGQRNHAELQCRQTLRDKLCQQFPHWAERLGQDHVLDASVLAQIGGSAMTESMTIAMQEDGLPNTFVPGRNLLFFTLAGALAYRRGLDTLVGGMSETDYSGYPDCRDNTLKALQVALSLGIERPLTVETPLMWLDKADTWELAHQLGSDALVKLIQEDSHTCYQNERETLHEWGYGCGQCPACELRAKGYGDWKLRG

SEQ ID NO: 35789 - protein, 239 aa, Alcaligenes xylosoxydans
  misc_feature (1)..(239): tr|A0A424WJC6|A0A424WJC6_ALCXX 7-cyano-7-deazaguanine s ynthase OS=Alcaligenes xylosoxydans xylosoxydans OX=856 98 GN=queC PE=3 SV=1
MQNHQRRALVLFSGGQDSTTCLAWALDRYAHVETVAFDYGQRHHIELTARLNVLREIRSNFPDWAPRLGEDHLLDLKVLGQVGDTAMTSDRAIEMQANGLPNTFVPGRNLLFLTLAAALGYRRQLDVLVGGMCETDFSGYPDCRDDTIKAQQVALGLGLGSRITIETPLMWIDKSETWALAHQLGGDALVETIVEESHTCYLGERGARHDWGYGCGECPACKLRKIGWEKWVVASAAEG

SEQ ID NO: 35790 - protein, 237 aa, Alcaligenes xylosoxydans
  misc_feature (1)..(237): tr|A0A179T854|A0A179T854_ALCXX 7-cyano-7-deazaguanine s ynthase OS=Alcaligenes xylosoxydans xylosoxydans OX=856 98 GN=queC PE=3 SV=1
MLNHQRRALVLFSGGQDSTTCLAWALDRYAHVETVAFDYGQRHRIELDARLNVLREIRARFPQWAPRLGEDHLLDLKVLGQVGDTAMTSDRAIEMQENGLPNTFVPGRNLLFLTLAAALGYRRQLDVLVGGMCETDFSGYPDCRDDTIKAQQVALGLGLGSRVTIETPLMWIDKSETWALAKQLGGDALVETIVEESHTCYLGERGARHAWGYGCGECPACKLRRAGWDKWQAQGAV

SEQ ID NO: 35791 - protein, 222 aa, Alcanivoracaceae bacterium
  misc_feature (1)..(222): tr|A0A2E2DH43|A0A2E2DH43_9GAMM 7-cyano-7-deazaguanine s ynthase OS=Alcanivoracaceae bacterium OX=2024895 GN=que C PE=3 SV=1
MKKAVVLLSGGLDSATCLAMARDQGYQCYTIAFDYGQRTRSELDAAKRVSAALGAVSHRVIELGMGNIGGSALTDHSIEVPEEGGDGIPVTYVPARNTVFLSLALGLAEVVDAEAIYIGVNAVDYSGYPDCRPAFIEAFQAMAGLATKAGVEGRPVTIETPLMHLSKAQIIQAGTALGLDYGLTVSCYQADENGNACGKCDSCRLRKQGFDEALVKDPTNYQ

SEQ ID NO: 35792 - protein, 225 aa, Alcanivoracaceae bacterium
  misc_feature (1)..(225): tr|A0A3L8B091|A0A3L8B091_9GAMM 7-cyano-7-deazaguanine s ynthase OS=Alcanivoracaceae bacterium GenoA1_TS13_700 O X=2072747 GN=queC PE=3 SV=1
MSDIKKAVVLLSGGLDSATCLAIARHQGYECYAITFDYGQRHESELAAARRVVDALGAMELKTIHINLGDIGGSALTDRSIEVPLGPTEGIPVTYVPARNTIFLSLALGWAEVLDADAIFIGVNAVDYSGYPDCRAEFISAFEGLANLATRRGVEGRPMAIEAPLLHLSKAEIIQKGLQLGLDYGLTVSCYQADSRGRACGQCDSCRLRREGFQQAGVADPTPYR

SEQ ID NO: 35793 - protein, 222 aa, Alcanivorax borkumensis
  misc_feature (1)..(222): sp|Q0VRI8|QUEC_ALCBS 7-cyano-7-deazaguanine synthase OS =Alcanivorax borkumensis (strain ATCC 700651 / DSM 1157 3 / NCIMB 13689 / SK2) OX=393595 GN=queC PE=3 SV=2
MKKAVVLLSGGLDSATCLAIARDQGYACHTIAFDYGQRTRSELDAAERVSGVLGALSHRVIELGMGNIGGSALTDHSIEVPENGGDGIPVTYVPARNTVFLSLALGLAEVIDAQAIFIGVNAVDYSGYPDCRPAFIEAFQSMATLATKAGVEGRPMQIETPLMHLSKAQIIQRGVALGLDYGLTVSCYQADDHGNACGKCDSCRLRSQGFEDALVKDPTNYQ

SEQ ID NO: 35794 - protein, 228 aa, Alcanivorax dieselolei
  misc_feature (1)..(228): tr|K0CD19|K0CD19_ALCDB 7-cyano-7-deazaguanine synthase OS=Alcanivorax dieselolei (strain DSM 16502 / CGMCC 1.3 690 / B-5) OX=930169 GN=exsB PE=3 SV=1
MSTAVVLLSGGLDSATCLAMARAEGHRCHTIAFDYGQRTRSELKAAERVSRALGAESHRVIELGLGNIGGSALTDHDIAVPENVPEEESDGIPVTYVPARNTVFLSLALGLAEVLEADVIYIGVNAVDYSGYPDCRPAFIEAFQNMANLATKAGVEGHPIRIATPLMNLSKADIIREGTRLGLDYGLTVSCYQADEEGQACGRCDSCRLRRQGFEEALVKDPTKYQGA

SEQ ID NO: 35795 - protein, 222 aa, Alcanivorax hongdengensis
  misc_feature (1)..(222): tr|L0WDX4|L0WDX4_9GAMM 7-cyano-7-deazaguanine synthase OS=Alcanivorax hongdengensis A-11-3 OX=1177179 GN=queC PE=3 SV=1
MKKAVVLLSGGLDSATCLAIARDQGYQCHTIAFDYGQRTRSELDAAARVSEALGAASHRVIELGMGNIGGSALTDHNIEVPEDGGEGIPVTYVPARNTVFLSLALGLAEVTGAEAIYIGVNAVDYSGYPDCRPAFIEAFQTLANLATKAGVEGNTIRIETPLMHLSKAQIIQQGEGLGLDYGLTVSCYQADAEGRACGRCDSCRLRKQGFADALVKDPTNYQ

SEQ ID NO: 35796 - protein, 222 aa, Alcanivorax jadensis
  misc_feature (1)..(222): tr|A0A095TDG9|A0A095TDG9_9GAMM 7-cyano-7-deazaguanine s ynthase OS=Alcanivorax jadensis T9 OX=1177181 GN=queC P E=3 SV=1
MKKAVVLLSGGLDSATCLAIARDQGYECHTIAFDYGQRTRSELDAAERVSAALGALSHRVIELGMGNIGGSALTDHSIDVPEEGGDGIPVTYVPARNTVFLSLALGLAEVVEAEAIYIGVNAVDYSGYPDCRPAFIEAFQAMASLATKAGVEGSPISVETPLMHLSKAQIIQQGTALGLDYGLTVSCYQADENGNACGKCDSCRLRKQGFDEALVKDPTNYQ

SEQ ID NO: 35797 - protein, 222 aa, Alcanivorax nanhaiticus
  misc_feature (1)..(222): tr|A0A095SL17|A0A095SL17_9GAMM 7-cyano-7-deazaguanine s ynthase OS=Alcanivorax nanhaiticus OX=1177154 GN=queC P E=3 SV=1
MNKAVVLLSGGLDSATCLAIARDQGYECHTIAFDYGQRTRAELAAALRVSAALGALSHRVVELGMGNIGGSALTDHSIEVPEDGGDGIPVTYVPARNTVFLSLALGLAEVLDAQAIFIGVNAVDYSGYPDCRPEFIEAFQTMANLATKAGVEGRPIQVETPLMHLSKADIIREGVALGLDYGLTVSCYQADESGNACGKCDSCRLRRLGFEDALVKDPTNYQ

SEQ ID NO: 35798 - protein, 227 aa, Alcanivorax pacificus
  misc_feature (1)..(227): tr|A0A0B4XMY4|A0A0B4XMY4_9GAMM 7-cyano-7-deazaguanine s ynthase OS=Alcanivorax pacificus W11-5 OX=391936 GN=que C PE=3 SV=1
MKKAVVLLSGGLDSATCLAMGQEAGYQCHTLAFDYGQRHRAELVAAERVSRYHGAASHRVIRLDLGTIGGSALTDTALAVPEEESEGIPITYVPARNTVFLSLALGLAEVLEADAIYIGVNAVDYSGYPDCRPAFIDAFRALATVATKAGVEGHAPSIQTPLLTLSKGDIIRAGTALGVDYSLTVSCYQADDDGQACGRCDSCRLRRAGFAAAGVVDPTRYAGAMPK

SEQ ID NO: 35799 - protein, 222 aa, Alcanivorax profundi
  misc_feature (1)..(222): tr|A0A418Y1H5|A0A418Y1H5_9GAMM 7-cyano-7-deazaguanine s ynthase OS=Alcanivorax profundi OX=2338368 GN=queC PE=3 SV=1
MKKAVVLLSGGLDSATCLAMARDRGYQCYTIAFDYGQRTRSELDAAKRVSAALGAVSHRVIELGMGNIGGSALTDHSIEVPEEGGDGIPVTYVPARNTVFLSLALGLAEVVDAEAIYIGVNAVDYSGYPDCRPAFIEAFQAMAGLATKAGVEGRPVTIETPLMHLSKAQIIQAGTALGLDYGLTVSCYQADENGNACGKCDSCRLRKQGFDEALVKDPTNYQ

SEQ ID NO: 35800 - protein, 222 aa, Alcanivorax sp.
  misc_feature (1)..(222): tr|B4WY38|B4WY38_9GAMM 7-cyano-7-deazaguanine synthase OS=Alcanivorax sp. DG881 OX=236097 GN=queC PE=3 SV=1
MKKAVVLLSGGLDSATCLAIARDQGYECHTIAFDYGQRTRSELDAAVQVSGALGALSHRVIELGMGNIGGSALTDHSIDVPEDGGEGIPVTYVPARNTVFLSLALGLAEVVDAQAIFIGVNAVDYSGYPDCRPAFIEAFQSMANLATKAGVEGRPMQIETPLMHLSKAQIIQQGVALGLDYGLTVSCYQADENGNACGKCDSCRLRSQGFEDALVKDPTNYQ

SEQ ID NO: 35801 - protein, 223 aa, Alcanivorax sp.
  misc_feature (1)..(223): tr|A0A2D9ULQ9|A0A2D9ULQ9_9GAMM 7-cyano-7-deazaguanine s ynthase OS=Alcanivorax sp. OX=1872427 GN=queC PE=3 SV=1
METAVVLLSGGLDSATCLAMARAEGFRCHTIAFDYGQRTRSELQAAERVSAALGAESHRVIELGMGGIGGSALTDHAIDVPENGGDGIPVTYVPARNTVFLSLALGLAEVVGADAIFIGVNAVDYSGYPDCRPEFIDAFQHLAGLATKAGVEGHPVRISTPLMALSKAEIIRRGTELGLDYSLTVSCYQADAEGRACGRCDSCRLRREGFEQALIKDPTIYQS

SEQ ID NO: 35802 - protein, 239 aa, Alicycliphilus denitrificans
  misc_feature (1)..(239): tr|A0A3R7FD39|A0A3R7FD39_9BURK 7-cyano-7-deazaguanine s ynthase OS=Alicycliphilus denitrificans OX=179636 GN=qu eC PE=3 SV=1
MSAPDRRRALVLLSGGQDSATCLAWALARYAEVETIGFDYGQRHRAELDCRQRLRAGLQAMPWPGRLGPDHLLTVDVLAQLGGSAMTEEVAIAMQQDGLPNTFVPGRNLLFFTLAAALAYRRGLRVLVGGMSETDYSGYPDCRDNTLKALQVALSLGLERPLTLETPLMWIDKAGTWALAHQLGGDALVGLVRRDSHTCYLGQRDRLHDWGYGCGSCPACELRAQGWVQWAERNRPACA

SEQ ID NO: 35803 - protein, 239 aa, Alicycliphilus denitrificans
  misc_feature (1)..(239): tr|E8TTA4|E8TTA4_ALIDB 7-cyano-7-deazaguanine synthase OS=Alicycliphilus denitrificans (strain DSM 18852 / JCM 14587 / BC) OX=596153 GN=queC PE=3 SV=1
MSAPDRRRALVLLSGGQDSATCLAWALARYAHVETIGFDYGQRHRAELDCRQRLRAGLQAMPWSGRLGPDHLLTVDVLAQLGGSAMTEEVAIAMQQDGLPNTFVPGRNLLFFTLAAALAYRRGLQVLVGGMSETDYSGYPDCRDNTLKALQVALSLGLDRPLTLETPLMWIDKAGTWALAHQLGGDALVELIRRDSHTCYLGQRDRLHDWGYGCGRCPACELRAQGWAQWAEKNRPACE

SEQ ID NO: 35804 - protein, 326 aa, Alicycliphilus sp.
  misc_feature (1)..(326): tr|A0A0E9LQI8|A0A0E9LQI8_9BURK 7-cyano-7-deazaguanine s ynthase OS=Alicycliphilus sp. B1 OX=1603291 GN=ALISP_72 11 PE=3 SV=1
MFGQALDTAAFFAIAFWRSSNAFMAAHWVEIAWVDYAIKLGVSLLLFVPAYGVLLGGRRALAATRIPLPLAGRAMSAPDRRRALVLLSGGQDSATCLAWALARYADVETIGFDYGQRHRAELDCPPAAARGPAGHAVVRAGWGLDHLLTVDVLAQLGGSAMTEEVAIAMQQDGLPNTFVPGRNLLFFTLAAALAYRRGLQVLVGGMSETDYSGYPDCRDNTLKALQVALSLGLDRPLTLETPLMWIDKAGTWALAHQLGGDALVELDQARFPHLLPRPARPAARLGLRLRQAARPASCAPRAGRSGQKETALLANRAVIFLIAASA

SEQ ID NO: 35805 - protein, 239 aa, Alicycliphilus sp.
  misc_feature (1)..(239): tr|A0A0E9LCF2|A0A0E9LCF2_9BURK 7-cyano-7-deazaguanine s ynthase OS=Alicycliphilus sp. B1 OX=1603291 GN=queC PE= 3 SV=1
MSAPDRRRALVLLSGGQDSATCLAWALARYAEVETIGFDYGQRHRSELDCRQRLRAGLQAMPWPGRLGLDHLLTVDVLAQLGGSAMTEEVAIAMQQDGLPNTFVPGRNLLFFTLAAALAYRRGLQVLVGGMSETDYSGYPDCRDNTLKALQVALSLGLERPLTLETPLMWIDKAGTWALAHQLGGDALVELVRRDSHTCYLGRRDRLHDWGYGCGSCPACELRAQGWAQWAERNRPACA

SEQ ID NO: 35806 - protein, 227 aa, Alicyclobacillus acidocaldarius
  misc_feature (1)..(227): tr|C8WRW8|C8WRW8_ALIAD 7-cyano-7-deazaguanine synthase OS=Alicyclobacillus acidocaldarius subsp. acidocaldariu s (strain ATCC 27009 / DSM 446 / JCM 5260 / NBRC 15652 / NCIMB 11725 / NRRL B-14509 / 104-1A) OX=521098
MAKAVVILSGGLDSATCMGIAHAAGYELCPITFDYGQRHRIELESAKKVAAFYGVKDHRIVSIDFLRQIGGSALTDESIDVPTEGVSREIPVTYVPGRNLLFLAIAASYAEVIGAEAIYIGVNALDYSGYPDCRPEFIEGVEHVLRIGTKAGVEGRPIRIETPLLHWTKGEIVRKGLELGVPYELTTSCYQGGEVACGECDSCRLRLKGFAEAGAKDPIPYRPGFND

SEQ ID NO: 35807 - protein, 179 aa, Alicyclobacillus acidocaldarius
  misc_feature (1)..(179): tr|F8II74|F8II74_ALIAT 7-cyano-7-deazaguanine synthase OS=Alicyclobacillus acidocaldarius (strain Tc-4-1) OX=1 048834 GN=queC PE=3 SV=1
MAAFYGVKDHRIVSIDFLRQIGGSALTDESIDVPTEGVSREIPVTYVPGRNLLFLAIAASYAEVIGAEAIYIGVNALDYSGYPDCRPEFIEGVEHVLRIGTKAGVEGRPIRIETPLLHWTKGEIVRKGLELGVPYELTTSCYQGGEVACGECDSCRLRLKGFAEAGAKDPIPYRPGFND

SEQ ID NO: 35808 - protein, 229 aa, Alicyclobacillus acidoterrestris
  misc_feature (1)..(229): tr|T0BTT5|T0BTT5_ALIAG 7-cyano-7-deazaguanine synthase OS=Alicyclobacillus acidoterrestris (strain ATCC 49025 / DSM 3922 / CIP 106132 / NCIMB 13137 / GD3B) OX=135685 4 GN=queC PE=3 SV=1
MMAKAVVILSGGLDSTTCMGLAKAAGYDLYPLTFDYGQRHNRELVCAVEVAKHYQAYDHRIVKLDFLRQIGGSALTDDNIEVPQDGVSEDIPVTYVPGRNLLFLSMAASYAEVIGAEAIYIGVNALDYSGYPDCRPEFIEAVQTTIARGTKAGVEGRPIRIETPLLNWTKAEIIRRGMELHVPYQLTTSCYVGEEVACGECDSCRLRLKGFAEAGYQDPVAYRNDVNLR

SEQ ID NO: 35809 - protein, 229 aa, Alicyclobacillus acidoterrestris
  misc_feature (1)..(229): tr|A0A512CT97|A0A512CT97_9BACL 7-cyano-7-deazaguanine s ynthase OS=Alicyclobacillus acidoterrestris OX=1450 GN= queC PE=3 SV=1
MMAKAVVILSGGLDSTTCMGLAKAAGYDLYPLTFDYGQRHNRELVCAVEVAKHYQASDHRIVKLDFLRQIGGSALTDDEIEVPQDGVSEDIPVTYVPGRNLLFLSMAASYAEVIGAEAIYIGVNALDYSGYPDCRPAFIEAVQTTIARGTKAGVEGRPIRIETPLLHWTKAEIIRRGMELNVPYQLTTSCYVGEEVACGECDSCRLRLKGFAEAGYQDPVAYRNDVNRR

SEQ ID NO: 35810 - protein, 220 aa, Alicyclobacillus ferrooxydans
  misc_feature (1)..(220): tr|A0A0P9GTN6|A0A0P9GTN6_9BACL 7-cyano-7-deazaguanine s ynthase OS=Alicyclobacillus ferrooxydans OX=471514 GN=q ueC PE=3 SV=1
MMEQNAVVVFSGGQDSTTCLVWALQNFKHVEAITFQYGQRHELEIECAREIASKLSVPHHVLNLDLLNQLAPSALTRSDIAVQAGTDGALPSTFVDGRNHIFLSFAAIFAKQIGASHIVTGVCQTDFSGYPDCRDVFVKSLNVTLNLAMDYEFVIDTPLMWLDKKMTWALADELGCFELVRNETLTCYNGVMGDGCGECPACELRNRGLQAYLAEIGTSA

SEQ ID NO: 35811 - protein, 209 aa, Alicyclobacillus hesperidum
  misc_feature (1)..(209): tr|J9E3I1|J9E3I1_9BACL 7-cyano-7-deazaguanine synthase OS=Alicyclobacillus hesperidum URH17-3-68 OX=1200346 GN =queC PE=3 SV=1
MGIAQHAGYELFPITFDYGQRHRIELECAKKVAAHYGVRDHRIVSLDFLRQIGGSALTDDAIDVPTSGVSRDIPVTYVPGRNLLFLSIAASYAEVIEATAIYIGVNALDYSGYPDCRPEFIEGVQHVLRIGTKAGVEGRSMQIETPLLHWSKAEIIRNGLALNVPYELTTSCYQGGEEACGECDSCRLRLKGFAEAGARDPIPYRVSVG

SEQ ID NO: 35812 - protein, 231 aa, Alicyclobacillus hesperidum
  misc_feature (1)..(231): tr|A0A1H2QX96|A0A1H2QX96_9BACL 7-cyano-7-deazaguanine s ynthase OS=Alicyclobacillus hesperidum OX=89784 GN=queC PE=3 SV=1
MGRIGVAKAVVILSGGLDSTTCMGIAQHAGYELFPITFDYGQRHRIELECAKKVAAHYGVRDHRIVSLDFLRQIGGSALTDDAIDVPTSGVSRDIPVTYVPGRNLLFLSIAASYAEVIEATAIYIGVNALDYSGYPDCRPEFIEGVQHVLRIGTKAGVEGRSMQIETPLLHWSKAEIIRNGLALNVPYELTTSCYQGGEEACGECDSCRLRLKGFAEAGARDPIPYRVSVG

SEQ ID NO: 35813 - protein, 222 aa, Alicyclobacillus macrosporangiidus
  misc_feature (1)..(222): tr|A0A1I7IG46|A0A1I7IG46_9BACL 7-cyano-7-deazaguanine s ynthase OS=Alicyclobacillus macrosporangiidus OX=392015 GN=queC PE=3 SV=1
MHQDQRAVVVFSGGQDSTTCLVWAMRRFGHVEAVTFHYNQRHELEIECAKHIASELGVPHHILDLGLLSQLAPNALTRRDIEIEHKEGELPSTFVDGRNLLFLSFAAILAKQRGARHLVTGVCQTDFSGYPDCRDVFIKSLNVTLNLAMDYEFVIHTPLMWLTKRDTWALADELGCFDLVRDKTLTCYNGVIGAGCGTCPACILRNRGLEAYLQEREQRGHA

SEQ ID NO: 35814 - protein, 227 aa, Alicyclobacillus montanus
  misc_feature (1)..(227): tr|A0A1M6U4B7|A0A1M6U4B7_9BACL 7-cyano-7-deazaguanine s ynthase OS=Alicyclobacillus montanus OX=1830138 GN=queC PE=3 SV=1
MLNRKAVVVLSGGLDSTTCLGIAADEGYSLYTLTFDYGQRHARELRAAEQVADYYQVADRRIVKLDFLRKIGKSALTDFHLSVPKNVHDGEDIPITYVPGRNLLFLSLAASFAEAIEAQAIYIGVNALDYSGYPDCRPQFIQAVQKVLDVGTKTAVEGAPISLQTPLLHLTKAEIIRWGHRLGVPYQLTTSCYEGAEEACGECDSCRLRLRGFKEAGLVDPIPYRSL

SEQ ID NO: 35815 - protein, 226 aa, Alicyclobacillus sacchari
  misc_feature (1)..(226): tr|A0A4R8LWY0|A0A4R8LWY0_9BACL 7-cyano-7-deazaguanine s ynthase OS=Alicyclobacillus sacchari OX=392010 GN=queC PE=3 SV=1
MAKAVVILSGGLDSTTCMGIAQHAGYELFPITFDYGQRHRIELECAKKVAAHYGVRDHRIVSLDFLRQIGGSALTDDAIEVPVSGLSRDIPVTYVPGRNLLFLSIAASYAEVIEATAIYIGVNALDYSGYPDCRPEFIEGVQHVLRIGTKAGVEGRSMQIETPLLHWSKAEIIRNGLDLNVPYELTTSCYQGGEEACGECDSCRLRLKGFAEAGARDPIPYRVSAS

SEQ ID NO: 35816 - protein, 226 aa, Alicyclobacillus sp.
  misc_feature (1)..(226): tr|A0A1F2Y1Y9|A0A1F2Y1Y9_9BACL 7-cyano-7-deazaguanine s ynthase OS=Alicyclobacillus sp. RIFOXYA1_FULL_53_8 OX=1 797236 GN=queC PE=3 SV=1
MKKAVVILSGGLDSTTCMGIARAEGYELLALTFDYGQRHKIELESARKVAEHYGVKDHRVVKLDFLRDIGGSALTSDELSVPTEGLTDEIPITYVPGRNLLFLSIASSYAEVVDADAIFMGVNALDYSGYPDCRPEFIESVQTAIERGTKKGVEGHQTVIEIPLVHWTKAEIIRRGMELEVPYELTTSCYQGAAEACGTCDSCRLRLKGFAEAGYTDPIPYKSEEQ

SEQ ID NO: 35817 - protein, 231 aa, Alicyclobacillus tengchongensis
  misc_feature (1)..(231): tr|A0A0V0PT98|A0A0V0PT98_9BACL 7-cyano-7-deazaguanine s ynthase OS=Alicyclobacillus tengchongensis OX=368812 GN =queC PE=3 SV=1
MGRIGVAKAVVILSGGLDSTTCMGIAQHAGYELFPITFDYGQRHRIELECAKKVAAHYGVRDHRIVSLDFLRQIGGSALTDDAIEVPTSGVSRDIPVTYVPGRNLLFLSIAASYAEVIEATAIYIGVNALDYSGYPDCRPEFIEGVQHVLRIGTKAGVEGRSMQIETPLLHWSKAEIIRNGLALRVPYELTTSCYQGGEEACGECDSCRLRLKGFAEAGARDPIPYRVSVG

SEQ ID NO: 35818 - protein, 229 aa, Alicyclobacillus vulcanalis
  misc_feature (1)..(229): tr|A0A1N7K225|A0A1N7K225_9BACL 7-cyano-7-deazaguanine s ynthase OS=Alicyclobacillus vulcanalis OX=252246 GN=que C PE=3 SV=1
MAKAVVILSGGLDSATCMGIARAAGYELCPITFDYGQRHRIELESAKKVAAFYGVKDHRIVSIDFLREIGGSALTDTSIDVPTEGVSRDIPVTYVPGRNLLFLAIAASYAEVIGAEAIYIGVNALDYSGYPDCRPEFIEGVEHVLRIGTKAGVEGRPIRIETPLLHWTKGEIVRKGLELGVPYELTTSCYQGGDVACGECDSCRLRLKGFAEAGARDPIPYRPGVNDAP

SEQ ID NO: 35819 - protein, 221 aa, Aliidiomarina haloalkalitolerans
  misc_feature (1)..(221): tr|A0A432VZM8|A0A432VZM8_9GAMM 7-cyano-7-deazaguanine s ynthase OS=Aliidiomarina haloalkalitolerans OX=859059 G N=queC PE=3 SV=1
MKKAVVIYSGGMDSFTVLHRAIADGFEVYPLSFHYGQRHSKELDCAAAVCEQLGLAHKLVDIRSINTLLAGSALTDDIEVPAADYAEGNMKATVVPNRNMILLSLAIGYAVSIDADEVYYGAHSGDHDIYPDCRPEFVEAMNQVSQLANYKAIPVRSPYLYNSKAEILADGLSMGLDYSQTWTCYNGREFACGNCSACRERLGAFAAHQLTDPLRYEEQAN

SEQ ID NO: 35820 - protein, 232 aa, Aliidiomarina iranensis
  misc_feature (1)..(232): tr|A0A432VXC6|A0A432VXC6_9GAMM 7-cyano-7-deazaguanine s ynthase OS=Aliidiomarina iranensis OX=1434071 GN=queC P E=3 SV=1
MQPTPASSNQPAAKCKRAVVIYSGGMDSFTVLNRAIADGCQVAALSFNYGQRHSKELDYAAKVCEKLKIEHKIVDIRAINSLLAGSSLTSDIAVPNADYAESNMQSTVVPNRNMILLSLAIGYAVSIDADEVYYGAHAGDHDIYPDCRPEFVEAMNTVSQLANYKAIPVHSPYLHNTKGDILADGIRMNLDYADTWTCYNGREHACGKCSACRERLAAFAAHGITDPLTYEE

SEQ ID NO: 35821 - protein, 227 aa, Aliidiomarina maris
  misc_feature (1)..(227): tr|A0A327WPM4|A0A327WPM4_9GAMM 7-cyano-7-deazaguanine s ynthase OS=Aliidiomarina maris OX=531312 GN=queC PE=3 S V=1
MAQNSTENNKVVVIYSGGMDSFTVLHRALEDGYDVHAVSFHYGQRHHRELESARQVCEQLGIAHKIVDIRAINTLLAGSSLTDDIEVPEGDYANTNMTSTVVPNRNMILLSLAIGYAVSIKASKVYYGAHSGDHDIYPDCRPEFVDAMNAVSQIANYEPIEVHSPYLQQSKADILGDGLRMGLDYSQTWTCYNGRDKACGRCSACRERLAAFASHAVSDPLAYESAQ

SEQ ID NO: 35822 - protein, 226 aa, Aliidiomarina minuta
  misc_feature (1)..(226): tr|A0A432WA78|A0A432WA78_9GAMM 7-cyano-7-deazaguanine s ynthase OS=Aliidiomarina minuta OX=880057 GN=queC PE=3 SV=1
MVQKTKQEKVVVIYSGGMDSFTVLNRALADGYQVFAVSFHYGQRHHRELEVASEACKKLGVEHKVVDIRNINQLLAGSSLTDDIDIPDAEYATSNMTSTVVPNRNMILLSLAIGYAVSIKANKVYYGAHSGDHDIYPDCRPEFVEAMNHVSQIANYDAVSIHSPYLQQSKADILADGIKMGLDYSQTWTCYNGRDKACGRCSACRERLAAFASHGLSDPLEYEAAE

SEQ ID NO: 35823 - protein, 220 aa, Aliidiomarina sanyensis
  misc_feature (1)..(220): tr|A0A432WEM9|A0A432WEM9_9GAMM 7-cyano-7-deazaguanine s ynthase OS=Aliidiomarina sanyensis OX=1249555 GN=queC P E=3 SV=1
MEQKTAVVIYSGGMDSFTVLNRAIADGYRVFALSFHYGQRHSKELEYAANVCENLGINHKVVDIRAINSLLAGSSLTDDIDVPNAAYATENMTSTVVPNRNMILLSLAIGYAVSIDADEVLYGAHSGDHDIYPDCRPEFVEAMNQVSLIANYKPIPVRSPYLYQSKNDILADGLSLGLDYSQTWTCYNGRERACGTCSACRERLQAFASLGTHDPLPYEN

SEQ ID NO: 35824 - protein, 231 aa, Aliidiomarina shirensis
  misc_feature (1)..(231): tr|A0A432WY85|A0A432WY85_9GAMM 7-cyano-7-deazaguanine s ynthase OS=Aliidiomarina shirensis OX=1048642 GN=queC P E=3 SV=1
MKQPAANNEQPTASNIAVVIYSGGMDSFTVLNRAIVDGFNVHALSFNYGQRHSKELDYAANVCEKLGIPHKIVDIRAINSLLAGSSLTSDIDVPDAEYAEANMQSTVVPNRNMILLSLAIGYAVSINADEVYYGAHAGDHDIYPDCRPEFVEAMNTVSQLANYKAIPVRSPYLHSSKGDILADGMRMNLDYANTWTCYNGRERACGKCSACRERLAAFAAHGLTDPINYEV

SEQ ID NO: 35825 - protein, 230 aa, Aliidiomarina soli
  misc_feature (1)..(230): tr|A0A432WL98|A0A432WL98_9GAMM 7-cyano-7-deazaguanine s ynthase OS=Aliidiomarina soli OX=1928574 GN=queC PE=3 S V=1
MMAQNSNPATKPQQQTVVVIYSGGMDSFTVLNRAIADGHQVHAVSFHYGQRHHRELESAKTVCAQLGVPHKVVDIRSINTLLAGSSLTDDIDIPEGDYATSNMTSTVVPNRNMILLSLAIGYAVSIKAGKVYYGAHSGDHDIYPDCRPEFVEAMNAVSQLANYEPVEIHSPYLVQSKADILADGLRMGLDYSQTWTCYNGRDKACGKCSACRERLAAFAAHGITDPLEYE

SEQ ID NO: 35826 - protein, 221 aa, Aliidiomarina sp.
  misc_feature (1)..(221): tr|A0A552X362|A0A552X362_9GAMM 7-cyano-7-deazaguanine s ynthase OS=Aliidiomarina sp. IM1326 OX=2593535 GN=queC PE=3 SV=1
MGQKSAVVIYSGGMDSFTVLNRAIADGLTVHALSFHYGQRHSKELDYAANVCEKLGISHKVVDIRAINTLLAGSALTSDIDVPDAEYAEGNMKATVVPNRNMILLSLAIGYAVSIDADEVYYGAHSGDHDIYPDCRPVFVEAMNQVSQLANYKPIPVVSPYLYQSKIDILRDGLSLGLDYSQTWTCYNGREKACGKCSACRERLQAFAALGLTDPLPYENA

SEQ ID NO: 35827 - protein, 218 aa, Aliiglaciecola lipolytica
  misc_feature (1)..(218): tr|K6YRK0|K6YRK0_9ALTE 7-cyano-7-deazaguanine synthase OS=Aliiglaciecola lipolytica E3 OX=1127673 GN=queC1 PE= 3 SV=1
MSQKVVVIFSGGMDSYTVLNKALREGYEVYALSFDYGQRHNKELTYAANACKELNVAHKIVDISAINELIGGSSLTSDIDVPEGHYEQDSMKQTVVPNRNMILLSMAVGYAVSLEAKKVFYGAHSGDHAIYPDCRPEFVHKMNDVCAIANYEAVEIACPYLDVSKIDILTDGLKMGLDYGKTWTCYNGREKACGKCGACQERLEAFAKNQATDPLAYE

SEQ ID NO: 35828 - protein, 219 aa, Aliiglaciecola sp.
  misc_feature (1)..(219): tr|A0A553L1G6|A0A553L1G6_9ALTE 7-cyano-7-deazaguanine s ynthase OS=Aliiglaciecola sp. M165 OX=2593649 GN=queC P E=3 SV=1
MSQKVVVIFSGGMDSFTVLNKVVREHNDVYALSFNYGQRHSKELDYAAKVCNELGVHHKIIDISAINELIGGSSLTADIDVPEGHYEQESMKQTVVPNRNMILLSMAVGYAVSLQANKVYYGAHSGDHAIYPDCRPEFVHRMNDVCAIANYEAVEIACPYLNVSKIDILTDGLIMGLDYGKTWTCYNGREKACGKCGACQERLEAFEHNGVTDPLSYEE

SEQ ID NO: 35829 - protein, 231 aa, Aliikangiella marina
  misc_feature (1)..(231): tr|A0A545TD19|A0A545TD19_9GAMM 7-cyano-7-deazaguanine s ynthase OS=Aliikangiella marina OX=1712262 GN=queC PE=3 SV=1
MSDKNTPKAIVLLSGGLDSSTCLAIAQSKGFDVYALSFSYGQKHSSELEAAKRVANLSQVSEHRIINLDLGGFGGSALTDEGIEVPTENDPDNSDEIPATYVPARNTVFLSIALAWAEVLEAEKIFAGVNAVDYSGYPDCRPEYIEAFQKMADLATKAGIEGTGVKIETPLINLTKPKIIQLGLSLAVDYSQTVSCYQADEHGLACGQCDSCLIRKAAFESAGIADPTRYR

SEQ ID NO: 35830 - protein, 225 aa, Aliikangiella sp.
  misc_feature (1)..(225): tr|A0A545UBW1|A0A545UBW1_9GAMM 7-cyano-7-deazaguanine s ynthase OS=Aliikangiella sp. M105 OX=2592383 GN=queC PE =3 SV=1
MSKKKAIILLSGGLDSTTCLAIAQSENYDCYALSFRYGQKHSSELEAAQRIAKNAKVKLHKIIDLNLGSFGGSALTDDSIEVPKGGTEGIPVTYVPARNTVFLSIALAWAEVLEADFIFAGVNAVDYSGYPDCRPEYIDAFQKMADLATKAGIEGRGVKLITPLIDLTKVEIIQRGHSLGVDYSQTVSCYDADVDGKACGECDSCLIRKNAFESAQVSDPTIYHS

SEQ ID NO: 35831 - protein, 227 aa, Aliivibrio finisterrensis
  misc_feature (1)..(227): tr|A0A4V1Z924|A0A4V1Z924_9GAMM 7-cyano-7-deazaguanine s ynthase OS=Aliivibrio finisterrensis OX=511998 GN=queC PE=3 SV=1
MSTAIVVFSGGQDSTTCLIQALTQYDNVHCITFDYGQRHNQEIEVAKKVALELGAASHKVMDVGLLNELAVSSLTRDNIPVSHELQENGLPNSFVPGRNILFLTLAGIYAYQLGAESVITGVCETDFSGYPDCRDEFVKSINQSLVLGMDRKLRIDTPLMWLNKAETWALADKYGKLDYVRSQTLTCYNGVIGDGCGDCPSCDLRKNGLDEYLENKDAVMADLNAKL

SEQ ID NO: 35832 - protein, 227 aa, Aliivibrio finisterrensis
  misc_feature (1)..(227): tr|A0A4Q5KI08|A0A4Q5KI08_9GAMM 7-cyano-7-deazaguanine s ynthase OS=Aliivibrio finisterrensis OX=511998 GN=queC PE=3 SV=1
MSTAIIVFSGGQDSTTCLIQALTQYDNVHCITFDYGQRHNQEIEVAKKVALELGAASHKVMDVGLLNELAVSSLTRDNIPVSHELQENGLPNSFVPGRNILFLTLAGIYAYQLGAESVITGVCETDFSGYPDCRDEFVKSINQSLVLGMDRKLRIDTPLMWLNKAETWALADKYGKLDYVRSQTLTCYNGVIGDGCGDCPSCDLRKNGLDEYLENKDAVMADLNAKL

SEQ ID NO: 35833 - protein, 227 aa, Aliivibrio fischeri
  misc_feature (1)..(227): sp|Q5E4H1|QUEC_ALIF1 7-cyano-7-deazaguanine synthase OS =Aliivibrio fischeri (strain ATCC 700601 / ES114) OX=31 2309 GN=queC PE=3 SV=1
MSTAIVVFSGGQDSTTCLIQALTQYDHVHCITFDYGQRHNQEIEVAKKVSIELGAASHKVMDVGLLNELAVSSLTRDNIPVSHELQENGLPNSFVPGRNILFLTLAGIYAYQLGAEAVITGVCETDFSGYPDCRDEFVKSINQSLVLGMDRQLEIKTPLMWLNKAETWALADKYGKLDYVRNHTLTCYNGVIGDGCGDCPSCDLRKNGLDAYLENKEPVMADLESKL

SEQ ID NO: 35834 - protein, 227 aa, Aliivibrio fischeri
  misc_feature (1)..(227): sp|B5FF08|QUEC_ALIFM 7-cyano-7-deazaguanine synthase OS =Aliivibrio fischeri (strain MJ11) OX=388396 GN=queC PE =3 SV=1
MSTAIVVFSGGQDSTTCLIQALTQYDHVHCITFDYGQRHNQEIEVAKKVAIELGAASHKVMDVGLLNELAVSSLTRDNIPVSHELQENGLPNSFVPGRNILFLTLAGIYAYQLGAEAVLTGVCETDFSGYPDCRDEFVKSINQSLVLGMDRQLEIKTPLMWLNKAETWALADKYGKLDYVRNHTLTCYNGVIGDGCGDCPSCDLRKNGLDAYLENKESVMADLESKL

SEQ ID NO: 35835 - protein, 227 aa, Aliivibrio logei
  misc_feature (1)..(227): tr|A0A1B9NUH1|A0A1B9NUH1_ALILO 7-cyano-7-deazaguanine s ynthase OS=Aliivibrio logei OX=688 GN=queC PE=3 SV=1
MSTAIVVFSGGQDSTTCLIQALTHYDHVHCITFDYGQRHNQEIEVAKSVALDLGATSHKVMDVGLLNELAVSSLTRDNIPVSHELQENGLPNSFVPGRNILFLTLAGIYAYQLGAESVITGVCETDFSGYPDCRDEFVKSINQSLVLGMDRKLKIDTPLMWLNKAETWALADKYGKLDYVRNQTLTCYNGVIGDGCGDCPSCDLRKNGLDDYLANKESVMADLESKI

SEQ ID NO: 35836 - protein, 227 aa, Aliivibrio salmonicida; identical to SEQ ID NO: 35835
  misc_feature (1)..(227): sp|B6EH68|QUEC_ALISL 7-cyano-7-deazaguanine synthase OS =Aliivibrio salmonicida (strain LFI1238) OX=316275 GN=q ueC PE=3 SV=1

SEQ ID NO: 35837 - protein, 227 aa, Aliivibrio sifiae
  misc_feature (1)..(227): tr|A0A2S7XHI1|A0A2S7XHI1_9GAMM 7-cyano-7-deazaguanine s ynthase OS=Aliivibrio sifiae OX=566293 GN=queC PE=3 SV= 1
MSTAIVVFSGGQDSTTCLIQALTQYDHVHCITFDYGQRHNQEIEVAKKVALELGAASHKVMDVGLLNELAVSSLTRDNIPVSHELQENGLPNSFVPGRNILFLTLAGIYAYQLGAESVITGVCETDFSGYPDCRDEFVKSINQSLVLGMDRKLRIDTPLMWLNKAETWALADKYGKLDYVRNQTLTCYNGVIGDGCGDCPSCDLRKNGLDDYLDNKDAVMVDLISKI

SEQ ID NO: 35838 - protein, 227 aa, Aliivibrio sifiae
  misc_feature (1)..(227): tr|A0A2S7XDN3|A0A2S7XDN3_9GAMM 7-cyano-7-deazaguanine s ynthase OS=Aliivibrio sifiae OX=566293 GN=queC PE=3 SV= 1
MSTAIVVFSGGQDSTTCLIQALTQYDHVHCITFDYDQRHNQEIEVAKKVALELGAASHKIMDVGLLNELAVSSLTRDNIPVSHELQANGLPNSFVPGRNILFLTLAGIYAYQLGAESVITGVCETDFSGYPDCRDEFVKSINQSLVLGMDRKLKIDTPLMWLNKAETWALADKYGKLNYVRNQTLTCYNGVIGDGCGDCPSCDLRKNGLDEYLENKDAVMADLISKI

SEQ ID NO: 35839 - protein, 227 aa, Aliivibrio sp.
  misc_feature (1)..(227): tr|A0A1B9PKF7|A0A1B9PKF7_9GAMM 7-cyano-7-deazaguanine s ynthase OS=Aliivibrio sp. 1S175 OX=1840087 GN=queC PE=3 SV=1
MSTAIVVFSGGQDSTTCLIQALTQYEHVHCITFDYGQRHNQEIEVAKKVALELGAASHKVMDVGLLNELAASSLTRDNIPVSHELQENGLPNSFVPGRNILFLTLAGIYAYQLGAESVITGVCETDFSGYPDCRDEFVKSINQSLVLGMDRKLRIDTPLMWLNKAETWALADKYGKLDYVRNQTLTCYNGVIGDGCGDCPSCDLRKNGLDDYLENKDAVMADLNSKI

SEQ ID NO: 35840 - protein, 227 aa, Aliivibrio wodanis
  misc_feature (1)..(227): tr|A0A090KJN0|A0A090KJN0_9GAMM 7-cyano-7-deazaguanine s ynthase OS=Aliivibrio wodanis OX=80852 GN=queC PE=3 SV= 1
MSTAIVVFSGGQDSTTCLIQALTQYDHVHCITFDYGQRHNQEIEVAKKVALELGAASHKVMDVGLLNELAASSLTRDNIPVSHELQENGLPNSFVPGRNILFLTLAGIYAYQLGAESVITGVCETDFSGYPDCRDEFVKSINQSLVLGMDRKLRIDTPLMWLNKAETWALADKYGKLDYVRNHTLTCYNGVIGDGCGDCPSCELRQNGLDTYINNKLDTMNELHKKN

SEQ ID NO: 35841 - protein, 218 aa, Alishewanella aestuarii
  misc_feature (1)..(218): tr|J1PYK9|J1PYK9_9ALTE 7-cyano-7-deazaguanine synthase OS=Alishewanella aestuarii B11 OX=1197174 GN=queC PE=3 SV=1
MTQKVVVIYSGGMDSYTVLHRALRDGHDVYALSFNYGQRHVKELKCAEQVCRELGVKHKIVDISAINQLLSGSSLTSDIEVPEGHYAADNMKSTVVPNRNMILLSLAVGYADSIGARAVYYGAHSGDHFIYPDCRPEFVQKMNDVCQIANYQPVDIVSPYLHQTKIEILKDGLAMGLDYSKTWTCYNGREKACGKCGSCQERLEAFALNQATDPLQYE

SEQ ID NO: 35842 - protein, 218 aa, Alishewanella agri
  misc_feature (1)..(218): tr|I8UDR3|I8UDR3_9ALTE 7-cyano-7-deazaguanine synthase OS=Alishewanella agri BL06 OX=1195246 GN=queC PE=3 SV=1
MTQKVVVIYSGGMDSYTVLHKALRDGHDVYALSFNYGQRHVKELKCAEQVCAELGVKHKIVDISAINQLLSGSSLTSDIEVPEGHYAADNMKSTVVPNRNMILLALAVGYADSIGARAVYYGAHSGDHFIYPDCRPEFVQKMNDVCQIANYEPVDIVSPYLAQTKIEILRDGLAMGLDYSKTWTCYNGREKACGKCGSCQERLEAFALNQAVDPLSYE

SEQ ID NO: 35843 - protein, 218 aa, Alishewanella jeotgali; identical to SEQ ID NO: 35841
  misc_feature (1)..(218): tr|H3ZJE5|H3ZJE5_9ALTE 7-cyano-7-deazaguanine synthase OS=Alishewanella jeotgali KCTC 22429 OX=1129374 GN=queC PE=3 SV=1

SEQ ID NO: 35844 - protein, 218 aa, Alishewanella sp.; identical to SEQ ID NO: 35841
  misc_feature (1)..(218): tr|A0A1C2C2P6|A0A1C2C2P6_9ALTE 7-cyano-7-deazaguanine s ynthase OS=Alishewanella sp. HH-ZS OX=1856684 GN=queC P E=3 SV=1

SEQ ID NO: 35845 - protein, 218 aa, Alishewanella sp.
  misc_feature (1)..(218): tr|A0A259P1V4|A0A259P1V4_9ALTE 7-cyano-7-deazaguanine s ynthase OS=Alishewanella sp. 34-51-39 OX=1970316 GN=que C PE=3 SV=1
MTQKVVVIYSGGMDSYTVLHKALRDGHDVYALSFNYGQRHVKELKCAEQVCAELGVKHKIVDISAINQLLSGSSLTSDIEVPEGHYAADNMKSTVVPNRNMILLALAVGYADSIGARAVYYGAHSGDHFIYPDCRPEFVQKMNDVCQIANYEPVDIVSPYLAQTKIEILKDGLAMGLDYSKTWTCYNGREKACGKCGSCQERLEAFALNQAVDPLSYE

SEQ ID NO: 35846 - protein, 218 aa, Alistipes onderdonkii
  misc_feature (1)..(218): tr|A0A4Q5INP5|A0A4Q5INP5_9BACT 7-cyano-7-deazaguanine s ynthase OS=Alistipes onderdonkii OX=328813 GN=queC PE=3 SV=1
MKDSVIIVSGGMDSITLLHEKVEEIALAVTFDYGSNHNKREAECAARHCQQLGIEHIIIPLAFIGQYFKSSLLEGADAVPEGHYEAENMKSTVVPFRNGIMLSVACGLAESRKLSKVLIANHGGDHAIYPDCRAGFVHSMSEAMRHGTYIGVQIDAPYTGIRKSDIARIGKRLGLDYSTTYSCYKGGEKHCGKCGTCVERKEALRDAEIEDTTEYETE

SEQ ID NO: 35847 - protein, 218 aa, Alistipes putredinis; identical to SEQ ID NO: 35846
  misc_feature (1)..(218): tr|B0MZU1|B0MZU1_9BACT 7-cyano-7-deazaguanine synthase OS=Alistipes putredinis DSM 17216 OX=445970 GN=queC PE= 3 SV=1

SEQ ID NO: 35848 - protein, 218 aa, Alistipes sp.
  misc_feature (1)..(218): tr|A0A374AIC0|A0A374AIC0_9BACT 7-cyano-7-deazaguanine s ynthase OS=Alistipes sp. AF14-19 OX=2292910 GN=queC PE= 3 SV=1
MKDSVIIVSGGMDSITLLHEKVEEIALAVTFDYGSNHNKREAECAARHCQQLGIEHIIIPLAFIGQYFKSSLLEGADAVPEGHYEAENMKSTVVPFRNGIMLSVACGLAESRKLSKVLIANHGGDHAIYPDCRSEFIRTMAAAMRFGTYEHVGISAPYTGISKSDIARIGKRLGLDYSTTYSCYKGGEKHCGKCGTCVERKEALRDAGIEDTTEYETE

SEQ ID NO: 35849 - protein, 225 aa, Aliterella atlantica
  misc_feature (1)..(225): tr|A0A0D8ZRR3|A0A0D8ZRR3_9CYAN 7-cyano-7-deazaguanine s ynthase OS=Aliterella atlantica CENA595 OX=1618023 GN=q ueC PE=3 SV=1
MKAVVLLSGGLDSATVLYSAIASGDECYALSFDYQQRHQKELESAIAIAQSAGVIDRKIVSFDLRSWGGSALTDDKIDLPQERSLAQMSADIPVTYVPARNTIFLSFALAYAETIDAGRVYIGVNALDYSGYPDCRLDYIQAMQEVFRLGTKQGREGEAIKIVTPLIDLKKTEIIQLGNKLGVPWEKTWSCYAGGDKACGVCDSCQLRLAAFKELGLQDPVAYIC

SEQ ID NO: 35850 - protein, 218 aa, Alkalibacillus haloalkaliphilus
  misc_feature (1)..(218): tr|A0A511W325|A0A511W325_9BACI 7-cyano-7-deazaguanine s ynthase OS=Alkalibacillus haloalkaliphilus OX=94136 GN= queC PE=3 SV=1
MKNEKALVVFSGGQDSTTCLFWALENFKEVETVTFDYNQRHDLEIEVAQEIAKELGVNNRVLDMSLISQLSANALTRDDIEIEEKDGELPSTFVEGRNHLFLSFAAVLGKQIGAKHIITGVSETDFSGYPDCRDGFIKSLNVTLNLSMDDQFVIHTPLMWRDKKEVWQLSDELGALDFVQNRTLTCYNGVMAEGCGECPACQLRREGLDAYLTEKGVS

SEQ ID NO: 35851 - protein, 218 aa, Alkalicoccus halolimnae
  misc_feature (1)..(218): tr|A0A5C7F065|A0A5C7F065_9BACI 7-cyano-7-deazaguanine s ynthase OS=Alkalicoccus halolimnae OX=1667239 GN=queC P E=3 SV=1
MLKEEKAVVVFSGGQDSTTCLLWALDRFAEVETVTFNYNQRHSREIDVAEKIAADFGVKHTVLDMSLLNQLAPNALTRSDIEIEQKEGEPPSTFVEGRNLLFLSFAAIQGKQHGARHIITGVCETDFSGYPDCRDAFVKSLNVTLNLAMDYEFVLHTPLMWLDKAETWKLADELHGLDYVRNNTLTCYNGILADGCGECPACILRHNGLQTYLQRKET

SEQ ID NO: 35852 - protein, 218 aa, Alkalicoccus saliphilus
  misc_feature (1)..(218): tr|A0A2T4UA07|A0A2T4UA07_9BACI 7-cyano-7-deazaguanine s ynthase OS=Alkalicoccus saliphilus OX=200989 GN=queC PE =3 SV=1
MREKEKAVVVFSGGQDSTTCLLWALKQFDEVETVTFNYNQRHHKEIEVAQSVAEKLGVKNTVLDMSLLNQLAPNALTRDDINIEQKEGELPTTFVDGRNHLFFSFAAIYGKQISARHIITGVCETDFSGYPDCRDVFVKSLNVTLNLSMDYNFVFHTPLMWLDKAETWELADKLDGLEFVRRETLTCYNGIIADGCGECPACELRRNGLENYKARKEG

SEQ ID NO: 35853 - protein, 238 aa, Alkalilimnicola ehrlichii
  misc_feature (1)..(238): sp|Q0A550|QUEC_ALKEH 7-cyano-7-deazaguanine synthase OS =Alkalilimnicola ehrlichii (strain ATCC BAA-1101 / DSM 17681 / MLHE-1) OX=187272 GN=queC PE=3 SV=1
MSETADTNQTAVVLFSGGQDSTTCLAWALARYHRVHTVAFDYGQRHRVELACRQRVREAIGQHFAGWGARLGEDHLLDLTSLGEISDTSLTRERAIEIRDSGLPDTFVPGRNLLFLTYAAALAWRLQARHLITGVCETDYSGYPDCRDDTIKALQVALNLGMDSHFVLHTPLMWRDKAQTWALAETLGGADLVELIAEHTHTCYLGDRTQRHDWGYGCGECPACRLRAQGWRRHRGLC

SEQ ID NO: 35854 - protein, 231 aa, Alkalilimnicola ehrlichii
  misc_feature (1)..(231): tr|A0A3E0X3V3|A0A3E0X3V3_9GAMM 7-cyano-7-deazaguanine s ynthase OS=Alkalilimnicola ehrlichii OX=351052 GN=queC PE=3 SV=1
MSKPRAVILLSGGLDSATVLAIARSQGFDCYALSFDYGQRHKAELDACRRIASDLGAVEHRVLSIGLGEFGGSALTDLDLAVPDKQEPGIPITYVPARNTVFLSLALGYAEVIGAWDIFIGVNAVDYSGYPDCRPAFIKAFEQMANVATKAAVEGEEQLHVRAPLMDLSKADIIRMGARLGVDYGLTVSCYQADEAGRACGICDSCRLRAEGFRAARIADPTPYQKKNTKS

SEQ ID NO: 35855 - protein, 219 aa, Alkalimonas amylolytica
  misc_feature (1)..(219): tr|A0A1H4B692|A0A1H4B692_ALKAM 7-cyano-7-deazaguanine s ynthase OS=Alkalimonas amylolytica OX=152573 GN=queC PE =3 SV=1
MMPQKVVVIYSGGMDSYTVLHKAIADGHDVYALSFNYGQRHVKELECAAQVCRELGINHKVVDISAINQLLAGSSLTDNIEVPEGHYEAENMKSTIVPNRNMILISLAVGYADSIKAKAVYYGAHSGDHFIYPDCRPEFVEKMNAVCQIANYDPIDIVSPYLHESKIEILRDGLAMGLDYSKTWTCYNGRELACGKCGACQERLEAFALNKAKDPLPYE

SEQ ID NO: 35856 - protein, 476 aa, Alkalinema sp.
  misc_feature (1)..(476): tr|A0A251W9S9|A0A251W9S9_9CYAN Uncharacterized protein OS=Alkalinema sp. CACIAM 70d OX=1934309 GN=B0A82_23080 PE=4 SV=1
MERQSKQTSDFTLLFESVMSSGGNICLYDHSRNKESNVRIAVDDSAFSCRIQKEFPSIIADLIDLAVAIHAADRLTFQSLRQQQTQIHVVLPIRHPEILNQSSFQDKLSSLLGWATGSRWIFEFSQRVDLGRVVEQQPLLTSSDPYINEVVLWSGGLDALAGLYTRLKENHQISFMLFGTGSNDNSYARQGQIFQALLPSFPNRLNLCRVPIRFSESNLHIKNKISRARGIVFTLLGSACAYLMGQQVLHLYENGIGAVNLPYRKSAVGLDHSRSVHPLTLLRVSDLVSELVGEGFRVQNPFLFWTKAEMCQQLAKDMKYDLPALTISCDSPHRKQPIQCGYCSSCILRKQALAASRVEDQTYYIVPHNDRPVSDIRLYLQNMLTQVSTLKGLLNCSENAISQWESLTRRFPSLDDIVDRTHGIEGLTPPEMRKNLIRLYQTYVLEWDAVEPQILGDFLSQVIDQPIIQDFQMAIQ

SEQ ID NO: 35857 - protein, 232 aa, Alkalinema sp.
  misc_feature (1)..(232): tr|A0A251WA49|A0A251WA49_9CYAN 7-cyano-7-deazaguanine s ynthase OS=Alkalinema sp. CACIAM 70d OX=1934309 GN=queC PE=3 SV=1
MKKAVVLLSGGLDSATSAAQAIADGYEVIALSLYYGQRHDRELQAARDIVAALKLSEHFILDVNLSQWGGSALTDRQIEIPTEGVQSDVIPSTYVPGRNTVFIAIALSLAEAKQAEAIYLGINAVDYSGYPDCRPDYLAAFEQLAQLSSKAGLEGHAPRLVAPLVLDSKVDIVHRAVKLGVPIAQTWSCYQGGSEPCGLCDSCRIRDKALIDAGYPDLATGLGRQLNHQEAR

SEQ ID NO: 35858 - protein, 230 aa, Alkaliphilus peptidifermentans
  misc_feature (1)..(230): tr|A0A1G5KKJ5|A0A1G5KKJ5_9CLOT 7-cyano-7-deazaguanine s ynthase OS=Alkaliphilus peptidifermentans DSM 18978 OX= 1120976 GN=queC PE=3 SV=1
MREAKGMIKNMKKAVILLSGGLDSTTCMAIAQQEGYQLYPISFDYKQRHNRELALAKEIATYFQSSDHKIIAIENVGGSALTDESIDLPTYQETNDIPITYVPARNIIFLSYALGYAEVIGAEAIFIGVSSIDYSGYPDCRPEFIKAFQKVVDVGTAAGVKGNSIEIKTPLINLSKKETIQLGYKYGAPYHLTTSCYNGKEKACGVCDSCVLRLKGFNEAGIIDPILYEE

SEQ ID NO: 35859 - protein, 238 aa, Alkalispirillum mobile
  misc_feature (1)..(238): tr|A0A498BSY9|A0A498BSY9_9GAMM 7-cyano-7-deazaguanine s ynthase OS=Alkalispirillum mobile OX=85925 GN=queC PE=3 SV=1
MVTETDKASSAVVLFSGGQDSTTCLAWALARYPRVHTVGFDYGQRHHVELDCRQRVREAVAERFPDWGERLGEDHLLDLTSLGRISDTSLTRERAIHMQQNGLPDTFVPGRNLLFLTYAAALAWRLQARYLVTGVCETDFSGYPDCRDDTIKALQVALNLGMDSRFVLHTPLMWRDKAQTWALAEALGGDPLVELIVSHTHTCYLGDRAHYHDWGYGCGTCPACELRAEGWARYLIGS

SEQ ID NO: 35860 - protein, 228 aa, Alkalitalea saponilacus
  misc_feature (1)..(228): tr|A0A1T5H8Y7|A0A1T5H8Y7_9BACT 7-cyano-7-deazaguanine s ynthase OS=Alkalitalea saponilacus OX=889453 GN=queC PE =3 SV=1
MKRAVILLSGGLDSAVTLWLAKSEGYELFTLSFDYGQRHKKELEAAAEITKVAGVKEHRLVTINMDQWGGSSLTDKNMEVEDGDVNRTDIPVTYVPARNMVFLSIAASYAEAIDAQNIFIGVSQVDYSGYVDCRESFIKAMENAINQGTVMAAEKNRPITIHAPFIYKTKTEEIKTGAKLGVPFGLTWSCYRGGEKPCGTCDSCLLRAKAFQEAGVVDEGITETGERK

SEQ ID NO: 35861 - protein, 256 aa, Alkanindiges illinoisensis
  misc_feature (1)..(256): tr|A0A4Y7XHL8|A0A4Y7XHL8_9GAMM 7-cyano-7-deazaguanine s ynthase OS=Alkanindiges illinoisensis OX=197183 GN=queC PE=3 SV=1
MTQSSSDNSNPHISQLAAQKPRAIVLLSGGLDSTTCLAWAQARYECFALSFSYGQRHSSELDAARALAQRAGVEHRIIDIDLRQLGGSALTDDSIAVPQDCEIESQSENYRQNQPGAIPVTYVPARNTIFLSYALAAAEVKNASAIVIGVNAVDYSGYPDCRPEYIDAFAKMAALATKAGVEGNPITIETPLLHLTKAAIIQLGLEHGVDYAQTISCYQADDNGYACGRCDSCRLRRQGFIDAGVEDPTLYQAVIN

SEQ ID NO: 35862 - protein, 242 aa, Alkanindiges sp.
  misc_feature (1)..(242): tr|A0A1S8CZ25|A0A1S8CZ25_9GAMM 7-cyano-7-deazaguanine s ynthase OS=Alkanindiges sp. H1 OX=1907941 GN=queC PE=3 SV=1
MSNDNVSPASSQKPRAIVLLSGGLDSTTCLAWAQARYECFALSFSYGQRHSSELDAARALAKRAGVEHRIIDIDLRQLGGSALTDDSIDVPEDQSDELPGSIPVTYVPARNTIFLSYALAAAEVINASAIVIGINAVDYSGYPDCRPDYIDAFAKMAALATRAGVEGNPITIETPLLQLTKAAIIQLGLEHGVDYSQTISCYQADVNGYACGRCDSCRLRRQGFLDAGVKDPTLYQAATNQD

SEQ ID NO: 35863 - protein, 230 aa, Allisonella histaminiformans
  misc_feature (1)..(230): tr|A0A1G5WD81|A0A1G5WD81_9FIRM 7-cyano-7-deazaguanine s ynthase OS=Allisonella histaminiformans OX=209880 GN=qu eC PE=3 SV=1
MKKAIVLSSGGVDSTTCISVAVKELGADNVCTASIFYGQKHVKELEAARKVAEWFHVKHYEFDLSSILQYSNCALLAGSSEEIKHESYEDQVKESETGRVSTYVPFRNGLMLSVAASLAASLYEDEEVDIYIGAHADDAAGNAYADCSEPFLKAMEDAISIGTYGKVHLVFPFADKNKAGVVKTGLALGTPYELTWSCYEGGEKPCGTCGTCRDRAAAFEANGVKDPALD

SEQ ID NO: 35864 - protein, 282 aa, Alloactinosynnema album
  misc_feature (1)..(282): tr|A0A1H0LAB0|A0A1H0LAB0_9PSEU 7-cyano-7-deazaguanine s ynthase OS=Alloactinosynnema album OX=504798 GN=queC PE =3 SV=1
MRIDRPEHRHPDHTVVIASGGLDSTVLAYWLAARQSRLTLVSFDYGQRNRVELDHAAEIARLLDSPHRTIDLTNLGAMLTGSALTDASVAVPDGHYTVESMAAAVVPNHNAIMLYIAVEVAIAVGADAVAFGARAGNYAIYPDCRPEFGQRFARSVQTANEGLLVPGFQVLAPFLTLTKTDIVRVGEALAVPFARTWSCHLGHELHCGTCEWCTERQEAFRDNGLTDPTLYRGRVEGELTVMDKKPAVSGPERGGLSSGHSSRVSSGERGVGTSVLSGWVWL

SEQ ID NO: 35865 - protein, 234 aa, Alloactinosynnema sp.
  misc_feature (1)..(234): tr|A0A0H5CC57|A0A0H5CC57_9PSEU 7-cyano-7-deazaguanine s ynthase OS=Alloactinosynnema sp. L-07 OX=1653480 GN=que C PE=3 SV=1
MTIDHPEHRHPEHAVVIASGGLDSTVLAYWLAARHSRLTLVSFDYGQRHRVELDHAAEIARLLLSPHRIIDLTSLGALLTGSALTDTSVAVPDGHYTDESMAATVVPNRNAIMLDIAVAVAIAVRADAVVFGAHAGDHTIYPDCRPEFVERFARSVQAANEGLLVPGFQVLAPFLTLTKTDIVRVGEALAVPFARTWSCYRGREVHCGTCGTCTERQEAFRDNGIVDPTVYRAA

SEQ ID NO: 35866 - protein, 237 aa, Alloactinosynnema sp.
  misc_feature (1)..(237): tr|A0A0H5CC68|A0A0H5CC68_9PSEU Uncharacterized protein OS=Alloactinosynnema sp. L-07 OX=1653480 PE=4 SV=1
MTDTRVPEVLLFSAGLDSYPAWHYLGRPPGLYFDLDHRYARQERAAIAALADAAGIEVEISDELRLGAWEAEDAIIPLRNVHLAMLAANRAEVVWCIGVKGDHTLDKSREAFADMGRFIARFSEQPTRVDSPFWDMTKTEIIAWYLAQGLPLDHLLLTFSCSRTDGSTVHCGRCPSCLRRWTSLVNNGVEAEFEQQPWTWDRVREFYIPAMRDGRYPDHRAHEFFAALATVGAAMAS

SEQ ID NO: 35867 - protein, 232 aa, Allochromatium vinosum
  misc_feature (1)..(232): tr|D3RQ61|D3RQ61_ALLVD 7-cyano-7-deazaguanine synthase OS=Allochromatium vinosum (strain ATCC 17899 / DSM 180 / NBRC 103801 / NCIMB 10441 / D) OX=572477 GN=queC PE=3 SV=1
MKPAVVLLSGGLDSTTALAIARAEGFVPHALSFRYGQRHAVELEAAARVAESMGVTEHVIAEIDLRRFGGSALTADLAVPKGRDPREMESDIPVTYVPARNTVFLSFALAWAEVLEASDIFIGVNALDYSGYPDCRPEYIAAFEQLANLATAAGVEGRQRYRIHAPLIEMSKAEIIRTGLALGVDYGLTSSCYDPGSGGRPCGACDSCQLRAKGFAEAGVADPLLSGFEVSA

SEQ ID NO: 35868 - protein, 235 aa, Allochromatium warmingii
  misc_feature (1)..(235): tr|A0A1H3DAX0|A0A1H3DAX0_ALLWA 7-cyano-7-deazaguanine s ynthase OS=Allochromatium warmingii OX=61595 GN=queC PE =3 SV=1
MKPAVVLLSGGLDSTTVLALARAQGFTPYALSFRYGQRHAVELEAAARVAAALGVAEHVIAEIDLRRFGGSALTAELAVPKGRELSELSTASAAIPITYVPARNTVFLSFALAWAEVLDAADLFIGVNALDYSGYPDCRPDYIAAFETLANLATAAGVEGRQRYRIHAPLIEMSKAEIIRNGLALGVDYALTSSCYDPGPIGQPCGACDSCQLRAKGFAEAGVVDPLLARYETDL

SEQ ID NO: 35869 - protein, 238 aa, Allonocardiopsis opalescens
  misc_feature (1)..(238): tr|A0A2T0Q2J6|A0A2T0Q2J6_9ACTN 7-cyano-7-deazaguanine s ynthase OS=Allonocardiopsis opalescens OX=1144618 GN=qu eC PE=3 SV=1
MNGDKRKAVVLLSGGLDSTTVLAIARHEGYETHALSFRYGQRHTEELVAAEKVAAALGAARHVVVDINLAVFGGSALTDDTLAVPHHDSADQISTDEIPITYVPARNTVFLSFALAWAETLGSSDVFIGVNALDYSGYPDCRPEYIEAYERMANLATKAGVEGKQRLKIHTPLIELTKAQTIQRGLELGVDYSWTHSCYDPVDGRACQTCDSCLLRSRGFAELGLVDPSFSSTSSANI

SEQ ID NO: 35870 - protein, 231 aa, Alloprevotella rava
  misc_feature (1)..(231): tr|G5GA87|G5GA87_9BACT 7-cyano-7-deazaguanine synthase OS=Alloprevotella rava F0323 OX=679199 GN=queC PE=3 SV= 1
MNNDKVLVVFSGGQDSTTCLYWAKAHFKEVYALAFIYGQKHVLEVELAEKIAKEAGVHFDKMDVSFIGSLGKNSLTDTSLEMDQEKPADSFPNTFVPGRNMFFLSIAAVYARERGIFHLVTGVSQTDFSGYPDCRDSFIKSLNVTLNLAMDEQFVLHTPLMWLDKCQTWALSDELGVLDLVRHETLTCYNGIAGDGCGHCPSCKLRKHGLDSYLELKAAGKTPFDVMHPQE

SEQ ID NO: 35871 - protein, 218 aa, Alloprevotella sp.
  misc_feature (1)..(218): tr|A0A328PWA3|A0A328PWA3_9BACT 7-cyano-7-deazaguanine s ynthase OS=Alloprevotella sp. E39 OX=2133944 GN=queC PE =3 SV=1
MKRNKALVVFSGGQDSTTCLYWAKAHFDEVWALSLRYGQKHATEVEVAEKIAQKAGVHFEAKDAPLIGSLGANSLTNSDIVMDETQPEESFPNTFVPGRNMFFLAIAAVYAREHGIFDLVTGVSQTDFSGYPDCRDAFIRSLNVTINLAMDEQFVIHTPLMWLDKSETWALADSFGVLDLVRNETLTCYNGIPGDGCGHCPACKLRREGLEKYLKSKK

SEQ ID NO: 35872 - protein, 221 aa, Alloprevotella sp.
  misc_feature (1)..(221): tr|A0A496KMB3|A0A496KMB3_9BACT 7-cyano-7-deazaguanine s ynthase OS=Alloprevotella sp. OX=1872471 GN=queC PE=3 S V=1
MNNKALVVLSGGQDSTTCLFWALREFDEVFALGFTYGQKHAAEVELARTICAEQNVPFEVMDVPLLGQLGRNSLTDTSLTMDEHKPADAPPNTFVPGRNLFFLSIAAVYARERGIFHLVTGVGQTDFSGYPDCRDNFIKSLNVTLNLAMDEQFCIHTPLMWRDKAETWALADELGVLDLIRQRTLTCYNGVVGDGCGHCPACQLRHDGLQQYLLTKETNHK

SEQ ID NO: 35873 - protein, 226 aa, Alloprevotella tannerae
  misc_feature (1)..(226): tr|C9LKA9|C9LKA9_9BACT 7-cyano-7-deazaguanine synthase OS=Alloprevotella tannerae ATCC 51259 OX=626522 GN=queC PE=3 SV=1
MKLLNNERALVVFSGGQDSTTCLFWAKRQFKEVFALSFRYGQKHANEVELAECIAREAGVHFQSLEAPLIGQLGRNSLTDASLEMDAEQPEGSFPNTFVPGRNLFFLSIAAVYAREHDIRHLVTGVSQTDFSGYPDCRDSFMKSLNVTLNLAMDEQFVIHTPLMWRDKAATWALADELGVLDLVRNETLTCYNGVKGDGCGHCPACTLRRRGLEEYLALKDAAQKS

SEQ ID NO: 35874 - protein, 232 aa, Unknown
  misc_feature (1)..(232): tr|A0A1V1PMY1|A0A1V1PMY1_9PROT 7-cyano-7-deazaguanine s ynthase OS=alpha proteobacterium U9-1i OX=1605283 GN=qu eC PE=3 SV=1
MSDTALVLFSAGQDSATCLAWALERYHRVETIGFFYGQRHAVELAQRPLIRAAMSDLSLRWRDRLGDDVVVDLAGYGALAESALTTQRAIEMAESGLPTTFVPGRNLVFLAVAAAHAYRRGADVLVGGMCETDYSGYPDCRRATLDAMQQALSLGLDRPTIVETPLMHRTKAQTWALAHALGGDAFVDLIVEQTHTCYEGDRSRRHAWGYGCETCPACDLRAKGWAEWKASA

SEQ ID NO: 35875 - protein, 239 aa, Unknown
  misc_feature (1)..(239): tr|A0A2A5XS23|A0A2A5XS23_9PROT 7-cyano-7-deazaguanine s ynthase OS=alpha proteobacterium MED-G09 OX=2007301 GN= queC PE=3 SV=1
MLDKNKSIVLFSGGQDSSACLLWALSKFEEVQTIGFDYGQRHNIELECRINLLKRIQLHSSNFLGKLSNDIVINLEEIKNISESSLLNSENIGMLENGLPNTFVPGRNLIFLNYASIIAYKNKTKNIVGGMCETDFSGYPDCRNETINSMEKSLNLGMDVEFKIQTPLMFKSKAEIWELIYKKGNKELIDIIIEESHTCYKGDRSKRYDWGYGCNSCPACELRSKGWNEFIINYPELKN

SEQ ID NO: 35876 - protein, 312 aa, Alphaproteobacteria bacterium
  misc_feature (1)..(312): tr|A0A257HPT1|A0A257HPT1_9PROT 7-cyano-7-deazaguanine s ynthase OS=Alphaproteobacteria bacterium PA1 OX=2015569 GN=queC PE=3 SV=1
MPECFKHSKRIHPFVRARLIPANGKALHRACDFDGRNLLRSSSFGFAENRLWNAPIPPFCFRESLLVIEPKHALVLFSGGQDSTACLAWALSRYDRVETIGFDYGQRHRVELDQRLVILEAIRATMPDWGQKLGDDHLLDLGLLGQISDTALTRDTAIAMADSGLPTTFVPGRNLVFLTFAGALAYRRGLGVLVGGMCETDYSGYPDCRRATLDAMEQSLSLGMDVSFKLATPLMYLTKAQTWDLAFALGGNALIELTVEHSHTCYTGDRSLRHDWGYGCGTCPACELRAAGWQQWQAQHQGQAVQGARVAP

SEQ ID NO: 35877 - protein, 235 aa, Alphaproteobacteria bacterium
  misc_feature (1)..(235): tr|A0A2S6RFC6|A0A2S6RFC6_9PROT 7-cyano-7-deazaguanine s ynthase OS=Alphaproteobacteria bacterium MarineAlpha9_B in4 OX=2013099 GN=queC PE=3 SV=1
MKKRAILLFSGGQDSTTALGWCLKNFNTVDLLSFDYGQRHSVELKSAKNIIREIEKDFSHHKNKIRNSLIFKIKNLSNITKSSLTSNIKIDTSAKIPNTFVPGRNLLFYNLAATYAYTKDIDNIVSGVCQTDYSGYPDCRDATIKMLNKAINLGMEKKFTFHTPLMFLTKAETWKLSYSIGGNKFVNIIKKLTHTCYKGERRKLFSWGYGCNRCPACLIRKKGWEEYNLEKKNDL

SEQ ID NO: 35878 - protein, 232 aa, Altererythrobacter aquimixticola
  misc_feature (1)..(232): tr|A0A4T3EXX7|A0A4T3EXX7_9SPHN 7-cyano-7-deazaguanine s ynthase OS=Altererythrobacter aquimixticola OX=2489173 GN=queC PE=3 SV=1
MVETTPKAVILLSGGLDSMVAGGIAREQGYAIYALTIDYNQRHRREIGSARKIAEALGAERHVVLPLDLSQFGGSALTDDIEVPKTGVGEGIPVTYVPARNLVFLSLTLAWAEAIGAHDIFIGVNALDYSGYPDCRPDFIASFQETARLATRDGVEGKPFTIHAPLQHWGKARIAQEAERLGLDPVMSWSCYDPTPEGMACGLCDSCRLRQKGFAEAGLEDPTPYAARPGPG

SEQ ID NO: 35879 - protein, 236 aa, Altererythrobacter atlanticus
  misc_feature (1)..(236): tr|A0A0F7KWA1|A0A0F7KWA1_9SPHN 7-cyano-7-deazaguanine s ynthase OS=Altererythrobacter atlanticus OX=1267766 GN= queC PE=3 SV=1
MSDHTKTETRRNAVVLLSGGLDSMVAGGIAREQGFAINALTIDYNQRHRCEIEAAKTIAKELGAVRHVILPLDLRQFGGSALTDDIAVPKTGLTDDIPVTYVPARNLIFLSLTLGWAEPIGAHDIFIGVNALDYSGYPDCRPEFIASFTDTATLATKEGAQGHSFTIQTPLQFWGKARIAQECQRLGLDPAMSWSCYDPTPEGMACGLCDSCRLRRKGMEEAGVVDRTEYAATPAD

SEQ ID NO: 35880 - protein, 228 aa, Altererythrobacter dongtanensis
  misc_feature (1)..(228): tr|A0A1B2A9T3|A0A1B2A9T3_9SPHN 7-cyano-7-deazaguanine s ynthase OS=Altererythrobacter dongtanensis OX=692370 GN =queC PE=3 SV=1
MADNSRIAVILLSGGLDSMVSAGIARERGFTLHALSIDYGQRHVRELDCARDIARRLGAERHVVLPLDLRAFGGSALTADIAVPKDGVTDDIPITYVPARNLVFLALTTAFAECSGARDIFIGVNALDYSGYPDCRPEFIASFAETARLGTKAGVEGEPFAIHAPLQHMTKADIAREAARLGLDPGWSWSCYDPADDGRACGLCDSCRLRQKGFAEAGLPDRVAYTDA

SEQ ID NO: 35881 - protein, 229 aa, Altererythrobacter epoxidivorans
  misc_feature (1)..(229): tr|A0A0M3TB04|A0A0M3TB04_9SPHN 7-cyano-7-deazaguanine s ynthase OS=Altererythrobacter epoxidivorans OX=361183 G N=queC PE=3 SV=1
MTQGKSENMQAVVLLSGGLDSMVSAAIAKERGYTVHALTVDYGQRHRRELDAAREIANRLELASHREIKLDLSAFGGSALTADIPVPKGGVGEDIPVTYVPARNLVFLSLTVACAEASDAANIFIGVNALDYSGYPDCRPEFIESFAETARLGTKAGVEGRPFQIHAPLQYMSKADIARECDRLGLEPAWSWSCYDPEPDGRACGKCDSCRLRQKGFEEAGITDNTSYA

SEQ ID NO: 35882 - protein, 231 aa, Altererythrobacter ishigakiensis
  misc_feature (1)..(231): tr|A0A562US68|A0A562US68_9SPHN 7-cyano-7-deazaguanine s ynthase OS=Altererythrobacter ishigakiensis OX=476157 G N=queC PE=3 SV=1
MSDNSPKAEKSAVVLLSGGLDSMVTAALALEQGFAIHALTIDYDQRHRRELEAARRIAKQLNVARHIELQMNMRAIGGSALTDLMDVPKDGVGDSIPVTYVPARNLIFLSVCVAAAEAAGASDVFIGVNALDYSGYPDCRPEFIASFAETARLGTKSGVEGEAFVIHAPLQEMTKADIARECVRLGLEPSNSWSCYDPTEDGLACGLCDSCRLRKKGFAEAGLTDSTAYAD

SEQ ID NO: 35883 - protein, 234 aa, Altererythrobacter marensis
  misc_feature (1)..(234): tr|A0A2W4YPJ6|A0A2W4YPJ6_9SPHN 7-cyano-7-deazaguanine s ynthase OS=Altererythrobacter marensis OX=543877 GN=que C PE=3 SV=1
MDNHDKPGAAVVLLSGGLDSMVVGALARERGLRLHALTVDYGQRHRRELDAARAIGARLEAERHVFLSLDLRHFGGSALTDDIAVPKGGVDRAIPVTYVPARNLIFLSLTTGFAEASGARDIFIGVNALDYSGYPDCRPEFIASFAETARLATRIGAEGDPVTIHAPLQHMTKADIAREAYRLGLDPAWSWSCYDPTAEGLACGLCDSCRLRRKGFAEAALVDTTRYAADAPGD

SEQ ID NO: 35884 - protein, 234 aa, Altererythrobacter marensis
  misc_feature (1)..(234): tr|A0A0G3XCP3|A0A0G3XCP3_9SPHN 7-cyano-7-deazaguanine s ynthase OS=Altererythrobacter marensis OX=543877 GN=que C PE=3 SV=1
MGSESGKTNNPAVVLLSGGLDSMVAAAIAREQGFRLNALTIDYGQRHRVELDAARRIATALDCERHVVLPLDLTIFGGSALTDDIAVPTDGVGEDIPVTYVPARNIVFLSLTLAWAETVGADDIFIGVNALDYSGYPDCRPEFIAAFEQMARIGTKAGAEGSALSIRAPLQFMSKAQIAAEAARLSLDTGMSWSCYAPTEAGLACGLCDSCRLRQKGFAEAGIEDGITYERTTG

SEQ ID NO: 35885 - protein, 232 aa, Altererythrobacter namhicola
  misc_feature (1)..(232): tr|A0A1C7D556|A0A1C7D556_9SPHN 7-cyano-7-deazaguanine s ynthase OS=Altererythrobacter namhicola OX=645517 GN=qu eC PE=3 SV=1
MSDNAKRHAVILLSGGMDSMVAAGLARESGFRISALTIDYNQRHRVELQAARAIADHVGVERHVVMPLDLRQFGGSALTDDIDVPKEGVGSAIPVTYVPARNLVFLSLTLAWAEAIGAHDIFIGVNALDYSGYPDCRPDFIASFAETARLATRDGVGGDGFTIHTPLMDMTKADIAREADRLGLPAGLSWSCYDPTPENLACGRCDACRLRAKGFSEAGLPDPTPYAEAPPA

SEQ ID NO: 35886 - protein, 238 aa, Altererythrobacter sp.
  misc_feature (1)..(238): tr|A0A1Q3MD17|A0A1Q3MD17_9SPHN 7-cyano-7-deazaguanine s ynthase OS=Altererythrobacter sp. 66-12 OX=1895714 GN=q ueC PE=3 SV=1
MTGNPEQTTRQSARQAVVLLSGGLDSMVAAALAREQGFAINALTIDYNQRHRCEIDAAAAIARHLGAIRHVVLPLDLRRFGGSALTDDIAVPKDGVGPEIPITYVPARNLVFLSLTLAWAEPLGAHDIFIGVNALDYSGYPDCRPEFIASFAETARLATKEGMEGSAFTFHAPLQHWGKARIAEEAVRLGLDPAMSWSCYDPTPGGLACGLCDSCRLRRAGFADAGLIDPTRYAATGT

SEQ ID NO: 35887 - protein, 241 aa, Altererythrobacter sp.
  misc_feature (1)..(241): tr|A0A369QDM2|A0A369QDM2_9SPHN 7-cyano-7-deazaguanine s ynthase OS=Altererythrobacter sp. HME9302 OX=2161824 GN =queC PE=3 SV=1
MTNLQSNGQPKAVVLLSGGLDSMVTAGIARERGFALYALSIDYGQRHRRELLAASKIAELLGADRHVVLPLDLRAFGGSALTDDIAVPKGGVGNDIPVTYVPARNLIFLALTTAFAESCDARDIFIGVNALDYSGYPDCRPEFIDSFAETARLGTKAGIEGAPFVIHAPLQMLGKAEIAQEADRMGLDSGLSWSCYDPRPDGLACGGCDSCRLRRQGFADAGLVDGAAYPVNSPPIRGETA

SEQ ID NO: 35888 - protein, 227 aa, Altererythrobacter xiamenensis
  misc_feature (1)..(227): tr|A0A1Y6F7D0|A0A1Y6F7D0_9SPHN 7-cyano-7-deazaguanine s ynthase OS=Altererythrobacter xiamenensis OX=1316679 GN =queC PE=3 SV=1
MHSSKKAVVLLSGGLDSMVVAALAKEAGFAIQALTINYGQRHLRELRSARDIAERLGVERHVELPLDLRTFGGSALTDDIAVPKSGVSEDIPVTYVPARNLVFLALTTAFAEASGAQDIFIGVNALDYSGYPDCRPEFIASFAETARLGTKSGAGGDAFTIHAPLQHLTKSDIAKECYRLDLDPSWSWSCYDPDEHGVACGLCDSCRLRRKGFAEAGLEDSTAYAAE

SEQ ID NO: 35889 - protein, 222 aa, Alteribacillus bidgolensis
  misc_feature (1)..(222): tr|A0A1G8MK56|A0A1G8MK56_9BACI 7-cyano-7-deazaguanine s ynthase OS=Alteribacillus bidgolensis OX=930129 GN=queC PE=3 SV=1
MSFANEKAVVVFSGGQDSTTCLFWALERFEEVSAVTFDYGQRHREELKVAKSITEEHGIEHKVMDMSLLNQLAPNALTRDDIKVQDGQDGELPNTFVEGRNLLFFSFATIYASQKGAKHIVTGVCETDYSGYPDCRDVFVKSLNVSLNLALDKDFVLHTPLMWLDKKETWELADKLGRLSYVKEKTLTCYNGVPGDGCGECPACRLRQAGYEQYIKEKEREE

SEQ ID NO: 35890 - protein, 220 aa, Alteribacillus iranensis
  misc_feature (1)..(220): tr|A0A1I2CUH9|A0A1I2CUH9_9BACI 7-cyano-7-deazaguanine s ynthase OS=Alteribacillus iranensis OX=930128 GN=queC P E=3 SV=1
MSFADEKAVVVFSGGQDSTTCLFWALERFQEVSAITFDYGQRHRKELEVAAEIAEELGVDHHVLDMTLLNQLAPNALTREEIEVSEGEEGELPNTFVEGRNLLFFSFAAIAASQKGAKHVVTGVSQTDYSGYPDCRDSFVKSLNVTLNLATDKEFVLHTPLMWLDKKETWELADRLGRLSYVKEKTLTCYNGIRGEGCGECPACHLRHAGYKEYMKEKER

SEQ ID NO: 35891 - protein, 222 aa, Alteribacillus persepolensis
  misc_feature (1)..(222): tr|A0A1G8GJ91|A0A1G8GJ91_9BACI 7-cyano-7-deazaguanine s ynthase OS=Alteribacillus persepolensis OX=568899 GN=qu eC PE=3 SV=1
MRFHNEKAVVVFSGGQDSTTCLFWALERFEEVHAVTFDYGQRHNKELDVARAIAEELGVVHKVMNMDLLNQLAPNALTRDDIDVEEGKDGEPPNTFVEGRNLLFFSFATIYASQIGAKHVVTGVCETDYSGYPDCRDMFVKSLNVSLNLAIDKEFVLHTPLMWLDKKETWELADKLGKLSYIKNHTLTCYNGIVGDGCGECPACKLRQAGYEQYLNEKEREE

SEQ ID NO: 35892 - protein, 224 aa, Alteromonadaceae bacterium
  misc_feature (1)..(224): tr|A0A495DC15|A0A495DC15_9ALTE 7-cyano-7-deazaguanine s ynthase OS=Alteromonadaceae bacterium 2052S.S.stab0a.01 OX=1304900 GN=queC PE=3 SV=1
MSKKAVVLSSGGLDSTTVLAIAQQQGYDCYTLSFDYGQRHRAELEAADRVSAAMGATEHKVVSLDLRTIGGSALTDTSISVPETETSGIPVTYVPARNTVFLSIALGWAEVLGAEAIFIGVNAVDYSGYPDCRPAYIQAYQAMASLATRAGVEGQPLKIETPLIDLSKADIIRLGSTLGVDYSLTVSCYQADEQGRACGKCDSCRLRRRGFEDAGVDDPTPYRD

SEQ ID NO: 35893 - protein, 218 aa, Alteromonadaceae bacterium
  misc_feature (1)..(218): tr|A0A2E9KAS5|A0A2E9KAS5_9ALTE 7-cyano-7-deazaguanine s ynthase OS=Alteromonadaceae bacterium OX=1916082 GN=que C PE=3 SV=1
MSEKVIVIYSGGMDSFTVLHKAIADGKKPYALSFNYGQRHKKELDYATAVCTELNVPHKVVDISAINSLVGGSALTDDIEVPEGHYEEPSMKTTVVPNRNMILLSLAVGYAVSENATKVYYGAHSGDHAIYPDCRPEFVEKMNDVCAIANYEAVEIVTPYLKVSKTAILTDGLKMGLDYGKTWTCYNGREHACGGCGACQERLEAFRDNGAVDPLTYE

SEQ ID NO: 35894 - protein, 218 aa, Alteromonadales bacterium
  misc_feature (1)..(218): tr|A0Y003|A0Y003_9GAMM 7-cyano-7-deazaguanine synthase OS=Alteromonadales bacterium TW-7 OX=156578 GN=queC PE= 3 SV=1
MTQKVVVIYSGGMDSFTVLNKALQQGHDVYALSFDYGQRHVKELKVAAQVCEKLNVPHKIVDISAINQLIGGSSLTDNIDVPEGHYEEESMKSTIVPNRNMILLSLAVGYAVSLKASQVYYGAHSGDHAIYPDCRPEFVQKMDDVCRIANYDAVEIFSPYLNNTKIDILTDGIKMGLDYSQTWTCYNGREKACGKCGACQERLEAFALNNITDPLEYE

SEQ ID NO: 35895 - protein, 220 aa, Alteromonadales bacterium
  misc_feature (1)..(220): tr|A0A2N0WLH9|A0A2N0WLH9_9GAMM 7-cyano-7-deazaguanine s ynthase OS=Alteromonadales bacterium alter-6D02 OX=2058 087 GN=queC PE=3 SV=1
MKEKVVVIYSGGMDSFTVLHKAIEEGKAVYPLTFNYGQRHSKEVDVAAQVCKTLNVPHKVVDISAINQLMAGSSLTSDIDIPEGHYEEDSMKSTVVPNRNMVLLSMAIAYAVSIEANAVYYGAHSGDHAIYPDCRPEFVHKMNEVSQIANYEPVDIVSPYIKNNKIEILADGLRMGLDYGQTWTCYNGREQSCGVCGSCQERLEAFAKNGLTDPLAYETS

SEQ ID NO: 35896 - protein, 218 aa, Alteromonas aestuariivivens
  misc_feature (1)..(218): tr|A0A3D8M698|A0A3D8M698_9ALTE 7-cyano-7-deazaguanine s ynthase OS=Alteromonas aestuariivivens OX=1938339 GN=qu eC PE=3 SV=1
MSEKVVVIYSGGMDSFTVLNKAIREGKSPLALSFDYGQRHKKELVYAAAVCDELGVPHKVVDISAINSLVGGSALTDDIDVPEGHYEEPSMQQTVVPNRNMILLSLAVGYAVSQGANKVFYGAHSGDHAIYPDCRPEFVERMNQVCAIANYEAVEIVTPYLQDSKTAILTDGLKMGLDYGKTWTCYNGREKACGKCGACQERLEAFRDNQATDPLEYE

SEQ ID NO: 35897 - protein, 220 aa, Alteromonas australica
  misc_feature (1)..(220): tr|A0A075P4V6|A0A075P4V6_9ALTE 7-cyano-7-deazaguanine s ynthase OS=Alteromonas australica OX=589873 GN=queC PE= 3 SV=1
MSENVVVIYSGGMDSFTVLHKAIRDGKKVNALSFDYGQRHKKELDYAANVCRSLNIPHKVVDISAINTLIGGSSLTSDIEVPEGHYEEPSMKQTVVPNRNMILLSLAVGYAVSLEANEVYYGAHSGDHAIYPDCRPEFVEKMNDVCHIANYTPVDIVSPYLKVSKTDILTDGLKMGLDYGLTWTCYNGREKACGKCGACEERLEAFRDNNATDPLEYEAH

SEQ ID NO: 35898 - protein, 219 aa, Alteromonas confluentis
  misc_feature (1)..(219): tr|A0A1E7ZFM1|A0A1E7ZFM1_9ALTE 7-cyano-7-deazaguanine s ynthase OS=Alteromonas confluentis OX=1656094 GN=queC P E=3 SV=1
MSEKVIVIYSGGMDSFTVLHKALADGKKPYALSFNYGQRHKKELDYAARVCDELNVPHKIVDISAINALVGGSALTDDIDVPEGHYEEPSMKTTVVPNRNMILLSLAVGYAVSEEATKVYYGAHSGDHAIYPDCRPEFVEKMNDVCAIANYEAVEIVTPYLKVSKTAILTAGLQMGLNYGKTWTCYNGREKACGKCGACQERLEAFRDNQATDPLAYEA

SEQ ID NO: 35899 - protein, 218 aa, Alteromonas lipolytica
  misc_feature (1)..(218): tr|A0A1E8FJ63|A0A1E8FJ63_9ALTE 7-cyano-7-deazaguanine s ynthase OS=Alteromonas lipolytica OX=1856405 GN=queC PE =3 SV=1
MSEKVIVIYSGGMDSFTVLNKALEDGKTPLALSFDYGQRHKKELDYAARVCAELNIPHKIVDISAINSLVGGSALTDDIDVPEGHYEEPSMKTTVVPNRNMILLSMAVGYAVSENATKVYYGAHSGDHAIYPDCRPEFVRKMNDVCAIANYEAVEIVTPYLEVSKTAILTDGLRMGLDYGKTWTCYNGREKACGQCGACQERLEAFRDNHQTDPLDYE

SEQ ID NO: 35900 - protein, 218 aa, Alteromonas macleodii
  misc_feature (1)..(218): tr|K0E8E6|K0E8E6_ALTMB 7-cyano-7-deazaguanine synthase OS=Alteromonas macleodii (strain Balearic Sea AD45) OX= 1004787 GN=queC PE=3 SV=1
MSENVVVIYSGGMDSFTVLHKALKAGKKVHALSFNYGQRHKKELDYAANVCNSLNVPHKIVDISAINTLIGGSALTSDIEVPEGHYEEPSMKQTVVPNRNMILLSLAVGYAVSLDANEVYYGAHSGDHAIYPDCRPEFVHKMNDVCGIANYTPVTIMTPYIDDSKTAILTDGLSMGLDYGQTWTCYNGREKACGKCGACEERLEAFKENNAVDPLEYE

SEQ ID NO: 35901 - protein, 218 aa, Alteromonas macleodii; identical to SEQ ID NO: 35900
  misc_feature (1)..(218): tr|A0A126PXT1|A0A126PXT1_ALTMA 7-cyano-7-deazaguanine s ynthase OS=Alteromonas macleodii OX=28108 GN=queC PE=3 SV=1

SEQ ID NO: 35902 - protein, 218 aa, Alteromonas marina
  misc_feature (1)..(218): tr|A0A0B3YHB5|A0A0B3YHB5_9ALTE 7-cyano-7-deazaguanine s ynthase OS=Alteromonas marina OX=203795 GN=queC PE=3 SV =1
MSENVVVIYSGGMDSFTVLHKALKAGKKVHALSFNYGQRHKKELDYAANVCKSLNVPHKIVDISAINTLIGGSALTSDIDVPEGHYEEPSMKQTVVPNRNMILLSLAVGYAVSLEANEVYYGAHSGDHAIYPDCRPEFVHKMNDVCGIANYTPVTIMTPYIDDSKTAILTDGLSMGLDYGQTWTCYNGREKACGKCGACEERLEAFKENDAIDPLEYE

SEQ ID NO: 35903 - protein, 218 aa, Alteromonas mediterranea
  misc_feature (1)..(218): tr|S5BWL3|S5BWL3_9ALTE 7-cyano-7-deazaguanine synthase OS=Alteromonas mediterranea UM7 OX=1300258 GN=queC PE=3 SV=1
MSENVVVIYSGGMDSFTVLHKALRAGKKVHALSFDYGQRHKKELDYAAAVCTSLGVPHKIVDISAINTLIGGSALTSDIDVPEGHYEEPSMKQTVVPNRNMILLSLAVGYAVSLDANEVYYGAHSGDHAIYPDCRPEFVHKMNDVCGIANYTPVTIMTPYIKDSKTAILTDGLSMGLDYGQTWTCYNGREKACGKCGACEERLEAFKDNGATDPLEYE

SEQ ID NO: 35904 - protein, 218 aa, Alteromonas mediterranea; identical to SEQ ID NO: 35903
  misc_feature (1)..(218): sp|B4RTX3|QUEC_ALTMD 7-cyano-7-deazaguanine synthase OS =Alteromonas mediterranea (strain DSM 17117 / CIP 11080 5 / LMG 28347 / Deep ecotype) OX=1774373 GN=queC PE=3 S V=1

SEQ ID NO: 35905 - protein, 218 aa, Alteromonas naphthalenivorans
  misc_feature (1)..(218): tr|F5ZDQ4|F5ZDQ4_ALTNA 7-cyano-7-deazaguanine synthase OS=Alteromonas naphthalenivorans OX=715451 GN=queC PE=3 SV=1
MSENVVVIYSGGMDSFTVLHKALRDGKTVHALSFDYGQRHKKELDYAAAVCKSLNVPHKIVDISAINSLIGGSSLTSDIDVPEGHYEEPSMKQTVVPNRNMILLSLAVGYAVSLEANEVYYGAHSGDHAIYPDCRPEFVEKMSDVCRIANYTPVEIVTPYIKDSKTAILTDGLKMGLDYGETWTCYNGREKACGKCGACEERLEAFRENHCTDPLSYE

SEQ ID NO: 35906 - protein, 218 aa, Alteromonas pelagimontana
  misc_feature (1)..(218): tr|A0A2A6AXE3|A0A2A6AXE3_9ALTE 7-cyano-7-deazaguanine s ynthase OS=Alteromonas pelagimontana OX=1858656 GN=queC PE=3 SV=1
MSEKVIVIYSGGMDSFTVLNKALAEGKAPLALSFNYGQRHKKELDYAATACKQLNVPHKIVDISAINSLVGGSALTDDIDVPEGHYEEPSMQQTVVPNRNMILLSLAVGYAVSQNATKVYYGAHSGDHAIYPDCRPEFVEKMNDVCAIANYSAIEIVTPYLEVSKAAILTDGLSMNLDYSLTWTCYNGREKACGKCGACQERLEAFRDNQASDPLPYE

SEQ ID NO: 35907 - protein, 218 aa, Alteromonas sp.; identical to SEQ ID NO: 35900
  misc_feature (1)..(218): tr|A0A2V3V9F9|A0A2V3V9F9_9ALTE 7-cyano-7-deazaguanine s ynthase OS=Alteromonas sp. I10 OX=1938740 GN=queC PE=3 SV=1

SEQ ID NO: 35908 - protein, 218 aa, Alteromonas sp.
  misc_feature (1)..(218): tr|A0A3N5Y5A6|A0A3N5Y5A6_9ALTE 7-cyano-7-deazaguanine s ynthase OS=Alteromonas sp. U0105 OX=2259342 GN=queC PE= 3 SV=1
MSEKAVIIYSGGMDSYTVLHKALQRGIHATALSFNYGQRHKKELDYAANVCRTLSIPHTVVDISAINQLLAGSSLTDNIDVPEGHYEEPSMKQTVVPNRNMILLSLAIGHAVSIEANAVYYGAHSGDHAIYPDCRPEFVERMNAVSQIANYEPVQIVSPYLNNTKGEILADGLAMGLDYGNTWTCYNGREKACGKCGACQERLEAFALNGATDPLEYE

SEQ ID NO: 35909 - protein, 218 aa, Alteromonas stellipolaris; identical to SEQ ID NO: 35905
  misc_feature (1)..(218): tr|A0A0S1YLK4|A0A0S1YLK4_9ALTE 7-cyano-7-deazaguanine s ynthase OS=Alteromonas stellipolaris LMG 21856 OX=11607 20 GN=queC PE=3 SV=1

SEQ ID NO: 35910 - protein, 214 aa, Alysiella crassa
  misc_feature (1)..(214): tr|A0A376BMU2|A0A376BMU2_9NEIS 7-cyano-7-deazaguanine s ynthase OS=Alysiella crassa OX=153491 GN=queC PE=3 SV=1
MTATLVIFSGGQDSTTCLFQAIAEYGVANVQTITFAYGQRHSIELERAAWIARDLGVKQTVLDLSLISGITNNALMDNTAEIDTSGSLPNTFVDGRNALFLLYAAIYAKSQNIKEIFVGVCETDFSGYPDCRDVFVKSMNVSLNLAMAYDFNIRTPLMYLTKKETWALADKLGVFDYIRQHTHTCYLGVDGGCHECPSCLLREKGLSEYLAERT

SEQ ID NO: 35911 - protein, 221 aa, Alysiella filiformis
  misc_feature (1)..(221): tr|A0A286E6Q4|A0A286E6Q4_9NEIS 7-cyano-7-deazaguanine s ynthase OS=Alysiella filiformis DSM 16848 OX=1120981 GN =queC PE=3 SV=1
MNNPHTTPAALVIFSGGQDSTTCLFQAIAEFGAANVQAITFHYGQRHAIELERAAWMAQDLGIKQTVLDLSLISSITNNALMDSNAQIDVSGSLPNTFVDGRNALFLLYAAIYAKSQNIKTIFVGVCETDFSGYPDCRDVFVKSMNVSLNLAMAYDFNIRTPLMYLTKKETWALADQLGAFDYVRQHTHTCYLGVQGGCHECPSCQLREKGLREYLAERES

SEQ ID NO: 35912 - protein, 233 aa, Amantichitinum ursilacus
  misc_feature (1)..(233): tr|A0A0N0XJW7|A0A0N0XJW7_9NEIS 7-cyano-7-deazaguanine s ynthase OS=Amantichitinum ursilacus OX=857265 GN=queC P E=3 SV=1
MTQTTEAARPAVILLSGGLDSATCLAIAKSQGFAPYCLSFDYGQRHNAELKAAARVAKALGAVEHRVVRIDLATFGGSALTDASIEVPTDGATDGGIPVTYVPARNTILLSYALAWAEVLKGDDIFIGVNAVDYSGYPDCRPDYIAAYQAMARLATRTGVEGSPLTIHTPLISLSKADIIKTGLALGVDYSLTVTCYKADDEGRACGVCDACRLRAAGFADAGVPDPTRYQPA

SEQ ID NO: 35913 - protein, 249 aa, Aminicella lysinilytica
  misc_feature (1)..(249): tr|A0A4R6Q6A5|A0A4R6Q6A5_9FIRM Uncharacterized protein OS=Aminicella lysinilytica OX=433323 GN=EV211_11330 PE= 4 SV=1
MNIQEFFETNNKVALGFSGGVDSSYLLYAAKEAGADIGAYYVKSQFQPQFELDDALKLAEHVGAELKVLECDVLSEPKVASNPSDRCYYCKRHIFGAVADRAAKDGYGVLIDGTNASDDAGDRPGTKALGELKVLSPLRDCGLTKDDIRALSKEAGLFTWNKPSYACLATRIPEGEEITDKTLRRIEGAEDVLRMMGFSDFRVRKRGDIGLLQIPECQMVSAVKLNEEIVLGLKPYFKDVVLDLVGRRR

SEQ ID NO: 35914 - protein, 620 aa, Aminobacter aminovorans
  misc_feature (1)..(620): tr|A0A142M800|A0A142M800_AMIAI Uncharacterized protein OS=Aminobacter aminovorans OX=83263 GN=AA2016_3548 PE=4 SV=1
MKQFEFACGGASFTCAYADVQRLTLDVQGANRNVNLRISDISRSMLGNVPDLLLDLLEIAAYIYCADQRASRGSEKLTLAGSSWRRSMHFTIPVRYPEIWSGAELNSALHETLSFLSDDSYHFSFVAAADPFVEKMAYFDGLLDGVVEADEIALFSGGIDSFAGAVETIVDHGRKVVLVGHHSAPKVFSIQKELIAKLGEAGHANSLFYVSVNITNTGVEAIESTQRSRSFLYASLAFVVARMFGKNAITFFENGIVSFNLPIARDVLGSRATRTTHPKVIRGFERIFSLLAGERIDVRTPYIWLTKKEVVERILDNSFGHLLPRTVSCAHPRSWTTSVRHCGACSQCIDRRFAVLAADAGDLEPATDYAIDLLTGDRSLDEKIRMPVAYVKFCQTILDSGKTQFMVNNPQVASALNYFPDLSCDLALDQIWDMHHRHAAGILSVLEGGLRQYSSALARNTLPPGSLLSLCFSRTHIEAPPLEDYDRQLGEFMDRLAQPVCEFAVDLDAKRIWFRGDYYLDGANFRLVAALIENHRSAKARLVEVPFTRTVKLAEKLEIDEDSLRQQVNRLRNEVANRLAVDQGIVFQINDFIENRQREGYRLAPALREVTRADLSRADH

SEQ ID NO: 35915 - protein, 200 aa, Aminobacter sp.
  misc_feature (1)..(200): tr|A0A0Q6MF63|A0A0Q6MF63_9RHIZ 7-cyano-7-deazaguanine s ynthase OS=Aminobacter sp. Root100 OX=1736420 GN=ASC75_ 19180 PE=3 SV=1
MRALLFSGGLDSSALAWWLRPEICVTIDYGQRAARGEIAASSALCSQIGLEHRTIHANLSSLGSGSMAAKVAAEGASAEEFWPYRNQMLVTLAAMKLMPMGVREIILGSVSTDQHADGKAPFLKSLDRTLSLQEGHVRVTAPARRMSTRTLLRTSGFPYGLIGLTFSCHVHEYACGQCNGCLKHRECVEMTYPRPKRGAA

SEQ ID NO: 35916 - protein, 219 aa, Ammonifex degensii
  misc_feature (1)..(219): tr|C9RBW2|C9RBW2_AMMDK 7-cyano-7-deazaguanine synthase OS=Ammonifex degensii (strain DSM 10501 / KC4) OX=42900 9 GN=queC PE=3 SV=1
MKSVVLLSGGLDSAVCLACAVEDGEVVLSLTFDYGQAAAKKEIEAASKLSRHYGVPHQVLHLPFLRELLPPAMASGEGMPEPETRELDDKVSADKLARSVWVPNRNALFLSIGAAFAESLGAEAVVAGFNAEEAQSFPDNSPPFVDAMNEVLRYSTRGKVRVISYTQRLDKKAIVRLGKRLGLPFPFIWSCYRAGEEMCGRCPSCLRYFRALREAEEEW

SEQ ID NO: 35917 - protein, 218 aa, Ammonifex sp.
  misc_feature (1)..(218): tr|A0A3A6MQG2|A0A3A6MQG2_9THEO 7-cyano-7-deazaguanine s ynthase OS=Ammonifex sp. OX=1872493 GN=queC PE=3 SV=1
MKCVVLLSGGLDSAVSLACARRDGAVLLCLTFDYGQQAVKPEIQAAAAFCEYYKVPHRVIDLPFLREITTTALVTGEDLPEPEVAYLDEFSRALEDAARVWVPNRNGIFLNIAAAYAEHLGAPAVVAGFNREEAAAFPDNSAAFVNAATAALYFATQNHVRVISYTQNLDKTGIAALGRRLGVPLELVWSCYRGGSEPCWRCESCLRYSRALAAAKEE

SEQ ID NO: 35918 - protein, 218 aa, Ammonifex thiophilus
  misc_feature (1)..(218): tr|A0A3D8P2C8|A0A3D8P2C8_9THEO 7-cyano-7-deazaguanine s ynthase OS=Ammonifex thiophilus OX=444093 GN=queC PE=3 SV=1
MRSVVLLSGGLDSAVCLACAVEDGEVVLSLTFDYGQAAARREIEAASKLARHYGVPHRVLPLSFLQELLPPAMASGEGMPEPETRELDDEVLADQLARSVWVPNRNALFLSVGAAFAESLGAEAVVAGFNAEEAQSFPDNSPPFVNAVNEVLRYSTRGKVRVISYTQRLDKRAIVRLGKRLGLPFSFIWSCYRAGEEMCGRCPSCLRYFRALREVEGE

SEQ ID NO: 35919 - protein, 223 aa, Ammoniphilus oxalaticus
  misc_feature (1)..(223): tr|A0A419SM78|A0A419SM78_9BACL 7-cyano-7-deazaguanine s ynthase OS=Ammoniphilus oxalaticus OX=66863 GN=queC PE= 3 SV=1
MKKKAVIILSGGLDSATCMGVAQQVGYELYPLTFDYGQKHQHEIVHAKRIAQHYQVAEHRVVKLDFLNQLGGSALTDPSIEVPDYAGDDEVPVTYVPARNLIFLSLATAYAETVGAEKIFIGVSSVDYSGYPDCRPEFIASMSETIRLATKLGAEQGMLQIEAPLSHLSKEDTIRLGMELAVPYELTTSCYRGGDKACGTCDSCELRLKGFAEAGLVDPIPYV

SEQ ID NO: 35920 - protein, 223 aa, Ammoniphilus sp.
  misc_feature (1)..(223): tr|A0A4Q1SRH8|A0A4Q1SRH8_9BACL 7-cyano-7-deazaguanine s ynthase OS=Ammoniphilus sp. CFH 90114 OX=2493665 GN=que C PE=3 SV=1
MTKKAVIILSGGLDSTTCMGIAEREGYTCYPLTFDYGQRHKHEVEQAKKVAAHYEVPQHKIVDIAFLGQIGGSALTDSSIEVPDYTGSKEVPVTYVPARNMIFLSLAAAYAEVVGAEAIYIGVSSVDYSGYPDCRPEFIRSMTETINLATQAGIKEGNLKILAPLSHLSKAQTIQLGIDLNVPYHLTTSCYRGGESACGTCDSCKLRLQGFEQAGAKDPIPYM

SEQ ID NO: 35921 - protein, 215 aa, Amphibacillus marinus
  misc_feature (1)..(215): tr|A0A1H8K3Q5|A0A1H8K3Q5_9BACI 7-cyano-7-deazaguanine s ynthase OS=Amphibacillus marinus OX=872970 GN=queC PE=3 SV=1
MNNNKAIVVFSGGQDSTTCLFWALKQFNEVEVVTFDYNQRHQEEIKVAQEIADELGVKQTIMDMSLLNQLAPNALTRNDIAVTEGEDGELPSTFVPGRNLLFLSFATIYASQVGAKHIVTGVCETDFSGYPDCRDVFIKSLNVTLNLSMDTQFVIHTPLMWLDKAETWALADQLNAFEFVRDKTLTCYEGIRGSGCGECPACKLRQNGLDRFLEK

SEQ ID NO: 35922 - protein, 246 aa, Amphiplicatus metriothermophilus
  misc_feature (1)..(246): tr|A0A239PP86|A0A239PP86_9PROT 7-cyano-7-deazaguanine s ynthase OS=Amphiplicatus metriothermophilus OX=1519374 GN=queC PE=3 SV=1
MYALDSDKAVVLFSGGQDSAIALAWALQRFDWVETIGFDYGQRHAVELGARTALRRELTRDFSAFAARLGPDTLVDLGGLGRLSETALTRDAEIAVAENGLPTTFVPGRNLAFLVFAAALAYRRGAGALVAGMCQVDYSGYPDCREEALRAQIEAIRLGMDAAFRLETPVMHLSKAESWRLAEKIGGRRLVDLINEHSHSCYRGVRATRHEWGYGCGDCPACDLRAKGWAAYVADEGGETATGKAK

SEQ ID NO: 35923 - protein, 228 aa, Amphritea atlantica
  misc_feature (1)..(228): tr|A0A1H9FR16|A0A1H9FR16_9GAMM 7-cyano-7-deazaguanine s ynthase OS=Amphritea atlantica OX=355243 GN=queC PE=3 S V=1
MSTPSNNAVVLLSGGLDSATALAMAVERGFNCYVLSFDYGQRSQTELLAAKKITRDLDVKEHRVVRLHLEDFGGSALTDNSIDVPDHEEEGIPVTYVPARNTVFMSLALAWAEVLHAQHIFIGVNAVDYSGYPDCRPEYIAAFEQMANLATKTGVEGERLTIETPLIDLTKAEIIREGTRLGVNYGLTVSCYQADDDGRACGVCDSCRLRAKGFEDAGVADPTRYITA

SEQ ID NO: 35924 - protein, 227 aa, Amphritea balenae
  misc_feature (1)..(227): tr|A0A3P1SIK5|A0A3P1SIK5_9GAMM 7-cyano-7-deazaguanine s ynthase OS=Amphritea balenae OX=452629 GN=queC PE=3 SV= 1
MSTPSNNAVVLLSGGLDSATALAMAVERGFNCYVLSFDYGQLSQTELNAARKIAAQLDVKEHKVVRLNLEDFGGSALTDDSIEMPETEEEGIPVTYVPARNTVFMSLALAWAEVLHAQHVFIGVNAVDYSGYPDCRPEYIAAFETMANLATKTGVEGERLTIETPLIDLTKAEIIQAGTQLGVDYGLTVSCYQADDEGRACRVCDSCRLRAKGFADAGVADPTLYRD

SEQ ID NO: 35925 - protein, 231 aa, Amphritea sp.
  misc_feature (1)..(231): tr|A0A430KQ68|A0A430KQ68_9GAMM 7-cyano-7-deazaguanine s ynthase OS=Amphritea sp. MCCC 1K03512 OX=2490544 GN=que C PE=3 SV=1
MTMSTSSNNAVVLLSGGLDSATALAMAVEHGYNCYVLSFDYGQRSQTELTAAKQIAANLDVKEHRVVRLNLEDFGGSALTDNDIDVPDHEEEGIPVTYVPARNTVFMSLALAWAEVLHAQHIFIGVNAVDYSGYPDCRPEYIAAFEHMANLATKTGVEGERLTIETPLIDLTKAQIIQEGTRLGVDYGLTVSCYQADDDGRACGVCDSCRLRAKGFEDAGVVDPTRYVQGA

SEQ ID NO: 35926 - protein, 235 aa, Amycolatopsis alba
  misc_feature (1)..(235): tr|A0A229RCF1|A0A229RCF1_9PSEU 7-cyano-7-deazaguanine s ynthase OS=Amycolatopsis alba DSM 44262 OX=1125972 GN=q ueC PE=3 SV=1
MVPIGSPAHRHPRHAIVIASGGLDSTVLAYWLAQRGAELTLLSFDYGQRHRVELEHAAEIARLLDCPHEIVDLAMLGRLLAGSALTDADVQVPDGHYTDESMRATIVPNRNAIMLDIAVSLAVVRNADVVAFGAHAGDHTVYPDCRPEFVKRYAWSARVANDGLLDDDFEILAPFITQSKTDIVRIGAAFRVPFEKTWSCYRGGTTHCGTCGTCTERKEAFQQNGIPDPTTYGSA

SEQ ID NO: 35927 - protein, 757 aa, Amycolatopsis albispora
  misc_feature (1)..(757): tr|A0A344LH82|A0A344LH82_9PSEU Condensation domain-cont aining protein OS=Amycolatopsis albispora OX=1804986 GN =A4R43_37235 PE=4 SV=1
MTEPKLLSTEPAQAEVIEQEVEAALRRHGGVADCAVVFAGAGESARRNCVRCGITGKYPGLTFDDAGVCSLCVLYEENREQIDAYWGDLSELAPKLRAKAEAAGSEYDCLLLFSGGKDSTYVLYRLVDLGLRVMTFTFDNGFISTTALRNVEEVTGELGIEHVTKTRADQNKIFLLSLQEHKSVCNGCFRSLLDLSTELAHHRGIPSIVTGLSRGQIMDERLSWFHQQGIFDRDEIEEKLALGRRVYHQAGGDGAEAAAVDAVEVVDFYRYSEVTKDEIRALLKSRSKIWAHPDDTGFCSSNCLINDVGVYVHNAERGFHNYEAPTRWEVRLGHLAVAEADEELQGPVNSTRVKRMLAKIGYPDPAEHPHLGARMTAYYVQGSSTEEAVRAAVASVLPEGLVPERWVAVSEIPRKAGVVDRSALKAPVATRFGRGNEDSSHPLTPSQLRVTERTPLAEQARALLVTLPGAVDTAKVKKIVLQLLMQHDTMRMKFTKDEHGWRQQPIGAGGSLPVVRLDLSAVSPEQEPALLKRAVAKLRARLDPAEGRVLQVTALERGSRPAGLLLVLHELAADTASWRLILEDVVTACRQLGAGEPVELARSEAFPGTTPIEPPPAATDPGPAGAALGVLADVLPAWLGQDSVVVEVADHTAPHHRAGRVVGRVSDVDFWRIRPDRIEPADGPADIRYDHFGDVTTLLPPGSPVRVSDLPEVDFTELPGEGPHRISITGAVRGGKLRLSWRGAPEEVVQRATDRLA

SEQ ID NO: 35928 - protein, 237 aa, Amycolatopsis albispora
  misc_feature (1)..(237): tr|A0A344LDJ4|A0A344LDJ4_9PSEU 7-cyano-7-deazaguanine s ynthase OS=Amycolatopsis albispora OX=1804986 GN=queC P E=3 SV=1
MVSMSTTQAEHRHPEHVVVIASGGLDSTVLAYWLAARHSRLTLLSFDYGQRHRIELDHAAEIARLLDSPHRIIDLTSLGTLLTGCALTDTSVAVPDGHYTDESMAATVVPNRNAIMLDIAVSVATSVRADAVAFGAHAGDHAIYPDCRPEFVERFARSVQAANEGLLVPDFQVLAPFLTLSKTDVVRVGEALEVPFARTWSCYRGQDVHCGTCGTCTERREAFRGNDIIDPTVYRAA

SEQ ID NO: 35929 - protein, 233 aa, Amycolatopsis cihanbeyliensis
  misc_feature (1)..(233): tr|A0A542DPQ7|A0A542DPQ7_9PSEU 7-cyano-7-deazaguanine s ynthase OS=Amycolatopsis cihanbeyliensis OX=1128664 GN= FB471_4913 PE=3 SV=1
MSAKEILLYSAGLDSFPAWHYLGKPEALFFDIGQRYCSQEYRAIETLRRRWDITLTTSRELNLTAWERPDGIIPLRNLYFAMLASHRADVIWCIGVKGDHTADKNPEAFAQMSTFLSTYAGREIRIDSPFWDMTKTEIVRWYLDQGLPVEDLLNTFSCLNPGTSPFHCGRCSACLRRWISLVNNGITDAKFQTNPWEWDEVQSYYLTAMHDGTYPDHRAEEFFTALSTVGVDA

SEQ ID NO: 35930 - protein, 220 aa, Amycolatopsis coloradensis
  misc_feature (1)..(220): tr|A0A1R0L1E8|A0A1R0L1E8_9PSEU 7-cyano-7-deazaguanine s ynthase OS=Amycolatopsis coloradensis OX=76021 GN=queC PE=3 SV=1
MVIASGGLDSTVLAYWLAQRGAELTLLSFDYGQRHRVELEHAAEIARLLDCPHEIVDLAMLGRLLAGSALTDADVPVPDGHYSDESMRATIVPNRNAIMLDIAVSLAVVRKADVVAFGAHAGDHAVYPDCRPEFVKRYAWSARVANDGLLDDDFEILAPFITQSKTDIVRLGAAFRVPFEKTWSCYRGGTTHCGTCGTCIERKEAFQQNGIPDPTSYGSA

SEQ ID NO: 35931 - protein, 235 aa, Amycolatopsis decaplanina
  misc_feature (1)..(235): tr|M2YJW3|M2YJW3_9PSEU 7-cyano-7-deazaguanine synthase OS=Amycolatopsis decaplanina DSM 44594 OX=1284240 GN=qu eC PE=3 SV=1
MSARELVAVVLSGGMDSTTVAAHYHHDGHPLLMITVDYGQRHRKEIDSAAAVARHYSAEHVVVDLRSVGSALTGSALTDDTVAVPDGHYAEATMKATIVPNRNAILANVAVGIALSHRAAVLALGTHAGDHFIYPDCRPAFIDALSTLVEVANEGMNPPRVEAPFLRWSKSDIARHGTMLGAPMELTWSCYKGGDRHCGVCGTCYERREAFRDADVPDPTAYLDNTTEFPAPAAL

SEQ ID NO: 35932 - protein, 240 aa, Amycolatopsis japonica
  misc_feature (1)..(240): tr|A0A075UT05|A0A075UT05_9PSEU 7-cyano-7-deazaguanine s ynthase OS=Amycolatopsis japonica OX=208439 GN=queC PE= 3 SV=1
MRDVVIVPIGSPAHRHPRHAIVIASGGLDSTVLAYWLAQRGAELTLLSFDYGQRHRVELEYAAEIARLLDCPHEIVDLAMLGRLLNGSALTDADVPVPDGHYTDESMRATIVPNRNAIMLDIAVSLAVVRNADVVAFGAHAGDHAVYPDCRPEFVKRYAWSARVANDGLLNDDFEILAPFITQSKTDIVRIGAAFRVPFEKTWSCYRGGTTHCGMCGTCTERKEAFQQNGIPDPTNYGSA

SEQ ID NO: 35933 - protein, 219 aa, Amycolatopsis keratiniphila
  misc_feature (1)..(219): tr|A0A1H2JBU8|A0A1H2JBU8_9PSEU 7-cyano-7-deazaguanine s ynthase OS=Amycolatopsis keratiniphila OX=129921 GN=que C PE=3 SV=1
MIASGGLDSTVLAYWLAQRGAELTLLSFDYGQRHRIELEYAAEIARLLDCPHEIVDLAMLGRLLAGSALTDADVPVPDGHYTDESMRTTIVPNRNAIMLDIAVSLAVVRNADVVAFGAHAGDHAVYPDCRPEFVKRYAWSARVANDGLLDDDFEILAPFITQSKTDIVRIGAAFRVPFEKTWSCYRGGTTHCGMCGTCTERKEAFQQNGIPDPTNYGSA

SEQ ID NO: 35934 - protein, 237 aa, Amycolatopsis marina
  misc_feature (1)..(237): tr|A0A1I1BR88|A0A1I1BR88_9PSEU 7-cyano-7-deazaguanine s ynthase OS=Amycolatopsis marina OX=490629 GN=queC PE=3 SV=1
MNTKRKAVVLLSGGLDSATVLAIARAEGYECYALSFRYGQRHEVELAAAGRVAEAGGAAAHVVADIDLRLFGGSALTADIAVPHHDRVEDLDISEIPVTYVPARNTIFLSFALAWAETLEASDVFIGVNALDYSGYPDCRAEYISAYETMANLATKAGVEGRQQLRIHTPLIELTKGQTIERGLALGVDYALTHSCYDPTEDGRACGSCDSCLLRSRGFAEVGLTDPALATSAGAAR

SEQ ID NO: 35935 - protein, 234 aa, Amycolatopsis niigatensis
  misc_feature (1)..(234): tr|A0A2N3X169|A0A2N3X169_9PSEU 7-cyano-7-deazaguanine s ynthase OS=Amycolatopsis niigatensis OX=369932 GN=queC PE=3 SV=1
MPIGTPAHRHPRHAIVIASGGLDSTVLAYWLAARGAELTLLSFDYGQRHRVELEYAAEIARLLNCPHETVELSMLGRLLVGSALTDTDVAVPDGYYTDESMRATVVPNRNAIMLDIAVSVAVARKADVVAFGAHAGDHAVYPDCRPEFVERFTRSVRTANEGLLVDDFEILAPFLTQSKTDIVRIGTALDVPFERTWSCYRGEATHCGTCGTCTERKEAFQQNGITDPTSYRCA

SEQ ID NO: 35936 - protein, 234 aa, Amycolatopsis orientalis
  misc_feature (1)..(234): tr|A0A193CD21|A0A193CD21_AMYOR 7-cyano-7-deazaguanine s ynthase OS=Amycolatopsis orientalis OX=31958 GN=queC PE =3 SV=1
MPIGSSTHRHPRHAIVIASGGLDSTVLAYWLAARGARLTLLSFDYGQRHRVELEYAAQIARLLDCPHEVVDLAMLGRLLAGSALTDADVPVPDGHYTDESMRATIVPNRNAIMLDIAVSLALVRNSDAVAFGAHAGDHAVYPDCRPEFVERFTRSTRIANEGLLNDDFEILAPFITQRKADIVRIGTAFSVPFEKTWSCYRGRTTHCGTCGTCTERKEAFQQNDIPDPTKYGSV

SEQ ID NO: 35937 - protein, 269 aa, Amycolatopsis rifamycinica
  misc_feature (1)..(269): tr|A0A066UE10|A0A066UE10_9PSEU ExsB family transcriptio nal regulator OS=Amycolatopsis rifamycinica OX=287986 G N=DV20_09420 PE=4 SV=1
MNGTRLVAHLAGIGRLAVAFSGGADSALVLAAAVRALGPADVLAVTANSASLAAVELAAAREIAADLGVRHLTPPTGELAEPGYTANGRQRCYFCKTTVLTAIAEVAVDHGFPALATGTNADDAVDPFRPGIRAGDELGVHTPLRTLRLSKEDVRAIARHWGLDWADKPAAPCLASRVRYGVPITTATLARVEQAESAVRAYLDDRSLPSRDVRVRDLGGTARIELDAAVAAEVRDDPRLVDAVRARGFAEAAVAPFRSGGLNHESTAG

SEQ ID NO: 35938 - protein, 237 aa, Amycolatopsis rubida
  misc_feature (1)..(237): tr|A0A1I5WK75|A0A1I5WK75_9PSEU 7-cyano-7-deazaguanine s ynthase (Queuosine biosynthesis) OS=Amycolatopsis rubid a OX=112413 GN=SAMN05421854_109277 PE=4 SV=1
MTEPRIPEVLLFSAGLDSYPAWHYLGRPPGLYFDLGHRYASQERAAVAALSDAAGIEIEISDELRLGAWEAEDAIIPLRNVHLAMLASNRAEMVWCIGVKGDHTLDKSRDAFADMGRFIARFSEKPTRVDSPFWDMTKTDIIAWYLAQGLPVEHLLLTFSCSRTDGSTVHCGRCSSCLRRWTSLVNNGVEAEFEHQPWTWDRVREFYIPAMRGGRYPDHRAHEFFAALATVGAAVAS

SEQ ID NO: 35939 - protein, 448 aa, Amycolatopsis rubida
  misc_feature (1)..(448): tr|A0A1I5ZB37|A0A1I5ZB37_9PSEU 7-cyano-7-deazaguanine s ynthase (Queuosine biosynthesis) OS=Amycolatopsis rubid a OX=112413 GN=SAMN05421854_114169 PE=4 SV=1
MSAVSRSVIAFRSSSDRAARRIEFGVDARLDGQGVPDVLSRQLDPLAADLLEVAAAVYAVDRSVVRPRYAGFERGENWARQIDLTIPVRCRERWESVRTDLAELLAWLTDDEWSVSFSESDRDRLTGGQGYLVSTLPDDIEPVLFSGGLDSSAGLALRLGGPPLLPVSVRTNNDMAGVQERVLSRLRGVSREVLPAASFRVNLTQSRTRAPGAKQENSQRSRGLLFLAAGIAVAITLGKGRLWFLENGIGAINLPYLRSQVGSQATRSAHPRTVQAMARLAGTLTGQDFAVETPLLGLTKAEAVSAVPPEYEHAIACSVSCDTGFASRISGHPPCGTCTSCLLRRQAVTASRYPKLDEGKRFRRIPDRTTPELAAMLWQASRIESRLAEQDPWSGFVEEFPEIAGAAEFVPRDRLLRLFGAYVREWPKVLAPMDVPVGDWFSGQELAS

SEQ ID NO: 35940 - protein, 476 aa, Amycolatopsis saalfeldensis
  misc_feature (1)..(476): tr|A0A1H8Y8F8|A0A1H8Y8F8_9PSEU 7-cyano-7-deazaguanine s ynthase OS=Amycolatopsis saalfeldensis OX=394193 GN=SAM N04489732_11214 PE=3 SV=1
MCFIGGGIVSGQVSDSADSELVLRRLMQLGASRGSDGAGVAMLGLHGSSFARDLAGPLAVAERIQVRSGQTVVLMNSRLEPTSEHVPDITAEQLQPYQYGGTTIVHNGIVANDHELRARYGIEQSNLATRIDSGIIPNLLVRGGSSPREQLVNFADEVVGSYALAVHNVAQPEMLTLACSFKPLWMAFSYGLGSMFFASESGQLRAALAGIDDTAEVTRLEPYSGAVVDATRVLDSFSLDRRRSGGPALCVCSGGMDSTTAAALVAEAGQKLVFCNFQYGCRAEVRERRAVEEIAEFYGAEAIFPDLRWLGELGGSTLTSEIDHIADGDEGVETAHEWVPARNLVLIAHAVALCERYGFGSIVLGTNEQEGSVFPDNELEFIETLSRAVNIGSVDRITIASPVGRMSKRDIVRTALQLNVPLHLTWSCYRSGELPCGSCGSCLQRRIAFHQLGLDDPRAYATPVPASILARSGRPA

SEQ ID NO: 35941 - protein, 430 aa, Amycolatopsis sp.
  misc_feature (1)..(430): tr|A0A5C4LYF3|A0A5C4LYF3_9PSEU Uncharacterized protein OS=Amycolatopsis sp. SYSUP0005 OX=2547244 GN=FG385_2043 0 PE=4 SV=1
MTRLLLATNSETAQDGSGYDEVFLWNDSSRSSFTGSLEPSLSALGPIGEVNSDFVRVALGVFAADRSVRRKGRGADWNARDLHLTVQIADPGRWQTKSQELTELISFLTGDRWSLDFVAAPASIVTPLPVDDASFVQTVLLSGGADSAAGALYSALQLQPGETQALVSHFSSTAISPFQKSLADSIAQLAPRQTSIHFQVNLNRGSKRLDRTNFRNEPSSRSRSLLFLALGLAVASRTSSPLLIPENGFASLNPPLGPERRGALSTRTTHPRFLHDLEKLLAALGAHSRIENPFQNLTKGQMFALIADQTNADTASRYLSATNSCSHTDAHYEGAPPGSSCGVCFGCIVRRAAFKAAGLKDRTTYLSEDPDGSYKDFVQKKSIEAAVADFCQDEVKPRTVMAMSLSANYRASDALDLCRRGAAELREYIQ

SEQ ID NO: 35942 - protein, 448 aa, Amycolatopsis sp.
  misc_feature (1)..(448): tr|A0A178X6F9|A0A178X6F9_9PSEU 7-cyano-7-deazaguanine s ynthase OS=Amycolatopsis sp. M39 OX=1825094 GN=queC PE= 4 SV=1
MSAVSRSVIAFRSSSDRAARRIEFGVDARLDGQGVPDVLSRQLDPLAADLLEVAAAVYAVDRSVVRPRYAGFERGENWARQIDLTIPVRCRERWESVRTDLAELLAWLTDDEWSVSFSESDRDRLTGGQGYLVSTLPDDIEPVLFSGGLDSSAGLALRLGGPPLLPVSVRTNNDMAGVQERVLSRLRGVSREVLPAASFRVNLTQSRTRAPGAKQENSQRSRGLLFLAAGIAVAITLGKGRLWFLENGIGAINLPYLRSQVGSQATRSAHPRTVQAMARLAGTLTGQDFAVETPLLGLTKAEAVSAVPPEYEHAIACSVSCDTGFASRISGHPPCGTCTSCLLRRQAVTASRYPKLDEGKRFRRIPDRTTPELAAMLWQASRIESRLAEQDPWSGFVEEFPEIAGAAEFVPRDRLLRLFGAYVREWPKVLASMDVPVGDWFSGQELAS

SEQ ID NO: 35943 - protein, 236 aa, Amycolatopsis sulphurea
  misc_feature (1)..(236): tr|A0A2A9FIC3|A0A2A9FIC3_9PSEU 7-cyano-7-deazaguanine s ynthase OS=Amycolatopsis sulphurea OX=76022 GN=queC PE= 3 SV=1
MPIGTPAHRHPRHAIVIASGGLDSTVLAYWLAARGAKLTLLSFDYGQRHRVELEHAADIASLLGCPQKTIELATLGRLLAGSALTDTVVPVPDGHYTDESMRATIVPNRNAIILDIAVAVAIVSKADVVAFGAHAGDHAIYPDCRPEFVERFTRTVRAANEGLLASDFEVLAPFLAHSKTDIVRIGAALGVPFERTWSCYRGQAMHCGTCGTCIERKEAFESNGLPDPTTYRNACA

SEQ ID NO: 35944 - protein, 232 aa, Amycolatopsis xylanica
  misc_feature (1)..(232): tr|A0A1H3PBZ2|A0A1H3PBZ2_9PSEU 7-cyano-7-deazaguanine s ynthase OS=Amycolatopsis xylanica OX=589385 GN=queC PE= 3 SV=1
MSKPAIVLLSGGLDSTTTLAIAKDQGFAPYVLSFRYGQRHSVELTAAQRVAEHQGVERHIIADIDLRVFGGSALTDDIEVLKGRTEAEMNEGIPSSYVPARNTIFLSFALAYAEVTGARDIFTGVTAVDYSGYPDCRPEYLAAYETMANLATKSAVEGESPIKVHAPLLRLSKADIIRTGTRLGVDYSLTSSCYDPDDEGRACGQCDTCVLRLKGFTEAGVPDPVRYQGVSA

SEQ ID NO: 35945 - protein, 235 aa, Anabaena cylindrica
  misc_feature (1)..(235): tr|K9ZLI9|K9ZLI9_ANACC 7-cyano-7-deazaguanine synthase OS=Anabaena cylindrica (strain ATCC 27899 / PCC 7122) O X=272123 GN=queC PE=3 SV=1
MGKPKLSSEMKAVILLSGGLDSSTVLYQARADGCECYVISFDYQQRHQRELKSALLIAQAVGVVKHQVVNFDLRQWGGSALTDHAIALPQERSLDEMSQNIPVTYVPARNTIFLSFALAYAEAIAAQRVYIGVNALDYSGYPDCRPDYIQAMQEVFRLGTKQGLEGQPINIVAPLINLKKTEIIQLGNQLGVPWELTWSCYAGGEVACGVCDSCRLRLAAFAELGLKDLVPYAKY

SEQ ID NO: 35946 - protein, 224 aa, Anabaena sp.
  misc_feature (1)..(224): tr|A0A1B7VMZ7|A0A1B7VMZ7_9NOST 7-cyano-7-deazaguanine s ynthase OS=Anabaena sp. WA113 OX=1710889 GN=queC PE=3 S V=1
MKAVILLSGGLDSSTVLYQAKADGCECYTISCDYQQRHRKELDAALKVGKEAGTIQHQVVSFDLRQWGGSALTDDKISLPEQRSLDEMAENIPVTYVPARNTIFLSFALSYAEAIAAERVYIGVNALDYSGYPDCRPDYIQAMQEVFRLGTKQGREGQAIQVITPLINLKKTEIIQLGNQLGVPWHLTWSCYAGSDLACGVCDSCRLRLAAFAELGLTDPIDYV

SEQ ID NO: 35947 - protein, 227 aa, Anabaena sp.
  misc_feature (1)..(227): tr|A0A1B7VA51|A0A1B7VA51_9NOST 7-cyano-7-deazaguanine s ynthase OS=Anabaena sp. AL09 OX=1710891 GN=queC PE=3 SV =1
MKAVILLSGGLDSSTVLYKAKADGCECYAISFDYQQRHRKELNSALMIAKAAGVIQHQVVNFDLGQWGGSALTDHKIDVPKGRSLAEMADNIPVTYVPARNTIFLSFALSYAEAIAAERVYIGVNILDYSGYPDCRPDYIEAMQEVFRLGTKQGREGEAMKIIAPLIDLKKTEIIQLGNQLGVPWDLTWSCYAGGESACGVCDSCQLRLAAFAELGLKDPVDYSEVG

SEQ ID NO: 35948 - protein, 224 aa, Anabaenopsis circularis
  misc_feature (1)..(224): tr|A0A1Z4GMS7|A0A1Z4GMS7_9CYAN 7-cyano-7-deazaguanine s ynthase OS=Anabaenopsis circularis NIES-21 OX=1085406 G N=queC PE=3 SV=1
MKAVILLSGGLDSSTVLYQAKADGCDCYAISFDYQQRHRRELNSARHVAQTAQVVEHQVVNFDLRQWGGSALTDDKIDLPEARSLAEMSQNIPVTYVPARNTIFLSFALGYAEAIAAERVYIGVNALDYSGYPDCRPDYIQAMQEVFRLGTKQGREGNPTAIVAPLVNLKKTEIIQLGNTLGVPWDLTWSCYSGGDVACGVCDSCRLRLAAFDELGLTDPVPYA

SEQ ID NO: 35949 - protein, 221 aa, Anaerobacillus alkalidiazotrophicus
  misc_feature (1)..(221): tr|A0A1S2MBU3|A0A1S2MBU3_9BACI 7-cyano-7-deazaguanine s ynthase OS=Anaerobacillus alkalidiazotrophicus OX=47296 3 GN=queC PE=3 SV=1
MKKALVVFSGGQDSTTCLFWALKNFDVVETVTFDYNQRHNKEIDVAKAIASDLGVENTVIDMSLLNQLTSNALTRSDIEIKEGGEGELPSTFVDGRNHLFLSFAAIMAKAKGIKNIITGVCETDFSGYPDCRDVFIKSLNVTLNLSMDYQFVIHTPLMWIDKKETWALADKLGAFEYVREKTLTCYNGIIGDGCGECPACKLRKEGLRKHLEEQKGGAANV

SEQ ID NO: 35950 - protein, 221 aa, Anaerobacillus alkalilacustris
  misc_feature (1)..(221): tr|A0A1S2LWU9|A0A1S2LWU9_9BACI 7-cyano-7-deazaguanine s ynthase OS=Anaerobacillus alkalilacustris OX=393763 GN= queC PE=3 SV=1
MKKALVVFSGGQDSTTCLFWALKNFDVVETVTFDYNQRHNKEIDVAKAIASDLGVENTVIDMSLLNQLTSNALTRSDIEIKEGGEGELPSTFVDGRNHLFLSFAAIMAKAKGIKNIITGVCETDFSGYPDCRDVFVKSLNVTLNLSMDYQFVIHTPLMWIDKKETWALADELGAFEYVREKTLTCYNGIIGDGCGECPACKLRKEGLRMYLEEQKGGAADV

SEQ ID NO: 35951 - protein, 222 aa, Anaerobacillus isosaccharinicus
  misc_feature (1)..(222): tr|A0A1S2MFV7|A0A1S2MFV7_9BACI 7-cyano-7-deazaguanine s ynthase OS=Anaerobacillus isosaccharinicus OX=1532552 G N=queC PE=3 SV=1
MKKALVVFSGGQDSTTCLFWALKHFDQVETVTFDYNQRHKEEIEVAKKIAHEMSVENTVIDMSLLNQLTSNALTRSDIEIKEGEDGELPTTFVDGRNHLFLSFAAIMAKAKGINHIITGVCETDFSGYPDCRDMFVKSLNVTLNLAMDYNFVIHTPLMWIDKKETWALAAELGAFDYIREKTLTCYNGIVGDGCGECPACKLRSEGLRKFLEEQGTGVSTHV

SEQ ID NO: 35952 - protein, 206 aa, Anaerobacillus macyae
  misc_feature (1)..(206): tr|A0A0J6FZA5|A0A0J6FZA5_9BACI 7-cyano-7-deazaguanine s ynthase OS=Anaerobacillus macyae OX=157733 GN=queC PE=3 SV=1
MGMAKEKGYELYPITFHYGQKHNREVEQAKKVAEYYDAPDHRIVNISFLNQIGGSALTDDSIDVPSDMDEDEIPVTYVPARNMIFLSLASAYAEVIGAEAIYIGVSAVDYSGYPDCRPEFIQSMNETVNLATKAGATGSEMKIETPLIDMTKADTVKEGLRLNVPYELTTSCYNGEEEACGECDSCRLRLKGFEEARAVDPIPYKA

SEQ ID NO: 35953 - protein, 224 aa, Anaerobacterium chartisolvens
  misc_feature (1)..(224): tr|A0A369BBC8|A0A369BBC8_9FIRM 7-cyano-7-deazaguanine s ynthase OS=Anaerobacterium chartisolvens OX=1297424 GN= queC PE=3 SV=1
MKKAIVLLSGGMDSTTVLYIAKAEGYEVYALSFNYGQRHKKELDCARRIADRAGVQEHIIVKTNMNAWGGSALTDDKIDVPDRDESSLDIPITYVPARNMIFLSYAASYAEAVGAQDIFIGVSEVDYSGYVDCRQEFIDAMENAINMGTVCAVEKGKRIKIQAPLVHMKKADEIKLGVSLGVDYGLTWTCYRGEEEACGTCDSCVLRLKAFEEARLRDEVRYKA

SEQ ID NO: 35954 - protein, 230 aa, Anaerobium acetethylicum
  misc_feature (1)..(230): tr|A0A1D3TN68|A0A1D3TN68_9FIRM 7-cyano-7-deazaguanine s ynthase OS=Anaerobium acetethylicum OX=1619234 GN=queC PE=3 SV=1
MTEKALVLFSGGVDSTTCLGMAVEKYGRENVTALSISYGQKHTKEIEASQKIADYYKVEHLYLDLAKIFEYSNCSLLNHSQKEIPKDAYAKQLEKTDGKPVSTYVPFRNGLFLSSAASIALSKGCSVIYYGAHSDDSAGNAYPDCSSVFNNAMNEAIYEGSGRQLRIEAPFVSWSKADVVRKGLDINVPYELTWSCYEGGDVPCGNCGTCIDRSLAFEKNGVADPALCGR

SEQ ID NO: 35955 - protein, 221 aa, Anaerobutyricum hallii
  misc_feature (1)..(221): tr|C0ERV2|C0ERV2_9FIRM 7-cyano-7-deazaguanine synthase OS=Anaerobutyricum hallii DSM 3353 OX=411469 GN=queC PE =3 SV=1
MQELKNKDAAVVVFSGGQDSTTCLFWALKRYKKVIALSFDYHQKHVKELECAKKICRDHEVEHHIMDMSLLNQLAPNSLTRVDIKVDESAPEEGTPNSFVDGRNLLFLSYAAVFAKQRGITDIITGVSQSDFSGYPDCRDMFIKSLNTTLCLAMDYQFDIITPLMWLDKKETWALADELGAFDIIRNETLTCYNGIIGDGCGHCPSCKLRKKGLDAYLASK

SEQ ID NO: 35956 - protein, 221 aa, Anaerobutyricum hallii; identical to SEQ ID NO: 35955
  misc_feature (1)..(221): tr|A0A173SDK3|A0A173SDK3_9FIRM 7-cyano-7-deazaguanine s ynthase OS=Anaerobutyricum hallii OX=39488 GN=queC PE=3 SV=1

SEQ ID NO: 35957 - protein, 218 aa, Anaerococcus nagyae
  misc_feature (1)..(218): tr|A0A3E2THL9|A0A3E2THL9_9FIRM 7-cyano-7-deazaguanine s ynthase OS=Anaerococcus nagyae OX=1755241 GN=queC PE=3 SV=1
MKSLVLLSGGVDSSTCLAMALDNKEEVIAISIEYGQSHGKRELQAAKDIANYYKVDHRIIDLSNIFNASKSSLNKNNNLEVSKGDYADQENINTEVEFRNGVFLTVMASLALQFDANKIYYGAHLDDSGAIYADTSEEFIDSITRTIDIGTRSKVEVVTPFRNKRKEDIVRTGLKLNLPYELTYSCYVGGDEPCGECGTCIDRKKAFLANGITDEKYF

SEQ ID NO: 35958 - protein, 231 aa, Anaeroglobus geminatus
  misc_feature (1)..(231): tr|G9YHD2|G9YHD2_9FIRM 7-cyano-7-deazaguanine synthase OS=Anaeroglobus geminatus F0357 OX=861450 GN=queC PE=3 SV=1
MRSDTVKAAVLASGGVDSTTALAQAVERYGAAKVTAVSVLYGQKHIKELEAAEKIASYYGVEHISVDAAPLFQYSRASLLQGSPEPVPKECYADQLKKTQGKAPFSTCVPFRNGIFLAAAAGIALSLGSEAVIYGAHADDAAGAAYPDCSPAFFEAMAAAVWEGSGRQIRLEAPFLAMNKAAVVEIGLRLRVPYELTWSCYEGGAEPCGQCGTCRDRAAAFAANRVSDPAR

SEQ ID NO: 35959 - protein, 250 aa, Anaerolineaceae bacterium
  misc_feature (1)..(250): tr|A0A3B9PYS9|A0A3B9PYS9_9CHLR Uncharacterized protein OS=Anaerolineaceae bacterium OX=2024896 GN=DCK95_00335 PE=4 SV=1
METNHKASKINLFWTGGWDSTYRLLEILIKEKKIVQTYYIIDPNRPSHALEMKRMDEIRKLIYKKYPSTRDQFLPTIRIELSDIQEDADIEKAFKEANEKQHLGNQYDWLARFCKQFDIDNMELCVQKLGNPALPCRFSPFFENDQKNGELVYKKSLLNEPEYVLFRRFKFPILHLTKQDMLNAARQNGWLGIMKKTWFCHQPIFGKFPCGQCDPCQQTMNERGMQNRIPLLVRLMRRRPLSKILTKFYR

SEQ ID NO: 35960 - protein, 443 aa, Anaerolineaceae bacterium
  misc_feature (1)..(443): tr|A0A2E0UU84|A0A2E0UU84_9CHLR Uncharacterized protein OS=Anaerolineaceae bacterium OX=2024896 GN=CL609_10590 PE=4 SV=1
MIWHIIAREKSDDSFTIENSQKGIPIYIDLSGVDKTIGIKSNLSSLFDSYGSFPTEVASDLLKLAMTVYSADKSAIRNQAFNKWSRYFHIYQPVSNIDLWNGIKEKLEQSLDFLTGDHWEIHFRISTEKLFGGMKEIQERIPSFSHSPSAFALMSGGLDSFAGAIDLLENTLGEVIFISHYSRGGATKTVQDRVYSLLRQKYPDRFCSLQFFVQPSEGIIEDVEPSQRSRSFLFLSIGAAVSSASHTNLPLNIFENGLLSLNVPLAANRGGGLSTRTTHPHFLSMFQEILESLGITMSIATPFRFLTKGEMLTGTKNPGVLQEGVKLTHSCSHGTYVRFKGGAFDDHCGYCLPCIIRRAATTAAGIEDVNYVVDVISNNLPANRVEGKDLYAMKIALKRLDNMTSSLYSHVRTAGPLQGTPEEISQYVDVYKRGMAEVQMLLG

SEQ ID NO: 35961 - protein, 186 aa, Anaerolineales bacterium
  misc_feature (1)..(186): tr|A0A523ZYB6|A0A523ZYB6_9CHLR Uncharacterized protein (Fragment) OS=Anaerolineales bacterium OX=2073117 GN=E3 J25_11545 PE=4 SV=1
MKRCTRCILPETFPGVKFDEAGVCNYCLAFTDALQKQERLKQRLRQKFHHILEQVRGQNSHDCLMSWSGGKDSTYTLMLLKQEYDLNILAFTFDMGFTSPTAFSNMRRIAENLGVDHIIVKPRFDLLRQVFVASTARDMYPAKALDRASNICTSCMGMAKGIALRMAIEKRIPIIAYGWSPGQAPL

SEQ ID NO: 35962 - protein, 251 aa, Anaeromassilibacillus sp.
  misc_feature (1)..(251): tr|A0A1Y4EPG1|A0A1Y4EPG1_9FIRM TIGR00268 family protein OS=Anaeromassilibacillus sp. An250 OX=1965604 GN=B5F54 _11915 PE=4 SV=1
MTLEQFFHAHPRAAVAFSGGTDSALLLWAAKTYGCDVHAYYMKTAFQPAFELADARRLAGELDIPMTVIETDILAVPGAAANGPDRCYHCKRQLFSALWQRARRDGHTLLLDGTNASDDEGDRPGMQALRELEVRSPLRECGLTKDEVRRLSREAGLFTWEKPAYACLATRIPTGTRITAGDLARVERAEDALSRLGFADFRVRLREDGARIQVTEAQMALARAKWEEILEQLKPDFTDVLLDQTPRQASR

SEQ ID NO: 35963 - protein, 217 aa, Anaeromicrobium sediminis
  misc_feature (1)..(217): tr|A0A267MDA7|A0A267MDA7_9CLOT 7-cyano-7-deazaguanine s ynthase OS=Anaeromicrobium sediminis OX=1478221 GN=queC PE=3 SV=1
MNNEKAVVVFSGGQDSTTCLFWAKEKFGDVIAISFDYNQKHKFELECAKDICKKHGIEHHILDLGLLNQLAPNSLTRVDIEVDKTAPKEGLPNSFVDGRNLLFFTFAAVFAKQRGINHIVTGVSQSDYSGYPDCRDVFIKSLNVTLNLSMDYEFEIHTPLMWIDKAATWKMADDLGVLHIVKNETLTCYNGIVGNGCGDCPACDLRKKGYLKFKEMK

SEQ ID NO: 35964 - protein, 447 aa, Anaeromyxobacter dehalogenans
  misc_feature (1)..(447): tr|B8JF98|B8JF98_ANAD2 PP-loop superfamily ATPase-like protein OS=Anaeromyxobacter dehalogenans (strain 2CP-1 / ATCC BAA-258) OX=455488 GN=A2cp1_1108 PE=4 SV=1
MKSPAYRYEVDGGGRIVVSHGGGTHILTPKLTADTVERSWLAPFARPERDLIRVAAAIHSVDRLSRRIPQGTKGLERELHWQRRLHVKLAVEDPDRWAAARERVARLLAFMTDDEWNLTFASCSDHLRPQPLFTENCENAEVGLFSGGLDSIVGTYLRSRTAKKLIVVSVHGIQVRASAQQRAITMLQRASFFSVPLHWVSFDHQLRHAHPPEKSQRCRGFLFLSIGAAVARTVGASTLHTYENGIGALNPPMNLAQVGAQNTRAMHPGTLASLEGILEVVQDDPVRLEAPFLFSTKGEMCRDAREHLIPLAQASNSCDEGEHGKPDPAEHCGLCTSCLLRRSALFAALGDKDPTPYRNRTSSHDDYDVLAFEQQARRFGGMQDWSTLLRSDPSLALIASYSKRRGTAPAVVADRIRDLFGRHRAELDSFYAARRPRPKIASSEERV

SEQ ID NO: 35965 - protein, 234 aa, Anaeromyxobacter dehalogenans
  misc_feature (1)..(234): sp|Q2IG55|QUEC_ANADE 7-cyano-7-deazaguanine synthase OS =Anaeromyxobacter dehalogenans (strain 2CP-C) OX=290397 GN=queC PE=3 SV=1
MAKATSEARRAVVLLSGGLDSSTCLAVARAEGLEAHCLSVDYGQRHKGELARARRIARALGAAGHRVVKVDLSAFGGSALTDAAIAVPKGRSEARMARDIPVTYVPARNTVMLSLALAHAEVIGAEQIFVGVNAIDYSGYPDCRPAFLHAFERLAKVATRAGVEGHPLRIRAPLLRLSKAGIVRLGTKLGVPYRMTLSCYDPIRGRACGRCDACSLRRKGFAEAGVQDPTQYAK

SEQ ID NO: 35966 - protein, 249 aa, Anaeromyxobacter sp.
  misc_feature (1)..(249): tr|A0A1F3C662|A0A1F3C662_9DELT 7-cyano-7-deazaguanine s ynthase OS=Anaeromyxobacter sp. RBG_16_69_14 OX=1797238 GN=queC PE=3 SV=1
MAKRVARPRAVVLLSGGLDSSTCLAVAMSELFEAHALTVNYGQRHRGEIDRARRVARALGAADHRVVRVDLFSFGGSALTDRAIAVPKGRSARAMASGIPITYVPARNTVLLALALAHAETIGAADVYVGVNAIDYSGYPDCRPAFIRAFERLARVATKAGVEGRRLRIRAPLLRLSKAGIIQLGTRLGVPYRVTLSCYDPVRGRACGRCDACELRRKGFAEAGVSDPTAYADVPSEARPASRSRELGR

SEQ ID NO: 35967 - protein, 233 aa, Anaeromyxobacter sp.
  misc_feature (1)..(233): sp|A7HHA2|QUEC_ANADF 7-cyano-7-deazaguanine synthase OS =Anaeromyxobacter sp. (strain Fw109-5) OX=404589 GN=que C PE=3 SV=1
MAKRPTKRAVVLLSGGLDSTTCLAVARRDGFEAHCLSVDYGQRHKGELARARRLSRALGAADHRVVKVDLSAFGGSALTDRAIAVPKGRSGRRRAAEIPVTYVPARNTVLLALALAHAETLGAEDVYVGVNAIDYSGYPDCRPAFLRAFERLATVATKAGVEGRPLRIHAPLLRLTKAGIVRLGTSLGVPYRVTLSCYDPVRGRACGACDACVLRRKGFAEAGIPDPTLYVQK

SEQ ID NO: 35968 - protein, 219 aa, Anaerospora hongkongensis
  misc_feature (1)..(219): tr|A0A4R1Q1I3|A0A4R1Q1I3_9FIRM 7-cyano-7-deazaguanine s ynthase OS=Anaerospora hongkongensis OX=244830 GN=queC PE=3 SV=1
MAVSDGGAMVVFSGGQDSTTCLFWALERFKHVEAVTFNYNQRHSLEIDCARTIASDLNIAHTILDMSLLNQLTANALTRPAMAITPGEQGNLPSTFVDGRNLLFMSFAAILAKQKGLHHIVTGVCETDFSGYPDCRDVFIKSLNVTIDLAMEYPFVIHTPLMWLNKAQTWELADQMGRLDYIRTKTLTCYDGVMGEGCGQCPACKLRNNGLAQYQQEKQ

SEQ ID NO: 35969 - protein, 218 aa, Anaerosporomusa subterranea
  misc_feature (1)..(218): tr|A0A154BM59|A0A154BM59_ANASB 7-cyano-7-deazaguanine s ynthase OS=Anaerosporomusa subterranea OX=1794912 GN=qu eC PE=3 SV=1
MNENGAMVVFSGGQDSTTCLFWALERFKNVEAVTFDYNQRHKLEIECAKNIAKEFGVQHTILDMSLLSQLTANALTREDIAIAKGSDGELPTTFVDGRNMLFLTFAAVLAKQKNLRHIVTGVCETDFSGYPDCRDIFVKSLNVTLNLAMDYQFVVHTPLMWINKAQTWEMADVMGKLDFIREKTLTCYYGILGSGCGQCPACVLRNNGLQEYLISRGR

SEQ ID NO: 35970 - protein, 219 aa, Anaerostipes caccae
  misc_feature (1)..(219): tr|B0ME50|B0ME50_ANACD 7-cyano-7-deazaguanine synthase OS=Anaerostipes caccae (strain DSM 14662 / NCIMB 13811 / L1-92) OX=411490 GN=queC PE=3 SV=1
MSKPTKAVVVFSGGQDSTTCLFWAKKKYEEVIALSFDYGQKHSDELICAKEICKKYGVEHHILDMALLNQLAPNSLTRADIEVDKEAPETGTPNSFVDGRNMLFLTFAAVFAKQRDIHVLVTGVSQSDFSGYPDCRHVFITSLETTLTLAMDYEFEVITPLMWIDKKETWKMADDLGVFDVIRQETLTCYNGVRGDGCGDCPACRLRRRGMEAYLSERK

SEQ ID NO: 35971 - protein, 221 aa, Anaerostipes hadrus
  misc_feature (1)..(221): tr|A0A1Q2C421|A0A1Q2C421_ANAHA 7-cyano-7-deazaguanine s ynthase OS=Anaerostipes hadrus OX=649756 GN=queC PE=3 S V=1
MAKPNKAVVVFSGGQDSTTCLFWAKKKYDEVIALSFNYGQRHSKELECAKKICKEHGVEHHILDMGLLNQLAPNSLTRVDMEVDHEAPEEGTPNSFVDGRNMLFLTFAAVFAKQRDIHVLVTGVSQSDFSGYPDCRHVFISSLETTLTLAMDYEFEVITPLMWIDKKQTWEMADKLGVFDIVKNETLTCYNGVMGDGCGECPACKLRRHGLEEYLKVRDHK

SEQ ID NO: 35972 - protein, 221 aa, Anaerostipes hadrus
  misc_feature (1)..(221): tr|L1PSZ7|L1PSZ7_ANAHA 7-cyano-7-deazaguanine synthase OS=Anaerostipes hadrus DSM 3319 OX=649757 GN=queC PE=3 SV=1
MAKPNKAVVVFSGGQDSTTCLFWAKKKYDEVIALSFNYGQRHSKELECAKKICKEHGVEHHILDMGLLNQLAPNSLTRVDMEVDHEAPEEGTPNSFVDGRNMLFLTFAAVFAKQRDIHVLVTGVSQSDFSGYPDCRHVFISSLETTLTLAMDYEFEVITPLMWIDKKQTWEMADKLGVFDIVRNETLTCYNGVMGDGCGECPACKLRRHGLEEYLKVRGHK

SEQ ID NO: 35973 - protein, 220 aa, Anaerostipes rhamnosivorans
  misc_feature (1)..(220): tr|A0A4P8IE08|A0A4P8IE08_9FIRM 7-cyano-7-deazaguanine s ynthase OS=Anaerostipes rhamnosivorans OX=1229621 GN=qu eC PE=3 SV=1
MSKPTKAVVVFSGGQDSTTCLFWAKKKYEEVIALSFNYGQKHSDELVCAKEICKKHGVEHHILDMGLLNQLAPNSLTRADIEVDKEAPETGTPNSFVDGRNMLFLTFAAVFAKQRGIHVLVTGVSQSDFSGYPDCRHVFITSLETTLTLAMDYEFEVITPLMWIDKKETWKMADDLGVFDIIRQETLTCYNGVKGDGCGDCPACKLRRKGMEAYLTERRN

SEQ ID NO: 35974 - protein, 219 aa, Anaerostipes sp.
  misc_feature (1)..(219): tr|R6QUY9|R6QUY9_9FIRM 7-cyano-7-deazaguanine synthase OS=Anaerostipes sp. CAG:276 OX=1262699 GN=queC PE=3 SV= 1
MSKPTKAVVVFSGGQDSTTCLFWAKKKYEEVIALSFDYGQKHSDELICAKEICKKYGVEHYILDMALLNQLAPNSLTRADIEVDKEAPETGTPNSFVDGRNMLFLTFAAVFAKQRDIHVLVTGVSQSDFSGYPDCRHVFITSLETTLTLAMDYEFEVITPLMWIDKKETWKMADDLGVFDVIRQETLTCYNGVRGDGCGDCPACRLRRRGMEAYLSERK

SEQ ID NO: 35975 - protein, 222 aa, Anaerostipes sp.
  misc_feature (1)..(222): tr|A0A1Q9JQ00|A0A1Q9JQ00_9FIRM 7-cyano-7-deazaguanine s ynthase OS=Anaerostipes sp. 494a OX=1261636 GN=queC PE= 3 SV=1
MSKPTKAVVVFSGGQDSTTCLFWAKKKYDEVIALSFDYGQRHSLELECAKDICNKYEIEHHILNMELLNQLAPNSLTRMDMEVDHDAPEKGTPNTFVDGRNMLFLTFAAVFAKQRDIHVLVTGVSQSDFSGYPDCRHVFISSLETTLTLAMDYEFEIITPMMWIDKKETWEMADKLGVFDIIRNETLTCYNGVMGDGCGECPSCKLRKKGLDEYLKIRTKND

SEQ ID NO: 35976 - protein, 228 aa, Anaerotruncus sp.
  misc_feature (1)..(228): tr|A0A3A9HLR7|A0A3A9HLR7_9FIRM 7-cyano-7-deazaguanine s ynthase OS=Anaerotruncus sp. 1XD22-93 OX=2320082 GN=que C PE=3 SV=1
MKVLVLSSGGIDSTVCLALAVEKYGYENVLSLSVSYGQKHSNELKAARRIAQHYHVRHKELDMGMIFAGSDCTLLEGRGEIPKGTYASQLQESTGKPVSTYVPFRNGLFLAAAASVALADGCEKIYYGAHADDSAGNAYPDTSEAFHEAISRAVYEGSGKQLEIEAPFLYSHKADVVRAGMELQVPFAFTWSCYEGGEKACGKCATCMDRMNAFALNGIQDPIEYESS

SEQ ID NO: 35977 - protein, 227 aa, Anaerovibrio lipolyticus
  misc_feature (1)..(227): tr|A0A1M6DI35|A0A1M6DI35_9FIRM 7-cyano-7-deazaguanine s ynthase OS=Anaerovibrio lipolyticus DSM 3074 OX=1120997 GN=queC PE=3 SV=1
MEKAVVLLSGGLDSTVCMAVAKSKGMEVYPISFNYHQRHNIELEGAKKVAKFYGVKKHLIIETNMEEIGGSALTDSQIEVPDGDFQHGAEDIPVTYVPARNMIFLSYAMAYAEVIGADHVYIGVNAVDYSGYPDCRPEFIGSFQKTANLATKAGTADGRNIKIETPLQDLSKKEIVQLGSKLGAPLQFTHSCYKGGEKACGVCDSCKLRLRGFAEAGVVDPVEYENM

SEQ ID NO: 35978 - protein, 227 aa, Anaerovibrio lipolyticus; identical to SEQ ID NO: 35977
  misc_feature (1)..(227): tr|A0A0B2JP02|A0A0B2JP02_9FIRM 7-cyano-7-deazaguanine s ynthase OS=Anaerovibrio lipolyticus OX=82374 GN=queC PE =3 SV=1

SEQ ID NO: 35979 - protein, 227 aa, Anaerovibrio sp.
  misc_feature (1)..(227): tr|A0A3D4ANJ7|A0A3D4ANJ7_9FIRM 7-cyano-7-deazaguanine s ynthase OS=Anaerovibrio sp. OX=1872532 GN=queC PE=3 SV= 1
MEKAVVLLSGGLDSTVCMAVAKSKGMEVYPISFNYHQRHNIELEGAKKVAKFYGVKKHLIIETNMEEIGGSALTDSKIEVPDGDFQHGADDIPVTYVPARNMIFLSYAMAYAEVIGADHVYIGVNAVDYSGYPDCRPEFIGSFQKTANLATKAGTADGRNIKIETPLQDLSKKEIVQLGSKLGAPLQFTHSCYKGGEKACGVCDSCKLRLRGFAEAGVVDPVEYENM

SEQ ID NO: 35980 - protein, 227 aa, Anaerovibrio sp.
  misc_feature (1)..(227): tr|A0A1X1Q4J1|A0A1X1Q4J1_9FIRM 7-cyano-7-deazaguanine s ynthase OS=Anaerovibrio sp. JC8 OX=1240085 GN=queC PE=3 SV=1
MEKAVVLLSGGLDSTVCMAVAKSKGMEVYPISFNYHQRHNIELEGAKKVAEFYGVKTHLIIETNMEGIGGSALTDDNIEVPDGDFEHGAEDIPITYVPARNMIFLSYAMAYAEVIGADHVFIGVNAVDYSGYPDCRPEFIGSFQKTANLATKAGTADGRNIKIETPLQDLSKKDIVQLGSKLGAPLQFTHSCYKGGEKACGVCDSCKLRLRGFEEAGVVDPVEYENM

SEQ ID NO: 35981 - protein, 196 aa, Ancylomarina sp.
  misc_feature (1)..(196): tr|A0A4Q1JJF4|A0A4Q1JJF4_9BACT 7-cyano-7-deazaguanine s ynthase OS=Ancylomarina sp. SHSM-M15 OX=2501299 GN=EO24 4_12765 PE=3 SV=1
MKKAILLSGGMDSICLAYFLKPDIAYTIDYGQVCSDREILISQKICRILEIEHKIIRVDCNSLGSGILANRKSIDNSPSDEWWPYRNQLLVTLSLMRAIKDDIKEIHLASVKSDKFHKDGTDKFYKIINELSSYQEGNIAVKCETLEYYTHELVEKYKVPIDLLLMAHSCHISNIACGFCPGCLKQLKVKQELNIS

SEQ ID NO: 35982 - protein, 209 aa, Ancylomarina sp.
  misc_feature (1)..(209): tr|A0A425Y038|A0A425Y038_9BACT 7-cyano-7-deazaguanine s ynthase OS=Ancylomarina sp. A4 OX=2283628 GN=DWB62_2011 0 PE=3 SV=1
MNDFKKGIILVSGGLDSTTLCYLFIKKNIEFIPLIINYGQHCFDTELKRLKSVLPNDYVERVEIIDVSQIYKYSNSKFINAGNLWEEKISADDLYIPYRNVLILTIAASFARTLDLNNVYSAFINSNHAKEIDCSNDFFNNLENLMSEYGSVKIEMPFRNFTKFEVAKLGVELGVPIGKTFSCQASPSIPCGACPNCVDRLDALKKLSE

SEQ ID NO: 35983 - protein, 222 aa, Andreesenia angusta
  misc_feature (1)..(222): tr|A0A1S1V6S0|A0A1S1V6S0_9FIRM 7-cyano-7-deazaguanine s ynthase OS=Andreesenia angusta OX=39480 GN=queC PE=3 SV =1
MKKAVILLSGGLDSTTCMAVAKAEGYELYPISFDYGQKHDRELALASKIAEHYSAAEHRVIKMQNIGGSALTDSDIEVPEYSEDGGVPVTYVPARNLLFLSYALGYAEVVGADAIFIGVSSVDYSGYPDCRPEFIDAFRKMVEVGTVAGLEGNPIEIVTPLIDLSKAETVKLGVKLGAPYEYTTSCYNGEEEACGVCDSCVLRLRGFQEAGIEDPIAYKKLT

SEQ ID NO: 35984 - protein, 234 aa, Andreprevotia lacus
  misc_feature (1)..(234): tr|A0A1W1XAM6|A0A1W1XAM6_9NEIS 7-cyano-7-deazaguanine s ynthase OS=Andreprevotia lacus DSM 23236 OX=1121001 GN= queC PE=3 SV=1
MTDLNHANGKPAVILLSGGLDSATCLAIAKNKGFTPYCLSFDYGQRHNAELKAAARVAAALGAAEHRIARIDLAAFGGSALTDASIAVPEDGVHEDEIPVTYVPARNTIMLSFALAWAEVLKADDIYIGVNAVDYSGYPDCRPEYISAFQAMGRLATKVGVEGASLTIHTPLIRLTKAEIIETGTALGVDYSLTTTCYQADDEGRACGVCDACRLRRAGFDDAGIKDPTRYRAV

SEQ ID NO: 35985 - protein, 229 aa, Aneurinibacillus aneurinilyticus
  misc_feature (1)..(229): tr|U1YBR0|U1YBR0_ANEAE 7-cyano-7-deazaguanine synthase OS=Aneurinibacillus aneurinilyticus ATCC 12856 OX=64974 7 GN=queC PE=3 SV=1
MEKKAVVVLSGGLDSTTCMGIAKDAGYELYPLTFYYGQRHNREVEQAKKIADFYGVPAHRLVNLDFLGQIGGSALTDTNIEVPVVQANAADEEEIPATYVPARNMIFLSLAVAYAEVVGAEVIYIGVSAVDYSGYPDCRPEFIRSMNETVHLATKAGAKGTGIRIEAPLAHLSKKETIEWGLALGVPYELSTSCYQGGAEACGECDSCRLRLKGFAEAGVKDPISYQKG

SEQ ID NO: 35986 - protein, 229 aa, Aneurinibacillus danicus
  misc_feature (1)..(229): tr|A0A511V806|A0A511V806_9BACL 7-cyano-7-deazaguanine s ynthase OS=Aneurinibacillus danicus OX=267746 GN=queC P E=3 SV=1
MPKKAVVVLSGGLDSTTCMGIAQAAGFETYPLTFHYGQRHSREVEQAKKIAAFYNVPNHRIVDLDFLKQIGGSALTDERIDVPVGKKNGEESEDIPPTYVPARNLIFLSLAAAYAETIGAEVIYIGVSAVDYSGYPDCRPEFIRSMNETVGLATKAGVTGAGIRIEAPLAHLSKKETIEWGLKLGVPYELSTSCYQGGSEACGECDSCRLRLKGFEEAGAKDPIFYKKG

SEQ ID NO: 35987 - protein, 215 aa, Aneurinibacillus danicus
  misc_feature (1)..(215): tr|A0A511VBZ4|A0A511VBZ4_9BACL 7-cyano-7-deazaguanine s ynthase OS=Aneurinibacillus danicus OX=267746 GN=ADA01n ite_25330 PE=3 SV=1
MEVKSMVLLFSGGVDSTTLLALCQKNQYDVFPLYINYGQRAHRLEEEAVQKLGQHYDVPVKRAVVPIPAFLNGSQMMNKEEKLPVIKDEGQAFAEEFIPHRNLFLLTLAAMYAHSLGISTIGLGIYSGSRLRYSDCTLEFLQKAQEMITISSGNSAIRIYAPFIHMDKGQITKIAADLDVPVHATVSCNMGIYRSCGVCASCIERQRVLNNVFKG

SEQ ID NO: 35988 - protein, 229 aa, Aneurinibacillus migulanus
  misc_feature (1)..(229): tr|A0A0K2WLT6|A0A0K2WLT6_ANEMI 7-cyano-7-deazaguanine s ynthase OS=Aneurinibacillus migulanus OX=47500 GN=queC PE=3 SV=1
MEKKAVVVLSGGLDSTTCMGIAKDTGYELYPLTFHYGQRHNREVEQAKKVADFYSVPAHRLVNLDFLGQIGGSALTDTNIEVPVVQANEEDEEDIPATYVPARNMIFLSLAAAYAEVVGAEAIYIGVSAVDYSGYPDCRPEFIRSMNETVQLATKAGVKGTGIRIEAPLAHLSKKETIEWGLTLGVPYELSTSCYQGGAKACGECDSCRLRLKGFAEAGAKDPISYQKG

SEQ ID NO: 35989 - protein, 229 aa, Aneurinibacillus migulanus
  misc_feature (1)..(229): tr|A0A0D1VI42|A0A0D1VI42_ANEMI 7-cyano-7-deazaguanine s ynthase OS=Aneurinibacillus migulanus OX=47500 GN=queC PE=3 SV=1
MEKKAVVVLSGGLDSTTCMGIAKDAGYELYPLTFHYGQRHNREVEQAKKVADFYSVPAHRLVNLDFLGQIGGSALTDTNIEVPVVQANAEDEEDIPATYVPARNMIFLSLAAAYAEVVGAEAIYIGVSTVDYSGYPDCRPEFIRSMNETVQLATKAGVKGTGIRIEAPLAHLSKKETIEWGLTLGVPYELSTSCYQGGAKACGECDSCRLRLKGFAEAGAKDPISYQKG

SEQ ID NO: 35990 - protein, 232 aa, Aneurinibacillus soli
  misc_feature (1)..(232): tr|A0A0U4NL61|A0A0U4NL61_9BACL 7-cyano-7-deazaguanine s ynthase OS=Aneurinibacillus soli OX=1500254 GN=queC PE= 3 SV=1
MDTAKKAVVVLSGGLDSTTCMGIARDAGYVLHALTFDYGQRHSREIEQAKRIAHHFEVADHRIVKMDFLSQIGGSALTDRSIAVPTEAGTHEESGEIPATYVPARNLIFLSLAAAYAEVVGAEVIYIGVSAVDYSGYPDCRPEFIASMSETIRLATKAGATGTNLRIEAPLSHLSKKETVELGLRLGVPYELSTSCYQGEEVACGVCDSCRLRLQGFREAGAVDPIAYHNRG

SEQ ID NO: 35991 - protein, 228 aa, Aneurinibacillus sp.
  misc_feature (1)..(228): tr|A0A109QH58|A0A109QH58_9BACL 7-cyano-7-deazaguanine s ynthase OS=Aneurinibacillus sp. XH2 OX=1450761 GN=queC PE=3 SV=1
MKKAVVILSGGLDSATCMGIAKDEGYELYPITFHYGQRHSREVESAIKMSEYYDTRSHKVINLDWLRQIGGSSLTDISLDVPTSGLTDEIPNTYVPARNLIFIALATAYAEVISASALFLGVNSLDYSGYPDCRPEFIQSMSKTINLATKNGVTGMNIKIETPLINMTKAEIIKKGLELGVPYHLTTSCYQGKELACARCDSCRLRIKGFQENKIIDPIDYEKSIVWN

SEQ ID NO: 35992 - protein, 228 aa, Aneurinibacillus sp.
  misc_feature (1)..(228): tr|A0A0X8DA88|A0A0X8DA88_9BACL 7-cyano-7-deazaguanine s ynthase OS=Aneurinibacillus sp. XH2 OX=1450761 GN=queC PE=3 SV=1
MKKAVVVLSGGLDSTTCMGIARDAGYELYPLTFHYGQRHDREVEQAKKIAAFYRVPHHRIVTLDFLKQIGGSALTDETIAVPVGGVNEAGENDIPSTYVPARNLIFLSLATAYAEVVGAEVVYIGVSAVDYSGYPDCRPEFIRAMNETIGLATKAGIAGAGIRIEAPLVHLSKKETIEWGLRLGVPYELSTSCYQGGEEACGECDSCRLRLKGFADAGAKDPIPYKKR

SEQ ID NO: 35993 - protein, 228 aa, Aneurinibacillus thermoaerophilus
  misc_feature (1)..(228): tr|A0A1G8BL20|A0A1G8BL20_ANETH 7-cyano-7-deazaguanine s ynthase OS=Aneurinibacillus thermoaerophilus OX=143495 GN=queC PE=3 SV=1
MKKAVVILSGGLDSATCMGIAKDEGYELYPITFHYGQRHSREVESAIKMSEYYDKRSHKVINLDWLRQIGGSSLTDISLDVPTSGLTDEIPNTYVPARNLIFIALATAYAEVISASALFLGVNSLDYSGYPDCRPEFIQSMSKTINLATKNGVTGMNIKIETPLINMTKAEIIKKGLELGVPYHLTTSCYQGKELACARCDSCRLRIKGFQENKIIDPIDYEKSIVWN

SEQ ID NO: 35994 - protein, 228 aa, Aneurinibacillus thermoaerophilus; identical to SEQ ID NO: 35992
  misc_feature (1)..(228): tr|A0A1G7WYF0|A0A1G7WYF0_ANETH 7-cyano-7-deazaguanine s ynthase OS=Aneurinibacillus thermoaerophilus OX=143495 GN=queC PE=3 SV=1

SEQ ID NO: 35995 - protein, 220 aa, Anoxybacillus amylolyticus
  misc_feature (1)..(220): tr|A0A160F227|A0A160F227_9BACI 7-cyano-7-deazaguanine s ynthase OS=Anoxybacillus amylolyticus OX=294699 GN=queC PE=3 SV=1
MKKEKAVVVFSGGQDSTTCLFWALKQFQEVEAVTFDYNQRHRLEIEVAASIANELGVPHTVLDMSLLNQLAPNALTRSDIAIEQKEGELPSTFVDGRNLLFLSFAAVLAKQKGARHLVTGVCETDFSGYPDCRDIFIKSLNVTLNLAMDYQFVIHTPLMWLNKAETWKLADELGALDFVRTRTLTCYNGMIADGCGECPACQLRQRGLQQYMAEKGAMNE

SEQ ID NO: 35996 - protein, 223 aa, Anoxybacillus amylolyticus
  misc_feature (1)..(223): tr|A0A4R1G2X2|A0A4R1G2X2_9BACI 7-cyano-7-deazaguanine s ynthase OS=Anoxybacillus amylolyticus OX=294699 GN=queC PE=3 SV=1
MKMNEEKAVVVFSGGQDSTTCLFWAKKQFGEVEAVTFDYGQRHRREIDVAQAIADELGVRHTVLDLSLLGQLAPNALTRRDIAIEQKEGELPTTFVDGRNLLFLSFAAVFAKQRGARHIVTGVCETDFSGYPDCRDVFIKSLNVTLNLAMDYEFVIHTPLMWLTKAETWKLADELGALEFIRTKTLTCYNGIIADGCGECPACALRKRGLDEYLREKAEVESR

SEQ ID NO: 35997 - protein, 221 aa, Anoxybacillus ayderensis
  misc_feature (1)..(221): tr|A0A0D0HQY0|A0A0D0HQY0_9BACI 7-cyano-7-deazaguanine s ynthase OS=Anoxybacillus ayderensis OX=265546 GN=queC P E=3 SV=1
MKKEKAVVVFSGGQDSTTCLFWAKKHFAEVEAVTFDYNQRHRLEIDVAASIAKELDVPHTVLDMSLLNQLAPNALTRSDIAIEQKEGQLPSTFVDGRNLLFLSFAAVLAKQKGARHLVTGVCETDFSGYPDCRDVFIKSLNVTLNLAMDYDFVIHTPLMWLNKAETWKLADELHALEFVRTKTLTCYNGIIADGCGECPACVLRKRGLDQYMSEKKGAHVQ

SEQ ID NO: 35998 - protein, 221 aa, Anoxybacillus flavithermus
  misc_feature (1)..(221): sp|B7GLA4|QUEC_ANOFW 7-cyano-7-deazaguanine synthase OS =Anoxybacillus flavithermus (strain DSM 21510 / WK1) OX =491915 GN=queC PE=3 SV=1
MKKEKAVVVFSGGQDSTTCLFWAKKHFAEVEAVTFDYNQRHRLEIDVAASIAKELNVSHTVLDMSLLHQLAPNALTRSDIAIEQKEGQLPSTFVDGRNLLFLSFAAVLAKQKGARHLVTGVCETDFSGYPDCRDVFIKSLNVTLNLAMDYQFVIHTPLMWLNKAETWKLADELGALEFVRNKTLTCYNGIIADGCGECPACVLRKRGLDQYMNEKKGANVR

SEQ ID NO: 35999 - protein, 221 aa, Anoxybacillus flavithermus
  misc_feature (1)..(221): tr|R4FD35|R4FD35_9BACI 7-cyano-7-deazaguanine synthase OS=Anoxybacillus flavithermus NBRC 109594 OX=1315967 GN =queC PE=3 SV=1
MKKEKAVVVFSGGQDSTTCLFWAKKHFAEVEAVTFDYNQRHRLEIDVAASIAKELNVPHTVLDMSLLNQLAPNALTRSDIAIEQKEGQLPSTFVDGRNLLFLSFAAVLAKQKGARHLVTGVCETDFSGYPDCRDVFIKSLNVTLNLAMDYEFVIHTPLMWLNKAETWKLADELGALEFVRNKTLTCYNGIIADGCGECPACVLRKRGLDQYMNEKKGANVR

SEQ ID NO: 36000 - protein, 221 aa, Anoxybacillus gonensis
  misc_feature (1)..(221): tr|M5QR65|M5QR65_9BACI 7-cyano-7-deazaguanine synthase OS=Anoxybacillus gonensis OX=198467 GN=queC PE=3 SV=1
MKREKAVVVFSGGQDSTTCLFWAKKHFAEVEAVTFDYNQRHRLEIDVAASIAKELDVPHTVLDMSLLNQLAPNALTRSDIAIEQKEGQLPSTFVDGRNLLFLSFAAVLAKQKGARHLVTGVCETDFSGYPDCRDVFIKSLNVTLNLAMDYDFVIHTPLMWLNKAETWKLADELDALEFVRTKTLTCYNGIIADGCGECPACVLRKRGLDQYMSEKKGAHVQ

SEQ ID NO: 36001 - protein, 221 aa, Anoxybacillus gonensis
  misc_feature (1)..(221): tr|B0FSM1|B0FSM1_9BACI 7-cyano-7-deazaguanine synthase OS=Anoxybacillus gonensis OX=198467 GN=queC PE=3 SV=1
MKKEKAVVVFSGGQDSTTCLFWAKKHFAEVEAVTFDYNQRHRLEIDVAASIAKELNVPHTVLDMSLLNQLAPNALTRSDIAIEQKEGQLPSTFVDGRNLLFLSFAAVLAKQKGARHLVTGVCETDFSGYPDCRDVFIKSLNVTLNLAMDYQFVIHTPLMWLNKAETWKLADELGALEFVRNKTLTCYNGIIADGCGECPACVLRKRGLDQYMNEKKGANVR

SEQ ID NO: 36002 - protein, 221 aa, Anoxybacillus kamchatkensis
  misc_feature (1)..(221): tr|A0A4S3L1M2|A0A4S3L1M2_9BACI 7-cyano-7-deazaguanine s ynthase OS=Anoxybacillus kamchatkensis OX=196180 GN=que C PE=3 SV=1
MKREKAVVVFSGGQDSTTCLFWAKKHFAEVEAVTFDYNQRHRLEIDVAASIAKELDVPHTVLDMSLLHQLAPNALTRSDIAIEQKEGQLPSTFVDGRNLLFLSFAAVLAKQKGARHLVTGVCETDFSGYPDCRDVFIKSLNVTLNLAMDYDFVIHTPLMWLNKAETWKLADELDALEFVRTKTLTCYNGIIADGCGECPACVLRKRGLDQYMSEKKGAHVQ

SEQ ID NO: 36003 - protein, 221 aa, Anoxybacillus kamchatkensis; identical to SEQ ID NO: 36002
  misc_feature (1)..(221): tr|A0A346DDC7|A0A346DDC7_9BACI 7-cyano-7-deazaguanine s ynthase OS=Anoxybacillus kamchatkensis G10 OX=1212546 G N=queC PE=3 SV=1

SEQ ID NO: 36004 - protein, 218 aa, Anoxybacillus pushchinoensis
  misc_feature (1)..(218): tr|A0A1I0U4E8|A0A1I0U4E8_9BACI 7-cyano-7-deazaguanine s ynthase OS=Anoxybacillus pushchinoensis OX=150248 GN=qu eC PE=3 SV=1
MKKEKAVVVFSGGQDSTTCLFWAKKHFAEVEAVTFDYNQRHRLEIDVAASIAKELNVPHTVLDMSLLNQLAPNALTRSDIAIEQKEGQLPSTFVDGRNLLFLSFAAVLAKQKGARHLVTGVCETDFSGYPDCRDVFIKSLNVTLNLAMDYEFVIHTPLMWLNKAETWKLADELGALEFVRDKTLTCYNGIIADGCGECPACVLRKRGFEQYMSQLPTT

SEQ ID NO: 36005 - protein, 221 aa, Anoxybacillus sp.
  misc_feature (1)..(221): tr|A0A167ULZ0|A0A167ULZ0_9BACI 7-cyano-7-deazaguanine s ynthase OS=Anoxybacillus sp. B7M1 OX=1490057 GN=queC PE =3 SV=1
MKKEKAVVVFSGGQDSTTCLFWALRQFAEVEAVTFDYHQRHRLEIEVASDIARELGIQHTVLNMSLLNQLAPNALTRSDMAIEHQEGELPSTFVDGRNLLFLSFAAVLAKQKGARHLVTGVCETDFSGYPDCRDVFIKSLNVTLNLAMDYQFVIHTPLMWLNKAETWQLADELGALEFVQTKTLTCYNGIMADGCGECPACVLRKRGLEQYLQAKAGVEQR

SEQ ID NO: 36006 - protein, 221 aa, Anoxybacillus sp.
  misc_feature (1)..(221): tr|A0A094JSP0|A0A094JSP0_9BACI 7-cyano-7-deazaguanine s ynthase OS=Anoxybacillus sp. KU2-6(11) OX=1535751 GN=qu eC PE=3 SV=1
MKREKAVVVFSGGQDSTTCLFWAKKHFAEVEAVTFDYNQRHRLEIDVAASIAKELNVPHTVLDMSLLNQLAPNALTRSDIAIEQKEGQLPSTFVDGRNLLFLSFAAVLAKQKGARHLVTGVCETDFSGYPDCRDVFIKSLNVTLNLAMDYEFVIHTPLMWLNKAETWKLADELGALEFVRTKTLTCYNGIIADGCGECPACVLRKRGLDQYMNEKKGANVR

SEQ ID NO: 36007 - protein, 219 aa, Anoxybacillus suryakundensis
  misc_feature (1)..(219): tr|A0A0K6GK54|A0A0K6GK54_9BACI 7-cyano-7-deazaguanine s ynthase OS=Anoxybacillus suryakundensis OX=1325335 GN=q ueC PE=3 SV=1
MKKAVVVFSGGQDSTTCLFWAKKHFDEVEAVTFDYNQRHRLEIDVAASIAKELDVPHTVLDMSLLNQLAPNALTRSDIAIEQKEGQLPSTFVDGRNLLFLSFAAVLAKQKGARHLVTGVCETDFSGYPDCRDVFIKSLNVTLNLAMDYEFIIHTPLMWLNKAETWKLADELGALEFVRHKTLTCYNGIIADGCGECPACVLRKRGLDQYMSEKKGADVQ

SEQ ID NO: 36008 - protein, 221 aa, Anoxybacillus thermarum; identical to SEQ ID NO: 35997
  misc_feature (1)..(221): tr|A0A0D0QAF5|A0A0D0QAF5_9BACI 7-cyano-7-deazaguanine s ynthase OS=Anoxybacillus thermarum OX=404937 GN=queC PE =3 SV=1

SEQ ID NO: 36009 - protein, 220 aa, Anoxybacillus vitaminiphilus
  misc_feature (1)..(220): tr|A0A327YTQ8|A0A327YTQ8_9BACI 7-cyano-7-deazaguanine s ynthase OS=Anoxybacillus vitaminiphilus OX=581036 GN=qu eC PE=3 SV=1
MKNEKAVVVFSGGQDSTTCLFWALKTFKEVEAVTFNYNQRHKLEIEVAASIAKDLGIKHTVLDMSLLNQLAPNALTRSDIQIKHKEGELPSTFVDGRNLLFLSFAAVLAKQSGARHLVTGVCETDFSGYPDCRDVFIKSLNVTLNLAMDYQFVIHTPLMWLNKAETWKLADELGAFEFVRNRTLTCYNGIIADGCGECPACILRKRGLEQYLAEKERGNA

SEQ ID NO: 36010 - protein, 600 aa, Antarctobacter heliothermus
  misc_feature (1)..(600): tr|A0A239KWH9|A0A239KWH9_9RHOB Queuosine biosynthesis p rotein QueC OS=Antarctobacter heliothermus OX=74033 GN= SAMN04488078_107211 PE=4 SV=1
MNVHGPAKNVNLRIDYISRTMLSNLPDLLIDLLEVAAYVYCADQRLVRGSDQLSKFGESWRRSLKFSIPVRELDVWRDPEIRDALIDTLGFLSDDSYSFDFRQAETPVQPKELYFHDLIDPADEHDDVALFSGGVDSFAGAVTDLVSNGRSLTLVGHYSSTKVRSVQEGLIAELKRKGYDRCLSYIPVWVSNEGVRAREFTQRTRSFLFACLGLVVARMSGKDGFSFYENGVVSINLPLAGDVVGGRATRTTHPKVLRGIEHLFSMLLDCEIRIRTPLQWLTKKEVTEKIAAAGMADLLSQTVSCTRPRKWTEIQRHCGVCSQCIDRRFGILAAGLGQHEPSDRYMQDLLLDDRSSGDDLRMALAYVSLFKKISVTPKERFLVDFPEVVSAVGHFPGVPTSEAGDRVFELFQRHAKSVEEVISSAVREYGAALYRNELPAASLLAACYNRGHVEVAPPSNYDADTKAFMDRLSAPTLEFAFDDDHERVHFRGELVLEGANFKLVAALIEAFRSAKKGQAEVPYLLAPDLAQRLDISDQSMRQQLRRLREAIEPLNVSMGIPMDQDTFIQTKERAGYRINPQCRESSVADILVSVSSASTG

SEQ ID NO: 36011 - protein, 224 aa, Aphanizomenon flosaquae
  misc_feature (1)..(224): tr|A0A1B7W0R5|A0A1B7W0R5_APHFL 7-cyano-7-deazaguanine s ynthase OS=Aphanizomenon flos-aquae LD13 OX=1710894 GN= queC PE=3 SV=1
MKAVILLSGGLDSSTVLYQAKADGCECYTISCDYQQRHRKELDAALKVGEAAGTIQHQVVSFDLRQWGASALTDDKISLPEQRSLDEMAENIPVTYVPARNTIFLSFALSYAEAIAAERVYIGVNALDYSGYPDCRPDYIQAMQEVFRLGTKQGREGQAIQVITPLINLKKTEIIQLGNQLGVPWHLTWSCYAGSDLACGACDSCRLRLAAFAELGLTDPIDYV

SEQ ID NO: 36012 - protein, 224 aa, Aphanizomenon flosaquae
  misc_feature (1)..(224): tr|A0A1B7X364|A0A1B7X364_APHFL 7-cyano-7-deazaguanine s ynthase OS=Aphanizomenon flos-aquae WA102 OX=1710896 GN =queC PE=3 SV=1
MKAVILLSGGLDSSTVLYQAKADGCECYTISCDYQQRHRKELDAALKVGKAAGTIQHQVVSFDLRQWGGSALTDDKISLPEQRSLDEMAENIPVTYVPARNTIFLSFALSYAEAIAAERVYIGVNALDYSGYPDCRPDYIQAMQEVFRLGTKQGREGQAIQVITPLINLKKTEIIQLGNQLGVPWHLTWSCYAGSDLACGVCDSCRLRLAAFAELGLTDPIDYV

SEQ ID NO: 36013 - protein, 230 aa, Aphanocapsa feldmannii
  misc_feature (1)..(230): tr|A0A524RLW6|A0A524RLW6_9CYAN 7-cyano-7-deazaguanine s ynthase OS=Aphanocapsa feldmannii 277cV OX=2507553 GN=q ueC PE=3 SV=1
MDQPLSIALLSGGLDSATATALALERGDRVIGLSFDYGQRHRRELACAAMLKEALGLEDQLQVRVNLADWGGSALTDPSIALPSGGVVEGVIPPTYVPGRNTVFISLALSLAEARGAGTIVLGVNAVDYSGYPDCRPDYLEAFQRLADLASKAGREGRGARLWAPLLTMDKRGIVAEALRLGVPIASTWSCYSGAAEACGRCDSCRIRDRALIDGGRPDLASPWARQQLR

SEQ ID NO: 36014 - protein, 230 aa, Aphanocapsa feldmannii; identical to SEQ ID NO: 36013
  misc_feature (1)..(230): tr|A0A524RVI4|A0A524RVI4_9CYAN 7-cyano-7-deazaguanine s ynthase OS=Aphanocapsa feldmannii 277cI OX=2507554 GN=q ueC PE=3 SV=1

SEQ ID NO: 36015 - protein, 246 aa, Aphanothece cf.
  misc_feature (1)..(246): tr|A0A2T1F339|A0A2T1F339_9CHRO 7-cyano-7-deazaguanine s ynthase OS=Aphanothece cf. minutissima CCALA 015 OX=210 7695 GN=queC PE=3 SV=1
MTRSPATPSPPPPLAIALLSGGLDSATAAALAIEAGHRVIGLSFDYGQRHRRELDAAAAVAGALALEEHHVIAVNLAAWGGSALTDPAIPVPDGGVVAGVIPSTYVPGRNTVFIALGLSLAEARGATSLVLGVNAVDYSGYPDCRPDYLAAFQTLADLATKAGREGQGARLWAPLVAWDKATIVREALRLGVPIAATWSCYSGEHLPCGRCDSCRIRDAALVAAGRADLTSAAVRAGAASRAGADR

SEQ ID NO: 36016 - protein, 737 aa, Aphanothece hegewaldii
  misc_feature (1)..(737): tr|A0A2T1M2H6|A0A2T1M2H6_9CHRO 7-cyano-7-deazaguanine s ynthase OS=Aphanothece hegewaldii CCALA 016 OX=2107694 GN=queC PE=3 SV=1
MSKKAVVLLSGGLDSATTAAIALKDGYDVMALSFNYGQRHNKELQASVKIAQALGIKEHYTIDVNLSGWGGSALTDSAIAIPEDGVKSDIIPITYVPGRNTVFIALALSLAEAKGCNAIFLGINAVDYSGYPDCRPDYLAAYQNLANLSSKVGVEGKAPQLIAPLIHDTKVDIVHRAIELGITITDTWSCYLGEDDPCGLCDSCRIRDKALIEAGYPEYATSVGKELYLTQNTSAKAIPTMSTLTSAKFPVLEDTRAGLPNICGFEAQISEIVKQGDPVFLHSTNLRLEDINAGFACALHMHQPTLPAGFEGALISNLQYMFEHPAQGDNHNAGVFAWCYGRMGDFIPDLINYGCNPRIMLDYSGNLLWGLRQMGRDDIINNLKRITCDPQYQPYVEWLGTMWSHAVIPSTPIPDIKLHIQAWQHYFASIFGYDALKRVKGFSPPEMHLPNHPDTLYEYIKALKECGYRWLMVQEHSIETLDGSGIPQDQKYIPNRLVAKNSHGETISITALIKTQGSDTKLVAQMQPYFEAKGRGKQTIGSKSIPSLVTQIADGENGGVMMNEFPRDFFRIYHEIRDQNGNHQGTVAVNGTEYLELIEAAGVNPEDYPTCQAVHQHKIWQRVNLDAVTPEAVENTIAELKSTDHSFNMDGASWTNDLSWVKGYENVLGPMNQFSALFHQKFDPMVAKDPTVTKHPDYHQALLHNLLLQTSCFRYWGQGIWTDYARRIYDRGAVLLR

SEQ ID NO: 36017 - protein, 232 aa, Aphanothece sacrum
  misc_feature (1)..(232): tr|A0A401IIT0|A0A401IIT0_APHSA 7-cyano-7-deazaguanine s ynthase OS=Aphanothece sacrum FPU1 OX=1920663 GN=queC P E=3 SV=1
MTHQSKAVVLLSGGLDSATSAAIAAKDGYHVIALSFRYGQRHQRELDSALKIAQALDIQEHYIIDVNLAQWGGSSLTDTFIELPQTGVNAHIIPSTYVPGRNTVFIAIALSLAEAKEAQAIYLGINAVDYSGYPDCRSDYLQAYQMLANLSSKASLDGKAPQLIAPLIKDSKVDIIHRAISLKVPISDTWSCYQGDSEPCGLCDSCRIRDRALIDAGYPELATVKGQELYNL

SEQ ID NO: 36018 - protein, 240 aa, Aquabacter spiritensis
  misc_feature (1)..(240): tr|A0A4R3M8P7|A0A4R3M8P7_9RHIZ 7-cyano-7-deazaguanine s ynthase OS=Aquabacter spiritensis OX=933073 GN=queC PE= 3 SV=1
MSEPGDDGALVLFSGGQDSTTCLAWALERFARVETVGFDYGQRHRVELERRGVLRQALTRLKGRWARQLGEDHTLSLTALSKVSDTALTRNVEIEMAEGGLPNTFVPGRNIIFLTFAAALAYRRGLRHIVGGMCETDYSGYPDCRDDTIKALQVALNLGMEKRFVLHTPLMWIDKAQTWALAETLGGAPLVEIVIEDTHTCYLGERGARHDWGYGCGTCPACRLRADGFARFHAAKGDAA

SEQ ID NO: 36019 - protein, 252 aa, Aquabacterium commune
  misc_feature (1)..(252): tr|A0A4R6RPE1|A0A4R6RPE1_9BURK 7-cyano-7-deazaguanine s ynthase OS=Aquabacterium commune OX=70586 GN=queC PE=3 SV=1
MLPPVAAPSLSHLDPRTALVVFSGGQDSTVCLAWALSRYARVETIGFDYGQRHQVELDCRPTVRAALSAQFPHWAARLGDDHLLDLRLLGQISDTALTEARAIEMQANGLPNTFVPGRNLLFLTFAAAVAYRRGASVLVGGMCETDFSGYPDCRDNTLKALQVAVSLGLDSPMTVETPLMWLTKAQTWALSAQLGGEALNALIAEHTHTCYLGDRSQRHAWGYGCGSCPACVLRRDGFAAFSQTVTETAAKL

SEQ ID NO: 36020 - protein, 448 aa, Aquabacterium olei
  misc_feature (1)..(448): tr|A0A2U8FWJ6|A0A2U8FWJ6_9BURK Uncharacterized protein OS=Aquabacterium olei OX=1296669 GN=DEH84_08735 PE=4 SV =1
MTVDVFEEDSACKRGAVPCRIGRDIRFKTEALESFSTHRWDPVIYDAFLVAAAVEFCDRTLVRSSMNWGRKFILHVPVHDVHKWTDKAAHGALTEALNLLTGDDWQIVFRTRKVPVPPPAQETMKFPMNAEAVMAYSDGMDSQAVAALEGKKLNGRVVRVRIGTSERDISRQERKEMPFHAVPYKVKIAKKDGESSARSRGFKFSLISAMAGYLIDVPVAIIPESGQGALAPVLLPVGHGYEDYRNHPAFTARMERFVYALLGYRFKYKFPRLWMTKGETLREFVENCEGGSKWNKTRSCWQTSRQIGFNGTRRQCGICAACILRRLSVHAAGLKEATDVYVWESLSTKTWEAGASKDFDLFTNALRQYSVAGVLHFEHLAGLQSRSDYQLTRRLSNFELAESLGESPVSVSQKLDRLLRQHAKEWSAFTKDLGPRSFVRQWIRSSAS

SEQ ID NO: 36021 - protein, 245 aa, Aquabacterium olei
  misc_feature (1)..(245): tr|A0A2U8FVI0|A0A2U8FVI0_9BURK 7-cyano-7-deazaguanine s ynthase OS=Aquabacterium olei OX=1296669 GN=queC PE=3 S V=1
MSPLNPSDLDPRTALVVFSGGQDSTVCLAWALSRYRHVETIGFDYGQRHRVELYCRNRVRSELTTHFPGWASRLGMDHLLDLRLLGQLSDTALTETRAIEMQANGLPNTFVPGRNLLFLNFAAALAYRRGASVLVGGMCETDFSGYPDCRDNTLKAMQVAISLGLDTPMVIETPLMWLTKAQTWALADQLGGEALNALIAEHTHTCYLGERQQRHPWGYGCGRCPACELRAQGHTEWLNRATPAD

SEQ ID NO: 36022 - protein, 241 aa, Aquabacterium sp.
  misc_feature (1)..(241): tr|A0A480B0Z8|A0A480B0Z8_9BURK 7-cyano-7-deazaguanine s ynthase OS=Aquabacterium sp. W35 OX=2315236 GN=queC PE= 3 SV=1
MPAAAPDPRHALVLFSGGQDSTACLAWALDRYERVETVGFDYGQRHRIELDCRTVVRDALAAQFPHWAARLGDDHLLDLRLLGQLSDTALTSERAIAIAANGLPNTFVPGRNLLFFNFAAALAWRRGASVLVGGMCETDYSGYPDCRDNTLKALQVALSLGLDAPMVVETPLMWLSKAQTWALTDRLGGAALNALIIEHTHTCYLGERGTLHAWGHGCGQCPACALRRNGFEAWQPAGATP

SEQ ID NO: 36023 - protein, 235 aa, Aquabacterium sp.
  misc_feature (1)..(235): tr|A0A0A0DUH5|A0A0A0DUH5_9BURK 7-cyano-7-deazaguanine s ynthase OS=Aquabacterium sp. NJ1 OX=1538295 GN=queC PE= 3 SV=1
MPSDPRTALVVFSGGQDSTACLAWALSRYARVETVGFDYGQRHRVELDCRLTVRTELARTFPQWGARLGEDHLLDLALLGQISDTALTESRAIEMQANGLPNTFVPGRNLLFLNFAAALAYRRGASVLIGGMCETDYSGYPDCRDNTLKALQVAISLGLDSPMTIETPLMWLTKAQTWQLSHDLGGEALNELIIEHTHTCYLGDRQHRHAWGYGCGTCPACRLRQEGFDAFRQQG

SEQ ID NO: 36024 - protein, 620 aa, Aquamicrobium defluvii
  misc_feature (1)..(620): tr|A0A4V3DJW8|A0A4V3DJW8_9RHIZ 7-cyano-7-deazaguanine s ynthase OS=Aquamicrobium defluvii OX=69279 GN=DES43_131 47 PE=3 SV=1
MKRFFVECGVSQPSGSDAIAMDVHGDAKNVNLRIDYISRTMLGNVPDLLIDLLELAAYIYCADQRLGRGSDKLTNFGENWRRSLHFSVPVRQLEIWQNPEVHEVLAGTLGFLSDDSYEFDFRRAETPVQPKELYFPHLIDASAEHDEVALFSGGIDSFAGVVNDVVTLGKSITLVGHYSSSKVRNVQESLIEGLSQKGFDRRISYIPVWVSNQGVSAREFTQRTRSFLFACLGLVVARMSGKDRFSFYENGVISINPPLAGDVIGGRATRTTHPKVLRGLEALFSILLDHQIEIQTPLHWLTKKEVTQKIKEADMSDMLGQTVSCTRPRIWTERQKHCGVCSQCIDRRFAVLAAGMEDHEPSSNYMRDLLLGDRSADDDLRMALSYVSFFQKVAATPKERFLVDFPEVVSALDQFPGLSPDDAGERIYNLFQRHAKAVEDVITAAISEHGARLYRNELPSGSLLATCFSRGHVEAAPAPDYDAQAKAFIDRLSSPILDFAFDEAAKRVLFHGGHHLDGANFRVVAALIENFREAKRQRADVPFFPATELADRLGVSDQSMRQQLGRLRKTLEPLTVTLGIPLDQDSFVQTKERAGYRLNPEWREVSVGDIRVKGEVTSQA

SEQ ID NO: 36025 - protein, 232 aa, Aquamicrobium sp.
  misc_feature (1)..(232): tr|A0A4U6BZC0|A0A4U6BZC0_9RHIZ 7-cyano-7-deazaguanine s ynthase OS=Aquamicrobium sp. LC103 OX=1120658 GN=queC P E=3 SV=1
MKCLVICSGGLDSVSLAYKVAAEHELAGLVSFDYGQRHGKELQFAAACAERLNVPHETVDIRNVGRSLSGSALTDDVDVPDGHYAEASMKITVVPNRNAIMLAIAFGIAAAQKADAVATAVHGGDHFIYPDCRPGFIDAFQTMQNHALDGYADIRLYAPYVRVSKAEIVRDGARHGTPFALTWSCYKGGELHCGRCGTCVERREAFHLAGHDDPTEYQDPDYWRDAVAKGAG

SEQ ID NO: 36026 - protein, 233 aa, Aquaspirillum sp.
  misc_feature (1)..(233): tr|A0A1U9JRF2|A0A1U9JRF2_9NEIS 7-cyano-7-deazaguanine s ynthase OS=Aquaspirillum sp. LM1 OX=1938604 GN=queC PE= 3 SV=1
MSGGRALVVLSGGQDSTTCLHWALRQFDHVEAVTFDYGQRHRVELSAARHIASQAGVRHHLLPINTFAALGGNALTDASITPEAGMRTEGDSQLPNTFVPGRNLIFLTFAAALAWQQRLDHLVVGVAQTDYSGYPDCRDNTLQALERALCLGMDRPIQLHTPLMHLSKADTVRLAMQLGALPALAHSHTCYHGSVPPCGECAACQLRAKGFAEAGVADPLVLRHAGKAEPCLA

SEQ ID NO: 36027 - protein, 226 aa, Aquicella lusitana
  misc_feature (1)..(226): tr|A0A370G5D2|A0A370G5D2_9COXI 7-cyano-7-deazaguanine s ynthase OS=Aquicella lusitana OX=254246 GN=queC PE=3 SV =1
MQKKAIILFSGGLDSTTCLAIAQSQGYACYALSFAYGQKHHVEIERAKQIAHSFGVVTHQVFVLPLEQIRGSSLTDGDMVVPDYQDGSAIPNTYVPARNTIFLSFALAWGEVLGAHDIFMGANYLDYSGYPDCRPDYLHAFETMANLATKASVEGQQFKIHAPLLKMHKAEIIREGLRLGIDYSHTVSCYRADRMGRACGKCDSCTYRKKGFEEAKVPDPTIYYGV

SEQ ID NO: 36028 - protein, 225 aa, Aquicella siphonis
  misc_feature (1)..(225): tr|A0A5E4PIS6|A0A5E4PIS6_9COXI 7-cyano-7-deazaguanine s ynthase OS=Aquicella siphonis OX=254247 GN=queC PE=3 SV =1
MNKKAIVLFSGGLDSTTCLVYALEQGFSCYALSFVYGQKHHVEVEQAGKIAGQYGVKEHKILSLPLDEIRGSSLTDKNLAVRDYQASDKIPDTYVPARNTIFLSFALGWGEVLGAYDIFLGANHLDYSGYPDCRPEYLHAFEKLATLATKTGVEQDQRFKIHTPLLSLSKAEIIRKGLHLGIDYSQTISCYRADINGRACGSCDSCVYRKKGFTEAGVTDPTIYA

SEQ ID NO: 36029 - protein, 456 aa, Aquicoccus sp.
  misc_feature (1)..(456): tr|A0A4V6ENG5|A0A4V6ENG5_9RHOB Uncharacterized protein OS=Aquicoccus sp. SCR17 OX=2541728 GN=E0K89_05310 PE=4 SV=1
MIINAPHPAISRKLSVEIVESDPKRASADHTLVLGRDIRFSTRDLESYANANWEPVVFDAMVVAAAVEYCDRSLRRSVREWARDFRLRLPVHEPDRWNTPEVLDALHDALGFLTGDRWHFTFVPRVHSEPSPRQQSLDLPPDAKATLAFSDGMDSRAVAGLVGADARQALVRVRLGTKRCDRPRRGQPFTGIPYKLGKSVPNPEPSARNRGFRFALVSGLASYICRAEQIIIPESGQGALGPVLVPVAHAYPDYRNHPAFLRRMERFLGALLGHSVEYTFPRIWHTKGQTLAAYLGLGIDHGEWKRTRSCWKGPQWSSVDGQYRQCGACAACMLRRLSVHAAGQTEAADTYIAADLSAPELEASVPATFRKANRSFREYAIAGALHLDHLADLAGEDGHPVLRRQALVLADALGMSAVQTEQNLKAMIAEHAGEWRAFVASLGDGSFLHNWVRGSR

SEQ ID NO: 36030 - protein, 218 aa, Aquifex aeolicus
  misc_feature (1)..(218): sp|O67003|QUEC_AQUAE 7-cyano-7-deazaguanine synthase OS =Aquifex aeolicus (strain VF5) OX=224324 GN=queC PE=3 S V=1
MKKHDGIIVLLSGGMDSATLLWLAKREFKKVYAISFDYGQRHKVELKYAKELAKLAEVEDHFIVQVPFYTSLKGSALIDESVEVPKGEYPENEPPVTTVPMRNLIFLSIASAFADNLEVNYIGIGVHALDTPYPDCRPEFITAAEAAINAGSTFVAKKKERMHVYAPFLGMSKRDIALLGKELGVPFEKTYSCYMGTEPPCGECPTCIQREEALRGIL

SEQ ID NO: 36031 - protein, 110 aa, Aquifex aeolicus
  misc_feature (1)..(110): tr|O67015|O67015_AQUAE 7-cyano-7-deazaguanine synthase OS=Aquifex aeolicus (strain VF5) OX=224324 GN=aq_848 PE =3 SV=1
MRNFILCTAGALYGVPKGINTCAIGSLGMYPFEDNKKEFFEKLSETISMSLGKEFYIETPFMGMHKHEVIKRYGKFIPLELSLTCINPVNGEPCGKCIKCKEREEALSLL

SEQ ID NO: 36032 - protein, 158 aa, Aquifex sp.
  misc_feature (1)..(158): tr|A0A432Q183|A0A432Q183_9AQUI 7-cyano-7-deazaguanine s ynthase (Fragment) OS=Aquifex sp. OX=313370 GN=DSY42_02 460 PE=3 SV=1
HFIVQVPFYKSLKGSALIDENVEVPKEDYPENEPPITTVPMRNLTFLSIASAFADNLELNYIGIGVHALDTPYPDCRPEFIASAEAAINAGSTFVAKTKKRIHIYAPFLGMTKRDIALLGKELGVPFEKTYSCYMGTEPPCGECPTCRQREEALKGIL

SEQ ID NO: 36033 - protein, 201 aa, Aquifex sp.
  misc_feature (1)..(201): tr|A0A432PVE3|A0A432PVE3_9AQUI 7-cyano-7-deazaguanine s ynthase OS=Aquifex sp. OX=313370 GN=DSY42_08020 PE=3 SV =1
MKKEKIVVLFSGGVESTALLIHYASKNNILYPLYVRFGYSWEDEELKRAKNVLFYLKKSVKNLRNLATVKVKSLSKRLKGFPSTEKELEIPMRNLLLCSQAAIYGYRKGIFRCAIGSLGMYPFPDNKREYFDKLEELISQGLNKTFTIETPFFGMKKEEIIRLYGNLMPLHLTFSCIKPIKGKPCGKCIKCREREEALRLL

SEQ ID NO: 36034 - protein, 202 aa, Aquificaceae bacterium
  misc_feature (1)..(202): tr|A0A3D3RPY1|A0A3D3RPY1_9AQUI 7-cyano-7-deazaguanine s ynthase OS=Aquificaceae bacterium OX=2053503 GN=DIT36_0 3860 PE=3 SV=1
MYRENAHKIVVLFSGGVESTCLLYLYLKKGWLVYPVYMRAGYPWEPVELENAKRLWQYAKRTYKNLMPIRILFYTNPEKVKSRSHSKDLLIPLRNLNLITPASNYALLKGIKSIAIGSLGIYPFYDNNLDYMRSLQRLTGIEILTPFMGMEKHQVIAKFSKDVPLERTLSCINPKRSKGKISPCGRCEKCKEREEAFKALSL

SEQ ID NO: 36035 - protein, 216 aa, Aquificaceae bacterium
  misc_feature (1)..(216): tr|A0A350D0W9|A0A350D0W9_9AQUI 7-cyano-7-deazaguanine s ynthase OS=Aquificaceae bacterium OX=2053503 GN=queC PE =3 SV=1
MKRVIVLLSGGMDSATLLWLCKREFEEVYALSFDYGQRHKVELKYAKELARLAGVKEHIIVEVPHYRLIKGSALLEGGPQVPEGPYGEEVPPTNVPMRNLVFLAIAGSFADSYEINHIAIGVHALDTPYPDCRVEFITAMESAINSASAYVARTKRRISLYAPFLGMSKTDIARLGKELGVPFEKTYSCYMGTEPPCGVCATCLQRQEALRSIGLM

SEQ ID NO: 36036 - protein, 101 aa, Aquificae bacterium
  misc_feature (1)..(101): tr|A0A3M2ARH5|A0A3M2ARH5_9BACT 7-cyano-7-deazaguanine s ynthase (Fragment) OS=Aquificae bacterium OX=2202151 GN =D6699_05565 PE=3 SV=1
PYPDCRPEFISAMESAITAGSSYTAETKKRMFIYAPFLGMTKSQIAKLGIELGVPFEKTYSCYRGTEPPCGECATCLQRKQALESALKEVGGAPPPSLQGP

SEQ ID NO: 36037 - protein, 197 aa, Aquificae bacterium
  misc_feature (1)..(197): tr|A0A3M1BJU6|A0A3M1BJU6_9BACT 7-cyano-7-deazaguanine s ynthase OS=Aquificae bacterium OX=2202151 GN=D6804_0735 5 PE=3 SV=1
MNVHRIVVLFSGGVESTCLLYMYLREGWLVYPVYVKAGYPWEALELENGRNLWLYTMKVHRNLMPLRVVSMINPEKVNRREHNRNLFIPLRNMSLVSMAGNYALLKGIRHVAIGSLGIYPFPDNNADYMKKLQSLMNIELLTPFMGMEKHEVLKRFSEGVPLERTLSCIRPKKLMGKIVSCGKCEKCRERQEAFTYL

SEQ ID NO: 36038 - protein, 224 aa, Aquimonas voraii
  misc_feature (1)..(224): tr|A0A1G6ZAL7|A0A1G6ZAL7_9GAMM 7-cyano-7-deazaguanine s ynthase OS=Aquimonas voraii OX=265719 GN=queC PE=3 SV=1
MNPARAVVLLSGGMDSATVLAIARAQGYEAYALSVAYGQRHTSELAAAARLAEALGAAAHKVVNIDLRSIGGSALTDDIEVPEHGGEGIPVTYVPARNTIMLSVALGWAEVLGAQDIFCGVNAVDYSGYPDCRPEFIEAFERLGNLATKAGVEGRRLRVHAPLIDLSKADIVRRGIELGVDFSETVSCYRADAKGRACGHCDACRLRAAGFEAAGVADPTRYLG

SEQ ID NO: 36039 - protein, 203 aa, Aquisalimonas asiatica
  misc_feature (1)..(203): tr|A0A1H8U5D7|A0A1H8U5D7_9GAMM Queuosine biosynthesis p rotein QueC OS=Aquisalimonas asiatica OX=406100 GN=SAMN 04488052_105172 PE=4 SV=1
MRRIRDAVNADESRFPGRIAELEVHDMGAMRNNPEIHDALADIRRRRHSGWQYYPLSSYIQQQGLDGIELTAQKYDSLSVILDGMLEPFETPFGASYRISGKHQGTPEHTVFSRFTFPIIDVSKREMHTQAAEHGFLPLMEETWFCHSPLKDGSQCGTCTPCIVSIRGGMGYRVPLKTRLRYRTRTPRRLFWAIRKKLRRTFG

SEQ ID NO: 36040 - protein, 229 aa, Aquisalimonas asiatica
  misc_feature (1)..(229): tr|A0A1H8U028|A0A1H8U028_9GAMM 7-cyano-7-deazaguanine s ynthase OS=Aquisalimonas asiatica OX=406100 GN=queC PE= 3 SV=1
MSGTQRPAIILLSGGLDSATVLAMARDLGYRCHAISFDYGQRHRSELAACDAIAAQGAHEHRRVTLDLGAIGGSALTDTAIDVPETPADGIPVTYVPARNTVFLSLALGYAEVVGAFDLFIGVNAVDYSGYPDCRPDFIRAFEATANLATRAGTEGEQRFRVHAPLSDMSKADIIRHGLALGVDYSRTVSCYQADDQGRACGVCDSCRLRAAGFSEAGVTDPTRYRPGV

SEQ ID NO: 36041 - protein, 234 aa, Aquisphaera giovannonii
  misc_feature (1)..(234): tr|A0A5B9VY96|A0A5B9VY96_9BACT 7-cyano-7-deazaguanine s ynthase OS=Aquisphaera giovannonii OX=406548 GN=queC_1 PE=3 SV=1
MRADGARGTSAAVLLSGGLDSAVLLSEMRRGHDRIHPLYIRGGLRWEEAELAAARAFVAAIGGPGLEPLTVLEEPVRDVYGDHWSTGSGGVPGAETPDEAVYLPGRNVLLTAKAAVWCRLRGVSELALGSLGSNPFPDSTPGFYRDLESVLGRAMGGSPRLTRPFDRLSKAEVVWAGRDLPLHLTFSCLMPVAGLHCGSCNKCAERREGFRQSGVADRTPYATSNASPRVGHAG

SEQ ID NO: 36042 - protein, 236 aa, Aquisphaera giovannonii
  misc_feature (1)..(236): tr|A0A5B9WAB3|A0A5B9WAB3_9BACT 7-cyano-7-deazaguanine s ynthase OS=Aquisphaera giovannonii OX=406548 GN=queC_2 PE=3 SV=1
MEPERKAIVLLSGGLDSATALAEAKAAGFTPHALTISYGQRHAVEIRAARAVARSMAVARHVELEIDLRAFGGSALTSELEVPKDRPPGEMTAGIPITYVPARNTVFLSLALAWAESLGAFDIFVGVNCVDYSGYPDCRPEFLGAFEELARLATRAGVEGHDRFRVHAPLITLEKHDIIRRGIALGVDYGLTHSCYDPSPEGLACGRCDSCQIRLAAFRRLGLVDPARYVDGPVGA

SEQ ID NO: 36043 - protein, 234 aa, Aquitalea magnusonii
  misc_feature (1)..(234): tr|A0A0F3K8U6|A0A0F3K8U6_9NEIS 7-cyano-7-deazaguanine s ynthase OS=Aquitalea magnusonii OX=332411 GN=queC PE=3 SV=1
MTPNTTKTAEKALVVLSGGQDSTTCLYWALQKFGAANVEAVTFDYGQRHRVELDCARKIAAMAGVRQTVLPIDTFAAIGGNALTDDSITPEEGSRDDDALPNTFVPGRNLIFLTFAAAFGYTRGARHIVTGVAQTDYSGYPDCRENTLQALQLAVRLGMDSRVELHTPLMYLSKAETVTLAQQVGAMEALAWSHTCYNGAVPPCGHCASCELRAKGFAEAGVADPLVERCSKEA

SEQ ID NO: 36044 - protein, 234 aa, Aquitalea magnusonii
  misc_feature (1)..(234): tr|A0A3G9GFG0|A0A3G9GFG0_9NEIS 7-cyano-7-deazaguanine s ynthase OS=Aquitalea magnusonii OX=332411 GN=queC PE=3 SV=1
MTPNTTKTAEKALVVLSGGQDSTTCLYWALQKFGAANVEAVTFDYGQRHRVELDCARKIAAMAGVRQTVLPIDTFAAIGGNALTDDSITPEEGSRDDDALPNTFVPGRNLIFLTFAAAFGYTRGARHIVTGVAQTDYSGYPDCRENTLQALQLAVRLGMDSRVELHTPLMYLSKAETVTLAQQVGAMEALAWSHTCYNGAVPPCGHCASCALRAKGFAEAGVADPLIERCSKEA

SEQ ID NO: 36045 - protein, 234 aa, Aquitalea sp.
  misc_feature (1)..(234): tr|A0A454JM89|A0A454JM89_9NEIS 7-cyano-7-deazaguanine s ynthase OS=Aquitalea sp. MWU14-2217 OX=2480983 GN=queC PE=3 SV=1
MNPNSTPTAEKALVVLSGGQDSTTCLYWALQKFGAGNVEAVTFDYGQRHRVELDCARKIAAMAGVRQTVLPIDTFAAIGGNALTDDSIQPEAGSRDDDALPNTFVPGRNLIFLTFAAAFGYTRGARHIVTGVAQTDYSGYPDCRENTLQALQLAVRLGMDSRVELHTPLMYLSKAETVTLAQQVGAMEALAWSHTCYNGAVPPCGHCASCELRAKGFAEAGVADPLVERCAREA

SEQ ID NO: 36046 - protein, 234 aa, Aquitalea sp.
  misc_feature (1)..(234): tr|A0A3N7EGM2|A0A3N7EGM2_9NEIS 7-cyano-7-deazaguanine s ynthase OS=Aquitalea sp. FJL05 OX=2153366 GN=queC PE=3 SV=1
MNPHSTPTAEKALVVLSGGQDSTTCLYWALQKFGAGNVEAVTFDYGQRHRVELDCARKIAAMAGVRQTVLPIDTFAAIGGNALTDDSIQPEEGSRDDDALPNTFVPGRNLIFLTFAAAFGYTRGARHIVTGVAQTDYSGYPDCRENTLQALQLAVRLGMDSRVELHTPLMYLSKAETVTLAQQVGAMEALAWSHTCYNGAVPPCGHCASCELRAKGFAEAGVADPLVERCAKEA

SEQ ID NO: 36047 - protein, 239 aa, Arboricoccus pini
  misc_feature (1)..(239): tr|A0A212RNJ1|A0A212RNJ1_9PROT 7-cyano-7-deazaguanine s ynthase OS=Arboricoccus pini OX=1963835 GN=queC PE=3 SV =1
MSQPSDEGALVLFSGGQDSTTCLAWALERFARVETVGFNYGQRHRIELDQRQHLRRGLQALNPLWAERLGDDHTIALDGLGQISETALTRDEAIRIEASGLPNTFVPGRNIIFLTFAAALAYRRGLRRIVGGMCETDYSGYPDCRDDAIKALQVALNIGMEKRFVLETPLMWIDKAQTWALAERLGGQALVDLIVEESHTCYLGERGASHAWGHGCGTCPACQLRAEGHGRFVAGRRQG

SEQ ID NO: 36048 - protein, 232 aa, Archangium gephyra
  misc_feature (1)..(232): tr|A0A2W5U4N9|A0A2W5U4N9_9DELT 7-cyano-7-deazaguanine s ynthase OS=Archangium gephyra OX=48 GN=queC PE=3 SV=1
MEQKKKAVVLLSGGLDSATCLGFARRDGFEPVCLSIDYGQRHIVELERAKAVAKANGVTDHRVVKLDLRSIGGSALTADVDVPKHDDVSDLGTGIPVTYVPARNTVFLGLALGLAEVVGSTDLYIGVNAVDYSGYPDCRPEFIRAFEQLAKIATAAGVAGANFTVHAPLSGLTKADIIRQGVAAGVDYSLTHSCYDPSPEGLACGHCDSCLLRRKGFVEAGVPDPTRYVKTP

SEQ ID NO: 36049 - protein, 234 aa, Archangium gephyra
  misc_feature (1)..(234): tr|A0A0G3A8J7|A0A0G3A8J7_9DELT 7-cyano-7-deazaguanine s ynthase OS=Archangium gephyra OX=48 GN=queC PE=3 SV=1
MAGNNKKKAVVLLSGGLDSTTVLAMAKADGFEPVCLAVSYGQRHSVELDRARRVTQAMGVKDFRVVTVDLRQVGGSALTADIDVPKDRPEDELSHGIPITYVPARNALFLSLALGLAEVVEASVIYIGVNAVDYSGYPDCRPEFIRAFEQMATLATKAGVEGTRFEVRAPLSGMTKADIIRAGVKLGVDYSMTHSCYDPDGEGRACGRCDSCVLRRRGFEQAGVADPTSYVKGA

SEQ ID NO: 36050 - protein, 234 aa, Archangium sp.
  misc_feature (1)..(234): tr|A0A1Q3HW48|A0A1Q3HW48_9DELT 7-cyano-7-deazaguanine s ynthase OS=Archangium sp. Cb G35 OX=1920190 GN=queC PE= 3 SV=1
MAGNSKKKAVVLLSGGLDSTTVLAMAKADGFEPVCLAVSYGQRHVVELDRARRVTQAMGVKDFRVVTVDLRQVGGSALTADIDVPKDRPESELSHGIPITYVPARNALFLSLALGLAEVVEASVIYIGVNAVDYSGYPDCRPEFIRAFEQMATLATKAGVEGTRFEVRAPLSGMTKADIIQAGVKLGVDYSMTHSCYDPDGEGRACGRCDSCVLRRRGFEQAGVADPTPYVKGA

SEQ ID NO: 36051 - protein, 198 aa, Archangium violaceum
  misc_feature (1)..(198): tr|A0A084SK21|A0A084SK21_9DELT 7-cyano-7-deazaguanine s ynthase OS=Archangium violaceum Cb vi76 OX=1406225 GN=Q 664_38490 PE=3 SV=1
MKTALLLSGGMDSIAIAWWRRPELAITVDYGQRPALAELRAAASAAEAMGIEHLTVKADLSALGSGDMAGAEPLSLAPVTEWWPFRNQMLVTLAAMKAVAHGVQRLLIGTLKTDGLHADGRPDFVTTLDALLRLQEGGLRLEAPAISLTSAELIRTSSIPMEVLAWAHSCHVGIHACGQCRGCQKHYQTLAELGVDPY

SEQ ID NO: 36052 - protein, 234 aa, Archangium violaceum
  misc_feature (1)..(234): tr|A0A084SKM5|A0A084SKM5_9DELT 7-cyano-7-deazaguanine s ynthase OS=Archangium violaceum Cb vi76 OX=1406225 GN=q ueC PE=3 SV=1
MAGNSKKKAVVLLSGGLDSTTVLAMAKADGFEPVCLAVSYGQRHAVELERARRVTQAMGVKDFRVVTVDLRQVGGSALTADIDVPKDRPESELSHGIPITYVPARNALFLSLALGLAEVVEASVIYIGVNAVDYSGYPDCRPEFIRAFEQMATLATKAGVEGTRFEVRAPLSGMTKADIIRAGVELGVDYSMTHSCYDPDEEGRACGRCDSCVLRRRGFEQAGVVDPTLYVKGA

SEQ ID NO: 36053 - protein, 223 aa, Arcobacter anaerophilus
  misc_feature (1)..(223): tr|A0A4Q0XW65|A0A4Q0XW65_9PROT 7-cyano-7-deazaguanine s ynthase OS=Arcobacter anaerophilus OX=877500 GN=queC PE =3 SV=1
MSKKAVCILSGGMDSTLAAYIAKDEGYDIIAVHFNYGQRTQNKELESFRNICKDLEIEQKYEIDIPFFTQIGASALTDKSIDVPTQGVKPGVPITYVPFRNGIFLSIATAIAEKEEAQALFIGVVEEDSSGYPDCTDSFIKKMTSAINEGTKESTKLEIKTPLVKLMKSDIVKKALELNVPLEHTWSCYKEEEEACGVCDSCRLRLNGFKEANAVDPIPYKAN

SEQ ID NO: 36054 - protein, 223 aa, Arcobacter aquimarinus
  misc_feature (1)..(223): tr|A0A4V1LCJ9|A0A4V1LCJ9_9PROT 7-cyano-7-deazaguanine s ynthase OS=Arcobacter aquimarinus OX=1315211 GN=queC PE =3 SV=1
MNKKAICILSGGMDSTLASYMAKKDGYEIIAVHFNYGQRTENRELKAFRDICDDLKILEKYEIDIPFFTQIGASALTDKNIDIPTNGIEAGVPITYVPFRNGIFLSITAAIAEKEGATAMYIGVVQEDSSGYPDCTDDFINKMKKAINQGTKEDTHIDIVTPLVHLSKAQIVEEAIRLNVPLEHTWSCYKEEEFACGVCDSCRLRLNGFKVANQIDPIPYKGL

SEQ ID NO: 36055 - protein, 225 aa, Arcobacter bivalviorum
  misc_feature (1)..(225): tr|A0A345J046|A0A345J046_9PROT 7-cyano-7-deazaguanine s ynthase OS=Arcobacter bivalviorum OX=663364 GN=queC PE= 3 SV=1
MNKTIKKAVCILSGGMDSTLASYMAKNEGYEIIAVHFNYGQRTEKRELQAFRDICADLQIKEKYEIDIPFFTQIGASALTDSSIDVPTNGVEEGVPVTYVPFRNGIFLSIASAIAEKEEANALFIGVVEEDSSGYPDCTDEFISKMTNAINQGTKESTKIEIKTPLVHLMKNEIVEKSLELNVPLEHTWSCYKEESEACGVCDSCRLRLNGFKKANATDPIKYKE

SEQ ID NO: 36056 - protein, 228 aa, Arcobacter butzleri
  misc_feature (1)..(228): sp|A8EWF5|QUEC_ARCB4 7-cyano-7-deazaguanine synthase OS =Arcobacter butzleri (strain RM4018) OX=367737 GN=queC PE=3 SV=1
MNKISTKKAICILSGGMDSTLSSYIAKKDGFEIIAVHFNYGQRTQNRELKAFRDICNELDIKSKYEIDIPFFTQIGANALTDMSIDVPTGGLEAGVPITYVPFRNGIFLAITAAIAEKEGATAMYIGVVQEDSSGYPDCTEEFIQDMKKAINQGTKEDTKIEIITPLVHLSKAQIVQEAIKLNVPLELTWSCYKEEEEACGVCDSCRLRLNGFEQAGKKDPIKYKEFQ

SEQ ID NO: 36057 - protein, 228 aa, Arcobacter butzleri
  misc_feature (1)..(228): tr|A0A0G9KWV7|A0A0G9KWV7_9PROT 7-cyano-7-deazaguanine s ynthase OS=Arcobacter butzleri L355 OX=1447263 GN=queC PE=3 SV=1
MNKVSTKKAICILSGGMDSTLSSYIAKKDGFEIIAVHFNYGQRTQNRELKAFRDICNELDIKSKYEIDIPFFTQIGANALTDMTIDVPTGGLEAGVPITYVPFRNGIFLAITAAIAEKEGATAMYIGVVQEDSSGYPDCTEEFIQDMKKAINQGTKEDTKIEIITPLVHLSKAQIVQEAIKLNVPLELTWSCYKEEEEACGVCDSCRLRLNGFEQAGKKDPIKYKEFQ

SEQ ID NO: 36058 - protein, 223 aa, Arcobacter canalis
  misc_feature (1)..(223): tr|A0A2G1CX82|A0A2G1CX82_9PROT 7-cyano-7-deazaguanine s ynthase OS=Arcobacter canalis OX=1912871 GN=queC PE=3 S V=1
MKKRAVCILSGGMDSTLASYIAKNEGYEIIAVHFNYGQRTQDRELKAFRDICNDLKIEEKYEIDIPFFTQIGASALTDKNIDVPIGGVEAGVPITYVPFRNGIFLSIATAIAEKENASALYIGVVEEDSSGYPDCTDDFIKSITNTINTGTKEDTKLEIKTPLVHLMKNEIVLKALELNVPLNLTWSCYKEEEEACGVCDSCRLRLNGFEKANSEDKIPYKVK

SEQ ID NO: 36059 - protein, 229 aa, Arcobacter cibarius
  misc_feature (1)..(229): tr|A0A5J6RF62|A0A5J6RF62_9PROT 7-cyano-7-deazaguanine s ynthase OS=Arcobacter cibarius OX=255507 GN=queC PE=4 S V=1
MINNFNKKAVVILSGGMDSTLSSYIAKNSGYELIAVHFNYGQRTQERELKAFRDICEKLNVLNKYEIDIPFFTQIGASALTDKTIDVPTSGIEKGIVPITYVPFRNGIFLSIASAIAEKEEASAIYIGVVEEDSSGYPDCSDNFIQDMNKAINKGTKEDTKIRIITPLVHLSKTQIVEESIKLNVPLNLTWSCYKEEIEACGVCDSCRLRLNGFKNANAIDPIKYKEIN

SEQ ID NO: 36060 - protein, 223 aa, Arcobacter cloacae
  misc_feature (1)..(223): tr|A0A4Q0V9Q8|A0A4Q0V9Q8_9PROT 7-cyano-7-deazaguanine s ynthase OS=Arcobacter cloacae OX=1054034 GN=queC PE=3 S V=1
MNKKAICILSGGMDSTLASYIAKNDGYEIIAVHFNYGQRTQNRELKAFRDICDDLKILEKYEIDIPFFTQIGASALTDKNIDVPTNGIETGVPITYVPFRNGIFLSITAAIAEKEGATAMYIGVVQEDSSGYPDCTDDFIEKMKKAINQGTKEDTHIDIVTPLVHLSKAQIVEEAIRLNVPLEHTWSCYKEEEFACGVCDSCRLRLNGFKVANQVDPIPYKGL

SEQ ID NO: 36061 - protein, 223 aa, Arcobacter cloacae
  misc_feature (1)..(223): tr|A0A4Q0ZHM2|A0A4Q0ZHM2_9PROT 7-cyano-7-deazaguanine s ynthase OS=Arcobacter cloacae OX=1054034 GN=queC PE=3 S V=1
MNKKAICILSGGMDSTLASYIAKNDGYEIIAVHFNYGQRTENRELKAFRDICDDLKILEKYEIDIPFFTQIGASALTDKNIDVPTNGIETGVPITYVPFRNGIFLSITAAIAEKEGATAMYIGVVQEDSSGYPDCTDDFIEKMKKAINQGTKEDTHIDIVTPLVHLSKAQIVEEAIRLNVPLEHTWSCYKEEEFACGVCDSCRLRLNGFKVANQVDPIPYKGL

SEQ ID NO: 36062 - protein, 228 aa, Arcobacter cryaerophilus
  misc_feature (1)..(228): tr|A0A494TA33|A0A494TA33_9PROT 7-cyano-7-deazaguanine s ynthase OS=Arcobacter cryaerophilus D2610 OX=1032071 GN =queC PE=3 SV=1
MNQNFNKKAVVILSGGMDSTLSSYIAKNSGYELIAIHFNYGQRTQDRELKAFRDICKELNVLNKYEIDIPFFSQIGASALTDKNIDVPIDGIEKGVVPITYVPFRNGIFLSIASAIAEKENASAIYIGVVEEDSSGYPDCSDNFIQKMQNAINEGTKEDTKIEIITPLVHLSKAQIVEEAIKLNAPLELTWSCYKEEEKACGVCDSCRLRLNGFKEANQKDLIPYKES

SEQ ID NO: 36063 - protein, 443 aa, Arcobacter cryaerophilus
  misc_feature (1)..(443): tr|A0A5B7XE53|A0A5B7XE53_9PROT Uncharacterized protein OS=Arcobacter cryaerophilus ATCC 43158 OX=1032070 GN=AN 286_10515 PE=4 SV=1
MFKVTIEELDRKDCLLTLRLNINNEYESGLIINPYDCFTSIISNPTNSSLDVLYFTSIIYAIDKVIQRVDTFDNWSRDIEVEIPVSNVSVWNSAKDILKEAIDFLTSDNWIFNFRELEDISYFERKETLSLNINVEKICLFSGGLDSLAGAINLVDETDNILLISHVDGHGAPSTLHSELLSEIRNEYSTKNIRQASFHVYTEDEIKHEGTTRGRSILFHGIALFHAINLNINEIVTPENGVISINLPLTPSRTCSNSTKTMHPYFIKKFEEALSLLGHNIQINNPYLFKTKGEMLVENRNTDLISKLATKTLSCSHGGGHTATWYNRNSLNCGYCIPCTIRRASIHKFNNTLDRCNDYGHRLKNEDIKISSHEKRLDLLALAYFLNKNLTRAEVKREIKLMAKIDDIEEVTDMLLRGYAEIKQYINDKADDEIKGLFSCQLA

SEQ ID NO: 36064 - protein, 228 aa, Arcobacter defluvii
  misc_feature (1)..(228): tr|A0A4Q0UN67|A0A4Q0UN67_9PROT 7-cyano-7-deazaguanine s ynthase OS=Arcobacter defluvii OX=873191 GN=queC PE=3 S V=1
MNNKTTKKAICILSGGMDSTLASYIAKKDGYEIIAVHFNYGQRTQNRELKAFRDICDDLGILEKYEIDIPFFTQIGASALTDKSIDVPTNGLEAGVPITYVPFRNGIFLSITAAIAEKEKATAMYIGVVQEDSSGYPDCTEEFINDISKAINQGTREETSIEIKTPLVHLSKAQIVEEALKLNVPLIHTWSCYKEEDEACGVCDSCRLRLNGFNLANQIDPITYKVNL

SEQ ID NO: 36065 - protein, 224 aa, Arcobacter ebronensis
  misc_feature (1)..(224): tr|A0A4Q0YF91|A0A4Q0YF91_9PROT 7-cyano-7-deazaguanine s ynthase OS=Arcobacter ebronensis OX=1462615 GN=queC PE= 3 SV=1
MSRKKAVCILSGGMDSSLSSYIAKKEDGYDIIAVHFNYGQRTEKRELEAFRNICEDLDIKEKYEIDIPFFTQIGASALTDKTIEVPTQGVKPGVPITYVPFRNGIFLSIATAIAEKEEAEAIFIGVVEEDSSGYPDCTDSFIEKMTSAINQGTKESTKIKIKTPLVKLMKRDIVKRALELKVPLEHTWSCYKEEEEACGVCDSCRLRLNGFKEANAIDPIPYKD

SEQ ID NO: 36066 - protein, 224 aa, Arcobacter ebronensis
  misc_feature (1)..(224): tr|A0A4Q1AM02|A0A4Q1AM02_9PROT 7-cyano-7-deazaguanine s ynthase OS=Arcobacter ebronensis OX=1462615 GN=queC PE= 3 SV=1
MSRKKAVCILSGGMDSSLSSYIAKKEDGYDIIAVHFNYGQRTEKRELKAFRNICEDLDIKEKYEIDIPFFTQIGASALTDKTIEVPTQGVKPGVPITYVPFRNGIFLSIATAIAEKEEAEAIFIGVVEEDSSGYPDCTDSFIEKMTSAINQGTKESTKIKIETPLVKLMKRDIVKRALELNVPLEHTWSCYKEEEEACGVCDSCRLRLNGFKEANAIDPIPYKD

SEQ ID NO: 36067 - protein, 226 aa, Arcobacter ellisii
  misc_feature (1)..(226): tr|A0A347UBB0|A0A347UBB0_9PROT 7-cyano-7-deazaguanine s ynthase OS=Arcobacter ellisii OX=913109 GN=queC PE=3 SV =1
MNNSTKKAICILSGGMDSTLASYIAKNDGYEIIAVHFNYGQRTQDRELKAFRDICEDLKILEKYEIDIPFFTQIGASALTDKTIDVPTGGIEAGVPITYVPFRNGIFLSITAAIAEKEGASAMYIGVVQEDSSGYPDCTDEFIDKMKKAINQGTKEDTHIDIITPLVHLTKAQIVQEAIKLNVPLEHTWSCYKEENEACGVCDSCRLRLNGFKIAGLKDPISYKAS

SEQ ID NO: 36068 - protein, 223 aa, Arcobacter halophilus
  misc_feature (1)..(223): tr|A0A2N1J3W8|A0A2N1J3W8_9PROT 7-cyano-7-deazaguanine s ynthase OS=Arcobacter halophilus OX=197482 GN=queC PE=3 SV=1
MKKRAVCILSGGMDSTLASYMAKDEGYDIIAVHFNYGQRTEKRELKAFRDICEDLQIKEKYEIDIPFFTQIGASALTDKSIDVPVDGLESGVPITYVPFRNGIFLSIATAIAEKESANALFIGVVEEDSSGYPDCTDDFIKSITNTINVGTKESTVLEIKTPLVHLMKDEIVLKALELNVPLNLTWSCYKEEEEACGVCDSCRLRLNGFKKANSEDKIPYKVK

SEQ ID NO: 36069 - protein, 223 aa, Arcobacter marinus
  misc_feature (1)..(223): tr|A0A347THS6|A0A347THS6_9PROT 7-cyano-7-deazaguanine s ynthase OS=Arcobacter marinus OX=505249 GN=queC PE=3 SV =1
MKKRAVCILSGGMDSTLASYIAKNEGYEIIAVHFNYGQRTQDRELKAFRDICNDLKIEEKYEIDIPFFTQIGASALTDKNIDVPVGGVEAGVPITYVPFRNGIFLSIATAIAEKENASALYIGVVEEDSSGYPDCTDDFIKSITNTINTGTKEDTKLEIKTPLVHLMKNEIVLKALELNVPLNLTWSCYKEEEEACGVCDSCRLRLNGFKKANSEDKIPYKVK

SEQ ID NO: 36070 - protein, 196 aa, Arcobacter marinus
  misc_feature (1)..(196): tr|A0A1T5BRV9|A0A1T5BRV9_9PROT 7-cyano-7-deazaguanine s ynthase OS=Arcobacter marinus OX=505249 GN=SAMN06295997 _11548 PE=3 SV=1
MEREKIAILFSGGLESTALIKYYKNKKKDITLIYLFFGYVWEDAEFFHAKKIASKYKLTIATFDLSKVINTIQLGNVKNLKENIIPLRNLSLLTFASLFIYNKNIYKLAIGIQGNLEYPDTSKSYIKDIEKLISIGLLKNDFQIEVPFYGKKKEEIIKEYSLPLELIFSCTNPIKYKRCHNCYKCKKLDFLIKKYS

SEQ ID NO: 36071 - protein, 222 aa, Arcobacter molluscorum
  misc_feature (1)..(222): tr|A0A2G1DKF0|A0A2G1DKF0_9PROT 7-cyano-7-deazaguanine s ynthase OS=Arcobacter molluscorum LMG 25693 OX=870501 G N=queC PE=3 SV=1
MKKAVCILSGGMDSTLASYIAKNEGYEIIAVHFNYGQRTEKRELKAFRDICKDLNIKEKYEIDIPFFVQIGASALTDKNIDVPVDGIETGVPITYVPFRNGIFLSIATAIAEKENANALYIGVVEEDSSGYPDCTDEFIKSINYTINTGTKNTTNIEIKTPLVHLLKSEIVLKAMQLNVPLELTWSCYKEEEEACGVCDSCRLRLNGFEKANSKDKIPYKVK

SEQ ID NO: 36072 - protein, 222 aa, Arcobacter mytili
  misc_feature (1)..(222): tr|A0A345J2E2|A0A345J2E2_9PROT 7-cyano-7-deazaguanine s ynthase OS=Arcobacter mytili LMG 24559 OX=1032238 GN=qu eC PE=3 SV=1
MKKAVCILSGGMDSTLSSYIAKNEGYEIIAVHFNYGQRTETRELKAFRDICEDLQIKEKYEIDIPFFTQIGASALTDKSIEVPIGGIEAGVPVTYVPFRNGIFLSIAAAIAEKENTEAIYIGVVEEDSSGYPDCTEEFISSITNSINTGTKETTKIQIKTPLVHLMKNEIVLKAIELNVPLHLTWSCYKEEEEACGVCDSCRLRLNGFKKANCEDKIPYKVL

SEQ ID NO: 36073 - protein, 223 aa, Arcobacter nitrofigilis
  misc_feature (1)..(223): tr|D5UZC8|D5UZC8_ARCNC 7-cyano-7-deazaguanine synthase OS=Arcobacter nitrofigilis (strain ATCC 33309 / DSM 729 9 / LMG 7604 / NCTC 12251 / CI) OX=572480 GN=queC PE=3 SV=1
MSKKAICILSGGMDSTLSSYIAKNEGYEIIAIHFNYGQRTEKRELKAFRDVCENLNVKNKYEIDIPFFTQIGASALTDANIDVPIDGVKPGVPVTYVPFRNGIFLSIAAAVAEKENAEAMFIGVVEEDSSGYPDCTDAFINQIKNAINEGTKEATHISIKTPLVKLHKSEIVKKALELNVPLELTWSCYKEEKEACGVCDSCRLRLNGFAQANSKDPIPYKGS

SEQ ID NO: 36074 - protein, 226 aa, Arcobacter pacificus
  misc_feature (1)..(226): tr|A0A5C2H7M9|A0A5C2H7M9_9PROT 7-cyano-7-deazaguanine s ynthase OS=Arcobacter pacificus OX=1080223 GN=queC PE=3 SV=1
MSSTAKKAICILSGGMDSTLASYIAKNDGYEIIAVHFNYGQRTEQRELKAFRDICNDLGILEKYEIDIPFFTQIGASALTDSSIDVPTEGVKPGVPITYVPFRNGIFLSITAAIAEKEEATAMYIGVVQEDSSGYPDCTDEFIQDMTKAINQGTKEETKIEIKTPLVHLSKAQIVQEALKLDVPLEHTWSCYKEQNEACGVCDSCRLRLNGFKEAGSSDPIPYKAI

SEQ ID NO: 36075 - protein, 228 aa, Arcobacter skirrowii
  misc_feature (1)..(228): tr|A0A2U2C2Y1|A0A2U2C2Y1_9PROT 7-cyano-7-deazaguanine s ynthase OS=Arcobacter skirrowii OX=28200 GN=queC PE=3 S V=1
MNNNLKKKAVVILSGGMDSTLSSYIAKNSNYDLIAVHFNYGQRTETKELKAFRDICKELNVLNKYEIDIPFFTQIGASALTDKTIDVPVNGVEKGIIPITYVPFRNGIFLSIASAIAEKEEASAMYIGVVQEDSSGYPDCSDSFIQKMQNAINEGTKDDTKIEIITPLVHLSKAQIVEEAIKLNVPLELTWSCYKEEDKACGVCDSCRLRLNGFKEANQKDLIPYKES

SEQ ID NO: 36076 - protein, 228 aa, Arcobacter skirrowii
  misc_feature (1)..(228): tr|A0A4Q0UFJ1|A0A4Q0UFJ1_9PROT 7-cyano-7-deazaguanine s ynthase OS=Arcobacter skirrowii CCUG 10374 OX=1032239 G N=queC PE=3 SV=1
MNNNLKKKAVVILSGGMDSTLSSYIAKNSNYDLIAVHFNYGQRTQDRELKAFRDICKELNVLNKYEIDIPFFSQIGASALTDKTIDVPVDGIEKGVVPITYVPFRNGIFLSIASAIAEKEEASAMYIGVVQEDSSGYPDCSDSFIQKMQNAINEGTKEDTKIEIITPLVHLSKAQIVEEAIKLNVPLELTWSCYKEEDKACGVCDSCRLRLNGFKEANQKDLIPYKES

SEQ ID NO: 36077 - protein, 227 aa, Arcobacter sp.
  misc_feature (1)..(227): tr|A0A366MRJ9|A0A366MRJ9_9PROT 7-cyano-7-deazaguanine s ynthase OS=Arcobacter sp. CECT 9230 OX=2044510 GN=queC PE=3 SV=1
MNNNLNKKAIVILSGGMDSTLSSYIAKTDGYELIAVHFNYGQRTQNKELKAFRDICKELNVVNKYEIDIPFFTQIGANALTDLNIDVPTNGLEDGVPITYVPFRNGIFLSIATAVAEKEGATAMYIGVVQEDSSGYPDCTDSFIGSISKAINEGTKEDTKIEIITPLVHLSKSQIVQKAIELSVPLELTWSCYKEEHEACGVCDSCRLRLNGFTQANSIDPIKYKEF

SEQ ID NO: 36078 - protein, 223 aa, Arcobacter sp.
  misc_feature (1)..(223): tr|A0A1Y5E0P3|A0A1Y5E0P3_9PROT 7-cyano-7-deazaguanine s ynthase OS=Arcobacter sp. 31_11_sub10_T18 OX=1856277 GN =queC PE=3 SV=1
MTKKRAICILSGGMDSTLSTYIAKNENYDIIPVHFNYGQRTEKRELKAFRDICNELKLENIYEIDIPFFTQIGASALTDDTIDIPVDGIEPGVPITYVPFRNGIFLSIATAIAEKEKASALFMGVVEEDSSGYPDCTDDFISKMSKSINAGTKEETKLEIITPLVKLSKSQIVTKATTLNVKLELTWSCYKESDIACGVCDSCRLRLNGFEKAGIKDNIPYKV

SEQ ID NO: 36079 - protein, 227 aa, Arcobacter suis
  misc_feature (1)..(227): tr|A0A443TJU5|A0A443TJU5_9PROT 7-cyano-7-deazaguanine s ynthase OS=Arcobacter suis OX=1278212 GN=queC PE=3 SV=1
MSKISTKKAICILSGGMDSTLASYIAKNEGYEIIAVHFNYGQRTQDRELKAFRDICDDLKILEKYEIDIPFFTQIGASALTDKTIDVPTGGIEAGVPITYVPFRNGIFLSITAAIAEKEEATAMYIGVVQEDSSGYPDCTDSFIFDMKKAINEGTKKDTHIDIKTPLVHLSKAQIVQEAIKLNVPLEHTWSCYKEEKEACGVCDSCRLRLNGFRIAGVKDPIPYKAS

SEQ ID NO: 36080 - protein, 228 aa, Arcobacter trophiarum
  misc_feature (1)..(228): tr|A0A4Q1A4Z4|A0A4Q1A4Z4_9PROT 7-cyano-7-deazaguanine s ynthase OS=Arcobacter trophiarum LMG 25534 OX=1032241 G N=queC PE=3 SV=1
MINNSNNKAVVILSGGMDSTLSSYIAKNSGYELIAVHFNYGQRTENRELIAFRDICKKLNVLNKYEIDIPFFAQIGASALTDKSIDVPVDGLEKGIIPVTYVPFRNGIFLSIASAIAEKENANAIYIGVVQEDSSGYPDCTNSFISSIQNAINEGTKDNTNIKIITPLVNLSKAQIVQEAIKLNVPLELTWSCYKEEESACGVCDSCRLRLNGFKEANQKDPIPYKES

SEQ ID NO: 36081 - protein, 226 aa, Arcobacter venerupis
  misc_feature (1)..(226): tr|A0A443TSP9|A0A443TSP9_9PROT 7-cyano-7-deazaguanine s ynthase OS=Arcobacter venerupis OX=1054033 GN=queC PE=3 SV=1
MNNKTKKAICILSGGMDSTLASYIAKNDGYEIIAVHFNYGQRTQDRELKAFRDICEDLKILEKYEIDIPFFTQIGASALTDKNIDVPTGGVETGVPITYVPFRNGIFLSITAAIAEKEGATAMYIGVVQEDSSGYPDCTDLFISDMKRAINQGTKEDTHIDIKTPLVHLSKAQIVLEAKKLNVPLEHTWSCYKEEEEACGVCDSCRLRLNGFKIANQIDPIAYKAL

SEQ ID NO: 36082 - protein, 1383 aa, Arenibacter sp.
  misc_feature (1)..(1383): tr|A0A372GRL7|A0A372GRL7_9FLAO Amino acid adenylation d omain-containing protein OS=Arenibacter sp. P308M17 OX= 2303391 GN=D0S24_18200 PE=4 SV=1
MHNKYLYSQPLTQSQELIWMGQKINPNVPLYNVPYAFEINGNISEEVFELALQALIDRTEILRTIFYEENGTVTQKVLAEFSFQLKKLDFSRNTNGLSVKEWLEKRSEINFDFSQPLFDTAILKVAEENYIWYLNLHHLITDATTAVLIFNLMADLYKGVQDKNVATIPFPPAYSNFITFEAEKRKGPDHNKYNNYWKEKVKSIATVPQLYGSRQKAKTTRAKRVHIALGKRRTQQLKELTRNPKVGSLSTDMGLFTLFSSLIHIFLYRISGQSKILIGSPIHNRLSRDFKFTPGLFVELFPISLELSDDDTFATVIEKMKLETNDFLRNAQVSSSSAEVGRSFSAVINYINTSFSSFNGFPTNVEWIHPKHCDPLHQLRCHIIDFNAKGELEILFDLNQDIFDEGLAELVPHHFLNLMDGLLTDLDQPIGAPPLITKYEIEELLGDMKTSGTSHFKGTFLEHFEKTVHNNPKKIALENGEDLISYLDLNNRANQLAHFLIKNGIKENEKVALHLYRSPDYIISALALMKIGATFIPIPADQPAGRIEFVISNSDCVLVITEKALRKNIAGNTKTMDLREISEKISSEPSTSTGHNLKRSCIAYYLYTSGSTGMPKGVMVSHKALNNYLQWASSFYNIGTNSVFPLFTSIGFDLTISSTFLPLINGGKVVVYREGMLGPDISLIQVLDENKVNSIKVTPAHITLMQVRNLVGSRIKTMIVGGEDLKVGIAKNIYDHLGEDVTIFNEYGPTEATVGCIVSKFNPEHHRDISVPIGKVIANMNAYILDNNKNLVPKGVVGELFLSGDSLAEGYANLKELTKQKFINDPFRPGSIMYRTGDLVRMNNQDEMEFLGRNDEQVKLNGFRIELADIEANLLEHSSIDNASVVLIDAQERVAENEVLNCTECGLPSNYPKTDFDEKGVCHLCNAFKGYKEKTDKYFKTEEELHQLLLSRKASNSTYDCLSLLSGGKDSTYVLARLINMGLKVLAFTLDNGYISEQAKTNIDQIVQKLGVDHVYGSTEHMNKIFVDSLDRHQNVCNGCFKTIYTLSTKVALDKKIPFVVTGLSRGQFFETRLTEELFWDDDIDTSTIDQTILEARKLYHQESDAVNQLLDVSMFKDEKTFEKVQFVDFYRYNDVRLEEMLAYLKEKVGWVRPTDTGRSTNCLINQLGIYVHKKQKGYSNYSFPYSWDVRLGHKTRTETLEEINEYIDENEVKHIMKEIGYVESNYNDKMRPQLVGYYTAKTKISHQELTQHLSKRLPHYMLPGTFKYLETLPLTSNGKVDKKALRGLNIVQLQMETPFVEPKNEIEILLEKIWREVLLLDKIGIHDNFIALGGHSLAAIRVTARVNEEVEMTFPLNKIFELPTISEYAKYIEETLLTLMEE

SEQ ID NO: 36083 - protein, 221 aa, Arenicella xantha
  misc_feature (1)..(221): tr|A0A395JTG5|A0A395JTG5_9GAMM 7-cyano-7-deazaguanine s ynthase OS=Arenicella xantha OX=644221 GN=DFR28_101252 PE=3 SV=1
MDNSAVTDVAVLVSGGLDSSVLAVHLSDSNYHVYPIYIQHGLYWEATERDHLTRFLCAVARPNIAELKILELPVTDMYESHWSVSGNNVPDENTQDDAVFLPGRNLLLLAKASVWCSLTGIRTIALAPLSGNPFADNSNAFYRAIEQSIQISSGQNMDIIRPFSNMSKDQVLQLGGKLPLHLTFSCIRPHKGLHCGRCNKCAERKLAYHRLGIEDATPYAT

SEQ ID NO: 36084 - protein, 213 aa, Arenicella xantha
  misc_feature (1)..(213): tr|A0A395JQM9|A0A395JQM9_9GAMM 7-cyano-7-deazaguanine s ynthase in queuosine biosynthesis OS=Arenicella xantha OX=644221 GN=DFR28_101249 PE=4 SV=1
MSKPSILCMFSGGIDSTGVLHTLITDEDFHDRALIVHHIILQNRENRAQAEMESVRKIIDFYQAEHPHRGFTYTESVFNTTGFAPLKASRFPFDMDVCAFTAGNISVARKDVRQVAMGRTKTDVESGGDNFQKRMERAQTIYRAVYSLEPETIPEYIFPVINMTKEEIWDSLPEPVQSATWYCRHPQYRPGGHAEPCKKCPTCKEVSEFIAHG

SEQ ID NO: 36085 - protein, 227 aa, Arenimonas caeni
  misc_feature (1)..(227): tr|A0A2P6MBV7|A0A2P6MBV7_9GAMM 7-cyano-7-deazaguanine s ynthase OS=Arenimonas caeni OX=2058085 GN=queC PE=3 SV= 1
MNPQAKRAVVLVSGGMDSAVVLAIAREQGFACHALSVSYGQRHTSELAAAAELAASVGAEHKLVTVDLRSIGGSALTDDIDVPEAGGAGIPVTYVPARNTIMLSIALGWAEVLGADDLFCGVNAVDYSGYPDCRPEFIEAFQRLANVATKAGVEGHALKVHAPLLRMSKADIAREGARLGVDFSRTVSCYQADEQGRACGRCDACRLRAEGFVAAGLADPTRYAPRV

SEQ ID NO: 36086 - protein, 237 aa, Arenimonas composti
  misc_feature (1)..(237): tr|A0A091BEU5|A0A091BEU5_9GAMM 7-cyano-7-deazaguanine s ynthase OS=Arenimonas composti TR7-09 = DSM 18010 OX=11 21013 GN=queC PE=3 SV=1
MKKAVVLVSGGMDSAVVLALAREAGFACHALSVSYGQRHTSELQAAARVAAAMGAVEHKVVTVDLRAIGGSALTADIAVPEHDAGERLDEGIPVTYVPARNTIMLSIALGWAEVLGADDLFCGVNAVDYSGYPDCRPEFIAAFERLANLATKTGVTRAAAGEPGLQVHAPLMRMSKADIAREGTRLGVDFAQTVSCYQADGDGRACGRCDACRLRAAGFADAGLPDPTRYAPGAESR

SEQ ID NO: 36087 - protein, 227 aa, Arenimonas donghaensis
  misc_feature (1)..(227): tr|A0A087MG37|A0A087MG37_9GAMM 7-cyano-7-deazaguanine s ynthase OS=Arenimonas donghaensis DSM 18148 = HO3-R19 O X=1121014 GN=queC PE=3 SV=1
MNQNQKHAVVLVSGGMDSAVVLAMAREQGFVCHALSVSYGQRHTSELAAAAELAASVGAQHKVVTVDLRSIGGSALTADIDVPEQGGQGIPVTYVPARNTIMLSIALGWAEVLGADDLFCGVNAVDYSGYPDCRPAFIEAFQALANLATKAGVEGHALRVHAPLMRMSKADIAREGARLGVDFSRTVSCYQADDQGRACGRCDACRLRAEGFAAAGLADPTRYAPRA

SEQ ID NO: 36088 - protein, 213 aa, Arenimonas malthae
  misc_feature (1)..(213): tr|A0A091B7N5|A0A091B7N5_9GAMM 7-cyano-7-deazaguanine s ynthase OS=Arenimonas malthae CC-JY-1 OX=1384054 GN=que C PE=3 SV=1
MDSAVVLALAREQGFACHALSVSYGQRHTSELAAAAELARVQGAVEHKVVTVDLRSIGGSALTADIDVPETAGQGIPVTYVPARNTIMLSIALGWAEVLGADDLFCGVNAVDYSGYPDCRPEFIAAFERLANLATKAGVEGHSLRVHAPLMRLGKADIAREGARLGVDFSRTVSCYQADAEGRACGRCDACRLRAEGFAAAGLADPTRYAPRG

SEQ ID NO: 36089 - protein, 227 aa, Arenimonas metalli
  misc_feature (1)..(227): tr|A0A091BSB8|A0A091BSB8_9GAMM 7-cyano-7-deazaguanine s ynthase OS=Arenimonas metalli CF5-1 OX=1384056 GN=queC PE=3 SV=1
MTTQQRKAVVLVSGGMDSAVVLAMAREQGFLCHALSVSYGQRHTSELAAAAALAALHGAEHKVVTVDLRSIGGSALTADIAVPEAAAAGIPVTYVPARNTIMLSIALGWAEVLGADDLFCGVNAVDYSGYPDCRPEFIAAFECLANLATKAGVEGHALRLHAPLMRMSKADIAREGARLGVDFSATVSCYQADADGRACGRCDACRLRAEGFAAAGLPDPTRYASRE

SEQ ID NO: 36090 - protein, 213 aa, Arenimonas oryziterrae
  misc_feature (1)..(213): tr|A0A091BFD2|A0A091BFD2_9GAMM 7-cyano-7-deazaguanine s ynthase OS=Arenimonas oryziterrae DSM 21050 = YC6267 OX =1121015 GN=queC PE=3 SV=1
MDSAVTLAIARELGFTCHALSVSYGQRHSAELDAANELARTQGAAEHKTVGVDLRSIGGSALTSDIAVPETPADGIPVTYVPARNTIMLSIALGWAEVLGADDIFCGVNAVDYSGYPDCRPEFIAAFEKLAGLATQAGVEGRGMRIHAPLIAMSKADIVREGQRLGVDFSRTVSCYQADAQGNACGLCDACRLRSEGFAAAGVPDPTRYRQKA

SEQ ID NO: 36091 - protein, 223 aa, Arenimonas sp.
  misc_feature (1)..(223): tr|A0A1D2RT38|A0A1D2RT38_9GAMM 7-cyano-7-deazaguanine s ynthase OS=Arenimonas sp. SCN 70-307 OX=1660089 GN=queC PE=3 SV=1
MKKAVVLVSGGMDSAVVLAIAREQGFDCHALSVAYGQRHTSELAAAAELAQSVGAVHKVVNVDLRSIGGSALTADIDVPEAGGEGIPVTYVPARNTIMLSIALGWAEVLGADDLFCGVNAVDYSGYPDCRPEFIEAFERLANVATKAGVEGHGLKVHAPLLRMSKADIAREGARLGVDFARTVSCYQADGQGRACGRCDACRLRAEGFAAAGLPDPTRYAPRG

SEQ ID NO: 36092 - protein, 224 aa, Arenimonas sp.
  misc_feature (1)..(224): tr|A0A5B2ZCI2|A0A5B2ZCI2_9GAMM 7-cyano-7-deazaguanine s ynthase OS=Arenimonas sp. 3729k OX=2608255 GN=queC PE=3 SV=1
MKKAVVLVSGGMDSAVVLAMAREQGFACHALSVAYGQRHTSELDAAARVAADLAAVEHKVVQVDLRSIGGSALTDDIAVPESPGQGIPVTYVPARNTIMLSIALGWAEVLGARDLFCGVNAVDYSGYPDCRPAFIAAFERLANLATRAGVEGAGLRVHAPLMEMGKADIVRAGHRLGVDFGSTVSCYQADAEGRACGRCDACRLRAQGFAEAGLADPTRYVTAS

SEQ ID NO: 36093 - protein, 455 aa, Armatimonadetes bacterium
  misc_feature (1)..(455): tr|A0A3D4ZYV9|A0A3D4ZYV9_9BACT Uncharacterized protein OS=Armatimonadetes bacterium OX=2033014 GN=DGT21_15725 PE=4 SV=1
MARVVVRTGMPPDMLERAGPSADWCLQWLGDGCNVMADLEQLQAAICTQPSELTRDILDIALALYTADIVVPRGRNEAWTRELSLLVPVRQPDFWEQNLSALLSILHGLTRDNFHLEFCARLEDCPELLRPVGAGGPADIRSRDVDCVCALSGGIDSLAGGTMLLRADRRPLFVSHRSGNPYVRQLQTAAEKTLDSIRPDTAVFANLVVQPRHGSGAEFRFPVPGDRESSRRLRTFLFMAMLTAAAGGVDVEEAYLCENGILTIALPMSPGRVGSLSTRSTHPSILAGFNALARAAGMKTTILNPFIYRTKAEIITDILRPVLTPNQIQATTSCWMSGRRNRPCGGCIPCLLRRISMLAAGLPDEAYEIDLLADPEVYRGTEAYDNLIDLLTQAVRVSSGTDEQLLVQWPQLLDLASAGVSVEDALAMYRRYAEEVWRVTREHFPAVALLMKRIG

SEQ ID NO: 36094 - protein, 222 aa, Armatimonadetes bacterium
  misc_feature (1)..(222): tr|A0A1Y0H4M7|A0A1Y0H4M7_9BACT 7-cyano-7-deazaguanine s ynthase OS=Armatimonadetes bacterium Uphvl-Ar1 OX=20044 67 GN=queC PE=3 SV=1
MNPRAVILLSGGLDSVTCLAIAQSQGFDPYCLTIQYGQRHYIELDAARSIAEKFQVTEHKILPVDLTLFGGSALTDNIEVPKDSPTTDIPVTYVPARNTVMLSLALAYAETRQANDIFVGVNAVDYSGYPDCRPEFIAAFQNLAQVATKAGVEGNSLTIHAPLIQMTKPEIIQTGLKLGVDYGMTHSCYDPVNGRPCEHCDSCLIRIKAFAELGMTDPALLK

SEQ ID NO: 36095 - protein, 226 aa, Aromatoleum aromaticum
  misc_feature (1)..(226): sp|Q5P4Z2|QUEC_AROAE 7-cyano-7-deazaguanine synthase OS =Aromatoleum aromaticum (strain EbN1) OX=76114 GN=queC PE=3 SV=1
MTEPKRAIVLLSGGLDSATCLAIARNAGFDCYALSIAYGQRHTAELAAARRVAQSLDAREHRLAHVSLGEFGGSALTDSSIPVPIEGAVGGIPVTYVPARNTVMLSIALAWAEVLGAHDIYVGVNAVDYSGYPDCRPEFIAAFEAMANLATKAGIEGARITIHAPLIRLSKAGIIQRGTALGVDYAQTVSCYQADEAGRACGVCDACRLRKAGFEAAGIPDPTPYR

SEQ ID NO: 36096 - protein, 457 aa, Aromatoleum aromaticum
  misc_feature (1)..(457): tr|Q5P5F5|Q5P5F5_AROAE Uncharacterized protein OS=Aroma toleum aromaticum (strain EbN1) OX=76114 GN=ebA2390 PE= 4 SV=1
MTTLLPLKELAVDVVEAGARRRKSMVPCILGQNIDFDLEALESFSSIKWQTTVYDALVVAAVVEFCDRSLARSAMNWGRKFSVHIPVHDPDKWSDKTVIRALVEALNLLTGDDWHFEFRARKVPAEPPQQDRLRFPSDAEAIIAYSDGMDSRAVAGLESSRLGRRLVRMRVGSKQHDVSKKERLRIPFTALPYSVKLENGRNAENSARSRGFKFSVVSTMAAYLIDAPSVIVPESGQGALAPVLLPVGQGYEDYRNHPVFTALMARFFNALLGYKIQYRFPRLWMTKGETLREFVDVCGSEARWATTRSCWQQSRQVAVSGERRQCGVCAACILRRLSVHAAGLNELPKTYVWESLKAATWETGAAKDFASFTPALREYSIAGVLHFEHLASLRGAVQYELIKRRTTNELARALSEPPAVVAQNLDRLLQQHTNEWSAFTNDLGSGSFVRQWIDDAS

SEQ ID NO: 36097 - protein, 216 aa, Arsenicibacter rosenii
  misc_feature (1)..(216): tr|A0A1S2VRU4|A0A1S2VRU4_9BACT Uncharacterized protein OS=Arsenicibacter rosenii OX=1750698 GN=BLX24_03880 PE= 4 SV=1
MDDKSVAMLFSGGRDSSLATCILANENSKIHLLSMFNGAVVKGDISQYRYNEIKEKFPNNIISFNILSSFSLFRRIALLDIEKDFERFKYNLIPVGDALATHTIAVIYCIQNKINNLASGYVKYEMDFPEQLPDVVARTSEFVKKYGINYLTPVYEYDSLDKVKYRLFDFGISTKSLEGTSLFADTYSVPPPNVVLDYLDLKLPICDEYIKFMLNL

SEQ ID NO: 36098 - protein, 626 aa, Arsenicitalea aurantiaca
  misc_feature (1)..(626): tr|A0A433XE93|A0A433XE93_9RHIZ Uncharacterized protein OS=Arsenicitalea aurantiaca OX=1783274 GN=EMQ25_04515 P E=4 SV=1
MSEALVQVDGRDRPLAIRINGRHPTFRLATDALETKVIRELDPVILDLMEIASTVFAADGAVPRGGPTRPNLGQDWYRQFDFEIPVRHPELWQRDDVVAALRDAVETLTEDSVSFRFIQAAPDVMRQQYLDYDPTGVAFEADEVILFSGGLDSFAGALELLATTSSRVVLVTHRSAQKAIPRQIELGQYLVDQFPHRVLHVHVLARRVDQEARDSTQRSRTLLFSALGQAVACAFGAERVSFFENGIVSHNLPLSPQIVGTMATRTTHPLALTNINRLMQLALPAAVPISNRFQWLTKTEVVSKIDENGGASQIARSVSCTSIREQNTLHTHCGACTQCFDRRFAILKANLADYDPEETYATDVLFGERGNDRSMTMAVEWTRHTLGLGDLEEQGFMERFGHEVSRILRGHPDLPPRAALDLSLRLHQRQGKVVRDVLETVLRERSAELVAQRLPATCLVRLHLGSGEELVGRVPRYAPDEERRASSTGMEAVEEVDEEVDADAPLRLQFFMQGQRHVVEVAGLTTVMGAPARVPHALRSVYDEDKRNGVRPEDHRYSIGTTLPHLADMDKSTIRKLVARCRKQLAEGYTELHGVPPPAHLLIQTRPSSGYRLDPTIVVVEPNRPV

SEQ ID NO: 36099 - protein, 178 aa, Arsenophonus endosymbiont
  misc_feature (1)..(178): tr|A0A3B0J5S5|A0A3B0J5S5_9GAMM 7-cyano-7-deazaguanine s ynthase OS=Arsenophonus endosymbiont of Aleurodicus flo ccissimus OX=2152761 GN=queC PE=3 SV=1
MLNVIVLKLLLLKRYASILTSQHIKYWMSGLLNELATSSLTRDNIPIPSYEKSIESELPNTFVPERNILFLTLAAIYAYQVQAEVVITCVCETDFSGYPNCRDEFVKALNQAICLGIAKPIRFETPLMWLNKAETWALADYYHSLKLVQNKTLTCYNGIIGNGCQHCAACPAICVQKD

SEQ ID NO: 36100 - protein, 233 aa, Arsenophonus endosymbiont
  misc_feature (1)..(233): tr|A0A3B0M1H9|A0A3B0M1H9_9GAMM 7-cyano-7-deazaguanine s ynthase OS=Arsenophonus endosymbiont of Trialeurodes va porariorum OX=235567 GN=queC PE=3 SV=1
MTKRAVTVFSGGQDSTTCLIQAIKQYNEVHCITFNYAQRHSAEIVAAQKICQHFNIAAHKILDVGLLNELAISSLTRDNIPIPSYEKSIESELPNTFVPGRNILFLTLAAIYAYQVQAEVVITGVCETDFSSYPDCRDEFVKALNQAICLGIAKTIRFENPLMWLNKAETWALADYYHSLKLVQNKTLTCYNGIIGNGCQQCAACHLRAEGLKYYLNHRQAIMSSLKQKMHLK

SEQ ID NO: 36101 - protein, 233 aa, Arsenophonus nasoniae
  misc_feature (1)..(233): tr|A0A4P7L796|A0A4P7L796_9GAMM 7-cyano-7-deazaguanine s ynthase OS=Arsenophonus nasoniae OX=638 GN=queC PE=3 SV =1
MLKRAVIVFSGGQDSTTCLIQAIKQYDEVHCITFNYAQRHSTEIVVAQKICQHFNIKAHKILDVGLLNELAISSLTRDNIPIPSYEKSSESELPNTFVPGRNILFLTLAAIYAYQVQAEVVITGVCETDFSGYPDCRDEFVKALNQAICLGIAKAIRFETPLMWLNKAETWALADYYHSFEFIQNKTLTCYNGIIGDGCQKCAACHLRAEGLKYYLNHRQAIMSSLKQKMHLK

SEQ ID NO: 36102 - protein, 239 aa, Arsenophonus nasoniae
  misc_feature (1)..(239): tr|D2TWD2|D2TWD2_9GAMM 7-cyano-7-deazaguanine synthase OS=Arsenophonus nasoniae OX=638 GN=queC PE=3 SV=1
MMDSIGMLKRAVIVFSGGQDSTTCLIQAIKQYDEVHCITFNYAQRHSTEIVVAQKICQHFNIKAHKILDVGLLNELAISSLTRDNIPIPSYEKSSESELPNTFVPGRNILFLTLAAIYAYQVQAEVVITGVCETDFSGYPDCRDEFVKALNQAICLGIAKAIRFETPLMWLNKAETWALADYYHSFEFIQNKTLTCYNGIIGDGCQKCAACHLRAEGLKYYLNHRQAIMSSLKQKMHLK

SEQ ID NO: 36103 - protein, 233 aa, Arsenophonus sp.
  misc_feature (1)..(233): tr|A0A2A2H435|A0A2A2H435_9GAMM 7-cyano-7-deazaguanine s ynthase OS=Arsenophonus sp. ENCA OX=1987579 GN=queC PE= 3 SV=1
MTKRAVIVFSGGQDSTTCLIQAIKQYNEVHCITFNYAQRHSAEIVAAQKICQHFNIAAHKILDVGLLNELAISSLTRDNIPIPSYEKSIESELPNTFVPGRNILFLTLAAIYAYQVQAEVVITGVCETDFSGYPDCRDEFVKALNQAICLGIAKPIRFETPLMWLNKAETWALADYYHSLKLVQNKTLTCYNGIIGNGCQQCAACHLRAEGLKYYLNHRQAIMSSLKLKMHLK

SEQ ID NO: 36104 - protein, 218 aa, Arsukibacterium ikkense
  misc_feature (1)..(218): tr|A0A0M2V688|A0A0M2V688_9GAMM 7-cyano-7-deazaguanine s ynthase OS=Arsukibacterium ikkense OX=336831 GN=queC PE =3 SV=1
MSQKVVVIYSGGMDSFTVLHKAVAAGHDVYALSFNYGQRHVKELICAANVCKELNIKHKIVDISAINQLISGSSLTSDIDVPEGHYAADNMKSTIVPNRNMILLSLAVGYADSIGARAVYYGAHSGDHFIYPDCRPEFVQKMNDVCQIANYQPVDIVSPYLYQTKIEILADGLAMGLDYSKTWTCYNGRDKACGKCGSCQERLEAFNLNNTADPLPYE

SEQ ID NO: 36105 - protein, 218 aa, Arsukibacterium sp.
  misc_feature (1)..(218): tr|A0A0M2VLG1|A0A0M2VLG1_9GAMM 7-cyano-7-deazaguanine s ynthase OS=Arsukibacterium sp. MJ3 OX=1632859 GN=queC P E=3 SV=1
MSQKVVVIYSGGMDSFTVLHKAVAAGHDVYALSFNYGQRHVKELICAANVCKDMNIKHKIVDISAINQLIAGSSLTSDIDVPEGHYAADNMKSTIVPNRNMILLSLAVGYADSIGARAVFYGAHSGDHFIYPDCRPEFVQKMNDVCQIANYQPVDIVSPYLYQTKIEILADGLAMGLDYSKTWTCYNGRDKACGKCGSCQERLEAFNLNNATDPLPYE

SEQ ID NO: 36106 - protein, 188 aa, Arthrobacter sp.
  misc_feature (1)..(188): tr|A0A2V5D4Q8|A0A2V5D4Q8_9MICC 7-cyano-7-deazaguanine s ynthase OS=Arthrobacter sp. RC1.1 241 OX=2183924 GN=que C PE=3 SV=1
MELAAAKRVAEAQGVGDHVVCDIDLRVFGGSALTSDVEVPKHSSVDQVEENIPVTYVPARNTVFLSFALAYAEVVGATDIFIGVNALDYSGYPDCRPEYIRAFEAMANLATRAGVEGGAITIHTPLMDKTKGEIVQMGLALGVDYSLTSSCYDPDDAGRSCGHCDSCLLRLKGFAEAGSHDPIAYQGV

SEQ ID NO: 36107 - protein, 229 aa, Arthrobacter sp.
  misc_feature (1)..(229): tr|A0A4P8GSB6|A0A4P8GSB6_9MICC 7-cyano-7-deazaguanine s ynthase OS=Arthrobacter sp. 24S4-2 OX=2575374 GN=queC P E=3 SV=1
MTRKAIVLLSGGLDSTTVLAHAKSEGFEPYALSFRYGQRHVVELQAAQRVAEAQGVKNHVVCDIDLRVFGGSALTADVDVPKHESVDQVEENIPVTYVPARNTVFLSFALAYAEVLGSTDIFIGVNALDYSGYPDCRPEYIQAFEAMANLATRAGVEGGVIKIHTPLMDKTKGEIVQMGLALGVDYGLTSSCYDPDDAGHACGHCDSCLLRLKGFADAGSHDPVTYQGV

SEQ ID NO: 36108 - protein, 187 aa, Arthrobacter viscosus
  misc_feature (1)..(187): tr|O52119|O52119_ARTVI 7-cyano-7-deazaguanine synthase (Fragment) OS=Arthrobacter viscosus OX=1673 GN=ALU1 PE= 3 SV=1
MLRVRGSSYPLKKTKEKQYSILRVVFSGGQDSTTCLFWAMERFEEVEAVTFDYNQRHSLEIECAQKIAKELGITHHILDMSLLNQLAPNALTRSDIAVEDGEDGELPSTFVPGRNLLFLSFAGVLASQIGAKHIVTGVCETDFSGYPDCRDVFIKSLNVTLNLSMDQSFVIDTPLMWLNKEETWELA

SEQ ID NO: 36109 - protein, 226 aa, Arthrospira maxima
  misc_feature (1)..(226): tr|B5W8T4|B5W8T4_LIMMA 7-cyano-7-deazaguanine synthase OS=Arthrospira maxima CS-328 OX=513049 GN=queC PE=3 SV= 1
MKAVILLSGGLDSSTVLYQAKADGCECYALSFNYQQRHLRELEAAAKIAEAAGVAAHQVVEFDLKRWGGSALTDHNIDLPCDRTLAEMSATIPITYVPARNTIFLSLALAYGETIGADRIYIGVNALDYSGYPDCRPDYIAAMQSVFRLGTKQGREGNAITINTPLIDLKKTDIIQLGNSLGVPWEYTWSCYGGEAQACGVCDACRLRLAAFEALGLTDPISYAKR

SEQ ID NO: 36110 - protein, 226 aa, Arthrospira platensis; identical to SEQ ID NO: 36109
  misc_feature (1)..(226): tr|K1VY67|K1VY67_ARTPT 7-cyano-7-deazaguanine synthase OS=Arthrospira platensis C1 OX=459495 GN=queC PE=3 SV=1

SEQ ID NO: 36111 - protein, 226 aa, Arthrospira platensis
  misc_feature (1)..(226): tr|D4ZX25|D4ZX25_ARTPN 7-cyano-7-deazaguanine synthase OS=Arthrospira platensis (strain NIES-39 / IAM M-135) O X=696747 GN=queC PE=3 SV=1
MKAVILLSGGLDSSTVLYQAKADGYECYALSFNYQQRHLRELEAAAKIAQAAGVAAHQTVEFDLKRWGGSALTDDNIDLPCDRTLAEMSATIPITYVPARNTIFLSFALAYGEAIGADRIYIGVNALDYSGYPDCRPDYIVAMQSVFRLGTKQGREGNPITINTPLIDLKKTDIIQLGNSLGVPWEHTWSCYGGEAEACGVCDACRLRLAAFQALGLTDPISYAKR

SEQ ID NO: 36112 - protein, 226 aa, Arthrospira sp.; identical to SEQ ID NO: 36109
  misc_feature (1)..(226): tr|A0A328V7V3|A0A328V7V3_9CYAN 7-cyano-7-deazaguanine s ynthase OS=Arthrospira sp. O9.13F OX=1982223 GN=queC PE =3 SV=1

SEQ ID NO: 36113 - protein, 196 aa, Asaccharobacter celatus
  misc_feature (1)..(196): tr|A0A369NVR5|A0A369NVR5_9ACTN ExsB family transcriptio nal regulator OS=Asaccharobacter celatus OX=394340 GN=C 1850_10000 PE=4 SV=1
MYLLREPKLAVAFSGGCDSALLLAAAKLAGCEVHAYLVKTAFQPDFELDDARTVAAALEVPLTVVEADVLAQADICANPADRCYLCKRFIFDEVRRAAAADGFTVIVDGTNATDDPERRPGFKALAEAGVVSPLRRAGMTKANVRHVLASLEERFGLPSGALMSAKPSFPCLAVYVPQGESITEASLREAARSRGL

SEQ ID NO: 36114 - protein, 229 aa, Asaccharobacter celatus
  misc_feature (1)..(229): tr|A0A369NZA6|A0A369NZA6_9ACTN 7-cyano-7-deazaguanine s ynthase OS=Asaccharobacter celatus OX=394340 GN=queC PE =3 SV=1
MTKTKALVLCSGGVDSTTLLARAVSKYGAENVYALSISYGQKHVREIEAARTVAAYYGVQQRFLDLGAIFADSDCSLLDHSDAAVPQSSYAEQQAAGDGGPVSTYVPFRNGLFLSSAASMALSLGCSVVYYGAHHDDWAGNAYPDCSLEFVEAMNRAIVEGTGGELRLEAPFVTWSKADIVREGLALGVPYELTWSCYEGGEAPCGRCATCLDRAAAFAANGVEDPALG

SEQ ID NO: 36115 - protein, 219 aa, Asaccharospora irregularis
  misc_feature (1)..(219): tr|A0A1M5QLJ0|A0A1M5QLJ0_9FIRM 7-cyano-7-deazaguanine s ynthase OS=Asaccharospora irregularis DSM 2635 OX=11213 21 GN=queC PE=3 SV=1
MKEKQKAVVVFSGGQDSTTCLFWALKKFDEVLAVTFDYGQRHKLEIECASSIAKELGVEHHILDMALLNQLAPNALTRDEIEVSEGEEGTLPSTFVEGRNMLFLTFAGVFAKVKGAKHIVTGVCETDFSGYPDCRDIFIKSLNVTMNLAMDYPFVLHTPLMWIDKAQTWEMADKLGKLEYIREKTLTCYNGIKGDGCGECPACHLRKRGLDNYLKSKGE

SEQ ID NO: 36116 - protein, 233 aa, Asaia bogorensis
  misc_feature (1)..(233): tr|A0A0P0YEZ6|A0A0P0YEZ6_9PROT 7-cyano-7-deazaguanine s ynthase OS=Asaia bogorensis NBRC 16594 OX=1231624 GN=qu eC PE=3 SV=1
MLSDDTAIVLFSGGQDSATCLAWALDRFAHVETLGFAYGQRHAIELECRDTLRDAMMRQNPQWRERLGPDHTLDLSVLGRISETALTREAAIEMNENGLPSTFVPGRNLLFLSFAATLGVRRNARHIVTGVCETDYSGYPDCRDDTIKALQVALNLGMETRFVLHTPLMWLDKAETWRLAERIGGDGLVALINRESHSCYMGDRAHLHDWGYGCGTCPACELRAKGWASYVSA

SEQ ID NO: 36117 - protein, 233 aa, Asaia platycodi
  misc_feature (1)..(233): tr|A0A060QDM5|A0A060QDM5_9PROT 7-cyano-7-deazaguanine s ynthase OS=Asaia platycodi SF2.1 OX=1382230 GN=queC PE= 3 SV=1
MLSDDTAIVLFSGGQDSATCLAWALDRFEHVETLGFAYGQRHAIELECRDTLRDAMTRQNPQWRERLGPDHTLDLSVLGQISETALTREAAIEMNENGLPSTFVPGRNLLFLSFAATLGVRRNARHIVTGVCETDYSGYPDCRDDTIKALQVALNLGMETRFVLHTPLMWLDKAETWRLAERIGGDGLVALINRESHSCYMGNRAHLHDWGYGCGTCPACELRAKGWASYVSA

SEQ ID NO: 36118 - protein, 56 aa, Asaia sp.
  misc_feature (1)..(56): tr|A0A433WRY4|A0A433WRY4_9PROT 7-cyano-7-deazaguanine s ynthase (Fragment) OS=Asaia sp. W19 OX=2067395 GN=C0V97 _15850 PE=3 SV=1
MPSDDTAIVLFSGGQDSATCLAWALNRYAHVETLGFAYGQRHAIELECRETLRRAM

SEQ ID NO: 36119 - protein, 233 aa, Asaia sp.
  misc_feature (1)..(233): tr|A0A433WSJ2|A0A433WSJ2_9PROT 7-cyano-7-deazaguanine s ynthase OS=Asaia sp. W19 OX=2067395 GN=queC PE=3 SV=1
MPSDDTAIVLFSGGQDSATCLAWALNRYAHVETLGFAYGQRHAIELECRETLRRAMISARPDWQDRLGEDHTLDLSVLGQISDTALTREAAIEMNENGLPSTFVPGRNLLFLSFAATLAVRRNARHIVTGVCETDYSGYPDCRDDTIKALQVALNLGMETRLVLHTPLMWLDKAETWRLAERIGGSALVKLINRESHSCYLGDRTHLHEWGYGCGACPACDLRAKGWSSYVST

SEQ ID NO: 36120 - protein, 234 aa, Asanoa ishikariensis
  misc_feature (1)..(234): tr|A0A1H3UBF7|A0A1H3UBF7_9ACTN 7-cyano-7-deazaguanine s ynthase OS=Asanoa ishikariensis OX=137265 GN=queC PE=3 SV=1
MSDTKPKAVVLLSGGLDSATVLAMALREGYEAYALSFRYGQRHTVELKAAAAVAEQFGVRRHVIADIDLRAFGGSALTDDGIAVPHYASADELSQDIPVTYVPARNTIFLSFALAWAETLDASDVFIGVNALDYSGYPDCRPEFIAAYEAMANLATKAGVEGRQRLRIHTPLIELTKAQTIRSGLELGVDYSLTHSCYDPADDRACGTCDSCLLRGRGFAELGLSDPALAPAAG

SEQ ID NO: 36121 - protein, 246 aa, Asticcacaulis benevestitus
  misc_feature (1)..(246): tr|V4PFJ2|V4PFJ2_9CAUL 7-cyano-7-deazaguanine synthase OS=Asticcacaulis benevestitus DSM 16100 = ATCC BAA-896 OX=1121022 GN=queC PE=3 SV=1
MSASLDHVPAAKSALVLFSGGQDSSVCLAWALTHFERVETIGFDYGQRHAIEMTTRTTVLEKFREVFPLAATRLGEDHVCDLRGFGAVAESSLTRETEIVMTERGLPSSFVPGRNLVFFVYAAAVADRRGLDHLVGGMCETDFSGYPDCRNETLQAMQTVLQLGVERPFEIHTPLMWIDKAQTWAMSLELGGQPLVDLILEETTTCYKGERGERHPWGYGCGECPACQLRKTGFEHFIENAQPAER

SEQ ID NO: 36122 - protein, 241 aa, Asticcacaulis excentricus
  misc_feature (1)..(241): tr|A0A3G9G7Q0|A0A3G9G7Q0_9CAUL 7-cyano-7-deazaguanine s ynthase OS=Asticcacaulis excentricus OX=78587 GN=queC P E=3 SV=1
MTPSDLETVPADRSALVLFSGGQDSTACLAWALTHFERVETIGFDYGQRHAIEMTTRARVLQRFPEVFEPARTRLGDDHVVDLKGFGRVAESSLTREQEIRMGERGLPNSFVPGRNLVFFVYAAAVADRRGIDHLVGGMCETDFSGYPDCRKDTLEAMQTVLNLGIERPYIIDTPLMFLTKAETWALTHQLGGEALVDLVLEDTHTCYMGERGERHEWGYGCGTCPACDLRARGFEQWCNG

SEQ ID NO: 36123 - protein, 241 aa, Asticcacaulis excentricus
  misc_feature (1)..(241): tr|E8RV79|E8RV79_ASTEC 7-cyano-7-deazaguanine synthase OS=Asticcacaulis excentricus (strain ATCC 15261 / DSM 4 724 / VKM B-1370 / CB 48) OX=573065 GN=queC PE=3 SV=1
MTPSDLETVPAECSALVLFSGGQDSTACLAWALTHFERVETIGFDYGQRHAIEMTTRARVLERFPEVFELARTRLGDDHVVDLKGFGRVAESSLTREQEIRMGERGLPNSFVPGRNLVFFVYAAAVADRRGIDHLVGGMCETDFSGYPDCRKDTLEAMQTVLNLGIERPYRIDAPLMFLTKAETWALTHQLGGDALVDLVLEDTHTCYMGERGQRHEWGYGCGTCPACELRARGFEQWRNR

SEQ ID NO: 36124 - protein, 207 aa, Asticcacaulis sp.
  misc_feature (1)..(207): tr|V4NBL2|V4NBL2_9CAUL 7-cyano-7-deazaguanine synthase OS=Asticcacaulis sp. YBE204 OX=1282363 GN=AEYBE204_0982 0 PE=3 SV=1
MKAAILLASGGLDSTTVGYKLAEDGFYVLPIFFDYGQHCVETEWAKVREVLPSHFEKPERNTISDLFRGSSSRLIAEANLWEDKVVDDDLYVPYRTLLFYAAAAARAQTLGILSVYTGFINSNHAKEIDCTAEFMNKLDGLSEEIGPVRFVSPFRYWSKFEVTQEALRLGVPIGKTFSCQAASELPCGACPNCVERLAALRQAGLLT

SEQ ID NO: 36125 - protein, 244 aa, Asticcacaulis sp.
  misc_feature (1)..(244): tr|V4P0C4|V4P0C4_9CAUL 7-cyano-7-deazaguanine synthase OS=Asticcacaulis sp. YBE204 OX=1282363 GN=queC PE=3 SV= 1
MSDPVSSLEAVPAERSALVLFSGGQDSTACLAWALTQFDRVETVGFDYGQRHHIEMETRTKVLARMRREYVPAQTKLGEDHVVDLKGFGRVAESSLTRDQEIKMGERGLPNSFVPGRNLAFFVYAAAVADRRGIDHLVGGMCETDFSGYPDCRKDTLDAMERVLNLGIERPYIIDTPLMYLTKAETWAMTHDLGGDALVEVVLEETHTCYMGERGERHVWGYGCGTCPACELRANGFEQWRAAK

SEQ ID NO: 36126 - protein, 246 aa, Asticcacaulis taihuensis
  misc_feature (1)..(246): tr|A0A1G4PXR3|A0A1G4PXR3_9CAUL 7-cyano-7-deazaguanine s ynthase OS=Asticcacaulis taihuensis OX=260084 GN=queC P E=3 SV=1
MSASLDHVPAAKSALVLFSGGQDSSVCLAWALTHFERVETIGFDYGQRHSIEMTTRTTVLAKFRETFPHWAERLGEDHVCDLRGFGAVAESSLTRETEIVMTERGLPSSFVPGRNLVFFVYAAAVADRRGLDHLVGGMCETDFSGYPDCRNDTLQAMQTVLQLGIERPFEIHTPLMWIDKAQTWALSEELGGEALVDLILEETTTCYKGVRAERHPWGYGCGECPACQLRKTGFEHFLEARTPAER

SEQ ID NO: 36127 - protein, 181 aa, Atelocyanobacterium thalassa
  misc_feature (1)..(181): tr|D3EQS2|D3EQS2_ATETH 7-cyano-7-deazaguanine synthase OS=Atelocyanobacterium thalassa (isolate ALOHA) OX=1453 429 GN=UCYN_11530 PE=3 SV=1
MCDKSLAVVLLSGGLDSATSAAIAAAQGYKLVALSLRYGQLHHKELESAKTIAKELDINSHYIIDVDIAQWGGSSLTDESLSIPLDGVSPHNIPSTYVPGRNTVFIALALSLAEAKGAKAIFLGINMIDYSGYPDCRSEYLKAYQDLANISSKAGIEGNTIELIAPLIKKPKLILFKKLLN

SEQ ID NO: 36128 - protein, 231 aa, Atlantibacter hermannii
  misc_feature (1)..(231): tr|A0A447LK97|A0A447LK97_ATLHE 7-cyano-7-deazaguanine s ynthase OS=Atlantibacter hermannii OX=565 GN=queC PE=3 SV=1
MKRAVVVFSGGQDSTTCLIQALNQYDEVHCVTFDYGQRHRAENDIAKDLAHKLGARAHKVLDVGLLNELAVSSLTRDSIPVPDYDPDASGIPSTFVPGRNILFLTLTAIYAYQVQAEAIITGVCETDFSGYPDCRDEFVKALHHAVNLGMASNIRFETPLMWLNKAETWALADRWGKLDLVRNETLTCYNGIKGDGCGECAACHLRANGLNQYLADKTGVMAQLKRKMDLP

SEQ ID NO: 36129 - protein, 231 aa, Atlantibacter hermannii; identical to SEQ ID NO: 36128
  misc_feature (1)..(231): tr|H5UYG0|H5UYG0_ATLHE 7-cyano-7-deazaguanine synthase OS=Atlantibacter hermannii NBRC 105704 OX=1115512 GN=qu eC PE=3 SV=1

SEQ ID NO: 36130 - protein, 231 aa, Atlantibacter subterranea
  misc_feature (1)..(231): tr|A0A3R9EYD6|A0A3R9EYD6_9ENTR 7-cyano-7-deazaguanine s ynthase OS=Atlantibacter subterranea OX=255519 GN=queC PE=3 SV=1
MKRAVVVFSGGQDSTTCLIQALHQYDEVHCVTFDYGQRHRAEIEIAQQLAVKLGARAHKTLDVGLLNELAVSSLTRDSIPVPDYDPDASGIPSTFVPGRNILFLTLTAIYAYQVQAEAIITGVCETDFSGYPDCRDEFVKALHQAVNLGMASNIRFETPLMWLNKAETWALADRWGKLDLVRNETLTCYNGIKGDGCGECAACNLRANGLNQYLADKVGVMAQMKRKTGLN

SEQ ID NO: 36131 - protein, 215 aa, Atopobacter sp.
  misc_feature (1)..(215): tr|A0A421BEF1|A0A421BEF1_9LACT 7-cyano-7-deazaguanine s ynthase OS=Atopobacter sp. AH10 OX=2315861 GN=queC PE=3 SV=1
MMKMVLLSGGVDSSTALALALKKDPNVLAVSFTYNQSHEKMEMKAAQDIADYYQVKRLVIDLATIFKGSHSSLNRANHMAITEGDYAKQESPNTEVEFRNGVFIAILASLAKQYGADEIFFGAHQDDSGTIYPDCSPEFIQAMDLAVQLGTGHQVSLSAPFKQVTKATIVKIGLELGVPYALTYSCYEGTNPPCGKCGTCIDRRKAFQANGLDLL

SEQ ID NO: 36132 - protein, 224 aa, Aulosira laxa
  misc_feature (1)..(224): tr|A0A1Z4TZ79|A0A1Z4TZ79_9CYAN 7-cyano-7-deazaguanine s ynthase OS=Aulosira laxa NIES-50 OX=1541988 GN=queC PE= 3 SV=1
MKAVILLSGGLDSSTILYQAKADGYECHALSFDYQQRHQRELESARLVAQKAGVVKHQVVNFDLRQWGGSALTDSSIDLPEERSLDEMSQNIPVTYVPARNTIFLSFALAYAEAIAAQRVYIGVNALDYSGYPDCRPDYIQAMQEVFRLGTKQGREGEPITIAAPLINLKKTEIIQLGNLLGVPWELTWSCYAGADVACGVCDSCRLRLAAFAELGLKDPVAYV

SEQ ID NO: 36133 - protein, 239 aa, Aurantimonas sp.
  misc_feature (1)..(239): tr|A0A1X0SV77|A0A1X0SV77_9RHIZ 7-cyano-7-deazaguanine s ynthase OS=Aurantimonas sp. 22II-16-19i OX=1317114 GN=q ueC PE=3 SV=1
MTEADGALVLFSGGQDSTTCLAVALERFAHVETIGFDYGQRHRVELEVRPRVLAALRAGFPHWAERLGPDHMIDMGVLGQISDTALTRDTAIAMEATGLPNTFVPGRNLLFLGFAGALAYRRGLKHIVTGVCETDYSGYPDCRDDTIKAMQLALNLGMEARFVIDTPLMFIDKAATFALAERLGGEALVDLVVEETHSCYEGDRTHRHAFGYGCGACPACELRARGFERYREAKAANAG

SEQ ID NO: 36134 - protein, 220 aa, Aureibacillus halotolerans
  misc_feature (1)..(220): tr|A0A4R6U3S3|A0A4R6U3S3_9BACI 7-cyano-7-deazaguanine s ynthase OS=Aureibacillus halotolerans OX=1508390 GN=que C PE=3 SV=1
MGLNEEKAVVVFSGGQDSTTCLFWAKQTFKEVIAVTFNYGQRHAAEIEVAQAIAAEQEVAHHVLDLSLLNQLAPNALTRADIEIEQKDGELPSTFVPGRNLVFLSFAGILAHQVGAKHLVTGVCETDFSGYPDCRDAFVKSLNVTLNLSMDKDFVLHTPLMWLDKADTWGMADDLGVLNYVQQKTLTCYEGIVGVGCGVCPACVLRANGLAAYLQRKEVR

SEQ ID NO: 36135 - protein, 1371 aa, Aureicoccus marinus
  misc_feature (1)..(1371): tr|A0A2S7T5T6|A0A2S7T5T6_9FLAO Carrier domain-containin g protein OS=Aureicoccus marinus OX=754435 GN=BST99_056 85 PE=4 SV=1
MNENKRYQLTATQTQMWLAHQLYPEACVLNVVNTFELENSLDRELFDRSFAELQRQLSVFRLVFGIQENHPYQEVRPEPTRGLDWVECAPNEWKALVDHRKTQPLPIEETVFDACVYVLGEEHYVFYLNMHHSVEDATSSTFIWKALWTLYFGFQESGVFPSLDLIPFEQSLTEYGHESLASLDTQYWVQQSAAHIPQRFYGELSKNTLESQQLRYAIGKERLIKLKTLLKEPTFSSFSEDLGVFTILLTVYVAFLSRITQSEKVQLGIPVHHRSGLKARKSPGLWIEFFPFVTEVASGLSFKELYAQIKSEGAEFFKHALPGSSSAEANRSNQAIFNFIGAGFDNPTDWKVRTNWLHSGQSDPAHGIRCHYTKMGESGEPELWFDLNEALFKEDQRNRVGRHYLKLLDAFLDNVEQAFSEVLLEDSSLPAGDMPQVQEVPAVLGEKVNHFLRQADQIALVEGDQQFTYAQFNAALAELSSQLKRAGLQPGDRVGLCSERSSAYVAAVWTCLREGYVFVPLDPAQGAQRLQFIGENAEVSAILCSAEQEEAGLWRSTPHRLLSLSNQIFSSSACLGNPSFPNPDQAAYILYTSGSTGEPKGVVVNQGALSHYVQWAAEKYRPGNESLCMPFFTSIGFDLTLTSLLTPLATGGKVVVIGQKGSGPDLAVLELKNYQEINTVKLTPAHLQLWLSQGGVNPEIESCILGGEDLKNELSVRLFQAGVHRIYNEYGPTEATVGCIVGEFSPEKHREGSTPIGESVPYGGYLLLDEAGVEVVHGLVGQLYLYGANLAQGYWKRADRTAESFVEIAHYPGLRLYKTGDFARVNSDGDLIYLGRRDEQIKRNGFRIELGEIKSALRKQEGLDEVAIVYDQGESNEEVVAKEADTHCSNCGLPSNYPEADFDEEGVCHLCRAFEGYEIKVDQYFKTEDDLVRLLTSKQGRSSHYDCLALLSGGKDSTYVLARLVRMGLRVLAFTLDNGYISDQAKANIQKIVKQLGVDHVYGSTPHMNTIFVDSLHRHQNVCNGCFKTIYTLSTQIALEKDIPFIVTGLSRGQFFETRLTEELFWHTENSTDSIDKIILEARKLYHQEEDAVKSCLDVSMFREASTFEKVEYVDFYRYSHVSLTQMLQFLRTEIGWERPTDTGRSTNCLINQAGIHVHKKKKGYSNYAFPYSWDVRLGHKNRDESLDEINEAIDVTEVERMLDEIGYVDHEAQESNAKLLAFYTGKTNLNKEKVWAQLREVLPDYMVPNDVIQVEEIPLTSRGKVDRKELLSAYHTEGEEQAHAKQPENDIQALIQEIWQKVLRVESPGIESNFIQLGGHSLAAIRVTAQLNEDLGTELPLAWVFEFPTIESYAEALETHMRTLLEEENS

SEQ ID NO: 36136 - protein, 232 aa, Aureimonas altamirensis
  misc_feature (1)..(232): tr|A0A1M6K2T2|A0A1M6K2T2_9RHIZ 7-cyano-7-deazaguanine s ynthase OS=Aureimonas altamirensis DSM 21988 OX=1121026 GN=queC PE=3 SV=1
MNTLVVCSGGLDSVSLAYVLAEQGNLGAIVTFDYNQRHRREIDFARRAAERLGKPFHLIDIQPIGAVLSGSALTDAVDVPDGHYAEDTMKATIVPNRNAIMLTIAFGLAAAQKMDAVAIAVHGGDHFIYPDCRPGFIDNFAAMQARALDGFAQVRLLAPFVERSKADIVRAGAEAGTPFAQTWSCYKGGDVHCGRCGTCVERREAFDIAGVSDPTVYADADFWRDAVSRRCA

SEQ ID NO: 36137 - protein, 253 aa, Aureimonas flava
  misc_feature (1)..(253): tr|A0A3A1WI17|A0A3A1WI17_9RHIZ 7-cyano-7-deazaguanine s ynthase OS=Aureimonas flava OX=2320271 GN=queC PE=3 SV= 1
MGERQDTALVLFSGGQDSTTCLAWALDRFARVETVGFDYGQRHRVELDVRPRILDRIRRDFPQWGDRIGQDHLLDMGLLAQISQTALTGEMAIAMQANGLPNTFVPGRNLLFLTFAAAIAYRRGARHLVTGVCETDYSGYPDCRDDTMKAMQIALNLGLEARLVVHTPLMWIDKAETFALAERLGGGSLLDLVCEETHTCYQGDRTHRHAWGYGCGACPACELRAQGWERFRCETASGKPTAGGHPAPGPASR

SEQ ID NO: 36138 - protein, 423 aa, Aureimonas flava
  misc_feature (1)..(423): tr|A0A3A1WG10|A0A3A1WG10_9RHIZ Uncharacterized protein OS=Aureimonas flava OX=2320271 GN=D3218_15125 PE=4 SV=1
MVTRIPTRVLATPNAMRATAAVAHGDVGVALHHIGRPELAGLGGTLNQAAAALPRTPSVLAWDFLSIALAVHAADRFVIRKEAADSWTRMIALEVELADPEPWAAQAGAIEDTLRFLSSDIWSVRFRGGGARPPAVADRPTDRDCACLFSGGLDSLIGALDLRAEGRRPLLVSQASPKEGSVQRTLAGLIGMDAERFSARASERWRQPYEPSSRARSMLFLGYGAVAAASLARDGAPVDLFVPENGLISINAPLTHRRMASLSTRTTHPHFISSLQRVLDGVGLPARIRTPYALKTKGQMLAECRDELIHELAHRSYSCGKGKRLNQHCGRCVPCLIRRASFEAAGMRDGTDYWANDLSEHASNEDVAAARFAAATLERRDVARWASEAGPLPTDPDLRRGHVDVVRRGTAEVKAFLDAIAWP

SEQ ID NO: 36139 - protein, 232 aa, Aureimonas sp.
  misc_feature (1)..(232): tr|A0A0S2EUA5|A0A0S2EUA5_9RHIZ 7-cyano-7-deazaguanine s ynthase OS=Aureimonas sp. AU20 OX=1349819 GN=queC PE=3 SV=1
MKTLVVCSGGLDSVSLAQKYAGEGDLAALVTFDYGQRHKREIDFAREAATRLAVPFHLLDIGPIGAVLSGSALTSDVAVPDGHYAEETMKATVVPNRNAILLTIAFGLAAAQNLDAVAVAVHGGDHFIYPDCRPDFIDAFRHMQAKALEGYASVDLLAPFVHRTKADIVREGARYGTPFERTWSCYKGGEVHCGRCGTCVERREAFHLAGVEDPTRYEDPDFWQAAVASRAG

SEQ ID NO: 36140 - protein, 232 aa, Aureimonas ureilytica
  misc_feature (1)..(232): tr|A0A175RLW9|A0A175RLW9_9RHIZ 7-cyano-7-deazaguanine s ynthase OS=Aureimonas ureilytica OX=401562 GN=queC PE=3 SV=1
MRTLVVCSGGLDSVSLAHQCAAEGHLGALVTFDYKQRHACEIDYAREAAARLGVPFHLIDIGPIGAVLTGSALTDDVAVPDGHYAEETMKATVVPNRNAIMLTIAFGLAAAQGMDQVALAVHGGDHFIYPDCRPGFIDAFRAMQAAALDGYASVALSAPFVNRTKADIVTAGARVGTPFERTWSCYKGGDVHCGRCGTCVERREAFHLAGVEDPTVYADPDFWQAAVAARAG

SEQ ID NO: 36141 - protein, 232 aa, Aureimonas ureilytica
  misc_feature (1)..(232): tr|A0A175RDR9|A0A175RDR9_9RHIZ 7-cyano-7-deazaguanine s ynthase OS=Aureimonas ureilytica OX=401562 GN=queC PE=3 SV=1
MRTLVVCSGGLDSVSLAHQCAAEGHLGALVTFDYKQRHACEIDYAREAAARLGVPFHLIDIGPIGAVLTGSALTDDVAVPDGHYAEETMKATVVPNRNAIMLTIAFGLAAAQGLDRVALAVHGGDHFIYPDCRPGFIDAFRAMQAAALDGFAQVALSAPFVNRTKADIVTAGARVGTPFERTWSCYKGGEVHCGRCGTCVERREAFHLAGVEDPTVYADLNFWQAAVAARAG

SEQ ID NO: 36142 - protein, 218 aa, Auricoccus indicus; identical to SEQ ID NO: 35396
  misc_feature (1)..(218): tr|A0A1Q1G311|A0A1Q1G311_9STAP 7-cyano-7-deazaguanine s ynthase OS=Auricoccus indicus OX=1849491 GN=queC PE=3 S V=1

SEQ ID NO: 36143 - protein, 227 aa, Avibacterium avium
  misc_feature (1)..(227): tr|A0A379AR78|A0A379AR78_AVIAV 7-cyano-7-deazaguanine s ynthase OS=Avibacterium avium OX=751 GN=queC PE=3 SV=1
MTTFKNHNRKAVVIFSGGQDSTTCLIQAIADYGVENVETVTFHYGQRHAIELEKAKWIAQDLGVKQTFIDTSVIKAITSNALMNENAEIKQEKDELPNTFVDGRNALFLLYTAIYAKGQGISDIITGVCETDFSGYPDCRDVFIKSMNVTLNLAMDYNFNLRTPLMYLTKAQTWALADSLGALDYVRNHTHTCYQGVEGGCGECPSCVLRNKGLDEYLQQKSAVQNV

SEQ ID NO: 36144 - protein, 227 aa, Avibacterium endocarditidis
  misc_feature (1)..(227): tr|A0A2S5AI00|A0A2S5AI00_9PAST 7-cyano-7-deazaguanine s ynthase OS=Avibacterium endocarditidis OX=380674 GN=que C PE=3 SV=1
MTTFKNHNHKAVVIFSGGQDSTTCLIQAIADYGVENVETVTFHYGQRHAIELEKAKWIAQDLGVKQTFIDTSVIKAITSNALMNENAEIKQEKDELPNTFVDGRNALFLLYTAIYAKGQGISDIITGVCETDFSGYPDCRDVFIKSMNVTLNLAMDYNFNLRTPLMYLTKAQTWALADNLGALDYVRNHTHTCYQGVDGGCGECPSCVLRNKGLDEYLKQKSAVQNV

SEQ ID NO: 36145 - protein, 227 aa, Avibacterium gallinarum
  misc_feature (1)..(227): tr|A0A379AXW2|A0A379AXW2_AVIGA 7-cyano-7-deazaguanine s ynthase OS=Avibacterium gallinarum OX=755 GN=queC PE=3 SV=1
MTTFKNHNRKAVVIFSGGQDSTTCLIQAIGDYGVENVETVTFHYGQRHAIELEKAKWIAQDLGVKQTFIDTSVIKAITSNALMNENAEIKQEKDELPNTFVDGRNALFLLYTAIYAKGQGISDIITGVCETDFSGYPDCRDVFIKSMNVTLNLAMDYNFNLRTPLMYLTKAQTWALADSLGALDYVRNHTHTCYQGVDGGCGECPSCVLRNKGLDEYLKQKSAVQNV

SEQ ID NO: 36146 - protein, 227 aa, Avibacterium paragallinarum
  misc_feature (1)..(227): tr|A0A0F5ET42|A0A0F5ET42_AVIPA 7-cyano-7-deazaguanine s ynthase OS=Avibacterium paragallinarum OX=728 GN=queC P E=3 SV=1
MTTTNIHRRQAVVIFSGGQDSTTCLIQAIADYGKENVQAVTFHYGQRHAIELEKAQWIAQDLGIKQTLIDTSVIKAITTNALMDDHAQIKQAKGELPNTFVDGRNALFLLYTAIYAKGQGISDIITGVCETDFSGYPDCRDVFIKSMNVTLNLAMDYNFNIRTPLMYLTKAQTWELADSLGALDYIRTHTHTCYMGVEGGCGECPSCILRNKGLEEYLQQKSAVQNV

SEQ ID NO: 36147 - protein, 227 aa, Avibacterium paragallinarum; identical to SEQ ID NO: 36146
  misc_feature (1)..(227): tr|S6FHA6|S6FHA6_AVIPA 7-cyano-7-deazaguanine synthase OS=Avibacterium paragallinarum JF4211 OX=1351754 GN=que C PE=3 SV=1

SEQ ID NO: 36148 - protein, 227 aa, Avibacterium volantium
  misc_feature (1)..(227): tr|A0A447SSU2|A0A447SSU2_AVIVO 7-cyano-7-deazaguanine s ynthase OS=Avibacterium volantium OX=762 GN=queC PE=3 S V=1
MTTFKNHNRKAVVIFSGGQDSTTCLIQAIADYGVENVETVTFHYGQRHAIELEKAKWIAQDLGVKQTFIDTSVIKAITSNALMNENAEIKQEKDELPNTFVDGRNALFLLYTAIYAKGQGISDIITGVCETDFSGYPDCRDVFIKSMNVTLNLAMDYNFNLRTPLMYLTKAQTWALADSLGALDYVRNHTHTCYQGVDGGCGECPSCVLRNKGLDEYLQQKSAVQNV

SEQ ID NO: 36149 - protein, 230 aa, Azoarcus communis
  misc_feature (1)..(230): tr|A0A2U8GTW0|A0A2U8GTW0_9RHOO 7-cyano-7-deazaguanine s ynthase OS=Azoarcus communis OX=41977 GN=queC PE=3 SV=1
MTSTPRAIVLLSGGLDSATCLAIAREQGFETYALSVAYGQRHVAELTASKRVAEALGASEHRLARVELGQFGGSALTDPGIAVPEDVEADGIPVTYVPARNTVMLSIAMAWAEVLGARDVFVGVNAVDYSGYPDCRPAFIEAFQTMANLATKAGIEGHGLRIHAPLMTLSKADIVRRGTALGVDYGLTVSCYQAADDGRACGRCDACRLRRAGFEAAGIPDPTPYQHRSA

SEQ ID NO: 36150 - protein, 230 aa, Azoarcus communis
  misc_feature (1)..(230): tr|A0A323V1I0|A0A323V1I0_9RHOO 7-cyano-7-deazaguanine s ynthase OS=Azoarcus communis SWub3 = DSM 12120 OX=11210 29 GN=queC PE=3 SV=1
MNTTPRAVVLLSGGLDSATCLAIARDMGFETYALSVAYGQRHAAELTASKRVADALGAREHRLARVELGQFGGSALTDASIAVPEDGDTGGIPVTYVPARNTVMLSIAMAWAEVLDARDIFVGVNAVDYSGYPDCRPAFIEAFQAMANLATKAGVEGHGLRIHAPLIELSKADIICRGSALGVDYGLTVSCYQADDSGRACGRCDACRLRRAGFDAAGLPDPTPYQHRNG

SEQ ID NO: 36151 - protein, 230 aa, Azoarcus indigens
  misc_feature (1)..(230): tr|A0A4R6E289|A0A4R6E289_9RHOO 7-cyano-7-deazaguanine s ynthase OS=Azoarcus indigens OX=29545 GN=queC PE=3 SV=1
MTDKQRAVVLLSGGLDSATCLAIARDMGLETYALSVSYGQRHAAELTASKRVADALGAREHRLARVGLGQFGGSALTDPSIAVPEDVEAEGIPVTYVPARNTVMLSIALAWAEVLDARHIFVGVNAVDYSGYPDCRPAFIKAFETMANLATKAGVEGNGVTIHAPLIDLSKADIIRRGTALGVDYSLTVSCYQADDSGRACGRCDACRLRRAGFEAAGISDPTPYQPRNL

SEQ ID NO: 36152 - protein, 231 aa, Azoarcus sp.
  misc_feature (1)..(231): tr|A0A4S4AM21|A0A4S4AM21_9RHOO 7-cyano-7-deazaguanine s ynthase OS=Azoarcus sp. CC-YHH848 OX=2565932 GN=queC PE =3 SV=1
MTQTRRAIVLLSGGLDSATCLAIARDMGFECYALSVAYGQRHAAELTASKRVAEALGAREHRLAMVNLGQFGGSALTDPTIPVPEEAGSGGIPVTYVPARNTVMLSIALAWAEVLGAHDIFVGVNAVDYSGYPDCRPEFIRAFETMANLATKAGVEDDARMTIHAPLIELSKAEIITLGTRLGVDYGLTVTCYQADDQGRACGRCEACRLRRAGFEAAGIADPTPYQQRGN

SEQ ID NO: 36153 - protein, 228 aa, Azoarcus sp.
  misc_feature (1)..(228): sp|A1K2H5|QUEC_AZOSB 7-cyano-7-deazaguanine synthase OS =Azoarcus sp. (strain BH72) OX=62928 GN=queC PE=3 SV=1
MTDLPRAVVLLSGGLDSATCLAIARDMGLETYALSVAYGQRHAAELTASRRVAHALGAREHRVASVSLGEFGGSALTDPAIAVPEDAAPGGIPVTYVPARNTVMLSMALAWAEVLGARHIFVGVNAVDYSGYPDCRPAFIQAFETMANLATKAGVEGHPTTIHAPLIDLSKADIIRRGVALGVDYGLTVSCYQADDDGRACGRCDACRLRREGFAAAGIADPTRYQAR

SEQ ID NO: 36154 - protein, 227 aa, Azoarcus tolulyticus
  misc_feature (1)..(227): tr|A0A1N6N971|A0A1N6N971_9RHOO 7-cyano-7-deazaguanine s ynthase OS=Azoarcus tolulyticus OX=34027 GN=queC PE=3 S V=1
MPDHPKRAVILLSGGLDSATCLAIARDMGFETYALSVAYGQRHAAELDAARRVAASLGAREHRVASVELGQFGGSALTDEKIPVPVEGSSDGIPVTYVPARNTVMLSIALAWAEVLGANDIFVGVNAVDYSGYPDCRPEFIAAFETMANLATKAGVEGTRLQIHAPLIALSKADIIRRGSALGVDYSQTVSCYQADDAGHACGMCDACRLRRAGFEAAAVPDPTRYA

SEQ ID NO: 36155 - protein, 224 aa, Azomonas agilis
  misc_feature (1)..(224): tr|A0A562I183|A0A562I183_9GAMM 7-cyano-7-deazaguanine s ynthase OS=Azomonas agilis OX=116849 GN=queC PE=3 SV=1
MSTKKAIILLSGGLDSATVAAIARAEQYDCYSLSFDYGQRHRAELQASERVARHLGMREHKIIGLNLGSIGGSALTDERIAVPETPSQGIPVTYVPARNTVFLALALGWAEVVGAQDIFIGVNAVDYSGYPDCRPEFINAFEQLANLATKAGVEGQSFHIRTPLQYWTKAQIIQEGVKLGVDYRLTVSCYQADALGRACGKCDSCRLRAAGFAAAGVLDPTEYF

SEQ ID NO: 36156 - protein, 225 aa, Azonexus fungiphilus
  misc_feature (1)..(225): tr|A0A495VPM1|A0A495VPM1_9RHOO 7-cyano-7-deazaguanine s ynthase OS=Azonexus fungiphilus OX=146940 GN=queC PE=3 SV=1
MKEKAIVLLSGGLDSATCLAIARSQGFDCYCLSFDYGQRHSAELQAAERVVKALGAAEHRVINFGLAQFGGSALTDTSIAVPVDGLQSGIPVTYVPARNTIMLSLALAWAEVLGSRDIFVGVNAVDYSGYPDCRPEYIAAFEKMANLATRAGVEGQKLHIHAPLIDLSKAEIVRRGTALGVDYGLTVSCYQADELGRACGVCDSCRLRAEGFAAAGLPDPTPYRT

SEQ ID NO: 36157 - protein, 457 aa, Azonexus hydrophilus
  misc_feature (1)..(457): tr|A0A1R1I8F4|A0A1R1I8F4_9RHOO Uncharacterized protein OS=Azonexus hydrophilus OX=418702 GN=BJN45_07885 PE=4 S V=1
MTSPLPLKELAVDVVEAGARRRKGMVPCRLGQNIDFDLEALESYSSIKWQTTVYDALVVAAVVEFCDRSLARSAMNWGRKFLVHIPVHDPDKWSEKTVTRALVEALNLLTGDDWHFEFRARKASAECPPQDRMRFPSNAEAVLAYSDGMDSCAVAGLESNRLGRRLVRVRVGSKQHDVSKKDRLRIPFTALPYSVKLDNGRNAENSARSRGFKFSVVSTMAAYLIDAPSVIVPESGQGALAPVFLPVGQGYEDYRSYPGFTALMARFFNALLGYQIQYRFPRLWMTKGETLREFVDVCGSEARWATTRSCWQQSRQVAVSGERRQCGVCAACMLRRLSVHAAGLNEPPETYVWESLKAATWESGAAKDFASFTLALREYSIAGVLHFEHFASLRESVQYELIKRRRTNELARSLSEPPAAVAQNLDRLLQQHAIEWSVFTNDLGSRSFVRQWIDDAL

SEQ ID NO: 36158 - protein, 225 aa, Azonexus hydrophilus
  misc_feature (1)..(225): tr|A0A1R1I3K5|A0A1R1I3K5_9RHOO 7-cyano-7-deazaguanine s ynthase OS=Azonexus hydrophilus OX=418702 GN=queC PE=3 SV=1
MNEKAVVLLSGGLDSATCLAIARSQGFDCYCLSFNYGQRHTAELQAADRVVKALGASEHRVLNLGLAQFGGSALTDTSIAVPVDGVQPGIPVTYVPARNTIMLSLALAWAEVLGSRDIFVGINAVDYSGYPDCRPDYLAAFETMANLATRAGVEGQKLSIHAPLINLTKADIIRTGHALGVDYGLTVSCYQADELGRACGVCDSCRLRAEGFAAAGIPDPTAYRT

SEQ ID NO: 36159 - protein, 241 aa, Azorhizobium caulinodans
  misc_feature (1)..(241): sp|A8IMX7|QUEC_AZOC5 7-cyano-7-deazaguanine synthase OS =Azorhizobium caulinodans (strain ATCC 43989 / DSM 5975 / JCM 20966 / NBRC 14845 / NCIMB 13405 / ORS 571) OX=4 38753 GN=queC PE=3 SV=1
MSADAGPGSGALVLFSGGQDSTTTLAWALDRFERVETLGFDYGQRHRIELDCRVKVRAAMAALNPAWAAKLGEDHTLALDALGAVSDTALTRDVAIEMTEGGLPNTFVPGRNIVFLTFAAALAYRRGLKHIVGGMCETDFSGYPDCRDDTIKALQVALNLGMDRRFVLETPLMWIDKAETWRLAERLGGRALVDLIVEDTHTCYLGERGPRHPWGHGCGTCPACQLRAEGFARYEAARVSE

SEQ ID NO: 36160 - protein, 239 aa, Azorhizobium sp.
  misc_feature (1)..(239): tr|A0A258K9S7|A0A258K9S7_9RHIZ 7-cyano-7-deazaguanine s ynthase OS=Azorhizobium sp. 32-67-21 OX=1970319 GN=queC PE=3 SV=1
MSGPLQEGGALVLFSGGQDSTTCLAWALERFDRVETVGFDYGQRHRVELEHRKSLMVGLSRLNGAWARRLKDDHTLSLSALGKVSETALTRNVAIDMEEDGLPNTFVPGRNIIFLTFAAALAYRRGLKHIVGGMCETDYSGYPDCRDDTIKALQVAINLGMERRFVLDTPLMWIDKAATWRLAESLGGPALVDLIIEDTHTCYLGERGARHAWGHGCGTCPACILRAEGYARYRAEAVG

SEQ ID NO: 36161 - protein, 37 aa, Azorhizobium sp.
  misc_feature (1)..(37): tr|A0A258N2A7|A0A258N2A7_9RHIZ Uncharacterized protein (Fragment) OS=Azorhizobium sp. 35-67-15 OX=1970320 GN=B 7Y65_03140 PE=4 SV=1
MTAEEGIVADGALVLFSGGQDSTTCLAWALERFARVE

SEQ ID NO: 36162 - protein, 229 aa, Azospira oryzae
  misc_feature (1)..(229): tr|G8QFE9|G8QFE9_AZOOP 7-cyano-7-deazaguanine synthase OS=Azospira oryzae (strain ATCC BAA-33 / DSM 13638 / PS ) OX=640081 GN=queC PE=3 SV=1
MTDIRPAIVLLSGGLDSATCLAIAKSEGFAPYCLSFDYGQRHKAELQAAARVAAALGAKEHRVVRLDIGQFGGSALTDSSIAVPVEGVQAGGIPVTYVPARNTVMLSFALAWAEVLGAKDIFVGVNAVDYSGYPDCRPEFIAAFERMANLATKAGVEGAELHVHAPLIDLTKAQIIQRGTALGVDYGITVSCYQADDEGRACGVCDSCRLRAEGFRAAGLADPTPYRSA

SEQ ID NO: 36163 - protein, 228 aa, Azospira oryzae
  misc_feature (1)..(228): tr|A0A2W5HL27|A0A2W5HL27_9RHOO 7-cyano-7-deazaguanine s ynthase OS=Azospira oryzae OX=146939 GN=queC PE=3 SV=1
MANGAKKAVVLLSGGLDSATALAVAKNEGYDCYPLSVDYGQRHAAELKAAERVAQALGARALKRVKLDLTVFGGSALTDASIAVPEMPGPGIPVTYVPARNTILLSLALAYAEVLGVQHIFIGANAVDYSGYPDCRPEYLRAYEAMANLATKAAVEGARLTLHAPLVNLSKAEIIRRGVALGVDYAITVSCYQATEDGLACGRCDACRLRRAGFEAAGVPDPTRYQSR

SEQ ID NO: 36164 - protein, 229 aa, Azospira sp.
  misc_feature (1)..(229): tr|A0A5H2YDY3|A0A5H2YDY3_9RHOO 7-cyano-7-deazaguanine s ynthase OS=Azospira sp. I09 OX=1765049 GN=queC PE=4 SV= 1
MTDIRPAIVLLSGGLDSATCLAIAKSEGFAPYCLSFDYGQRHKAELQAAARVAAALGAKEHRVVRLDIGQFGGSALTDSSIAVPVEGVQAGGIPVTYVPARNTVMLSFALAWAEVLGAKDIFVGVNAVDYSGYPDCRPEFIAAFERMANLATKAGVEGAELHVHAPLIDLTKAQIVQRGTALGVDYGITVSCYQADDEGRACGVCDSCRLRAEGFRAAGLADPTPYRSA

SEQ ID NO: 36165 - protein, 231 aa, Azospira sp.
  misc_feature (1)..(231): tr|A0A2R5EHX9|A0A2R5EHX9_9RHOO 7-cyano-7-deazaguanine s ynthase OS=Azospira sp. I13 OX=1765050 GN=queC PE=3 SV= 1
MTSLRPAIVLLSGGLDSATCLAIAKSEGFAPYCLSFDYGQRHRAELQAAARVAAALGAQEHRTVRLDIGQFGGSALTDSAIAVPTDGVQPGIPVTYVPARNTVMLSFALAWAEVLGAQDIFVGVNAVDYSGYPDCRPEYIAAFEHMANLATKAGVEGHRLSIHAPLIDLSKARIIQTGSGLGVDYALTVSCYQADDQGRACGACDSCRLRKEGFNAAGLPDPTPYQPARQP

SEQ ID NO: 36166 - protein, 232 aa, Azospirillum brasilense
  misc_feature (1)..(232): tr|A0A060DJI1|A0A060DJI1_AZOBR 7-cyano-7-deazaguanine s ynthase OS=Azospirillum brasilense OX=192 GN=queC PE=3 SV=1
MTARNAVVLVSGGLDSTTVLAIAREQGYRLNALSFRYGQRHAVELEAAKRVAAAMAVDRHVIADIDLRAFGGSALTDAIDVPKHASAADLGTGIPVTYVPARNTVFLSFALAWAETLEASDIFIGVNALDYSGYPDCRPEYIAAFETMANLATKAGVEGASRFKIHAPLMTLDKAGIIRRGLELGVDYGLTHSCYDPAPDGAACGSCDSCLLRLKGFAEAGLADPVAYGGGA

SEQ ID NO: 36167 - protein, 232 aa, Azospirillum brasilense
  misc_feature (1)..(232): tr|G8AIV4|G8AIV4_AZOBR 7-cyano-7-deazaguanine synthase OS=Azospirillum brasilense Sp245 OX=1064539 GN=queC PE= 3 SV=1
MNAKNAVVLVSGGLDSTTVLAIAREQGYRLNALSFRYGQRHAVELEAAKRVAAAMAVDRHVIADIDLRAFGGSALTDAIAVPKHASAADLGTGIPVTYVPARNTVFLSFALAWAETLQASDIFIGVNALDYSGYPDCRPEYIAAFETMANLATKAGVEGSSRFKIHAPLMTLDKAGIIRRGLELGVDYGLTHSCYDPAPDGTACGSCDSCLLRLKGFQEAGLSDPVAYGGGV

SEQ ID NO: 36168 - protein, 231 aa, Azospirillum doebereinerae
  misc_feature (1)..(231): tr|A0A433JFT1|A0A433JFT1_9PROT 7-cyano-7-deazaguanine s ynthase OS=Azospirillum doebereinerae OX=92933 GN=queC PE=3 SV=1
MKAKNAVVLVSGGLDSTTVLAIAKHEGYRVNALSFRYGQRHAVELEAARRVVAAMGVERHVIADIDLRAFGGSALTDAIDVPKHDHASDLGGGIPVTYVPARNTVFLSFALAWAETLGAQDLFIGVNAMDYSGYPDCRPEYIAAFETLANLATKAGVEGTSRFTIHAPLMTLDKAGIVQRGLELGVDYSLTHSCYDPAPDGTSCGACDSCLLRLRGFAEAGLADPIAYAKR

SEQ ID NO: 36169 - protein, 466 aa, Azospirillum doebereinerae
  misc_feature (1)..(466): tr|A0A433IZD8|A0A433IZD8_9PROT ATPase OS=Azospirillum d oebereinerae OX=92933 GN=EJ913_30870 PE=4 SV=1
MSPVDYYLQRDLPRLNVDVVEDGNKPKRGFEGCIIGKDITFKADSIASYFFVSWNPTVHDALLVAASAEFCDRNQRRPSNGWGREFNLRIPVHEPGLWSSKPVSDALHDALRFLTGDRWDITFYARKKHKEPPPQILMELGRPVSAVIPYSDGLDSRAVAGLMGKKLGDGLVRVRLGTGGIDKKSRKKEPFMAVPYSVKTREHTPEPSARIRGFKFTLLSGLAAYLAKADTVFIPESGQGALGPTIVPVGQAYTDYRNHPLFTAKMETLLRRLLGYKVHFVFPQLWNTKGETLRMYMEECDIAPSRLVNTKSCWQGSRQVSINGSSRQCGICAACMLRRMSLHAAGVAEPSGNYVWEKLNTVTLEAGASQEFRRDKITPAMREYAIAGALHMDHLAALRHSPANSALISLSTFQLSQTLGLPPAIVRVHLDRLLAQHEKEWKEFMCSLGPTSFLAEWAVHGYDHAA

SEQ ID NO: 36170 - protein, 239 aa, Azospirillum humicireducens
  misc_feature (1)..(239): tr|A0A168YCS7|A0A168YCS7_9PROT 7-cyano-7-deazaguanine s ynthase OS=Azospirillum humicireducens OX=1226968 GN=qu eC PE=3 SV=1
MGVPKQAVVLVSGGLDSTTVLAIAKAEGYRVNALSFRYGQRHSVELEAARRVVAAMGVERHVIADIDLRAFGGSALTDSIDVPKHDSAAELEAGLEQGIPVTYVPARNTVFLSFALAWAETLGASDLFIGVNALDYSGYPDCRPDYIAAFETLANLATKAGVEGTSRFKIHAPLMTLDKAAIVRRGLELGVDYGLTHSCYDPTPEGLSCGACDSCLLRLKGFAEAGLSDPIRYDSGMIS

SEQ ID NO: 36171 - protein, 246 aa, Azospirillum lipoferum
  misc_feature (1)..(246): tr|A0A1X7PY31|A0A1X7PY31_AZOLI 7-cyano-7-deazaguanine s ynthase OS=Azospirillum lipoferum OX=193 GN=queC PE=3 S V=1
MTTRDAVVLVSGGLDSTTVLAIARHEGYRVNALSFRYGQRHSVELDAARRVVAAMGVERHVVADIDLRAFGGSALTDSIDVPKHETAADLGADIPVTYVPARNTVFLSFALAWAETLGAQDLFIGVNALDYSGYPDCRPEYIAAFETLANLATKAGVEGTSRFKIHAPLMTLDKAAIVRRGLELGVDYSLTHSCYDPAPDGTSCGTCDSCLLRLKGFSEAGMTDPIRYAAGNSPLGRTASTSAIST

SEQ ID NO: 36172 - protein, 246 aa, Azospirillum lipoferum
  misc_feature (1)..(246): tr|G7Z8R7|G7Z8R7_AZOL4 7-cyano-7-deazaguanine synthase OS=Azospirillum lipoferum (strain 4B) OX=862719 GN=queC PE=3 SV=1
MADQDKTMGAAKEAVVLVSGGLDSTTVLAIAKAEGYRVNALSFRYGQRHSVELEAARRVVAAMGVERHVIADIDLRAFGGSALTDSIDVPKHDSAAELEADPGQGIPVTYVPARNTVFLSFALAWAETLGASDLFIGVNALDYSGYPDCRPEYIAAFEALANLATKAGVEGTSRFKIHAPLMTLDKAGIVRRGLELGVDYSLTHSCYDPTPEGLSCGACDSCLLRLKGFSEAGMSDPIRYAAGTAP

SEQ ID NO: 36173 - protein, 238 aa, Azospirillum oryzae
  misc_feature (1)..(238): tr|A0A1X7GG44|A0A1X7GG44_9PROT 7-cyano-7-deazaguanine s ynthase OS=Azospirillum oryzae OX=286727 GN=queC PE=3 S V=1
MADLGESRQAVVLVSGGLDSTTVLAIAKAEGYRVNALSFRYGQRHSVELEAARRVVAAIGVERHVIADIDLRAFGGSALTDAIDVPKHDNAAGLGEGIPVTYVPARNTVFLSFALAWAETLGASDLFIGVNALDYSGYPDCRPEYIAAFETLANLATKAGVEGTSRFKIHAPLMQMDKAAIVRRGLELGVDYSLTHSCYDPTPEGLSCGACDSCLLRLKGFSEAGTTDPIRYASGTDK

SEQ ID NO: 36174 - protein, 242 aa, Azospirillum oryzae
  misc_feature (1)..(242): tr|A0A5A9GAQ9|A0A5A9GAQ9_9PROT 7-cyano-7-deazaguanine s ynthase OS=Azospirillum oryzae OX=286727 GN=queC PE=3 S V=1
MAALGESRQAVVLVSGGLDSTTVLAIAKAEGYRVNALSFRYGQRHSVELEAAQRVVAAMGVERHVIADIDLRAFGGSALTDSIDVPKHDSAADLAAGLGEGIPVTYVPARNTVFLSFALAWAETLGASDLFIGVNALDYSGYPDCRPEYIAAFETLANLATKAGVEGTSRFRIHAPLMRMDKAAIVRRGLELGVDYSLTHSCYDPTPEGLSCGACDSCLLRLKGFSEAGTTDPIRYANGTNK

SEQ ID NO: 36175 - protein, 242 aa, Azospirillum palustre
  misc_feature (1)..(242): tr|A0A2B8BA73|A0A2B8BA73_9PROT 7-cyano-7-deazaguanine s ynthase OS=Azospirillum palustre OX=2044885 GN=queC PE= 3 SV=1
MADRNGVRDAVVLVSGGLDSTTVLAIAKAEGYRVNALSFRYGQRHSVELEAARRVVSAMGVERHVIADIDLRAFGGSALTDSIAVPKHDSAAGLQAGLGEGIPVTYVPARNTVFLSFALAWAETLGSSDLFIGVNALDYSGYPDCRPEYIAAFETLANLATKAGVEGTSRFKIHAPLMMLDKAAIVRRGLELGVDYSLTHSCYDPTPEGLSCGACDSCLLRLKGFSEAGMTDPIRYDTGTKA

SEQ ID NO: 36176 - protein, 242 aa, Azospirillum sp.
  misc_feature (1)..(242): tr|A0A2U1WEX3|A0A2U1WEX3_9PROT 7-cyano-7-deazaguanine s ynthase OS=Azospirillum sp. TSA6c OX=709813 GN=queC PE= 3 SV=1
MADRNGVRDAVVLVSGGLDSTTVLAIAKAEGYRVNALSFRYGQRHSVELEAARRVVAAMGVERHVIADIDLRAFGGSALTDSIAVPKHDSAADLQAGLGEGIPVTYVPARNTVFLSFALAWAETLGSSDLFIGVNALDYSGYPDCRPEYIAAFETLANLATKAGVEGTSRFKIHAPLMTLDKAAIVRRGLELGVDYSLTHSCYDPTPEGLSCGACDSCLLRLKGFSEAGMTDPIRYDTGTKA

SEQ ID NO: 36177 - protein, 242 aa, Azospirillum sp.
  misc_feature (1)..(242): tr|A0A2U1X338|A0A2U1X338_9PROT 7-cyano-7-deazaguanine s ynthase OS=Azospirillum sp. TSH20 OX=652754 GN=queC PE= 3 SV=1
MADQDRSKPAVVLVSGGLDSTTVLAIAKAGGYRVNALSFRYGQRHSVELEAAQRVVAAMGVERHVIADIDLRAFGGSALTDAIDVPKHDSAADLAAGLGEGIPVTYVPARNTVFLSFALAWAETLGASDLFIGVNALDYSGYPDCRPEYVAAFETLANLATKAGVEGTSRFKIHAPLMQMDKAAIVRRGLELGVDYSLTHSCYDPTSEGLSCGACDSCLLRLKGFSEAGTTDPIRYASGTNK

SEQ ID NO: 36178 - protein, 238 aa, Azospirillum thiophilum
  misc_feature (1)..(238): tr|A0A0F2KZ00|A0A0F2KZ00_9PROT 7-cyano-7-deazaguanine s ynthase OS=Azospirillum thiophilum OX=528244 GN=queC PE =3 SV=1
MVERDGQKDAVVLVSGGLDSTTVLAIAKAEGYRVNALSFRYGQRHAVELEAARRVVAAMGVERHVVADIDLRAFGGSALTDAIAVPKHGSAAELGDGIPVTYVPARNTVFLSFALAWAETLGASDLFIGVNALDYSGYPDCRPEYIAAFETLANLATKAGVEGTSRFRIHAPLMTLDKAGIIRRGQELGVDYSLTHSCYDPTPDGQSCGTCDSCLLRLKGFSEAGMIDQIRYESGMNG

SEQ ID NO: 36179 - protein, 224 aa, Azotobacter beijerinckii
  misc_feature (1)..(224): tr|A0A1I4D8M0|A0A1I4D8M0_9GAMM 7-cyano-7-deazaguanine s ynthase OS=Azotobacter beijerinckii OX=170623 GN=queC P E=3 SV=1
MNERKAVILLSGGLDSATVVALARAEGYACYSMSFDYGQRHRAELRAAERVARQLGVVEHKVVGLDLGGIGGSALTDLAIAVPETPSEGIPVTYVPARNTVFLALALGWAEVLGARDIFIGVNAVDYSGYPDCRPAFIEAFERMANLATKAGVEGRGLRIQAPLQNLGKAEIIRAGLCHGVDYGLTVSCYQADEDGRACGKCDSCRLRVAGFAAAGVADPTRYV

SEQ ID NO: 36180 - protein, 224 aa, Azotobacter beijerinckii
  misc_feature (1)..(224): tr|A0A1H6RSF8|A0A1H6RSF8_9GAMM 7-cyano-7-deazaguanine s ynthase OS=Azotobacter beijerinckii OX=170623 GN=queC P E=3 SV=1
MNERKAVILLSGGLDSATVVALARAEGYACYSMSFDYGQRHRAELRAAERVARQLGVVEHKVVGLDLGGIGGSALTDLAIAVPETPSEGIPVTYVPARNTVFLALALGWAEVLGARDIFIGVNAVDYSGYPDCRPAFIEAFERMANLATKAGVEGQGLRILAPLQNLGKAEIIRVGLCHGVDYGLTVSCYQADEDGRACGKCDSCRLRVAGFAAAGVADPTRYV

SEQ ID NO: 36181 - protein, 224 aa, Azotobacter chroococcum
  misc_feature (1)..(224): tr|A0A0C4WR40|A0A0C4WR40_9GAMM 7-cyano-7-deazaguanine s ynthase OS=Azotobacter chroococcum NCIMB 8003 OX=132831 4 GN=queC PE=3 SV=1
MSEKKAVILLSGGLDSATVLALAQAEGYACYSMSFDYGQRHRAELRAAERVARQLGVVEHKVIGLNLDGIGGSALTDSSIAVPEAPGEGIPVTYVPARNTVFLALALGWAEVLEAHEIFIGVNAVDYSGYPDCRPAFIEAFERLANLATKAGVEGRGFHIQAPLQNLGKAEIIQVGLRHGVDYGLTVSCYQADEEGRACGKCDSCRLRAAGFAAAGVADPTRYI

SEQ ID NO: 36182 - protein, 224 aa, Azotobacter chroococcum
  misc_feature (1)..(224): tr|A0A4U1KSY6|A0A4U1KSY6_9GAMM 7-cyano-7-deazaguanine s ynthase OS=Azotobacter chroococcum OX=353 GN=queC PE=3 SV=1
MSEKKAVILLSGGLDSATVLALAQAEGYACYSMSFDYGQRHRAELRAAERVARQLGVVEHKVIGLNLDGIGGSALTDSSIAVPEAPGEGIPVTYVPARNTVFLALALGWAEVLEAHEIFIGVNAVDYSGYPDCRPAFIEAFERLANLATRAGVEGRGFHIQAPLQNLGKAEIIQVGLRHGVDYGLTVSCYQADEEGRACGKCDSCRLRAAGFAAAGVADPTRYI

SEQ ID NO: 36183 - protein, 224 aa, Azotobacter vinelandii
  misc_feature (1)..(224): tr|M9YL54|M9YL54_AZOVI 7-cyano-7-deazaguanine synthase OS=Azotobacter vinelandii CA6 OX=1283331 GN=queC PE=3 S V=1
MNEKKAVILLSGGLDSATVAALAKTEGYACYSMSFDYGQRHRAELRAAERVARQLGMVEHKVIGLDLGGIGGSALTDPAIAVPESPCEGIPVTYVPARNTVFLALALGWAEVLGARDIFIGVNAVDYSGYPDCRPAFIEAFERMANLATKAGVEGQGFRIRAPLQNLGKDEIIRAGLRHGVDYGLTVSCYQADEEGRACGRCDSCRLRAAGFATAGVTDPTRYG

SEQ ID NO: 36184 - protein, 224 aa, Azotobacter vinelandii; identical to SEQ ID NO: 36183
  misc_feature (1)..(224): sp|C1DRE9|QUEC_AZOVD 7-cyano-7-deazaguanine synthase OS =Azotobacter vinelandii (strain DJ / ATCC BAA-1303) OX= 322710 GN=queC PE=3 SV=1

SEQ ID NO: 36185 - protein, 219 aa, Bacillaceae bacterium; identical to SEQ ID NO: 35689
  misc_feature (1)..(219): tr|A0A3E0JRL0|A0A3E0JRL0_9BACI 7-cyano-7-deazaguanine s ynthase OS=Bacillaceae bacterium OX=1889774 GN=queC PE= 3 SV=1

SEQ ID NO: 36186 - protein, 220 aa, Bacillaceae bacterium
  misc_feature (1)..(220): tr|A0A271M152|A0A271M152_9BACI 7-cyano-7-deazaguanine s ynthase OS=Bacillaceae bacterium SAOS 7 OX=2015052 GN=q ueC PE=3 SV=1
MKKEKAVVVFSGGQDSTTCLFWAKERFEEVIAVTFDYGQRHKLELECAADIAKDLQVPHHVLDMSLLNQLSPNALTRTDIEIDEKEGELPSTFVEGRNLLFLSFAAVLAKQYGAKHLITGVCETDFSGYPDCRDVFIKSLNVTLNLSMDTSFVIHTPLMWLDKAETWELADQLGAFDYVRERTLTCYNGIKGSGCGECPACKLRQRGLDQYLAKKGAEQA

SEQ ID NO: 36187 - protein, 219 aa, Bacilli bacterium
  misc_feature (1)..(219): tr|A0A0K0GBG4|A0A0K0GBG4_9FIRM 7-cyano-7-deazaguanine s ynthase OS=Bacilli bacterium VT-13-104 OX=1637974 GN=qu eC PE=3 SV=1
MEKDNAIVVFSGGQDSTTCLFWAKEQFKEVETVTFDYGQRHQLEIECAKEIAEDLGVKHHILDMSLLHQLAPNALTRDDMEIADGDGTRLPNTFVPGRNLLFLSFAGVLAKQVGARHLVTGVSETDFSGYPDCRDSFIKSLNVTLNLAMDEGFVIHTPLMWLDKKEVWRLSDDLGVMDLIREKTLTCYNGIKADGCGKCPACKLRNHGLEQYLLTKGEK

SEQ ID NO: 36188 - protein, 219 aa, Bacillus aerius
  misc_feature (1)..(219): tr|A0A3A9DHW0|A0A3A9DHW0_9BACI 7-cyano-7-deazaguanine s ynthase OS=Bacillus aerius OX=293388 GN=queC PE=3 SV=1
MKQEKAIVVFSGGQDSTTCLLWALRQFQEVEAVTFQYNQRHREEIEVAKKIAEKLGVKHHLLDMELLNQLAPNALTRDDIEIEAKEGELPSTFVPGRNLVFLSFASILAYQVGARHIITGVCETDFSGYPDCRDEFVKSCNVTVNLAMERPFVIHTPLMWLNKAETWELADELDALDFVKNETLTCYNGIIADGCGECPACKLRANGYNEYMKMKKERA

SEQ ID NO: 36189 - protein, 218 aa, Bacillus aerophilus
  misc_feature (1)..(218): tr|A0A410KUP2|A0A410KUP2_9BACI 7-cyano-7-deazaguanine s ynthase OS=Bacillus aerophilus OX=293389 GN=queC PE=3 S V=1
MKNEKAVVVFSGGQDSTTCLLWALQQFKEVETVTFHYNQRHQEEIDVAKRIADKLGVKNHLLDMSLLNQLAPNALTRDDIDIEEKEGELPSTFVPGRNLVFLSFASILAYQIGARHIITGVCETDFSGYPDCRDEFVKSCNVTVNLAMEKPFVIHTPLMWLNKAETWKLADELNALDFVKNETLTCYNGIISDGCGECPACKLRKNGYDTYMDMKEAN

SEQ ID NO: 36190 - protein, 222 aa, Bacillus akibai
  misc_feature (1)..(222): tr|W4QWK3|W4QWK3_BACA3 7-cyano-7-deazaguanine synthase OS=Bacillus akibai (strain ATCC 43226 / DSM 21942 / JCM 9157 / 1139) OX=1236973 GN=queC PE=3 SV=1
MREEKAVVVFSGGQDSTTCLLWALEQFKEVATVTFDYGQRHHEEIECAREIAQELGVSFHVLDMKLINQLSANALTREDIEVKAGKDGELPSTFVPGRNHLFLSFAAVYAQAIGARHIITGVCETDFSGYPDCRDSFVKSLNVTLNLAMDAQFVIHTPLMWLNKEETWKLADELNALDFVREKTLTCYHGIRGNGCGECPACELRKQGLNAYLDKKEGGKAK

SEQ ID NO: 36191 - protein, 220 aa, Bacillus albus
  misc_feature (1)..(220): tr|A0A1J9U5J2|A0A1J9U5J2_9BACI 7-cyano-7-deazaguanine s ynthase OS=Bacillus albus OX=2026189 GN=queC PE=3 SV=1
MKKEKAVVVFSGGQDSTTCLFWAIEQFAEVEAVTFNYNQRHKLEIDCAAEIAKELGIKHTVLDMSLLNQLAPNALTRTDMEITHEEGELPSTFVDGRNLLFLSFAAVLAKQVGARHIVTGVCETDFSGYPDCRDVFVKSLNVTLNLSMDYPFVIHTPLMWIDKAETWKLSDELGAFEFVREKTLTCYNGIIGDGCGECPACQLRKAGLDTYLQEREGANN

SEQ ID NO: 36192 - protein, 222 aa, Bacillus alcalophilus
  misc_feature (1)..(222): tr|A0A094XJ42|A0A094XJ42_BACAO 7-cyano-7-deazaguanine s ynthase OS=Bacillus alcalophilus ATCC 27647 = CGMCC 1.3 604 OX=1218173 GN=queC PE=3 SV=1
MLKDEKAVVVFSGGQDSTTCLVWALKTFKEVATVTFDYGQRHRDEIECAKEIADELGVSFKVLDLQLISQLSANALTRDDIEIEAGKDGELPSTFVEGRNHLFLSFAAIYAKQIGARHVVTGVCETDFSGYPDCRDSFIKSLNVTLNLAMDHQFVIHTPLMWLDKKKTWQLADELGVLDFVRNKTLTCYEGVRGEGCGKCPACQLRKNGLDLYLEEKGEELS

SEQ ID NO: 36193 - protein, 218 aa, Bacillus altitudinis; identical to SEQ ID NO: 36189
  misc_feature (1)..(218): tr|A0A5K1N8K7|A0A5K1N8K7_9BACI 7-cyano-7-deazaguanine s ynthase QueC OS=Bacillus altitudinis OX=293387 GN=queC PE=4 SV=1

SEQ ID NO: 36194 - protein, 219 aa, Bacillus amyloliquefaciens
  misc_feature (1)..(219): tr|A0A0D7XYK1|A0A0D7XYK1_BACAM 7-cyano-7-deazaguanine s ynthase OS=Bacillus amyloliquefaciens OX=1390 GN=queC P E=3 SV=1
MKKEKAVVVFSGGQDSTTCLLWALQNFEEVETVTFHYNQRHQEEIDVAKSIAEKLGVKNHLLDMSLLNQLAPNALTRDDIEIEAKDGELPTTFVPGRNLVFLSFASILAYQIGARHIITGVCETDFSGYPDCRDEFVKSCNVTVNLAMEKPFVIHTPLMWLNKAETWKLADELGALDFVKNNTLTCYNGIIADGCGECPACLLRNKGYDEYMKMKGERN

SEQ ID NO: 36195 - protein, 227 aa, Bacillus amyloliquefaciens
  misc_feature (1)..(227): tr|I2C496|I2C496_BACAM 7-cyano-7-deazaguanine synthase OS=Bacillus amyloliquefaciens Y2 OX=1126211 GN=ykvJ PE= 3 SV=1
MIDKGEKDMKKEKAVVVFSGGQDSTTCLLWALQNFEEVETVTFHYNQRHQEEIDVAKSIAEKLGVKNHLLDMSLLNQLAPNALTRDDIEIEAKDGELPTTFVPGRNLVFLSFASILAYQIGARHIITGVCETDFSGYPDCRDEFVKSCNVTVNLAMEKPFVIHTPLMWLNKAETWKLADELGALDFVKNNTLTCYNGIIADGCGECPACLLRNKGYDEYMKMKGERN

SEQ ID NO: 36196 - protein, 220 aa, Bacillus anthracis
  misc_feature (1)..(220): sp|Q81TC7|QUEC_BACAN 7-cyano-7-deazaguanine synthase OS =Bacillus anthracis OX=1392 GN=queC PE=3 SV=1
MKKEKAVVVFSGGQDSTTCLFWAIEQFAEVEAVTFNYNQRHKLEIDCAVEIAKELGIKHTVLDMSLLNQLAPNALTRTDMEITHEEGELPSTFVDGRNLLFLSFAAVLAKQVGARHIVTGVCETDFSGYPDCRDVFVKSLNVTLNLSMDYPFVIHTPLMWIDKAETWKLSDELGAFEFVREKTLTCYNGIIGDGCGECPACQLRKAGLDTYLQEREGASN

SEQ ID NO: 36197 - protein, 220 aa, Bacillus anthracis
  misc_feature (1)..(220): tr|A0A1T3V7Q2|A0A1T3V7Q2_BACAN 7-cyano-7-deazaguanine s ynthase OS=Bacillus anthracis OX=1392 GN=queC PE=3 SV=1
MKKEKAVVVFSGGQDSTTCLFWAIEQFAEVEAVTFNYNQRHKLEIDCAAEIAKELGIKHTVLDMSLLNQLAPNALTRTDMEITHEEGELPSTFVDGRNLLFLSFAAVLAKQVGARHIVTGVCETDFSGYPDCRDVFVKSLNVTLNLSMDYPFVIHTPLMWIDKAETWKLSDELGAFEFVREKTLTCYNGIIGDGCGECPACQLRKAGLDTYLQEREGASN

SEQ ID NO: 36198 - protein, 229 aa, Bacillus aquimaris
  misc_feature (1)..(229): tr|A0A366EX90|A0A366EX90_9BACI 7-cyano-7-deazaguanine s ynthase OS=Bacillus aquimaris OX=189382 GN=queC PE=3 SV =1
MNTEKALVVFSGGQDSTTCLFWAKKSFKEVEAVTFNYGQRHVAELDCAKEIAEDLEVPHHVLDMSLLNQLAPSALTRADAEITHQDGELPSTFVPGRNLLFLSFAGILAKQIGARHIVTGVCETDFSGYPDCRDIFVKSLNVSLNLSMDDQFVIHTPLMWINKAQTWEMADDLGAFRYVQENTLTCYNGIKGSGCGECPACELRQKGLEEYKRTKKGERENDTTNLPDS

SEQ ID NO: 36199 - protein, 220 aa, Bacillus aquimaris
  misc_feature (1)..(220): tr|A0A5D4U5Y2|A0A5D4U5Y2_9BACI 7-cyano-7-deazaguanine s ynthase OS=Bacillus aquimaris OX=189382 GN=queC PE=3 SV =1
MKNEKALVVFSGGQDSTTCLIWAKKEFKEVEAVTFNYGQRHSEELVCASEIAQELEVPHHVLDMSLLNQLSPSALTRNEEITEKEGELPSTFVPGRNLLFLSFAGVLAKNIGAVHIVTGVCETDFSGYPDCRDMFVKSFNVTFNLAMDEGYVVHTPLMWLDKEATWKWADEMGMLQYVREKTLTCYNGIRGDGCGTCPSCKLRSKGLTAYLSSENGGAEL

SEQ ID NO: 36200 - protein, 221 aa, Bacillus aryabhattai
  misc_feature (1)..(221): tr|A0A2C5HIY1|A0A2C5HIY1_9BACI 7-cyano-7-deazaguanine s ynthase OS=Bacillus aryabhattai OX=412384 GN=queC PE=3 SV=1
MMKNEKAIVVFSGGQDSTTCLFWALKNFKEVETVTFQYGQRHSQEIEVAKAIAADLGVKHTVLDMSLLNQLAPNALTRDDIEIEQKEGELPTTFVDGRNLLFLSFAAVLAKNSGGRHIVTGVCETDFSGYPDCRDVFVKSLNVTLNLSMDFEFVIHTPLMWIDKAETWALADELGALEYVREKTLTCYNGIVADGCGECPACQLRKRGLDQYLQTKEGGEK

SEQ ID NO: 36201 - protein, 221 aa, Bacillus aryabhattai
  misc_feature (1)..(221): tr|A0A1G6Q7W3|A0A1G6Q7W3_9BACI 7-cyano-7-deazaguanine s ynthase OS=Bacillus aryabhattai B8W22 OX=1358420 GN=que C PE=3 SV=1
MMKNEKAIVVFSGGQDSTTCLFWALKNFKEVETVTFQYGQRHSQEIEVAKTIAADLGVKHTVLDMSLLNQLAPNALTRDDIDIEQKEGELPTTFVDGRNLLFLSFAAVLAKNSGGRHIVTGVCETDFSGYPDCRDVFVKSLNVTLNLSMDFEFVIHTPLMWIDKAETWALADELGALEYVREKTLTCYNGIVADGCGECPACQLRKRGLDQYLQTKEGGEK

SEQ ID NO: 36202 - protein, 219 aa, Bacillus asahii
  misc_feature (1)..(219): tr|A0A398BBP5|A0A398BBP5_9BACI 7-cyano-7-deazaguanine s ynthase OS=Bacillus asahii OX=228899 GN=queC PE=3 SV=1
MKKEKAVVVFSGGQDSTTCLFWALERFAEVEAVTFDYNQRHRLEIECAQNIANELGIKHHILDMSLLNQLAPNALTRNDIEVKDGEDGELPSTFVPGRNLLFLSFAGVIASQIGAKHIVTGVCETDFSGYPDCRDVFIKSLNVTLNLSMDDSFVIDTPLMWLNKEETWELADRLGAFEFVREKTLTCYNGIIADGCGECPACKLRQKGLVDYLSKRKES

SEQ ID NO: 36203 - protein, 219 aa, Bacillus asahii
  misc_feature (1)..(219): tr|A0A3Q9RLL9|A0A3Q9RLL9_9BACI 7-cyano-7-deazaguanine s ynthase OS=Bacillus asahii OX=228899 GN=queC PE=3 SV=1
MKKEKAVVVFSGGQDSTTCLFWALERFAEVEAVTFDYNQRHRLEIECAQNIANELGIKHHILDMSLLNQLAPNALTRDDIEVKDGEDGELPSTFVPGRNLLFLSFAGVIASQIGAKHIVTGVCETDFSGYPDCRDVFIKSLNVTLNLSMDNSFVIDTPLMWLNKEETWELADQLGAFEFVREKTLTCYNGIIADGCGECPACKLRQKGLVDYLSKRKES

SEQ ID NO: 36204 - protein, 219 aa, Bacillus atrophaeus
  misc_feature (1)..(219): tr|A0A0H3E0M3|A0A0H3E0M3_BACA1 7-cyano-7-deazaguanine s ynthase OS=Bacillus atrophaeus (strain 1942) OX=720555 GN=queC PE=3 SV=1
MKKEKAIVVFSGGQDSTTCLLWALKEFEEVETVTFHYNQRHQQEIDVAKAIAEELGVKNHLLDMSLLNQLAPNALTRDDIKIEAKDGELPSTFVPGRNLVFLSFASILAYQIGARHIITGVCETDFSGYPDCRDEFVKSCNVTVNLAMEKPFVIHTPLMWLNKAETWKLADELGALDFVKNNTLTCYNGIIADGCGECPACLLRNKGYEEYMEMKGERK

SEQ ID NO: 36205 - protein, 219 aa, Bacillus atrophaeus; identical to SEQ ID NO: 36204
  misc_feature (1)..(219): tr|A0A080UQ20|A0A080UQ20_BACAT 7-cyano-7-deazaguanine s ynthase OS=Bacillus atrophaeus OX=1452 GN=queC PE=3 SV= 1

SEQ ID NO: 36206 - protein, 218 aa, Bacillus australimaris
  misc_feature (1)..(218): tr|A0A0N8HW51|A0A0N8HW51_9BACI 7-cyano-7-deazaguanine s ynthase OS=Bacillus australimaris OX=1326968 GN=queC PE =3 SV=1
MKNEKAVVVFSGGQDSTTCLLWALQQFEEVETVTFHYNQRHQEEIDVAKRIADKLGVKNHLLDMSLLNQLAPNALTRDDIDIEEKEGELPSTFVPGRNLVFLSFASILAYQIGARHIITGVCETDFSGYPDCRDEFVKSCNVTVNLAMEKPFVIHTPLMWLNKAETWKLADELNALDFVKNETLTCYNGIISDGCGECPACKLRKNGYDTYMEMKEAK

SEQ ID NO: 36207 - protein, 221 aa, Bacillus azotoformans
  misc_feature (1)..(221): tr|A0A072NVK5|A0A072NVK5_BACAZ 7-cyano-7-deazaguanine s ynthase OS=Bacillus azotoformans MEV2011 OX=1348973 GN= queC PE=3 SV=1
MKNDKAIVVFSGGQDSTTCLFWALKNFKEVEAVTFDYNQRHRLEIEVAKDIAKELGVRHHILDMSLLNQLAPNALTRDDIEVKAGEDGELPNTFVPGRNLLFLSFAGVLASQVGAKHIITGVCETDFSGYPDCRDIFVKSLNVTLNLSMDQTFVIHTPLMWINKAETWKLADELGALDFVRERTLTCYNGIIADGCGECPACKLRKAGLDQYMDSLKEGIE

SEQ ID NO: 36208 - protein, 221 aa, Bacillus azotoformans; identical to SEQ ID NO: 36207
  misc_feature (1)..(221): tr|K6CAY5|K6CAY5_BACAZ 7-cyano-7-deazaguanine synthase OS=Bacillus azotoformans LMG 9581 OX=1131731 GN=queC PE =3 SV=1

SEQ ID NO: 36209 - protein, 220 aa, Bacillus bacterium
  misc_feature (1)..(220): tr|A0A506QL77|A0A506QL77_9BACI 7-cyano-7-deazaguanine s ynthase OS=Bacillus bacterium OX=2053512 GN=queC PE=3 S V=1
MKKEKAVVVFSGGQDSTTCLFWAMQQFAEVEAVTFNYNQRHKLEIDCAAEIAKELGIKHTVLDMSLLNQLAPNALTRTDMEITHEEGELPSTFVDGRNLLFLSFAAVLAKQVGARHIVTGVCETDFSGYPDCRDVFVKSLNVTLNLSMDYPFVIHTPLMWIDKAETWKLSDELGAFEFVREKTLTCYNGIIGDGCGECPACQLRKAGLDTYLQEREGASN

SEQ ID NO: 36210 - protein, 222 aa, Bacillus bacterium
  misc_feature (1)..(222): tr|A0A3D0E4J9|A0A3D0E4J9_9BACI 7-cyano-7-deazaguanine s ynthase OS=Bacillus bacterium OX=2053512 GN=queC PE=3 S V=1
MLKDEKAIVVFSGGQDSTTCLFWALKTFKEVEVVTFNYNQRHKNEIECAKAIAQEVNVRHHLLDMHLLNQLAPSALTRNDIDIKDGGDGEQLSTFVPGRNLIFLSFAAVLASQVNAKHMITGVSETDFSGYPDCRDAFIKSLNVTINLSMDQEFVIHTPLMWLDKEETWKLADELDVLDYVREKTLTCYEGVIGDGCGECPACKLRKNGLEKYLASQKGVKE

SEQ ID NO: 36211 - protein, 220 aa, Bacillus badius
  misc_feature (1)..(220): tr|A0A162YV76|A0A162YV76_BACBA 7-cyano-7-deazaguanine s ynthase OS=Bacillus badius OX=1455 GN=queC PE=3 SV=1
MNKEKAVVVFSGGQDSTTCLFWAQQRFDEVIAVTFDYGQRHRLELECATEIANELNIPHHTLDMSLLNQLAPNALTRQDIEITEKDGEPPSTFVEGRNLLFLSFAAVLAKQYNARHLVTGVCETDFSGYPDCRDVFIKSLNVTLNLSMDYSFVIHTPLMWLDKAETWELADDLGAFDYVRERTLTCYNGIKGSGCGECPACKLRQNGLSKYLAKKEAGSK

SEQ ID NO: 36212 - protein, 236 aa, Bacillus badius
  misc_feature (1)..(236): tr|A0A0C2U7X8|A0A0C2U7X8_BACBA 7-cyano-7-deazaguanine s ynthase OS=Bacillus badius OX=1455 GN=queC PE=3 SV=1
MNLFLLSNEKKKGRGKMNKEKAVVVFSGGQDSTTCLFWAQQRFDEVIAVTFDYGQRHRLELECATEIANELNIPHHTLDMSLLNQLAPNALTRQDIEITEKDGEPPSTFVEGRNLLFLSFAAVLAKQYNARHLVTGVCETDFSGYPDCRDVFIKSLNVTLNLSMDYSFVIHTPLMWLDKAETWELADDLGAFDYVRERTLTCYNGIKGSGCGECPACKLRQNGLSKYLAKKEAGSK

SEQ ID NO: 36213 - protein, 220 aa, Bacillus bataviensis
  misc_feature (1)..(220): tr|A0A561DEN9|A0A561DEN9_9BACI 7-cyano-7-deazaguanine s ynthase OS=Bacillus bataviensis OX=220685 GN=queC PE=3 SV=1
MLKDEKAVVVFSGGQDSTTCLFWALKQFKEVEVVTFDYNQRHSLEIECAKNIANELGVRHHILDMSLLNQLAPNALTRNDIEVKEGEDGELPSTFVPGRNLLFISFAGVLASQVGAKHLVTGVCETDFSGYPDCRDIFIKSLNVTLNLSMDTEFVIHTPLMWLDKAETWQLADELDALEFVREKTLTCYNGIIADGCGECPSCLLRKKGLEKYLSTREAL

SEQ ID NO: 36214 - protein, 220 aa, Bacillus bombysepticus; identical to SEQ ID NO: 36191
  misc_feature (1)..(220): tr|A0A023P4J1|A0A023P4J1_9BACI 7-cyano-7-deazaguanine s ynthase OS=Bacillus bombysepticus str. Wang OX=1330043 GN=queC PE=3 SV=1

SEQ ID NO: 36215 - protein, 218 aa, Bacillus boroniphilus
  misc_feature (1)..(218): tr|W4RT46|W4RT46_9BACI 7-cyano-7-deazaguanine synthase OS=Bacillus boroniphilus JCM 21738 OX=1294265 GN=queC P E=3 SV=1
MKNEKAVVVFSGGQDSTTCLFWAMKEFGEVEAVTFDYNQRHRTEIQCAEEIASELGIKHHILDMSLLNQLAPNALTRNDIDVKDGEGGELPSTFVPGRNLLFLSFAGVLASQVKAKHIVTGVCETDFSGYPDCRDVFIKSLNVTLNLSMDQNFVIHTPLMWLNKAQTWKLADDLDAFEFVRSRTLTCYNGIIADGCGICPACKLRKKGLDDYLEGDVS

SEQ ID NO: 36216 - protein, 220 aa, Bacillus butanolivorans
  misc_feature (1)..(220): tr|A0A0M0F1K0|A0A0M0F1K0_9BACI 7-cyano-7-deazaguanine s ynthase OS=Bacillus butanolivorans OX=421767 GN=queC PE =3 SV=1
MKKEKAVVVFSGGQDSTTCLFWAMERFEEVEAVTFDYNQRHSLEIECAQKIAKELGITHHILDMSLLNQLAPNALTRSDIAVEDGEDGELPSTFVPGRNLLFLSFAGVLASQIGAKHIVTGVCETDFSGYPDCRDVFIKSLNVTLNLSMDQSFVIDTPLMWLNKEETWELADQLGAFDFVREKTLTCYNGIISDGCGECPACKLRKKGLDDYVSRRQVLK

SEQ ID NO: 36217 - protein, 223 aa, Bacillus caldolyticus
  misc_feature (1)..(223): tr|A0A2H5KM81|A0A2H5KM81_BACCL 7-cyano-7-deazaguanine s ynthase OS=Bacillus caldolyticus OX=1394 GN=queC PE=3 S V=1
MKMNEEKAVVVFSGGQDSTTCLFWAKKQFGEVEAVTFDYGQRHRREIDVAQAIADELGVRHTVLDLSLLGQLAPNALTRRDIAIEQKKGELPTTFVDGRNLLFLSFAAVFAKQRGARHIVTGVCETDFSGYPDCRDVFIKSLNVTLNLAMDYEFVIHTPLMWLTKAETWKLADELGALEFIRTKTLTCYNGIIADGCGECPACALRKRGLDEYLREKAEVESR

SEQ ID NO: 36218 - protein, 218 aa, Bacillus camelliae
  misc_feature (1)..(218): tr|A0A2N3LM40|A0A2N3LM40_9BACI 7-cyano-7-deazaguanine s ynthase OS=Bacillus camelliae OX=1707093 GN=queC PE=3 S V=1
MKKKEKAVVVFSGGQDSTTCLFWAKERFEEVVAVTFDYNQRHKLEIECAKNIANQLGVKHHILDMSLLNQLAPNALTRDDIQVKDGENGSLPSTFVPGRNLLFMSFAGVLASQVGAKHIVTGVCETDFSGYPDCRDIFVKSLNVTLNLSMDQDFVIHTPLMWLDKCETWKLADELDAFDFVRENTLTCYNGIIADGCGECPACKLRKHGLEEYLKIRK

SEQ ID NO: 36219 - protein, 220 aa, Bacillus campisalis
  misc_feature (1)..(220): tr|A0A0M2SZP5|A0A0M2SZP5_9BACI 7-cyano-7-deazaguanine s ynthase OS=Bacillus campisalis OX=1408103 GN=queC PE=3 SV=1
MKKNEKALVVFSGGQDSTTCLFWAMERFEEVEAVTFDYNQRHSSEIECAKTIAEELNIRHHILDMSLLNQLAPNALTRDDIEVKDGEGGGLPSTFVPGRNLLFMSFAGVLGSQVGARHIITGVCETDFSGYPDCRDIFVKSLNVTLNLSMDEDFVIHTPLMWLDKAETWQLADELGAFGFVREKTLTCYNGIIADGCGECPACRLRKNGLDEYLKVRKEQ

SEQ ID NO: 36220 - protein, 219 aa, Bacillus canaveralius
  misc_feature (1)..(219): tr|A0A3R9PB72|A0A3R9PB72_9BACI 7-cyano-7-deazaguanine s ynthase OS=Bacillus canaveralius OX=1403243 GN=queC PE= 3 SV=1
MKKDKAVIVFSGGQDSTTCLFWALEQFDEVEVVTFDYNQRHKNEIECAKEITKELGIKHHILDMSLLNQLAPNALTRSEIKVEEGAEGALPSTFVPGRNLLFLSFAGVLASQIGAKHIVTGVCETDFSGYPDCRNVFIQSLNVTLNLAMNAEFVIHTPLMWLDKAATWKLADELNAFEFVRDKTLTCYNGVIASGCGECPACKLRQKGLDEYMKHRKEF

SEQ ID NO: 36221 - protein, 226 aa, Bacillus canaveralius
  misc_feature (1)..(226): tr|A0A2N5GGN5|A0A2N5GGN5_9BACI 7-cyano-7-deazaguanine s ynthase OS=Bacillus canaveralius OX=1403243 GN=CU635_20 995 PE=3 SV=1
MEKALLLLSGGPDSSSLAYWIKQQGFELHTLTFNFGEKEGEAEKRTAKYIANHVSKTHKFISFENVLRDFYMSDGGPIHILRKAISREIQIKPFGAGIAISLAASYAAQIGANHLFYAVHKDDAVFRENNYEFFNLLSKAISIELGNEFKIHTPFLDKTKAEVLKIGFELGVPIEETWSCASNSTIHCGWCEPCKDRQHAFKDNGITDNTLYENKINKISEAEIKA

SEQ ID NO: 36222 - protein, 218 aa, Bacillus caseinilyticus
  misc_feature (1)..(218): tr|A0A1H3IJR5|A0A1H3IJR5_9BACI 7-cyano-7-deazaguanine s ynthase OS=Bacillus caseinilyticus OX=1503961 GN=queC P E=3 SV=1
MKKDKAVVVFSGGQDSTTCLFWALKHFKEVEAVTFNYNQRHQSEIEVAGKIAKELDVKHTILDMSLLNQLAPNALTRDDIPIEAKEGQLPSTFVDGRNLLFLSFAAVLAKQAGARHLVTGVCETDFSGYPDCRDVFIKSLNVTLNLAMDYQFVIHTPLMWLDKAETWKLADELNALEFVQTKTLTCYNGIIANGCGECPACILRKNGLDTYLNSNNSE

SEQ ID NO: 36223 - protein, 221 aa, Bacillus cavernae
  misc_feature (1)..(221): tr|A0A3S0TZJ3|A0A3S0TZJ3_9BACI 7-cyano-7-deazaguanine s ynthase OS=Bacillus cavernae OX=1674310 GN=queC PE=3 SV =1
MNKEKAVIVFSGGQDSTTCLFWAKERFAEVEAVTFDYNQRHSLEIECAKNIAKELGVKHHILDMSLLNQLAPNALTRNDIEVKDGEEGELPSTFVPGRNLLFLSFAGVLAKQINAKHIVTGVCETDFSGYPDCRDIFIKSLNVTLNLSMDHPFVIHTPLMWLNKTATWALADELGAFDFVREKTLTCYNGIIADGCGECPSCKLRKNGLDEYLKNRKEFSR

SEQ ID NO: 36224 - protein, 218 aa, Bacillus cellulosilyticus
  misc_feature (1)..(218): tr|E6TRB8|E6TRB8_BACCJ 7-cyano-7-deazaguanine synthase OS=Bacillus cellulosilyticus (strain ATCC 21833 / DSM 2 522 / FERM P-1141 / JCM 9156 / N-4) OX=649639 GN=queC P E=3 SV=1
MNKNKVIVVFSGGQDSTTCLFWALKKYDEVEAVTFDYHQRHSEEIQVAKEITSELKVKHHILDMSLLNQLAPSALTREEIVVKDGEAGGLPSTFVPGRNLIFLSFATILARQIGAKHIVTGVCETDFSGYPDCRDVFIKSLNVSLNLSMDDQFVIHTPLMWLDKSETWKLADDLHALQYVRDKTLTCYNGIRGDGCGDCPACKLRKKGLEKYLIEKEN

SEQ ID NO: 36225 - protein, 220 aa, Bacillus cereus; identical to SEQ ID NO: 36197
  misc_feature (1)..(220): sp|C1EM49|QUEC_BACC3 7-cyano-7-deazaguanine synthase OS =Bacillus cereus (strain 03BB102) OX=572264 GN=queC PE= 3 SV=1

SEQ ID NO: 36226 - protein, 220 aa, Bacillus cereus
  misc_feature (1)..(220): tr|J8IQK7|J8IQK7_BACCE 7-cyano-7-deazaguanine synthase OS=Bacillus cereus VD102 OX=1053228 GN=queC PE=3 SV=1
MKKEKAVVVFSGGQDSTTCLFWAMEQFAEVEAVTFNYNQRHKLEIDCAAEIAKELGIKHTVLDMSLLNQLAPNALTRTDMEITHEEGELPSTFVDGRNLLFLSFAAVLAKQVGARHIVTGVCETDFSGYPDCRDVFVKSLNVTLNLSMDYPFVIHTPLMWIDKAETWKLSDELGAFEFVREKTLTCYNGIIGDGCGECPACQLRKAGLDTYLQEREGASN

SEQ ID NO: 36227 - protein, 219 aa, Bacillus circulans
  misc_feature (1)..(219): tr|A0A553SQ89|A0A553SQ89_BACCI 7-cyano-7-deazaguanine s ynthase OS=Bacillus circulans OX=1397 GN=queC PE=3 SV=1
MRDEKAVVVFSGGQDSTTCLFWALETFKEVEVVTFNYNQRHKAEIQCAIDIAEEVGVKHHLLDMELLNQLAPNALTRSDIEVKEGENGELPSTFVPGRNLVFLSFASILASQIGAKHIITGVCETDFSGYPDCRDSFVKSLNVTLNLAMDTSFVIHTPLMWLDKAETWKLADELGRLDYVREKTLTCYEGVIGNGCGQCPSCVLRKAGLDKYLQEKEAN

SEQ ID NO: 36228 - protein, 219 aa, Bacillus circulans
  misc_feature (1)..(219): tr|A0A0J1IM11|A0A0J1IM11_BACCI 7-cyano-7-deazaguanine s ynthase OS=Bacillus circulans OX=1397 GN=queC PE=3 SV=1
MKNEKAVVVFSGGQDSTTCLFWAIKNFKEVVAVTFDYNQRHITEIECAQKITEELGIKHHILDMSLLNQLAPNALTRDDIAVEDGKEGELPSTFVPGRNLLFMSFAGVLASQIQAKHIVTGVCETDFSGYPDCRDIFVKSLNVTLNLSMDNQFVIHTPLMWLNKEETWGLADELGAFDFVREKTLTCYNGIVADGCGECPACKLRKKGLNDYLAVRKGL

SEQ ID NO: 36229 - protein, 221 aa, Bacillus clausii
  misc_feature (1)..(221): sp|Q5WG41|QUEC_BACSK 7-cyano-7-deazaguanine synthase OS =Bacillus clausii (strain KSM-K16) OX=66692 GN=queC PE= 3 SV=1
MLEDKAVVVFSGGQDSTTCLFWAKERYRSLHAVIFDYGQRHKEEIQCAVDIANEQGVPYKVFDMGLLNQLTANALTRENISVQAGEAGESPSTFVAGRNHLFLSFAAVYAREMGAKHIITGVCETDFSGYPDCRDVFVKSLNVTLNLAMDEQFVIHTPLMWLNKKETWALADKMGQLEYIRAKTLTCYEGIRGDGCGTCPSCQLRQNGLDLYLREKAGAGQ

SEQ ID NO: 36230 - protein, 221 aa, Bacillus clausii
  misc_feature (1)..(221): tr|A0A268RVL4|A0A268RVL4_BACCS 7-cyano-7-deazaguanine s ynthase OS=Bacillus clausii OX=79880 GN=queC PE=3 SV=1
MLEDKAVVVFSGGQDSTTCLFWAKERYRSLHAVIFDYGQRHKEEIQCAVDIANEQGVPYKVFDMGLLNQLTANALTRENILVQAGEAGESPSTFVAGRNHLFLSFAAVYAREIGAKHIITGVCETDFSGYPDCRDVFVKSLNVTLNLAMDEQFVIHTPLMWLNKKETWALADKMGQLEYIRANTLTCYEGIRGDGCGTCPSCQLRQNGLDLYLREKAGASR

SEQ ID NO: 36231 - protein, 221 aa, Bacillus coagulans
  misc_feature (1)..(221): tr|G2TKN5|G2TKN5_BACCO 7-cyano-7-deazaguanine synthase OS=Bacillus coagulans 36D1 OX=345219 GN=queC PE=3 SV=1
MKKEKAVVVFSGGQDSTTCLFWAKKKFQEVEAVTFDYGQRHRLEIECAKNIAEELGVKQHILDMQLLNQLAPNALTRESITVKAGADGELPNTFVPGRNLLFLSFAGVLASQIGARHIVTGVCETDFSGYPDCRDIFIKSLNVTLNLSMDQQFVIHTPLMWRNKAETWALADELGAFDFVREKTLTCYNGIIADGCGECPACKLRKRGLEQYLAIRNGQSE

SEQ ID NO: 36232 - protein, 221 aa, Bacillus coagulans
  misc_feature (1)..(221): tr|A0A150JQ75|A0A150JQ75_BACCO 7-cyano-7-deazaguanine s ynthase OS=Bacillus coagulans OX=1398 GN=queC PE=3 SV=1
MKKEKAVVVFSGGQDSTTCLFWAKQKFQEVEAVTFDYGQRHRLEIACAKNIAEELGVKQHILDMQLLNQLAPNALTREDMTVKAGADGELPNTFVPGRNLLFLSFAGVLASQIGARHIVTGVCETDFSGYPDCRDIFVKSLNVTLNLSMDQQFVIHTPLMWRNKAETWALADELGAFDFVREKTLTCYNGIIADGCGECPACKLRKRGLEQYLAIRNGQPE

SEQ ID NO: 36233 - protein, 219 aa, Bacillus cohnii
  misc_feature (1)..(219): tr|A0A223KPL9|A0A223KPL9_9BACI 7-cyano-7-deazaguanine s ynthase OS=Bacillus cohnii OX=33932 GN=queC PE=3 SV=1
MKKNEKAIVVFSGGQDSTTCLFWALEQFEEVETVTFHYGQRHNLEIECAKKIASDLGVKHRVLDMSLLSQLSANALTRDDIDIEEKKGEVPNTFVDGRNLLFLSFAAVAAKQVGARHIITGVCETDFSGYPDCRDVFIKSLNVTLNLSMDYQFVIHTPLMWLNKAETWKLADELHALDYIKEKTLTCYNGIVADGCGECPACKLRKRGLEQYLETKGNN

SEQ ID NO: 36234 - protein, 220 aa, Bacillus cucumis
  misc_feature (1)..(220): tr|A0A2N5HSM4|A0A2N5HSM4_9BACI 7-cyano-7-deazaguanine s ynthase OS=Bacillus cucumis OX=1740721 GN=queC PE=3 SV= 1
MLKDEKAVVVFSGGQDSTTCLFWALKQFKEVEVVTFDYNQRHRLEIECAKNIADELGVRHHILDMSLLNQLAPNALTRNDIEVKEGEDGELPSTFVPGRNLLFISFAGVLASQVGAKHIVTGVCETDFSGYPDCRDIFIKSLNVTLNLSMDKEFVIHTPLMWLDKAETWQLADELNALDFVREKTLTCYNGVIADGCGECPACQLRRKGLEKYLTTREAL

SEQ ID NO: 36235 - protein, 220 aa, Bacillus cytotoxicus
  misc_feature (1)..(220): sp|A7GMN2|QUEC_BACCN 7-cyano-7-deazaguanine synthase OS =Bacillus cytotoxicus (strain DSM 22905 / CIP 110041 / 391-98 / NVH 391-98) OX=315749 GN=queC PE=3 SV=1
MKKEKAVVVFSGGQDSTTCLFWAMQQFAEVEAVTFNYNQRHKLEIECAANIAKELGIKHTVLDMSLLNQLAPNALTRTDIDITHEEGELPSTFVEGRNLLFLSFAAVLAKQVGARHIVTGVCETDFSGYPDCRDAFVKSLNVTLNLSMDYPFVIHTPLMWIDKADTWKLSDELGAFDFVREKTLTCYNGIIGDGCGECPACQLRKAGLDTYLQEREGAKA

SEQ ID NO: 36236 - protein, 220 aa, Bacillus cytotoxicus; identical to SEQ ID NO: 36235
  misc_feature (1)..(220): tr|A0A2S1A8G1|A0A2S1A8G1_9BACI 7-cyano-7-deazaguanine s ynthase OS=Bacillus cytotoxicus OX=580165 GN=queC PE=3 SV=1

SEQ ID NO: 36237 - protein, 218 aa, Bacillus daliensis
  misc_feature (1)..(218): tr|A0A1G9ZJ22|A0A1G9ZJ22_9BACI 7-cyano-7-deazaguanine s ynthase OS=Bacillus daliensis OX=745820 GN=queC PE=3 SV =1
MKKQEKAVVVFSGGQDSTTCLLWAMKQFDEVEAVTFDYNQRHRLEIKVAEDIAEELNIPHTVLDMSLLNQLAPNALTRDDIEIEQKEGELPTTFVDGRNHLFLTFAAIKGKQNDARHIITGVCETDFSGYPDCRDVFVKSLNVTLNLAMDYDFVLHTPLMWLDKAETWELADQLQGLEFVRNKTLTCYNGVIADGCGECPACELRNQGLDAYLNRKEA

SEQ ID NO: 36238 - protein, 219 aa, Bacillus deserti
  misc_feature (1)..(219): tr|A0A2N5M839|A0A2N5M839_9BACI 7-cyano-7-deazaguanine s ynthase OS=Bacillus deserti OX=673318 GN=queC PE=3 SV=1
MKRDKAVVVFSGGQDSTTCLFWALEQFEEVEAVTFDYNQRHKLEIDCAKAITEELNVRHHILDMSLLNQLAPNALTRADIPVSDGKDGELPSTFVPGRNLLFLSFAGILARGIGAKHIVTGVCETDFSGYPDCRDIFIKSLNVTLNLSMDENLVIHTPLMWLNKAETWEMADNLNAFDFVREKTLTCYNGIIADGCGECPACHLRQNGLNQYLAEKGVL

SEQ ID NO: 36239 - protein, 220 aa, Bacillus enclensis
  misc_feature (1)..(220): tr|A0A0V8HIT2|A0A0V8HIT2_9BACI 7-cyano-7-deazaguanine s ynthase OS=Bacillus enclensis OX=1402860 GN=queC PE=3 S V=1
MKQEKALVVFSGGQDSTTCLFWAKKEFREVEAVTFNYGQRHAAELDCAKEIAEDLNVSHHTLDMSLLNQLAPSALTRKDEAITHEEGELPSTFVPGRNLLFLSFAGVLAKQIGAKHIITGVCETDFSGYPDCRDIFVKSLNVSLNLSMDAQFVIHTPLMWIDKAQTWEMADRLGVLDYIRENTLTCYNGVKGDGCGECPACELRQRGLNQYLLKKQGGEE

SEQ ID NO: 36240 - protein, 231 aa, Bacillus endophyticus
  misc_feature (1)..(231): tr|A0A3N6DJH6|A0A3N6DJH6_9BACI 7-cyano-7-deazaguanine s ynthase OS=Bacillus endophyticus OX=135735 GN=queC PE=3 SV=1
MLKNEKAVVVFSGGQDSTTCLFWALENFAEVETVTFHYGQRHNKEIEVAEEIAKDLGVENTVLDMSLLNQLAPNALTRSDIEIEEKEGELPTTFVDGRNLLFLSFASIMAKQKGARHLVTGVCETDFSGYPDCRDIFVKSLNVTLNLSMDHNFVIHTPLMWIDKKDTWKLADELGALDYIRYNTLTCYNGIKADGCGECPACKLRKNGLDQYLAEKEEEKNATANLSERRS

SEQ ID NO: 36241 - protein, 230 aa, Bacillus endophyticus
  misc_feature (1)..(230): tr|A0A329ENG8|A0A329ENG8_9BACI 7-cyano-7-deazaguanine s ynthase OS=Bacillus endophyticus OX=135735 GN=queC PE=3 SV=1
MKNEKAVVVFSGGQDSTTCLFWALENFAEVETVTFHYGQRHNKEIEVAEEIAKDLGVENTVLDMSLLNQLAPNALTRSNIEIEEKEGELPTTFVDGRNLLFLSFASIMAKQKGARHLVTGVCETDFSGYPDCRDIFVKSLNVTLNLSMDHNFVIHTPLMWIDKKDTWRLADELGALDYIRYNTLTCYNGIKADGCGECPACKLRKNGLDQYLAEKEEEKNATANLSERRS

SEQ ID NO: 36242 - protein, 219 aa, Bacillus endozanthoxylicus
  misc_feature (1)..(219): tr|A0A5J5HTX2|A0A5J5HTX2_9BACI 7-cyano-7-deazaguanine s ynthase QueC OS=Bacillus endozanthoxylicus OX=2036016 G N=queC PE=4 SV=1
MKNEKAVVVFSGGQDSTTCLFWAIKNFAEVEAVTFHYNQRHSAEIDCAKNIASTLGIKHHILDMSLLNQLAPNALTRNEIEIEENKSGGLPSTFVPGRNLLFLSFAGVLAYQIGARHIITGVCETDFSGYPDCRDSFIKALNVSLNLSMDKSFVIHTPLMWLNKAETWELADELDAFDFIRENTLTCYNGIMADGCGECPACKLRRKGLEEYLNVRRDL

SEQ ID NO: 36243 - protein, 231 aa, Bacillus filamentosus
  misc_feature (1)..(231): tr|A0A1X7EZ87|A0A1X7EZ87_9BACI 7-cyano-7-deazaguanine s ynthase OS=Bacillus filamentosus OX=1402861 GN=queC PE= 3 SV=1
MLKNEKAVVVFSGGQDSTTCLFWALENFEEVETVTFHYGQRHNKEIEVAEEIAKDLGVENTVLDMSLLNQLAPNALTRSDIEIEEKEGELPTTFVDGRNLLFLSFASIMAKGKGARHLVTGVCETDFSGYPDCRDIFVKSLNVTLNLSMDHNFVIHTPLMWIDKKDTWKLADELGALDYIRYNTLTCYNGIKADGCGECPACKLRKNGLDQYLAEKEEEKNATANLSERRS

SEQ ID NO: 36244 - protein, 230 aa, Bacillus filamentosus
  misc_feature (1)..(230): tr|A0A0H4KFB7|A0A0H4KFB7_9BACI 7-cyano-7-deazaguanine s ynthase OS=Bacillus filamentosus OX=1402861 GN=queC PE= 3 SV=1
MKNEKAVVVFSGGQDSTTCLFWALENFEEVETVTFHYGQRHNKEIEVAEEIAKDLGVENTVLDMSLLNQLAPNALTRSDIEIEEKEGELPTTFVDGRNLLFLSFASIMAKGKGARHLVTGVCETDFSGYPDCRDIFVKSLNVTLNLSMDHNFVIHTPLMWIDKKDTWKLADELGALDYIRYNTLTCYNGIKADGCGECPACKLRKNGLDQYLAEKEEEKNATANLSERRS

SEQ ID NO: 36245 - protein, 219 aa, Bacillus firmus
  misc_feature (1)..(219): tr|W7LDW6|W7LDW6_BACFI 7-cyano-7-deazaguanine synthase OS=Bacillus firmus DS1 OX=1307436 GN=queC PE=3 SV=1
MKNDKALVVFSGGQDSTTCLFWAKERFAEVEAVTFNYNQRHKLEIECAKQIAKDLGIRHHILDMSLLNQLAPNALTRDDIEVKEGEEGGLPSTFVPGRNLLFMSFAGVLASQINARHIITGVCETDFSGYPDCRDIFIKSLNVTLNLSMDGQFVIHTPLMWLNKAETWKLADDLDALEYVRNNTLTCYNGIPADGCGECPACDLRQKGLEEYLNEKGEL

SEQ ID NO: 36246 - protein, 219 aa, Bacillus firmus
  misc_feature (1)..(219): tr|A0A366K404|A0A366K404_BACFI 7-cyano-7-deazaguanine s ynthase OS=Bacillus firmus OX=1399 GN=queC PE=3 SV=1
MKNDKALVVFSGGQDSTTCLFWAKERFAEVEAVTFNYNQRHKLEIECAQQIAKELGIRHHILDMSLLNQLAPNALTRDEIEVKDGEEGELPSTFVPGRNLLFLSFAGVLASQINAKHIITGVCETDFSGYPDCRDIFIKSLNVTLNLSMDHQFVIHTPLMWLNKAETWKLADELNALDYVREKTLTCYNGIPADGCGECPACHLRKNGLEEYLKEKEEL

SEQ ID NO: 36247 - protein, 220 aa, Bacillus flexus
  misc_feature (1)..(220): tr|A0A4P8XAM5|A0A4P8XAM5_9BACI 7-cyano-7-deazaguanine s ynthase OS=Bacillus flexus OX=86664 GN=queC PE=3 SV=1
MKNEKAIVVFSGGQDSTTCLFWALKNFKEVETVTFGYGQRHSKEIEVAEAIAKDLGVKHTILDMSLLSQLAPNALTRDDIDISQEEGELPTTFVDGRNLLFLSFAAVLAKNSGARHLVTGVCETDFSGYPDCRDVFVKSLNVTLNLSMDFEFVIHTPLMWIDKAETWGLADELGALDYVREHTLTCYNGIIADGCGECPACKLRKRGLEQYLDTKQGGEQ

SEQ ID NO: 36248 - protein, 219 aa, Bacillus foraminis
  misc_feature (1)..(219): tr|A0A4R2BMM7|A0A4R2BMM7_9BACI 7-cyano-7-deazaguanine s ynthase OS=Bacillus foraminis OX=279826 GN=queC PE=3 SV =1
MKKEKAVVVFSGGQDSTTCLFWAMEQFSEVVAVTFDYNQRHQQEIDCAKAITGELGIQHHILDMSLLNQLAPNALTRDDIEVKDGENGDLPSTFVPGRNLLFMSFAGILARQIGARHIVTGVCETDFSGYPDCRDIFIKSLNVTLNLSMDDNFVIHTPLMWLNKAETWKLADDLGAFEFVREKTLTCYNGIVSDGCGECPACRLRKNGLDEYLKMKEGL

SEQ ID NO: 36249 - protein, 222 aa, Bacillus freudenreichii
  misc_feature (1)..(222): tr|A0A448FGF4|A0A448FGF4_9BACI 7-cyano-7-deazaguanine s ynthase OS=Bacillus freudenreichii OX=1783501 GN=queC P E=3 SV=1
MLKDEKAIVVFSGGQDSTTCLFWALKTFKEVEVVTFNYNQRHKSEIECAKAIAQELDIRHHLLDMGLLNQLAPNALTRSDIEITDGEEGELPSTFVPGRNLIFLSFAAVLASQVNAKHIITGVSETDFSGYPDCRDAFIKSLNVSINLSMDQQFVIHTPLMWLDKEETWKLADDLNVLDYVREKTLTCYEGVIGDGCGECPACKLRKNGLEKYLTSRKGGKV

SEQ ID NO: 36250 - protein, 220 aa, Bacillus gaemokensis
  misc_feature (1)..(220): tr|A0A073KAR3|A0A073KAR3_9BACI 7-cyano-7-deazaguanine s ynthase OS=Bacillus gaemokensis OX=574375 GN=queC PE=3 SV=1
MKKEKAVVVFSGGQDSTTCLFWAMQQFEEVEAVTFNYNQRHKLEIDCAADIAKELGIKHTVLDMSLLNQLAPNALTRTDMEITHEEGELPSTFVDGRNLLFLSFAAVLAKQVGARHIVTGVCETDFSGYPDCRDVFVKSLNVTLNLSMDYPFVIHTPLMWIDKAETWKLSDELGAFQFVREKTLTCYNGIIGDGCGECPACKLRKAGLDTYLQEREGANV

SEQ ID NO: 36251 - protein, 221 aa, Bacillus galactosidilyticus
  misc_feature (1)..(221): tr|A0A177ZI50|A0A177ZI50_9BACI 7-cyano-7-deazaguanine s ynthase OS=Bacillus galactosidilyticus OX=217031 GN=que C PE=3 SV=1
MDDRKAVVVFSGGQDSTTCLFWALEKFEHVEAVTFQYGQRHIAELECAREICMKLNVHHHELDMTLLNQLAPNALTRDDMEIKEGDNELPSTFVPGRNLLFLSFAAVLAKQINAKHLITGVSETDFSGYPDCRDGFIKSLNVTLNLSMDETFVIHTPLMWRDKSDVWALSDQLGAFDFVKEHTLTCYNGIKASGCGECPACQLRNRGLEQYEELRQGGTIK

SEQ ID NO: 36252 - protein, 234 aa, Bacillus galactosidilyticus
  misc_feature (1)..(234): tr|A0A0Q9Y561|A0A0Q9Y561_9BACI 7-cyano-7-deazaguanine s ynthase OS=Bacillus galactosidilyticus OX=217031 GN=que C PE=3 SV=1
MREENNSGDDRKAVVVFSGGQDSTTCLFWALEKFEHVEAVTFQYGQRHIAELECAREICMKLNVHHHELDMTLLNQLAPNALTRDDMEIKEGDNELPSTFVPGRNLLFLSFAAVLAKQINAKHLITGVSETDFSGYPDCRDGFIKSLNVTLNLSMDETFVIHTPLMWRDKSDVWALSDQLGAFDFVKEHTLTCYNGIKASGCGECPACQLRNALHVNCAIVGLSNMKSFGKEEQ

SEQ ID NO: 36253 - protein, 219 aa, Bacillus ginsengihumi
  misc_feature (1)..(219): tr|A0A0A6Y3T5|A0A0A6Y3T5_9BACI 7-cyano-7-deazaguanine s ynthase OS=Bacillus ginsengihumi OX=363870 GN=queC PE=3 SV=1
MKKDKAIVVFSGGQDSTTCLFWAMQRFEEVIAVTFDYNQRHKQEIECAQNITKELGIKHHILDMGLLNQLAPNALTRNDIEVKAGENGDLPSTFVSGRNLLFLSFAGVLASQVGAKHIVTGVCETDFSGYPDCRDIFIKSLNVTLNLSMDEQFVIHTPLMWLNKAETWKLADELNAFDFVREKTLTCYNGIVADGCGECPACKLRKRGLEEYLEEKYQA

SEQ ID NO: 36254 - protein, 234 aa, Bacillus glycinifermentans
  misc_feature (1)..(234): tr|A0A1C3SEQ0|A0A1C3SEQ0_9BACI 7-cyano-7-deazaguanine s ynthase OS=Bacillus glycinifermentans OX=1664069 GN=que C PE=3 SV=1
MFNIKKNNKKAVVVLSGGLDSATCMGIAENEGYKLHALTFYYGQRHSREVEQAKKIAEHYQVQEHKIVNIDFLKELGGSALTDENIDVPKKMNQDNIPVTYVPARNLIFLSCASAYAEVIKAEAIYTGVSRVDYSGYPDCRPEFIESLNNTVRLATKRNIEGEKTNIFTPLINLSKADTITLGLKLNVPYELTTSCYNGEEYACGECDSCTLRLKGFKEAGYKDPIPYKNIQMI

SEQ ID NO: 36255 - protein, 219 aa, Bacillus glycinifermentans
  misc_feature (1)..(219): tr|A0A1C3SC93|A0A1C3SC93_9BACI 7-cyano-7-deazaguanine s ynthase OS=Bacillus glycinifermentans OX=1664069 GN=que C PE=3 SV=1
MKQEKAVVVFSGGQDSTTCLLWALQQFEEVETVTFHYNQRHQQEIEVAGNIAGKLGVKNHLLDMALLNQLAPNALTRDDIEIEAKEGELPSTFVPGRNLVFLSFASILAYQIGARHIVTGVCETDFSGYPDCRDEFVKSCNVTVNLAMERPFVIHTPLMWLNKAETWKLADELGALDFVKNETLTCYNGIIADGCGECPACKLRANGYQEYMKMKRERA

SEQ ID NO: 36256 - protein, 218 aa, Bacillus gobiensis
  misc_feature (1)..(218): tr|A0A0M5JB60|A0A0M5JB60_9BACI 7-cyano-7-deazaguanine s ynthase OS=Bacillus gobiensis OX=1441095 GN=queC PE=3 S V=1
MRKEKAVVVFSGGQDSTTCLVWALQEFAEVETVTFHYNQRHQLETEVAGKIAKKLNVKNHLLDMSLLNQLAPNALTRDEMEIKMNEDGLPSTFVPGRNLVFLSFASILAYQIGARHIVTGVCETDFSGYPDCRDSFIKSCNVTVNLAMDKPFVIHTPLMWLNKKETWKLADELHALDLVRNETLTCYNGIIADGCGECPACVLRKNGLNEYLHEKGGN

SEQ ID NO: 36257 - protein, 223 aa, Bacillus halodurans
  misc_feature (1)..(223): sp|Q9KAP3|QUEC_BACHD 7-cyano-7-deazaguanine synthase OS =Bacillus halodurans (strain ATCC BAA-125 / DSM 18197 / FERM 7344 / JCM 9153 / C-125) OX=272558 GN=queC PE=3 S V=1
MENKKKKAVVVFSGGQDSTTCLFWALKTFDEVATVTFDYGQRHAEEIECAKEIAEQLGVSFRVLDMTLLNQLTESALTREEIAVKDGENGELPSTFVPGRNQLFLSFAAVYAKQIGARHLVTGVCETDYSGYPDCRDVFIKSLNVTLNLAMDDQFVIHTPLMWLDKAETWKLADELGALDFVREKTLTCYHGIRGDGCGECPACMLRRRGLELYLAEKEGDRA

SEQ ID NO: 36258 - protein, 223 aa, Bacillus halodurans; identical to SEQ ID NO: 36257
  misc_feature (1)..(223): tr|A0A4Y7X1Y6|A0A4Y7X1Y6_BACHO 7-cyano-7-deazaguanine s ynthase OS=Bacillus halodurans OX=86665 GN=queC PE=3 SV =1

SEQ ID NO: 36259 - protein, 108 aa, Bacillus halotolerans
  misc_feature (1)..(108): tr|A0A2S9WDN6|A0A2S9WDN6_9BACI 7-cyano-7-deazaguanine s ynthase (Fragment) OS=Bacillus halotolerans OX=260554 G N=C7B72_22095 PE=3 SV=1
DIFIGVSEVDYSGYPDCRPEYIEAFAKMANLATKVGTQGNKLNIHAPLSHLSKAQTIHAGLKLGVDYSLTVSCYRADHTGRACGQCDSCTYRKKGFIEAGVTDPTLYY

SEQ ID NO: 36260 - protein, 219 aa, Bacillus halotolerans
  misc_feature (1)..(219): tr|A0A2S9WEN6|A0A2S9WEN6_9BACI 7-cyano-7-deazaguanine s ynthase OS=Bacillus halotolerans OX=260554 GN=queC PE=3 SV=1
MKKEKAIVVFSGGQDSTTCLLWALKEFEEVETVTFHYNQRHSQEVEVAKGIADKLGVKNHLLDMSLLNQLAPNALTRNDIEIEAKDGELPSTFVPGRNLVFLSFASILAYQIGARHIITGVCETDFSGYPDCRDEFVKSCNVTVNLAMEKPFVIHTPLMWLNKAETWKLADELGALDFVKNNTLTCYNGIIADGCGECPACHLRSRGYEEYMAMKGERA

SEQ ID NO: 36261 - protein, 219 aa, Bacillus haynesii
  misc_feature (1)..(219): tr|W7RBR0|W7RBR0_9BACI 7-cyano-7-deazaguanine synthase OS=Bacillus haynesii OX=1925021 GN=queC PE=3 SV=1
MKQEKAIVVFSGGQDSTTCLLWALRQFQEVEAVTFQYNQRHKQEIEVAKKIAEKLGVKHHLLDMELLNQLAPNALTRDDIEIEAKEGELPSTFVPGRNLVFLSFASILAYQVGARHIITGVCETDFSGYPDCRDEFVKSCNVTVNLAMERPFVIHTPLMWLNKAETWELADELDALDFVKNETLTCYNGIIADGCGECPACKLRANGYNEYMKMKKERA

SEQ ID NO: 36262 - protein, 222 aa, Bacillus haynesii
  misc_feature (1)..(222): tr|W7R682|W7R682_9BACI 7-cyano-7-deazaguanine synthase OS=Bacillus haynesii OX=1925021 GN=M769_0124655 PE=3 SV =1
MEKALLMLSGGPDSSTLAYWIKHKGYELHTLTFNFGEEEGEAEKRTANFIAKDISKSHKFISFESVLREFYMEDDPIHILRIAHLPSPIKAFGAGIAISLAASYAAENDIHHLFYAVHKDDTIFRENNYEFFNLLSKAISIELGREFRIHTPFLDKTKAEVLKIGFDLGVPLEETWSCASNSTIHCGWCDPCKNRQKAFKDNGITDNTLYENVNSKNSSVNV

SEQ ID NO: 36263 - protein, 73 aa, Bacillus hemicellulosilyticus
  misc_feature (1)..(73): tr|W4QFV2|W4QFV2_9BACI 7-cyano-7-deazaguanine synthase OS=Bacillus hemicellulosilyticus JCM 9152 OX=1236971 GN =JCM9152_2374 PE=3 SV=1
MDQQFVIHTPLMWLNKAETWELADQLNALSFVRERTLTCYHGVRGDGCGECPSCKLRMQGLKQYENQKERREE

SEQ ID NO: 36264 - protein, 137 aa, Bacillus hemicellulosilyticus
  misc_feature (1)..(137): tr|W4QFS6|W4QFS6_9BACI 7-cyano-7-deazaguanine synthase OS=Bacillus hemicellulosilyticus JCM 9152 OX=1236971 GN =JCM9152_2373 PE=3 SV=1
MKKDKAVVVFSGGQDSTTCLLWALKEFKEVATVTFDYGQRHYEEINCAKDIAKELEVSFHLLDMTFMNQLSPNALTHHDMKVEDGVAGELPSTFVPGRNHLFLSFAAVYAHSIGAKHIVTGVCETDYSGYPDCVINS

SEQ ID NO: 36265 - protein, 224 aa, Bacillus hisashii
  misc_feature (1)..(224): tr|A0A267TX26|A0A267TX26_9BACI 7-cyano-7-deazaguanine s ynthase OS=Bacillus hisashii OX=996558 GN=queC PE=3 SV= 1
MLKDEKAVVVFSGGQDSTTCLFWALNTFQNVEAVTFDYNQRHKKEIECAKSIAEELKVKHHILDMNLLNQLSPSALTRMDIDVKAGKSGELPSSFVPGRNLIFLSMAAILAQQIGAKHLVTGVCETDFSGYPDCRDVFVKSLNVTINLAMGQEFVIHTPLMWLDKAATWKMADDLNVLKLIKERTLTCYEGIIGDGCGKCPACQLRRQGYEKYMQMKANVSTAI

SEQ ID NO: 36266 - protein, 223 aa, Bacillus horikoshii
  misc_feature (1)..(223): tr|A0A1Y0CKZ0|A0A1Y0CKZ0_9BACI 7-cyano-7-deazaguanine s ynthase OS=Bacillus horikoshii OX=79883 GN=queC PE=3 SV =1
MKQKEKAMVVFSGGQDSTTCLIWAMKEFDEVEAVTFHYGQRHELEIDCATSIAKELGVKHRILDMSLLGQLTPNALTRDDIEIEEKEGELPSTFVDGRNLLFLSFAAVAAKQIGARHIVTGVCETDFSGYPDCRDVFIKSMNVTLNLSMDYPFVIHTPLMWLNKEETWELADDLDALDFVRTKTLTCYNGVIADGCGECPACKLRKRGLDDYLDKKNKGVVSS

SEQ ID NO: 36267 - protein, 223 aa, Bacillus horikoshii
  misc_feature (1)..(223): tr|A0A5D4TCR3|A0A5D4TCR3_9BACI 7-cyano-7-deazaguanine s ynthase OS=Bacillus horikoshii OX=79883 GN=queC PE=3 SV =1
MKQKEKAMVVFSGGQDSTTCLIWAMKEFDEVEAVTFHYGQRHELEIDCATSIAKELGVKHRILDMSLLGQLTPNALTRDNIEIEEKEGELPSTFVDGRNLLFLSFAAVAAKQIGARHIVTGVCETDFSGYPDCRDVFIKSMNVTLNLSMDYPFVIHTPLMWLNKEETWELADDLDALDFVRTKTLTCYNGIIADGCGECPACKLRKRGLDDYLVKKNKGVVSS

SEQ ID NO: 36268 - protein, 219 aa, Bacillus horneckiae
  misc_feature (1)..(219): tr|A0A2N0ZEZ5|A0A2N0ZEZ5_9BACI 7-cyano-7-deazaguanine s ynthase OS=Bacillus horneckiae OX=549687 GN=queC PE=3 S V=1
MKKEKAVVVFSGGQDSTTCLFWALDKFEEVVAVTFDYNQRHAAEIECAKAIAEELGVEHHILDMGLLNQLAPNALTRSEIVVKDGTGGSLPSTFVPGRNLLFMSFAGVLASQLGAKHIITGVCETDFSGYPDCRDIFVKSLNVTLNLSMDEQFVIHTPLMWLNKAETWEMADKLGCFSFVRKKTLTCYNGVVSDGCGECPACKLRKQGLEDYLKVRAAI

SEQ ID NO: 36269 - protein, 224 aa, Bacillus hwajinpoensis
  misc_feature (1)..(224): tr|A0A4U1MMP7|A0A4U1MMP7_9BACI 7-cyano-7-deazaguanine s ynthase OS=Bacillus hwajinpoensis OX=208199 GN=queC PE= 3 SV=1
MSKKAVIVLSGGLDSTTCMGMAKEKGYELYPITFHYGQKHNREVEQAKKVADYYDAPDHRIVNISFLNQIGGSALTDDSIDVPKDMDEDEIPVTYVPARNMIFLSLASAYAEVIGAEAIYIGVSAVDYSGYPDCRPEFIQSMNETVNLATKAGATGSEMKIETPLIDLTKADTVSEGLRLNVPYDLTTSCYNGEEEACGECDSCRLRLKGFEEAGAVDPIPYKS

SEQ ID NO: 36270 - protein, 220 aa, Bacillus indicus
  misc_feature (1)..(220): tr|A0A084H2U0|A0A084H2U0_BACID 7-cyano-7-deazaguanine s ynthase OS=Bacillus indicus OX=246786 GN=queC PE=3 SV=1
MKNEKALVVFSGGQDSTTCLFWAKKQFKEVEAVTFNYNQRHKLEIDVAEQIAKELDVRHHLLDMSLLNQLAPNALTRDDIAIEHKEGELPSTFVPGRNLLFLTFASVLAKQIGAKHIVTGVCETDFSGYPDCRDVFVKSCNVTINLAMDDQFVIHTPLMWIDKAETWKLADELSALEYVRDKTLTCYNGIIADGCGECPACRLRKKGLDEYISAKGGEAS

SEQ ID NO: 36271 - protein, 218 aa, Bacillus infantis
  misc_feature (1)..(218): tr|U5LCZ8|U5LCZ8_9BACI 7-cyano-7-deazaguanine synthase OS=Bacillus infantis NRRL B-14911 OX=1367477 GN=queC PE =3 SV=1
MKNEKAIVVFSGGQDSTTCLFWAKKNFKEVEAVTFDYGQRHIAELECARRIAADLAIQHHVLDMSLLNQLAPNALTRKDIKVEEKEGELPSTFVPGRNLLFLSFAGVLASQVAAKHIITGVCETDFSGYPDCRDQFVKSLNVTLNLSMDSQFVIHTPLMWLNKAETWKLADELGALEYVRKQTLTCYEGVIADGCGECPACRLRKRGLEDYLAERQGV

SEQ ID NO: 36272 - protein, 218 aa, Bacillus infantis
  misc_feature (1)..(218): tr|A0A5D4R8V6|A0A5D4R8V6_9BACI 7-cyano-7-deazaguanine s ynthase OS=Bacillus infantis OX=324767 GN=queC PE=3 SV= 1
MKNEKAIVVFSGGQDSTTCLFWAKNNFKEVEAVTFDYGQRHIAELDSARRIAADLAIKHHVLDMSLLNQLAPNALTRKDIKVEEKEGELPSTFVPGRNLLFLSFAGVLASQVAAKHIITGVCETDFSGYPDCRDQFVKSLNVTLNLSMDSQFVIHTPLMWLNKAETWKLADELGALDYVREQTLTCYEGIIADGCGECPACRLRKRGLEDYLAERQGV

SEQ ID NO: 36273 - protein, 219 aa, Bacillus intestinalis
  misc_feature (1)..(219): tr|A0A0K6LLU3|A0A0K6LLU3_9BACI 7-cyano-7-deazaguanine s ynthase OS=Bacillus intestinalis OX=1963032 GN=queC PE= 3 SV=1
MKKEKAIVVFSGGQDSTTCLLWALKEFEEVETVTFHYNQRHSQEIEVAKSIAEKLGVKNHLLDMSLLNQLAPNALTRNDIDIEVKDGELPSTFVPGRNLVFLSFASILAYQIGARHIITGVCETDFSGYPDCRDEFVKSCNVTVNLAMEKPFVIHTPLMWLNKAETWKLADELDALDFVKNNTLTCYNGIIADGCGECPACHLRSKGYEEYMAMKGERA

SEQ ID NO: 36274 - protein, 212 aa, Bacillus kochii
  misc_feature (1)..(212): tr|A0A248TEM7|A0A248TEM7_9BACI 7-cyano-7-deazaguanine s ynthase OS=Bacillus kochii OX=859143 GN=queC PE=3 SV=1
MVVFSGGQDSTTCLFWALEHFTEVVAVTFDYNQRHAIEIDCAKAITADLQIEHHILDMTLLNQLAPNALTRSNIDVKNGEDGALPSTFVPGRNLVFLSFAGILAYQIGARHIITGVCETDFSGYPDCRDQFIKSLNVTLNLSMERPFVIHTPLMWLNKAETWAMADDFGKLDYVRNKTLTCYNGVIADGCGECPACELRMQGLTQYLQVKMS

SEQ ID NO: 36275 - protein, 221 aa, Bacillus koreensis
  misc_feature (1)..(221): tr|A0A0M0LJP2|A0A0M0LJP2_9BACI 7-cyano-7-deazaguanine s ynthase OS=Bacillus koreensis OX=284581 GN=queC PE=3 SV =1
MKQEKAVVVFSGGQDSTTCLFWALQNFKEVETVTFQYGQRHSQEIDVAKSIAAELGVENTVLDMSLLNQLAPNALTRGDIEIEQKEGELPSTFVDGRNHLFLSFAAVMAKQKGARHLVTGVCETDFSGYPDCRDVFVKSLNVTLNLAMDYQFVIHTPLMWINKAETWGLADELGALDFVREKTLTCYNGVIADGCGECPACLLRKRGLDEYLEQKNGGERK

SEQ ID NO: 36276 - protein, 222 aa, Bacillus krulwichiae
  misc_feature (1)..(222): tr|A0A1X9MBI9|A0A1X9MBI9_9BACI 7-cyano-7-deazaguanine s ynthase OS=Bacillus krulwichiae OX=199441 GN=queC_1 PE= 3 SV=1
MRNEKAVVVFSGGQDSTTCLLWALDQFKEVATVTFDYGQRHLDEINCAREIAEELGVSFHVLDMKLINQLSANALTRKDIEVTAGEEGELPSTFVPGRNHLFLSFAAVYAQTIGARHIITGVCETDFSGYPDCRDSFVKSLNVTLNLAMDEQFVIHTPLMWLNKAETWKLADELNALDFVREKTLTCYHGIRGDGCGNCPACDLRKKGLESYLEKKQGGTKL

SEQ ID NO: 36277 - protein, 402 aa, Bacillus krulwichiae
  misc_feature (1)..(402): tr|A0A1X9MD55|A0A1X9MD55_9BACI 7-cyano-7-deazaguanine s ynthase OS=Bacillus krulwichiae OX=199441 GN=queC_2 PE= 4 SV=1
MQFTIDSLSNLHTILLKDVNYDYKGKSTIILDLVTTMGAIYCADVKTSKVNDKPRYIELTIPVFNPDIWTKNVIQIEELVKWVSEDTMKITFIGSSDTIDGYVNGLIPGTNNVVTLFSGGLDSFAGAYYNYKNNIKSDYLGFINKGEEKTKQLDVKEFYQQIFDDATEIILIDKPIKKKQTFIQSTRSLLYLALAIAKAHFNSSKEVYLYENGILSLNPEIQNRYTTKTTHPKTMFIYKSLLEKLSIDIKINHPFLFMTKGQITNDMNAEFKKAIEHTFTCGQGRSHPERSHSGQCGICIPCVLRKISLAAYDNEIFDVNYEYPYDVKISDIKEGNYRKDYASNINYFKTYYDLIKSNQIYYQLQIREKYYEEDPKFRISNQKMFSKFAEEYERFMKKYAPY

SEQ ID NO: 36278 - protein, 222 aa, Bacillus kyonggiensis
  misc_feature (1)..(222): tr|A0A4U1D9A3|A0A4U1D9A3_9BACI 7-cyano-7-deazaguanine s ynthase OS=Bacillus kyonggiensis OX=1037680 GN=queC PE= 3 SV=1
MLKDEKAIVVFSGGQDSTTCLFWALKTFKEVEAVTFNYNQRHKQEIDCAIEIAKELNVRHHILDMNLLNQLAPNALTRDDIEIKEGEDGELPSTFVPGRNLIFLSFAAVLASQVGAKHIITGVCETDFSGYPDCRDSFVKSLNVSINLSMDKEFVIHTPLMWLDKAETWGLANDLNALDFVREKTLTCYNGMIGDGCGECPSCKLRENGLDNYLSTREGAAK

SEQ ID NO: 36279 - protein, 220 aa, Bacillus lehensis
  misc_feature (1)..(220): tr|A0A4Y7WQ06|A0A4Y7WQ06_9BACI 7-cyano-7-deazaguanine s ynthase OS=Bacillus lehensis OX=300825 GN=queC PE=3 SV= 1
MKKEKAIVVFSGGQDSTTCLFWALEQFTDVSVLIFDYGQRHKNEIKVAKSIAVEAGVRAKVIDLQVLSQLNANALTNPTIAIEEGQEGELPNTFVPGRNHLFLSFAAVVAKDLGAKHIITGVCETDFSGYPDCRDVFVKSLNVTLNLAMNEQFVIHTPLMWLNKEETWAMADQLGKLRFIREKTLTCYEGVIGDGCGRCPACKLRMNGLQAYLQKGEASV

SEQ ID NO: 36280 - protein, 220 aa, Bacillus lehensis
  misc_feature (1)..(220): tr|A0A060LTZ0|A0A060LTZ0_9BACI 7-cyano-7-deazaguanine s ynthase OS=Bacillus lehensis G1 OX=1246626 GN=queC PE=3 SV=1
MKKEKAIVVFSGGQDSTTCLFWALEQFTDVSVLIFDYGQRHKNEIKVAKSIAAEAGVRAKVIDLQVLSQLNANALTNPTIAIEEGQEGDLPNTFVPGRNHLFLSFAAVVAKDLGAKHIITGVCETDFSGYPDCRDVFVKSLNVTLNLAMNEQFVIHTPLMWLNKEETWAMADQLGKLRFIREKTLTCYEGVIGDGCGRCPACKLRMNGLQAYLQKGEASV

SEQ ID NO: 36281 - protein, 226 aa, Bacillus lentus
  misc_feature (1)..(226): tr|A0A2X4YPY3|A0A2X4YPY3_BACLE 7-cyano-7-deazaguanine s ynthase OS=Bacillus lentus OX=1467 GN=queC PE=3 SV=1
MMKKDKAVVVFSGGQDSTTCLFWALERFAEVEAVTFDYNQRHQSEITCAKKITEELGVKHHILDMSLLHQLAPNALTRDEIDVEDGENGDLPSTFVPGRNLLFMSFAGVLAHQIKAKHLITGVSETDFSGYPDCTDMFMKSLNVTLNLSMEKDFTIHTPLMWLNKEETWELADQLEAFEFIRENTLTCYNGIIADGCGECPACKLRKRGLDDYLKHRKEMDNDVWL

SEQ ID NO: 36282 - protein, 219 aa, Bacillus licheniformis
  misc_feature (1)..(219): sp|Q65KI6|QUEC_BACLD 7-cyano-7-deazaguanine synthase OS =Bacillus licheniformis (strain ATCC 14580 / DSM 13 / J CM 2505 / NBRC 12200 / NCIMB 9375 / NRRL NRS-1264 / Gib son 46) OX=279010 GN=queC PE=3 SV=1
MKQEKAIVVFSGGQDSTTCLLWALRQFQEVEAVTFQYNQRHKQEIEVAKKIAAKLGVKHHLLDMELLNQLAPNALTRDDIEIEAKEGELPSTFVPGRNLVFLSFASILAYQVGARHIITGVCETDFSGYPDCRDEFVKSCNVTVNLAMERPFVIHTPLMWLNKAETWELADELDALDFVKNETLTCYNGIIADGCGECPACKLRANGYNEYMKMKKERA

SEQ ID NO: 36283 - protein, 219 aa, Bacillus licheniformis; identical to SEQ ID NO: 36282
  misc_feature (1)..(219): tr|A0A1Y0YE30|A0A1Y0YE30_BACLI 7-cyano-7-deazaguanine s ynthase OS=Bacillus licheniformis OX=1402 GN=queC PE=3 SV=1

SEQ ID NO: 36284 - protein, 220 aa, Bacillus litoralis
  misc_feature (1)..(220): tr|A0A179T0F5|A0A179T0F5_9BACI 7-cyano-7-deazaguanine s ynthase OS=Bacillus litoralis OX=152268 GN=queC PE=3 SV =1
MKNEKAVVVFSGGQDSTTCLFWALKQFKEVIAVTFNYNQRHSLEIDVAKSITEELGIKHHILDMSLLNQLAPNALTREDIEIEHKDGELPSTFVPGRNLLFLSFATILANQIGAKHIVTGVCETDFSGYPDCRDAFVKSCNVTLNLALDKPFVIHTPLMWINKAETWKLADDLGVLDFIRKKTLTCYNGIIAEGCGECPACRLRKNGLDEFLLEKGVVEK

SEQ ID NO: 36285 - protein, 220 aa, Bacillus litoralis
  misc_feature (1)..(220): tr|A0A5C6W3P2|A0A5C6W3P2_9BACI 7-cyano-7-deazaguanine s ynthase OS=Bacillus litoralis OX=152268 GN=queC PE=3 SV =1
MKNEKAVVVFSGGQDSTTCLFWALKQFKEVVAVTFNYNQRHSLEIEVAESIAEELGVQHHVLDMSLLNQLAPNALTRSDIEIEQKEGELPSTFVPGRNLLFLSFATILANQIGAKHIVTGVCETDFSGYPDCRDAFVKSCNVTLNLALDKPFVIHTPLMWINKAETWKLADDLGVLDFVRQKTLTCYNGIIAEGCGECPACELRKKGLDDYLLEKGVDGQ

SEQ ID NO: 36286 - protein, 219 aa, Bacillus loiseleuriae
  misc_feature (1)..(219): tr|A0A0K9GQ74|A0A0K9GQ74_9BACI 7-cyano-7-deazaguanine s ynthase OS=Bacillus loiseleuriae OX=1679170 GN=queC PE= 3 SV=1
MKQEKAVVVFSGGQDSTTCLFWAMKQFKEVEAVTFDYNQRHRLEIDCAKQIADELGIKHHILDMSLLNQLAPNALTRDDIAVSDGEEGELPSTFVPGRNLLFLSFAGVLASQVGAKHIITGVCETDFSGYPDCRDIFIKSLNVTLNLSMDQPFVIHTPLMWMNKAEAWGMADELDVLEFVRNKTLTCYNGIMADGCGDCPACKLRRKGLDDYLSQKVKN

SEQ ID NO: 36287 - protein, 223 aa, Bacillus lonarensis
  misc_feature (1)..(223): tr|A0A1G6H6W4|A0A1G6H6W4_9BACI 7-cyano-7-deazaguanine s ynthase OS=Bacillus lonarensis OX=1464122 GN=queC PE=3 SV=1
MKKNDSAVVVFSGGQDSTTCLFWALEKFDHVSALTFAYGQRHAAEIACAKDIARKAGVPLRILEVPTLNDITSNALTRNDIEITDQNENNALPSTFVPGRNHLFLSFAAIYAKEIGAKHLVTGVCETDFSGYPDCRDIFIKSLNVTLNLAMDTDFVIHTPLMWLNKTATWALADQLGKLETVQHDTLTCYEGIKGTGCTTCPACKLRAAGLAAYLEQKAGAPQ

SEQ ID NO: 36288 - protein, 221 aa, Bacillus luciferensis
  misc_feature (1)..(221): tr|A0A1E2W1N3|A0A1E2W1N3_9BACI 7-cyano-7-deazaguanine s ynthase OS=Bacillus luciferensis OX=178774 GN=queC PE=3 SV=1
MKNEKAIVVFSGGQDSTTCLFWAMQNFGEVEAVTFNYNQRHKLELDVAADICKELNIPHHILDMSLLNQLAPNALTRSDIDITHEEGELPSTFVDGRNLLFLSFAAVLAKQKGAKHIITGVCETDFSGYPDCRDIFVKSLNVTLNLSMDYPFVIHTPLMWIDKADTWKLADDLGAFEYVKNKTLTCYNGIISDGCGECPACELRQAGLDRYLQSKGAAKNV

SEQ ID NO: 36289 - protein, 220 aa, Bacillus luti; identical to SEQ ID NO: 36197
  misc_feature (1)..(220): tr|A0A1K0AKZ4|A0A1K0AKZ4_9BACI 7-cyano-7-deazaguanine s ynthase OS=Bacillus luti OX=2026191 GN=queC PE=3 SV=1

SEQ ID NO: 36290 - protein, 220 aa, Bacillus manliponensis
  misc_feature (1)..(220): tr|A0A073K1R4|A0A073K1R4_9BACI 7-cyano-7-deazaguanine s ynthase OS=Bacillus manliponensis OX=574376 GN=queC PE= 3 SV=1
MKKEKAVVVFSGGQDSTTCLFWAMQQFAEVETVTFNYNQRHKLEIDCAAAIAKELGVKHTVLDMSLLNQLAPNALTRTDIDITETEGELPSTFVDGRNLLFLSFAGVFAKQVGARHIVTGVCETDFSGYPDCRDIFVKSLNVTLNLSMDYPFVIHTPLMWIDKAETWKLADDLGAFEYVREKTLTCYNGIIGDGCGECPACKLRKAGLDTYLQEREGEKA

SEQ ID NO: 36291 - protein, 194 aa, Bacillus manliponensis
  misc_feature (1)..(194): tr|A0A073KCB8|A0A073KCB8_9BACI 7-cyano-7-deazaguanine s ynthase OS=Bacillus manliponensis OX=574376 GN=BAMA_192 75 PE=3 SV=1
MLVDRRDSKSILILASGGIDSTALIHYYVSQGFNIKGIHFNYGQMACKKEEQAVKKIGEYYDIEIESKSFGFSFNHIKGEFIARNPLFILAASNLLPKTYSKIGIGIHSGTPYYDCTRTFINDCQKILDGYFAGTVIIEAPFLLYDKRSVLKFCLRNQVPIELTYSCEFNDEEPCGECLSCKDRRILSELSGSM

SEQ ID NO: 36292 - protein, 220 aa, Bacillus marisflavi
  misc_feature (1)..(220): tr|A0A0M0GS84|A0A0M0GS84_9BACI 7-cyano-7-deazaguanine s ynthase OS=Bacillus marisflavi OX=189381 GN=queC PE=3 S V=1
MKNDKAVVVFSGGQDSTTCLFWAKKNFKEVEAVTFNYGQRHVAELDCAREIAEELNIPHHVLDMSLLNQLAPSALTRDEDIVQKDGELPSTFVPGRNLMFLSFAGVLAKQIGAKHIVTGVCETDFSGYPDCRDVFVKSLNVTLNLSMDDEFVIHTPLMWIDKAETWELADQLGAFEYVQEKTLTCYNGIKGAGCGECPACELRQRGLDQYLERRVGGDTE

SEQ ID NO: 36293 - protein, 220 aa, Bacillus marisflavi
  misc_feature (1)..(220): tr|A0A5D4RWL3|A0A5D4RWL3_9BACI 7-cyano-7-deazaguanine s ynthase OS=Bacillus marisflavi OX=189381 GN=queC PE=3 S V=1
MKNDKAVVVFSGGQDSTTCLFWAKKNFKEVEAVTFNYGQRHVAELDCAREIAQELDIPHHVLDMSLLNQLAPSALTRDEDIVQKDGELPSTFVPGRNLMFLSFAGVLAKQIGAKHIVTGVCETDFSGYPDCRDVFVKSLNVTLNLSMDDEFVIHTPLMWIDKAETWELADQLGAFEYVQEKTLTCYNGIKGAGCGECPACELRQRGLDQYLERRAGGDTE

SEQ ID NO: 36294 - protein, 222 aa, Bacillus marmarensis
  misc_feature (1)..(222): tr|U6SQ33|U6SQ33_9BACI 7-cyano-7-deazaguanine synthase OS=Bacillus marmarensis DSM 21297 OX=1188261 GN=queC PE =3 SV=1
MKQDKAVVVFSGGQDSTTCLFWALKEFKEVATVTFDYGQRHSKEIECARKIADELGVSFHVLDMGLLNQLSPNALTRADIEVEAGDDGELPSTFVEGRNLLFLSFAAIYGKQIGAKHIITGVCETDFSGYPDCRDIFVKSLNVTLNLSMDDQFVIHTPLMWLNKEQTWKLADDLGALSFVREKTLTCYNGIIGDGCGECPACVLRKKGLDDYLASTEAGEES

SEQ ID NO: 36295 - protein, 220 aa, Bacillus megaterium
  misc_feature (1)..(220): tr|D5DZE3|D5DZE3_BACMQ 7-cyano-7-deazaguanine synthase OS=Bacillus megaterium (strain ATCC 12872 / QMB1551) OX =545693 GN=queC PE=3 SV=1
MKNEKAIVVFSGGQDSTTCLFWALKNFKEVETVTFQYGQRHSQEIEVAKAIAADLGVKHTVLDMSLLNQLAPNALTRDDIEIEQKEGELPTTFVDGRNLLFLSFAAVLAKNSGGRHIVTGVCETDFSGYPDCRDVFVKSLNVTLNLSMDFEFVIHTPLMWIDKAETWALADELGALEYVREKTLTCYNGIVADGCGECPACQLRKRGLDQYMQTKEGGEE

SEQ ID NO: 36296 - protein, 221 aa, Bacillus megaterium
  misc_feature (1)..(221): tr|A0A1I2SYY7|A0A1I2SYY7_BACME 7-cyano-7-deazaguanine s ynthase OS=Bacillus megaterium OX=1404 GN=queC PE=3 SV= 1
MMKNEKAIVVFSGGQDSTTCLFWALKNFKEVETVTFQYGQRHSQEIEVAKAIAADLGVKHTVLDMSLLNQLAPNALTRDDIEIEQKEGELPTTFVDGRNLLFLSFAAVLAKNSGGRHIVTGVCETDFSGYPDCRDVFVKSLNVTLNLSMDFEFVIHTPLMWIDKAETWALADELGALEYVREKTLTCYNGIVADGCGECPACQLRKRGLDQYMQTKEGGEE

SEQ ID NO: 36297 - protein, 218 aa, Bacillus mesonae
  misc_feature (1)..(218): tr|A0A3Q9QY84|A0A3Q9QY84_9BACI 7-cyano-7-deazaguanine s ynthase OS=Bacillus mesonae OX=1193713 GN=queC PE=3 SV= 1
MKNEKAVVVFSGGQDSTTCLFWALKNFREVEAVTFDYNQRHRLEIECAERIANEVGVRHHILDMSLLNQLAPNALTRSEIEVKDGAEGELPSTFVPGRNLLFLSFAGVLASQIGAKHIITGVCETDFSGYPDCRDMFVKSLNVTLNLAMDDNFVIHTPLMWINKAQTWALADELGKLDFVREKTLTCYNGIISDGCGECPACVLRKRGLEEYLSGGSK

SEQ ID NO: 36298 - protein, 219 aa, Bacillus methanolicus
  misc_feature (1)..(219): tr|I3E8Y2|I3E8Y2_BACMM 7-cyano-7-deazaguanine synthase OS=Bacillus methanolicus (strain MGA3 / ATCC 53907) OX= 796606 GN=queC PE=3 SV=1
MKKDKAIVVFSGGQDSTTCLFWAMKQFEEVIAVTFDYNQRHKMEIECAKNITKELGIKHHILDMSLLNQLAPNALTRDNIPVKAGEEGELPSTFVPGRNLLFLSFAGVLANQVGAKHIVTGVCETDFSGYPDCRDIFIKSLNVTLNLSMDYQFVIHTPLMWLNKAETWKLADELGAFDFVREKTLTCYNGIIADGCGECPACKLRRKGLEDYLKIRKEL

SEQ ID NO: 36299 - protein, 219 aa, Bacillus methanolicus
  misc_feature (1)..(219): tr|I3DVL5|I3DVL5_BACMT 7-cyano-7-deazaguanine synthase OS=Bacillus methanolicus PB1 OX=997296 GN=queC PE=3 SV= 1
MKKEKAIVVFSGGQDSTTCLFWAMKQFEEVIAVTFDYNQRHKTEIECAKNITKELGIKHHILDMSLLNQLAPNALTRDEIPVKDGGEGELPSTFVPGRNLLFLSFAGVLANQVGAKHIVTGVCETDFSGYPDCRDVFIKSLNVTLNLSMDYQFVIHTPLMWLNKAETWKLADELGAFDFVREKTLTCYNGIIADGCGECPACKLRKKGLEEYLKVRGGL

SEQ ID NO: 36300 - protein, 220 aa, Bacillus mobilis
  misc_feature (1)..(220): tr|A0A386V0A5|A0A386V0A5_9BACI 7-cyano-7-deazaguanine s ynthase OS=Bacillus mobilis OX=2026190 GN=queC PE=3 SV= 1
MKKEKAVVVFSGGQDSTTCLFWAIEQFAEVEAVTFNYNQRHKLEIDCAAEIAKELGIKHTVLDMSLLNQLAPNALTRTDLEITHEEGELPSTFVDGRNLLFLSFAAVLAKQVGARHIVTGVCETDFSGYPDCRDVFVKSLNVTLNLSMDYPFVIHTPLMWIDKAETWKLSDELGAFEFVREKTLTCYNGIIGDGCGECPACQLRKAGLDTYLQEREGASN

SEQ ID NO: 36301 - protein, 220 aa, Bacillus mobilis; identical to SEQ ID NO: 36197
  misc_feature (1)..(220): tr|A0A1K0ADF7|A0A1K0ADF7_9BACI 7-cyano-7-deazaguanine s ynthase OS=Bacillus mobilis OX=2026190 GN=queC PE=3 SV= 1

SEQ ID NO: 36302 - protein, 221 aa, Bacillus muralis
  misc_feature (1)..(221): tr|A0A1B3XSN6|A0A1B3XSN6_9BACI 7-cyano-7-deazaguanine s ynthase OS=Bacillus muralis OX=264697 GN=queC PE=3 SV=1
MNKKEKAVVVFSGGQDSTTCLFWAMERFEEVEAVTFDYNQRHSLEIECAQQIAKELGINHHILDMSLLNQLAPNALTRSDIAVEDGEDGELPSTFVPGRNLLFLSFAGVLASQIGAKHIVTGVCETDFSGYPDCRDVFVKSMNVTLNLSMDQSFVIDTPLMWLNKEETWELADQLGAFEFVRDKTLTCYNGVISDGCGECPACKLRQKGLDDYVSRRGDLS

SEQ ID NO: 36303 - protein, 220 aa, Bacillus mycoides
  misc_feature (1)..(220): sp|A9VKR8|QUEC_BACMK 7-cyano-7-deazaguanine synthase OS =Bacillus mycoides (strain KBAB4) OX=315730 GN=queC PE= 3 SV=1
MKKEKAVVVFSGGQDSTTCLFWAIQQFEEVEAVTFNYNQRHKLEIDCAVEIAKELGIKHTILDMSLLNQLAPNALTRTDMEITHEEGELPSTFVDGRNLLFLSFAAVLAKQVGARHIVTGVCETDFSGYPDCRDVFVKSLNVTLNLSMDYPFVIHTPLMWIDKAETWKLSDELGAFEFVREKTLTCYNGIIGDGCGECPACQLRKAGLDTYLQEREGASN

SEQ ID NO: 36304 - protein, 220 aa, Bacillus mycoides
  misc_feature (1)..(220): tr|A0A1D3N4G4|A0A1D3N4G4_BACMY 7-cyano-7-deazaguanine s ynthase OS=Bacillus mycoides OX=1405 GN=queC PE=3 SV=1
MKKEKAVVVFSGGQDSTTCLFWAIQQFAEVEAVTFNYNQRHKLEIDCAAEIAKELGIKHTVLDMSLLNQLAPNALTRTDMEITHEEGELPSTFVDGRNLLFLSFAAVLAKQVGARHIVTGVCETDFSGYPDCRDVFVKSLNVTLNLSMDYPFVIHTPLMWIDKAETWKLSDELGAFEFVREKTLTCYNGIIGDGCGECPACQLRKAGLDTYLQEREGASN

SEQ ID NO: 36305 - protein, 219 aa, Bacillus nakamurai
  misc_feature (1)..(219): tr|A0A150F287|A0A150F287_9BACI 7-cyano-7-deazaguanine s ynthase OS=Bacillus nakamurai OX=1793963 GN=queC PE=3 S V=1
MKKEKAVVVFSGGQDSTTCLLWALQNFEEVETVTFHYNQRHQEEIDVAKAIAEKLGVKNHLLDMSLLNQLAPNALTRDDIEIEAKDGELPTTFVPGRNLVFLSFASILAYQIGARHIITGVCETDFSGYPDCRDEFVKSCNVTVNLAMEKSFVIHTPLMWLNKAETWKLADELDALDFVKNNTLTCYNGIIADGCGECPACLLRNKGYDEYMKMKGERK

SEQ ID NO: 36306 - protein, 222 aa, Bacillus nanhaiisediminis
  misc_feature (1)..(222): tr|A0A562QR59|A0A562QR59_9BACI 7-cyano-7-deazaguanine s ynthase OS=Bacillus nanhaiisediminis OX=688079 GN=queC PE=3 SV=1
MRNEKAVVVFSGGQDSTTCLLWALKQFKEVATVTFDYGQRHSYEIECAREIAEEIGVSFHVLDMKLINQLSANALTRSDIEVKEGENGELPSTFVPGRNHLFLSFAAVYAQSIGARHIITGVCETDFSGYPDCRDVFVKSLNVTLNLAMEEQFVIHTPLMWLNKAETWKLADDLGALSFIREKTLTCYEGIRGDGCGKCPACKLRKQGLDSYLAQKQGGGSL

SEQ ID NO: 36307 - protein, 221 aa, Bacillus nealsonii
  misc_feature (1)..(221): tr|A0A2N0Z2Y5|A0A2N0Z2Y5_9BACI 7-cyano-7-deazaguanine s ynthase OS=Bacillus nealsonii OX=115979 GN=queC PE=3 SV =1
MLKDEKAVVVFSGGQDSTTCLFWALNTFKEVEAVTFNYNQRHKEEIECAKKIAKDFKVNHHILDMALLNQLAPNALTRNDIEVKEGENGELPSTFVPGRNLLFLSFAAVLASQVGAKHIITGVCETDFSGYPDCRDSFVKSLNVSINLAMDSQFVIHTPLMWLDKADTWKLADDLQQLDYIRTQTLTCYEGIIGNGCGECPACKLRKAGLDQYLTSKQKAE

SEQ ID NO: 36308 - protein, 219 aa, Bacillus nealsonii
  misc_feature (1)..(219): tr|R9CJ29|R9CJ29_9BACI 7-cyano-7-deazaguanine synthase OS=Bacillus nealsonii AAU1 OX=1202533 GN=queC PE=3 SV=1
MKNEKAVVVFSGGQDSTTCLFWAMKNFKEVVAVTFDYNQRHITEIECAKKITEELGIKHHILDMSLLNQLAPNALTREDIAVEEGKDGALPSTFVPGRNLLFMSFAGVLASQIQAKHIVTGVCETDFSGYPDCRDIFIKSLNVTLNLSMDNQFVIHTPLMWLNKAETWGLADQLNAFDFVREKTLTCYNGIVADGCGECPACKLRKKGLDDYLAGRKGV

SEQ ID NO: 36309 - protein, 220 aa, Bacillus notoginsengisoli
  misc_feature (1)..(220): tr|A0A417YXU9|A0A417YXU9_9BACI 7-cyano-7-deazaguanine s ynthase OS=Bacillus notoginsengisoli OX=1578198 GN=queC PE=3 SV=1
MKDEKAVVVFSGGQDSTTCLFWAMEQFAEVTAVTFDYNQRHLTEIESAKNITKELGVKHHILDMSLLNQLAPNALTRDEIEVKDGEDGGLPSTFVPGRNLLFMSFAGVLASQIGAKHIITGVSETDFSGYPDCRDMFVKSLNVTLNLSMDQNFAIHTPLMWLNKAEVWKLADELGAFDFVRIKTLTCYNGVIADGCGECPACVLRKKGLDDYLAERNELV

SEQ ID NO: 36310 - protein, 218 aa, Bacillus obstructivus
  misc_feature (1)..(218): tr|A0A1L8ZNE6|A0A1L8ZNE6_9BACI 7-cyano-7-deazaguanine s ynthase OS=Bacillus obstructivus OX=1914540 GN=queC PE= 3 SV=1
MKKEKAIVVFSGGQDSTTCLFWALKRFEEVIAVTFDYNQRHKAEIDCAINITQELGIVHHILDMQLLNQLAPNALTRVDIDVTDGEEGELPSTFVPGRNLLFLSFAGVVASQVGAKHIITGVCETDFSGYPDCKDIFIKSLNVTLNLAMDKQFIIHTPLMWINKAETWKLADELGALDFVRTKTLTCYNGIIAEGCGECPACKLRKRGYDDYIKTKVR

SEQ ID NO: 36311 - protein, 219 aa, Bacillus oceanisediminis
  misc_feature (1)..(219): tr|A0A562JA81|A0A562JA81_9BACI 7-cyano-7-deazaguanine s ynthase OS=Bacillus oceanisediminis OX=665099 GN=queC P E=3 SV=1
MKKDKALVVFSGGQDSTTCLFWAKERFGEVEAVTFNYNQRHKLEIECAQEIAKELGVKHHILDMSLLNQLAPNALTRDEIEVKDGEEGELPSTFVPGRNLLFLSFAGVLASQISAKHIITGVCETDFSGYPDCRDVFIKSLNVTLNLSMDQQFVIHTPLMWLNKAETWKLADELNALDYVREKTLTCYNGIPSDGCGECPACHLRRKGLEEYLQEKGEL

SEQ ID NO: 36312 - protein, 219 aa, Bacillus oceanisediminis
  misc_feature (1)..(219): tr|A0A160MB32|A0A160MB32_9BACI 7-cyano-7-deazaguanine s ynthase OS=Bacillus oceanisediminis 2691 OX=1196031 GN= queC PE=3 SV=1
MKNDKALVVFSGGQDSTTCLFWAKERFEEVEAVTFNYNQRHKLEIECAQQIAKELGIRHHILDMSLLNQLAPNALTRDEIKVKDGEEGGLPSTFVPGRNLLFLSFAGVLASQINAKHIITGVCETDFSGYPDCRDIFIKSLNVTLNLSMDEQFVIHTPLMWLNKAETWKLADELNALDYVREKTLTCYNGIPADGCGECPACHLRKNGLEEYLKEKEEL

SEQ ID NO: 36313 - protein, 222 aa, Bacillus okhensis
  misc_feature (1)..(222): tr|A0A0B0IGP6|A0A0B0IGP6_9BACI 7-cyano-7-deazaguanine s ynthase OS=Bacillus okhensis OX=333138 GN=queC PE=3 SV= 1
MRNEKAVVVFSGGQDSTTCLLWALDQFQEVATVTFDYGQRHHDEIECAREIAEELGVSFHVLDMTLINQLSANALTRKDIEVKEGENGELPSTFVPGRNHLFLSFAAVYAQAIGARHIITGVCETDFSGYPDCRDSFVKSLNVTLNLAMDEQFVIHTPLMWLNKAETWKLADQLDALAFIREKTLTCYHGIRGDGCGECPSCNLRKKGLEDYLKEKQGGSDV

SEQ ID NO: 36314 - protein, 223 aa, Bacillus okuhidensis; identical to SEQ ID NO: 36257
  misc_feature (1)..(223): tr|A0A0M0KJD7|A0A0M0KJD7_9BACI 7-cyano-7-deazaguanine s ynthase OS=Bacillus okuhidensis OX=136160 GN=queC PE=3 SV=1

SEQ ID NO: 36315 - protein, 220 aa, Bacillus oleivorans
  misc_feature (1)..(220): tr|A0A285CMS5|A0A285CMS5_9BACI 7-cyano-7-deazaguanine s ynthase OS=Bacillus oleivorans OX=1448271 GN=queC PE=3 SV=1
MKKEKAIVVFSGGQDSTTCLYWALQHFQEVEAVTFNYNQRHKLEIEVAENIARELKVKHTVLDLSLLNQLAPNALTRENIQIEQKDGELPTTFVDGRNLLFLSFAAILAKQSGARHIITGVCETDFSGYPDCRDVFIKSLNVTLNLAMDYRFVIHTPLMWLNKAETWKLADQLGVLEYVRQKTLTCYNGILSDGCGTCPACLLRKKGLDEYLSMKEGIKH

SEQ ID NO: 36316 - protein, 220 aa, Bacillus pacificus; identical to SEQ ID NO: 36197
  misc_feature (1)..(220): tr|A0A1J9ZDI7|A0A1J9ZDI7_9BACI 7-cyano-7-deazaguanine s ynthase OS=Bacillus pacificus OX=2026187 GN=queC PE=3 S V=1

SEQ ID NO: 36317 - protein, 220 aa, Bacillus pacificus
  misc_feature (1)..(220): tr|A0A5C4ZGN7|A0A5C4ZGN7_9BACI 7-cyano-7-deazaguanine s ynthase OS=Bacillus pacificus OX=2026187 GN=queC PE=3 S V=1
MKKEKAVVVFSGGQDSTTCLFWAIEQFAEVEAVTFNYNQRHKLEIDCATEIAKELGIKHTVLDMSLLNQLAPNALTRTDMEITHEEGELPSTFVDGRNLLFLSFAAVLAKQVGARHIVTGVCETDFSGYPDCRDVFVKSLNVTLNLSMDYPFVIHTPLMWIDKAETWKLSDELGAFEFVREKTLTCYNGIIGDGCGECPACQLRKAGLDTYLQEREGASN

SEQ ID NO: 36318 - protein, 219 aa, Bacillus paralicheniformis
  misc_feature (1)..(219): tr|A0A1Q8GGH9|A0A1Q8GGH9_9BACI 7-cyano-7-deazaguanine s ynthase OS=Bacillus paralicheniformis OX=1648923 GN=que C PE=3 SV=1
MKQEKAIVVFSGGQDSTTCLLWALRQFQEVEAVTFQYNQRHREEIEVAKKIAEKLGVKHHLLDMELLNQLAPNALTRDDIEIEAKEGELPSTFVPGRNLVFLSFASILAYQVSARHIITGVCETDFSGYPDCRDEFVKSCNVTVNLAMERPFVIHTPLMWLNKAETWELADELDALDFVKNETLTCYNGIIADGCGECPACKLRANGYNEYMKMKKERA

SEQ ID NO: 36319 - protein, 219 aa, Bacillus paralicheniformis; identical to SEQ ID NO: 36188
  misc_feature (1)..(219): tr|A0A5C1Y0P8|A0A5C1Y0P8_9BACI 7-cyano-7-deazaguanine s ynthase OS=Bacillus paralicheniformis OX=1648923 GN=que C PE=3 SV=1

SEQ ID NO: 36320 - protein, 220 aa, Bacillus paramycoides
  misc_feature (1)..(220): tr|A0A1J9VFN7|A0A1J9VFN7_9BACI 7-cyano-7-deazaguanine s ynthase OS=Bacillus paramycoides OX=2026194 GN=queC PE= 3 SV=1
MKKEKAVVVFSGGQDSTTCLFWAMQQFAEVEAVTFNYNQRHKLEIDCAAEIAKELGIKHTVLDMSLLNQLAPNALTRTDMEITHEEGELPSTFVDGRNLLFLSFASVLAKQVGARHIVTGVCETDFSGYPDCRDVFVKSLNVTLNLSMDYPFVIHTPLMWIDKAETWKLSDELGAFEFVREKTLTCYNGIIGDGCGECPACQLRKAGLDTYLQEREGANN

SEQ ID NO: 36321 - protein, 220 aa, Bacillus paranthracis; identical to SEQ ID NO: 36226
  misc_feature (1)..(220): tr|A0A1J9YPI9|A0A1J9YPI9_9BACI 7-cyano-7-deazaguanine s ynthase OS=Bacillus paranthracis OX=2026186 GN=queC PE= 3 SV=1

SEQ ID NO: 36322 - protein, 220 aa, Bacillus paranthracis; identical to SEQ ID NO: 36197
  misc_feature (1)..(220): tr|A0A4P9F5Y0|A0A4P9F5Y0_9BACI 7-cyano-7-deazaguanine s ynthase OS=Bacillus paranthracis OX=2026186 GN=queC PE= 3 SV=1

SEQ ID NO: 36323 - protein, 219 aa, Bacillus persicus
  misc_feature (1)..(219): tr|A0A1H8AH04|A0A1H8AH04_9BACI 7-cyano-7-deazaguanine s ynthase OS=Bacillus persicus OX=930146 GN=queC PE=3 SV= 1
MKNDKAVVVFSGGQDSTTCLFWAMEQFADVTAVTFDYNQRHITEIECAKKITKELGITHHILDMSLLNQLAPNALTRQNIEVTDGEEGELPSTFVPGRNLLFMSFAGVLASQIGAKHIVTGVCETDFSGYPDCRDVFIKSLNVTLNLSMDQQFVIHTPLMWLNKAETWKMADELGAFDFVREKTLTCYNGIVADGCGECPACKLRKNGLDEYLNVRKER

SEQ ID NO: 36324 - protein, 222 aa, Bacillus pseudofirmus
  misc_feature (1)..(222): tr|A0A1Q9PTH2|A0A1Q9PTH2_BACPF 7-cyano-7-deazaguanine s ynthase OS=Bacillus pseudofirmus OX=79885 GN=queC PE=3 SV=1
MKQDKAVVVFSGGQDSTTCLFWALKEFKEVATVTFDYGQRHSKEIECARKIADELGVSFHVLDMGLLNQLSPNALTRADIEVKAGDDGELPSTFVEGRNLLFLSFAAIYGKQIGAKHIITGVCETDFSGYPDCRDIFVKSLNVTLNLSMDDQFVIHTPLMWLNKEQTWKLADDLGALSFVREKTLTCYNGIIGDGCGECPACVLRKKGLDDYLASTEAGAES

SEQ ID NO: 36325 - protein, 222 aa, Bacillus pseudofirmus; identical to SEQ ID NO: 36294
  misc_feature (1)..(222): tr|D3FSX7|D3FSX7_BACPE 7-cyano-7-deazaguanine synthase OS=Bacillus pseudofirmus (strain OF4) OX=398511 GN=queC PE=3 SV=1

SEQ ID NO: 36326 - protein, 220 aa, Bacillus pseudomycoides
  misc_feature (1)..(220): tr|A0A2A8BCW0|A0A2A8BCW0_9BACI 7-cyano-7-deazaguanine s ynthase OS=Bacillus pseudomycoides OX=64104 GN=queC PE= 3 SV=1
MKKEKAVVVFSGGQDSTTCLFWAMQQFAEVEAVTFNYNQRHKLEIDCAADIAKELGIKHTVLDMSLLNQLAPNALTRTDMEITHEEGELPSTFVDGRNLLFLSFAAVLAKQVGARHIVMGVCETDFSGYPDCRDVFVKSLNVTLNLSMDYPFVIHTPLMWIDKAETWKLSDELGAFEFVREKTLTCYNGIIGDGCGECPACKLRKAGLDTYLQEREGANA

SEQ ID NO: 36327 - protein, 220 aa, Bacillus pseudomycoides
  misc_feature (1)..(220): tr|A0A2C3W895|A0A2C3W895_9BACI 7-cyano-7-deazaguanine s ynthase OS=Bacillus pseudomycoides OX=64104 GN=queC PE= 3 SV=1
MKKEKAVVVFSGGQDSTTCLFWAMQQFAEVEAVTFNYNQRHKLEIDCAADIAKELGIKHTVLDMSLLNQLAPNALTRTDMEITHEEGELPSTFVDGRNLLFLSFAAVLAKQVGARHIVTGVCETDFSGYPDCRDVFVKSLNVTLNLSMDYPFVIHTPLMWIDKAETWKLSDELDAFEFVREKTLTCYNGIIGDGCGECPACKLRKAGLDTYLQEREGANA

SEQ ID NO: 36328 - protein, 218 aa, Bacillus pumilus
  misc_feature (1)..(218): sp|A8FCH9|QUEC_BACP2 7-cyano-7-deazaguanine synthase OS =Bacillus pumilus (strain SAFR-032) OX=315750 GN=queC P E=3 SV=1
MKNEKAVVVFSGGQDSTTCLLWALQQFEEVETVTFHYNQRHQEEIDVAKRIADKLGVKNHLLDMSLLNQLAPNALTRDDIDIEEKEGELPSTFVPGRNLVFLSFASILAYQIGARHIITGVCETDFSGYPDCRDEFVKSCNVTVNLAMEKPFVIHTPLMWLNKAETWKLADELNALDFVKNETLTCYNGIISDGCGECPACKLRKKGYDTYMEMKEAK

SEQ ID NO: 36329 - protein, 218 aa, Bacillus pumilus; identical to SEQ ID NO: 36206
  misc_feature (1)..(218): tr|A0A2P1F4U6|A0A2P1F4U6_BACPU 7-cyano-7-deazaguanine s ynthase OS=Bacillus pumilus OX=1408 GN=queC PE=3 SV=1

SEQ ID NO: 36330 - protein, 234 aa, Bacillus safensis
  misc_feature (1)..(234): tr|A0A5C0WAQ8|A0A5C0WAQ8_9BACI 7-cyano-7-deazaguanine s ynthase OS=Bacillus safensis OX=561879 GN=queC PE=3 SV= 1
MQCCTVVPSAKGGEQKMKNEKAVVVFSGGQDSTTCLLWALQQFEEVETVTFHYNQRHQEEIDVAKRIADKLGVKNHLLDMSLLNQLAPNALTRDDIDIEEKEGELPSTFVPGRNLVFLSFASILAYQIGARHIITGVCETDFSGYPDCRDEFVKSCNVTVNLAMEKPFVIHTPLMWLNKAETWKLADELNALDFVKNETLTCYNGIISDGCGECPACKLRKNGYDTYMEMKEAK

SEQ ID NO: 36331 - protein, 218 aa, Bacillus safensis; identical to SEQ ID NO: 36206
  misc_feature (1)..(218): tr|A0A494TVX9|A0A494TVX9_9BACI 7-cyano-7-deazaguanine s ynthase OS=Bacillus safensis OX=561879 GN=queC PE=3 SV= 1

SEQ ID NO: 36332 - protein, 220 aa, Bacillus salacetis
  misc_feature (1)..(220): tr|A0A3A1R0P1|A0A3A1R0P1_9BACI 7-cyano-7-deazaguanine s ynthase OS=Bacillus salacetis OX=2315464 GN=queC PE=3 S V=1
MKNEKALVVFSGGQDSTTCLIWAKKEFKEVEAVTFNYGQRHLDELACAKEIAEEFNIQHHVLDMSLLNQLSPSALTRNEEITEKEGELPSTFVPGRNLLFLSFAGVLARNIGAGHIITGVCETDFSGYPDCRDMFVKSFNVTLNLALDEGYAVHTPLMWLDKKATWKWADEMGMLQYVREKTLTCYNGIRGDGCGECPSCRLRNKGLREYLSEKKGGGSL

SEQ ID NO: 36333 - protein, 223 aa, Bacillus salarius
  misc_feature (1)..(223): tr|A0A3R9QMV2|A0A3R9QMV2_9BACI 7-cyano-7-deazaguanine s ynthase OS=Bacillus salarius OX=284579 GN=queC PE=3 SV= 1
MSLADEKAVVVFSGGQDSTTCLFWALERFKEVSAVTFDYGQRHDKEIKVAEDIAQELGVEHKVLDMSLLNQLAPNALTRDDMEVKAGENGEMPTTFVEGRNLLFFSFASIYASQWGAKHVVTGVCETDYSGYPDCRDVFVKSLNVSLNLGIGKEFVLHTPLMWLDKKETWELADNLGRLSYVKNKTLTCYHGILGDGCGECPACQLRQAGYDQYRKEKEREAL

SEQ ID NO: 36334 - protein, 221 aa, Bacillus salarius
  misc_feature (1)..(221): tr|A0A3R9Q0V5|A0A3R9Q0V5_9BACI 7-cyano-7-deazaguanine s ynthase OS=Bacillus salarius OX=284579 GN=queC PE=3 SV= 1
MADEKAVVVFSGGQDSTTCLFWALERFKEVSTVTFDYGQRHDKEIKVAEDIAAELGIEHQIMDMSLLNQLAPNALTRDDMEVHAGEDGELPTTFVEGRNLLFFSFASIFASQRGAKHVVTGVCETDYSGYPDCRDVFVKSLNVSLNLGMGKEFVLHTPLMWLDKKETWALADKLGKLSYVKNKTLTCYHGIQGDGCGECPACELRQAGYDQYMQEKEREAL

SEQ ID NO: 36335 - protein, 221 aa, Bacillus salsus
  misc_feature (1)..(221): tr|A0A1H0Q5J0|A0A1H0Q5J0_9BACI 7-cyano-7-deazaguanine s ynthase OS=Bacillus salsus OX=930152 GN=queC PE=3 SV=1
MMLKNEKAIIVFSGGQDSTTCLFWAMKQFKEVEAVTFNYNQRHVTEIECAKNIASELGIKHHILDMSLLNQLAPNALTRDDIEVKDGEEGELPSTFVPGRNLLFMSFAGVLARQVNAKHIVTGVCETDFSGYPDCRDIFIKSLNVTLNLSMDAQFVIHTPLMWINKAETWEMADDLGAFEFVQEKTLTCYNGIIAEGCGECPACKLRQKGLDDYLEIRGER

SEQ ID NO: 36336 - protein, 218 aa, Bacillus selenatarsenatis
  misc_feature (1)..(218): tr|A0A0A8X2P0|A0A0A8X2P0_9BACI 7-cyano-7-deazaguanine s ynthase OS=Bacillus selenatarsenatis SF-1 OX=1321606 GN =queC PE=3 SV=1
MKNEKAVVVFSGGQDSTTCLFWAIKEFGEVEAVTFDYNQRHRTEIHCAEEIASELGIKHHVLDMSLLNQLAPNALTRNDIDVEDGEGGELPSTFVPGRNLLFLSFAGVLASQVRAKHIVTGVCETDFSGYPDCRDVFIKSLNVTLNLSMDQNFVIHTPLMWLNKAQTWKMADDLDAFEFVRSRTLTCYNGIIADGCGVCPACKLRKKGLDKFLEGDVS

SEQ ID NO: 36337 - protein, 219 aa, Bacillus selenitireducens
  misc_feature (1)..(219): tr|D6XXU4|D6XXU4_BACIE 7-cyano-7-deazaguanine synthase OS=Bacillus selenitireducens (strain ATCC 700615 / DSM 15326 / MLS10) OX=439292 GN=queC PE=3 SV=1
MLNEEKALVVFSGGQDSTTCLFWALERFKEVETVTFDYHQRHSQEIEVAEGIAKELGVKNTVLDLSLLNQLSANALTRSDIAIEQKDRELPSTFVPGRNHLFLSFAGVMAKSMGAKHIVTGVCETDFSGYPDCRDVFIKSLNVTLNLAMDDTFVIDTPLMWLNKKETWALADELGALDFVREKTLTCYNGILADGCGECPACELRKNGLDDYLNEKVNG

SEQ ID NO: 36338 - protein, 218 aa, Bacillus shackletonii
  misc_feature (1)..(218): tr|A0A0Q3WYN4|A0A0Q3WYN4_9BACI 7-cyano-7-deazaguanine s ynthase OS=Bacillus shackletonii OX=157838 GN=queC PE=3 SV=1
MKKKEKAVVVFSGGQDSTTCLFWAKERFEEVVAVTFDYNQRHKLEIECAKNITNQLGVKHHILDMSLLNQLAPNALTRDDIQVKDGENGSLPSTFVPGRNLLFMSFAGVLASQVGAKHIVTGVCETDFSGYPDCRDIFVKSLNVTLNLSMDQDFVIHTPLMWLDKCETWKLADELDAFDFVREKTLTCYNGIIADGCGECPACKLRKNGLEEYLKIRK

SEQ ID NO: 36339 - protein, 219 aa, Bacillus siamensis; identical to SEQ ID NO: 36194
  misc_feature (1)..(219): tr|A0A2K9KCQ5|A0A2K9KCQ5_9BACI 7-cyano-7-deazaguanine s ynthase OS=Bacillus siamensis OX=659243 GN=queC PE=3 SV =1

SEQ ID NO: 36340 - protein, 219 aa, Bacillus siamensis
  misc_feature (1)..(219): tr|A0A268DYA5|A0A268DYA5_9BACI 7-cyano-7-deazaguanine s ynthase OS=Bacillus siamensis OX=659243 GN=queC PE=3 SV =1
MKKEKAVVVFSGGQDSTTCLLWALQNFEEVETVTFHYNQRHQEEIDVAKSIAEKLGVKNHLLDMSLLNQLAPNALTRDDIEIEAKDGELPTTFVPGRNLVFLSFASILAYQIGARHIITGVCETDFSGYPDCRDEFVKSCNVTINLAMEKPFVIHTPLMWLNKAETWKLADELGALDFVKNNTLTCYNGIIADGCGECPACLLRNKGYDEYMKMKGERN

SEQ ID NO: 36341 - protein, 221 aa, Bacillus simplex
  misc_feature (1)..(221): tr|A0A270AHN0|A0A270AHN0_9BACI 7-cyano-7-deazaguanine s ynthase OS=Bacillus simplex OX=1478 GN=queC PE=3 SV=1
MKKKEKAVVVFSGGQDSTTCLFWALERFEEVEAVTFDYNQRHSLEIECAQNIAKELGVNHHILDMSLLNQLAPNALTRSDIAVADGEEGELPSTFVPGRNLLFLSFAGVLASQIGAKHIITGVCETDFSGYPDCRDVFIKSLNVTLNLSMDQSFVIDTPLMWLNKEETWELADQLGAFDFVREKTLTCYNGIISDGCGDCPACNLRKKGLDDYVSRRKVLS

SEQ ID NO: 36342 - protein, 221 aa, Bacillus simplex
  misc_feature (1)..(221): tr|A0A098FKH2|A0A098FKH2_9BACI 7-cyano-7-deazaguanine s ynthase OS=Bacillus simplex OX=1478 GN=queC PE=3 SV=1
MKKKEKAVVVFSGGQDSTTCLFWALERFEEVEAVTFDYNQRHSLEIECAQNIAKELGVNHHILDMSLLNQLAPNALTRSDIAVADGEEGELPSTFVPGRNLLFLSFAGVLASQIGAKHIVTGVCETDFSGYPDCRDVFIKSLNVTLNLSMDQSFVIDTPLMWLNKEETWELADQLGAFDFVREKTLTCYNGIISDGCGDCPACNLRKKGLDDYVSRRKVLS

SEQ ID NO: 36343 - protein, 221 aa, Bacillus smithii
  misc_feature (1)..(221): tr|G9QLL9|G9QLL9_9BACI 7-cyano-7-deazaguanine synthase OS=Bacillus smithii 7_3_47FAA OX=665952 GN=queC PE=3 SV =1
MLNEEKAVVVFSGGQDSTTCLFWALKNFQEVQAVTFDYGQRHRKEIEVAKTIAHDLGVKHTVLDMSLLNQLAPNALTRKEIEIEQKEGELPTTFVDGRNLLFLSFAAVLAKQSGARHIITGVCETDFSGYPDCRDVFIKSLNVTLNLAMDYEFVIHTPLMWLNKAQTWELADQLGALEYVRENTLTCYNGIMADGCGHCPACKLRKRGLDEYLSKKNGGSK

SEQ ID NO: 36344 - protein, 221 aa, Bacillus smithii
  misc_feature (1)..(221): tr|A0A0H4P0S4|A0A0H4P0S4_9BACI 7-cyano-7-deazaguanine s ynthase OS=Bacillus smithii OX=1479 GN=queC PE=3 SV=1
MLNEEKAVVVFSGGQDSTTCLFWALKNFQEVQAVTFDYGQRHRKEIEVAKTIADDLGVKHTVLDMSLLNQLAPNALTRKEIEIEQKEGELPTTFVDGRNLLFLSFAAVLAKQSGARHIITGVCETDFSGYPDCRDVFIKSLNVTLNLAMDYEFVIHTPLMWLNKAQTWELADQLGALDYVRENTLTCYNGIMADGCGHCPACKLRKRGLNEYLSKKNGGSK

SEQ ID NO: 36345 - protein, 222 aa, Bacillus solimangrovi
  misc_feature (1)..(222): tr|A0A1E5LFC3|A0A1E5LFC3_9BACI 7-cyano-7-deazaguanine s ynthase OS=Bacillus solimangrovi OX=1305675 GN=queC PE= 3 SV=1
MKKLGKAIVVFSGGQDSTTCLFWALKHFEQVETVTFDYNQRHNHEIECAKEIAKELGVNNTVLDMSLLNQLAPNALTRNDIEVKAGEEGELPNTFVPGRNLMFLSFAAVMAKQINAQHLITGVCETDFSGYPDCRDIFIKSLNVTLNLSMDDEFYIHTPLMHLNKAETWELADELGVLDYVREKTLTCYNGVRGDGCGTCPACELRQRGLEQYLAQKSGETL

SEQ ID NO: 36346 - protein, 231 aa, Bacillus sonorensis
  misc_feature (1)..(231): tr|M5PFF4|M5PFF4_9BACI 7-cyano-7-deazaguanine synthase OS=Bacillus sonorensis L12 OX=1274524 GN=queC PE=3 SV=1
MKKNEKKAVVVLSGGLDSATCMGIAEKEGYMLHAITFDYGQRHSREVEQAKKIAAHYQVHDHRIVNIEFFKEIGGSALTDEHIDVPKKMNQDAIPATYVPARNLIFLSCAAAYAEVIKAEAIYTGVSGVDYSGYPDCRPEFIDSLNHTIRLATKRNIEGKKTNIYTPLINLSKADTVTLGLRLHVPYELTTSCYNGEEYACGECDSCTLRLKGFKEAGCKDPIPYKNTQVI

SEQ ID NO: 36347 - protein, 206 aa, Bacillus sonorensis
  misc_feature (1)..(206): tr|M5P828|M5P828_9BACI 7-cyano-7-deazaguanine synthase OS=Bacillus sonorensis L12 OX=1274524 GN=BSONL12_04698 PE=3 SV=1
MAYWIKHQGYELHTLTFNFGEEEGEAEKRTANFIAKDISKSHKFISFESVLREFYMEDDPIHILRIAHLPSPIKAFGAGIAISLAASYAAENDIHHLFYAVHKDDTIFRENNYEFFNLLSKAISIELGREFKIHTPFLDKTKAEVLKIGFDLGVPLEETWSCASNSTIHCGWCDPCKNRQKAFKDNGITDNTLYENVNSKNSSVNV

SEQ ID NO: 36348 - protein, 221 aa, Bacillus sp.
  misc_feature (1)..(221): tr|A0A0Q9I3F4|A0A0Q9I3F4_9BACI 7-cyano-7-deazaguanine s ynthase OS=Bacillus sp. Root239 OX=1736499 GN=queC PE=3 SV=1
MMKNEKAIVVFSGGQDSTTCLFWALKNFKEVETVTFQYGQRHSQEIEVAKAIAADLGVKHTVLDMSLLNQLAPNALTRDDIEIEQKEGELPTTFVDGRNLLFLSFAAVLAKNNGGRHIVTGVCETDFSGYPDCRDVFVKSLNVTLNLSMDFEFVIHTPLMWIDKAETWALADELGALEYVREKTLTCYNGIVADGCGECPACQLRKRGLDQYLQTKEGGEK

SEQ ID NO: 36349 - protein, 220 aa, Bacillus sp.
  misc_feature (1)..(220): tr|A0A3S2TRP1|A0A3S2TRP1_9BACI 7-cyano-7-deazaguanine s ynthase OS=Bacillus sp. M5HDSG1-1 OX=2499688 GN=queC PE =3 SV=1
MLRDEKAVVVFSGGQDSTTCLFWALETFKEVEVVTFNYNQRHKAEIQCAIDIAGELGVKHHLLDMELLNQLAPNALTRSDIEVKEGENGELPSTFVPGRNLVFLSFASILASQIGAKHIITGVCETDFSGYPDCRDSFVKSLNVTLNLAMDTSFVIHTPLMWLDKAETWKLADELGRLDYVREKTLTCYEGVIGDGCGQCPSCVLRKAGLDKYLQEKEAN

SEQ ID NO: 36350 - protein, 218 aa, Bacillus sporothermodurans
  misc_feature (1)..(218): tr|A0A150KMS9|A0A150KMS9_9BACI 7-cyano-7-deazaguanine s ynthase OS=Bacillus sporothermodurans OX=46224 GN=queC PE=3 SV=1
MKKKEKAVVVFSGGQDSTTCLFWAMERFEEVVAVTFDYNQRHKQEIECAKNIANELGVPHHILDMSLLNQLAPNALTRENIQVKDGENGSLPSTFVPGRNLLFLSFAGVLASQVGAKHIVTGVCETDFSGYPDCRDIFVKSLNVTLNLSMDQDFVIHTPLMWLDKSETWKLADELHAFEFVREKTLTCYNGIIADGCGECPACKLRKNGLEEFLKIRN

SEQ ID NO: 36351 - protein, 234 aa, Bacillus stratosphericus
  misc_feature (1)..(234): tr|M5RHY5|M5RHY5_9BACI 7-cyano-7-deazaguanine synthase OS=Bacillus stratosphericus LAMA 585 OX=1236481 GN=queC PE=3 SV=1
MQLCAVVRVCKRRKRKMKNEKAVVVFSGGQDSTTCLLWALQQFKEVETVTFHYNQRHQEEIDVAKRIADKLGVKNHLLDMSLLNQLAPNALTRDDIDIEEKEGELPSTFVPGRNLVFLSFASILAYQIGARHIITGVCETDFSGYPDCRDEFVKSCNVTVNLAMEKPFVIHTPLMWLNKAETWKLADELNALDFVKNETLTCYNGIISDGCGECPACKLRKNGYDTYMDMKEAN

SEQ ID NO: 36352 - protein, 218 aa, Bacillus stratosphericus; identical to SEQ ID NO: 36206
  misc_feature (1)..(218): tr|A0A4Y9K128|A0A4Y9K128_9BACI 7-cyano-7-deazaguanine s ynthase OS=Bacillus stratosphericus OX=293386 GN=queC P E=3 SV=1

SEQ ID NO: 36353 - protein, 218 aa, Bacillus subterraneus
  misc_feature (1)..(218): tr|A0A3R9FD89|A0A3R9FD89_9BACI 7-cyano-7-deazaguanine s ynthase OS=Bacillus subterraneus OX=285983 GN=queC PE=3 SV=1
MKKEKAVVVFSGGQDSTTCLFWAMKEFSSVEAVTFDYNQRHRTEIDCARAITSELGIKHHVLDMSLLNQLAPNALTREEIAVEDGEEGGLPSTFVPGRNLLFMSFAGVLASQVQAKHIVTGVCETDFSGYPDCRDIFVKSLNVTLNLSMDQDFVIHTPLMWLNKAETWKLADELGALDFVRTKTLTCYNGIIADGCGVCPACKLRKKGLDQFLEGDVS

SEQ ID NO: 36354 - protein, 428 aa, Bacillus subterraneus
  misc_feature (1)..(428): tr|A0A0D6Z7U6|A0A0D6Z7U6_9BACI ATPase OS=Bacillus subte rraneus OX=285983 GN=UB32_17855 PE=4 SV=1
MELVYKFNADDDYPVPEGGNLCEMNDYRYTFWNSQLETLPNYISTKGIDLLMLSLAVYGADRYFLRKDAADGWKRDIHIHLPVLNIDSMNEKKELIKDILDFLSGDNWKVSFRKRDFTDKEKVYRDKYEKSKKVKIHANRICMLSGGLDSFIGAIDLLQDNVNDTIFVSHYGGGKGVREYQELLQKEFIKEFKISDNNFFSFFAAPPGGIEDTMRTRSFMFFSHAIALAPCFEGDIDLIVPENGFISLNVPLTYSRMGTSSTRTTHPYYMGLLQQLLDELGFKIHIKNPYQFKTKGEMIIECKNQGFLKENIAKTMSCSHPDVGRMRGESETQHCGTCLPCVIRRASIKKAGFDESTHYYDPNFTSGDTARTNLNSYLLGLQKYDDKKAFLTIQTSGPLMDNIERYESIYKRGIAELKSLLEEYNENP

SEQ ID NO: 36355 - protein, 219 aa, Bacillus subtilis
  misc_feature (1)..(219): sp|O31675|QUEC_BACSU 7-cyano-7-deazaguanine synthase OS =Bacillus subtilis (strain 168) OX=224308 GN=queC PE=1 SV=1
MKKEKAIVVFSGGQDSTTCLLWALKEFEEVETVTFHYNQRHSQEVEVAKSIAEKLGVKNHLLDMSLLNQLAPNALTRNDIEIEVKDGELPSTFVPGRNLVFLSFASILAYQIGARHIITGVCETDFSGYPDCRDEFVKSCNVTVNLAMEKPFVIHTPLMWLNKAETWKLADELGALDFVKNNTLTCYNGIIADGCGECPACHLRSKGYEEYMVMKGERA

SEQ ID NO: 36356 - protein, 219 aa, Bacillus subtilis
  misc_feature (1)..(219): tr|A0A164YHN8|A0A164YHN8_BACIU 7-cyano-7-deazaguanine s ynthase OS=Bacillus subtilis OX=1423 GN=queC PE=3 SV=1
MKKEKAIVVFSGGQDSTTCLLWALKEFEEVETVTFHYNQRHSQEVEVAKSIAEKLGVKNHLLDMSLLNQLAPNALTRNDIEIEVKDGELPSTFVPGRNLVFLSFASILAYQIGARHIITGVCETDFSGYPDCRDEFVKSCNVTVNLAMEKPFVIHTPLMWLNKAETWKLADELGALDFVKNNTLTCYNGIIADGCGECPACHLRSKGYEEYMMMKGERA

SEQ ID NO: 36357 - protein, 219 aa, Bacillus swezeyi
  misc_feature (1)..(219): tr|A0A5D4QJH9|A0A5D4QJH9_9BACI 7-cyano-7-deazaguanine s ynthase OS=Bacillus swezeyi OX=1925020 GN=queC PE=3 SV= 1
MKQEKAVVVFSGGQDSTTCLLWALKQFEEVEAVTFHYNQRHQQEIDAATHIAEKLGVKHHLLDMALLNQLAPNALTRDDIEIEAKEGELPSTFVPGRNLVFLSFASILAYQIGARHIVTGVCETDFSGYPDCRDEFVKSCNVTVNLAMERPFVIHTPLMWLNKAETWELADELEALEFVKNETLTCYNGIIADGCGECPACKLRANGYNEYMKIKRERA

SEQ ID NO: 36358 - protein, 219 aa, Bacillus swezeyi
  misc_feature (1)..(219): tr|A0A1R1RGM4|A0A1R1RGM4_9BACI 7-cyano-7-deazaguanine s ynthase OS=Bacillus swezeyi OX=1925020 GN=queC PE=3 SV= 1
MKQEKAVVVFSGGQDSTTCLLWALKQFEEVEAVTFHYNQRHQQEIDAAKHIAEKLGVKHHLLDMALLNQLAPNALTRDDIEIEAKEGELPSTFVPGRNLVFLSFASILAYQIGARHIVTGVCETDFSGYPDCRDEFVKSCNVTVNLAMERPFVIHTPLMWLNKAETWELADELEALEFVKNETLTCYNGIIADGCGECPACKLRANGYNEYMKMKRERA

SEQ ID NO: 36359 - protein, 228 aa, Bacillus taeanensis
  misc_feature (1)..(228): tr|A0A366Y5D9|A0A366Y5D9_9BACI 7-cyano-7-deazaguanine s ynthase OS=Bacillus taeanensis OX=273032 GN=queC PE=3 S V=1
MSKKAVIVLSGGLDSTTCMGIAKEKGYELYPITFSYGQRHDREVEQAKKVAQHFEVSDHRLVDISFLNQIGGSALTDQSIEVPTEGVKDDIPATYVPARNMIFLSLASAYAEVIGAEVIYIGVSAVDYSGYPDCRPEFIESMTETVNLATKAGTTGDRIKIESPLIHLTKKETIEAGLRLNVPYHLTTSCYLGEEEACGVCDSCQLRIKGFKEAGAKDEIAYAVNINW

SEQ ID NO: 36360 - protein, 219 aa, Bacillus tequilensis
  misc_feature (1)..(219): tr|A0A2X0X9K3|A0A2X0X9K3_9BACI 7-cyano-7-deazaguanine s ynthase OS=Bacillus tequilensis OX=227866 GN=ykvJ PE=3 SV=1
MKKEKAIVVFSGGQDSTTCLLWALKEFEEVETVTFHYNQRHAQEIEVAQSIAEKLGVKNHLLDMSLLNQLAPNALTRDDIEIEVKDGELPSTFVPGRNLVFLSFASILAYQIGARHIITGVCETDFSGYPDCRDEFVKSCNVTVNLAMEKPFVIHTPLMWLNKAETWKLADELGALDFVKNNTLTCYNGIIADGCGECPACHLRSKGYEEYMVMKGERA

SEQ ID NO: 36361 - protein, 222 aa, Bacillus terrae
  misc_feature (1)..(222): tr|A0A429X5J2|A0A429X5J2_9BACI 7-cyano-7-deazaguanine s ynthase OS=Bacillus terrae OX=1914933 GN=queC PE=3 SV=1
MLKDEKAIVVFSGGQDSTTCLFWALKTFKEVEVVTFNYNQRHKNEIECAKTIAEELNVRHHLLDMQLLNQLAPNALTRNDIEIKDGGEGELPSTFVPGRNLIFLSFAAVLASQVNAKHIITGVSETDFSGYPDCRDAFIKSLNVSINLSMDKQFVIHTPLMWLDKEETWKLADELNVLEYIRTKTLTCYEGVIGDGCGVCPACKLRKNGLEKYLTSRKGGDV

SEQ ID NO: 36362 - protein, 79 aa, Bacillus thermoamylovorans
  misc_feature (1)..(79): tr|A0A0D0EQ51|A0A0D0EQ51_9BACI 7-cyano-7-deazaguanine s ynthase OS=Bacillus thermoamylovorans OX=35841 GN=B4064 _3648 PE=3 SV=1
MLNEEKAVVVFSGGQDSTTCLFWALKNFQEVQAVTFDYGQRHRKEIEVAKTIAHDLGVKHTVLDMSMEFDVHVIISFNS

SEQ ID NO: 36363 - protein, 224 aa, Bacillus thermoamylovorans; identical to SEQ ID NO: 36265
  misc_feature (1)..(224): tr|A0A090IZ59|A0A090IZ59_9BACI 7-cyano-7-deazaguanine s ynthase OS=Bacillus thermoamylovorans OX=35841 GN=queC PE=3 SV=1

SEQ ID NO: 36364 - protein, 221 aa, Bacillus thermocopriae
  misc_feature (1)..(221): tr|A0A410XHY7|A0A410XHY7_9BACI 7-cyano-7-deazaguanine s ynthase OS=Bacillus thermocopriae OX=1215031 GN=queC PE =3 SV=1
MKKEKAVVVFSGGQDSTTCLFWAKKHFAEVEAVTFDYNQRHRLEIDVAASIAKELNVPHTVLDMSLLNQLAPNALTRSDIAIEQKEGQLPSTFVDGRNLLFLSFAAVLAKQKGARHLVTGVCETDFSGYPDCRDVFIKSLNVTLNLAMDYEFVIHTPLMWLNKAETWKLADELGALEFVRNKTLTCYNGIIADGCGECPACVLRKRGFEQYMNEKKGANAQ

SEQ ID NO: 36365 - protein, 220 aa, Bacillus thuringiensis; identical to SEQ ID NO: 36197
  misc_feature (1)..(220): sp|A0RBG1|QUEC_BACAH 7-cyano-7-deazaguanine synthase OS =Bacillus thuringiensis (strain Al Hakam) OX=412694 GN= queC PE=3 SV=2

SEQ ID NO: 36366 - protein, 220 aa, Bacillus thuringiensis; identical to SEQ ID NO: 36191
  misc_feature (1)..(220): tr|W8XZZ9|W8XZZ9_BACTU 7-cyano-7-deazaguanine synthase OS=Bacillus thuringiensis DB27 OX=1431339 GN=queC PE=3 SV=1

SEQ ID NO: 36367 - protein, 221 aa, Bacillus timonensis
  misc_feature (1)..(221): tr|A0A4S3PML0|A0A4S3PML0_9BACI 7-cyano-7-deazaguanine s ynthase OS=Bacillus timonensis OX=1033734 GN=queC PE=3 SV=1
MKREKAIVVFSGGQDSTTCLFWARERFEEVEVVTFDYGQKHRLEIQCAKDIAAELGVKHHILDMSLLNQLAPNALTRHDIKIEEGENGELPSTFVPGRNLLFLSFAGVLARQVGAKHIVTGVSETDFSGYPDCRDIFMKSLNVTLNLSMDASFVIDTPLMWLNKAQTWELADQLGALEFVRERTLTCYNGVIADGCGECPACKLRKKGLDEFYLGKSNLEE

SEQ ID NO: 36368 - protein, 148 aa, Bacillus toyonensis
  misc_feature (1)..(148): tr|A0A2C4KWS9|A0A2C4KWS9_9BACI 7-cyano-7-deazaguanine s ynthase (Fragment) OS=Bacillus toyonensis OX=155322 GN= queC PE=3 SV=1
MYSNDKAIVVFSGGQDSTTCLFWAIEQFAEVEAVTFNYNQRHKLEIDCAAEIANELGIKHTVIDMSLLNQLAPNALTRIDMEITHEEGELPSTFVDGRNLLFLSFAAVLAKQVGARHIVTGVCETDFSGYPDCRDVFVKSLNVTLNLS

SEQ ID NO: 36369 - protein, 220 aa, Bacillus toyonensis; identical to SEQ ID NO: 36191
  misc_feature (1)..(220): tr|A0A2A2PBI7|A0A2A2PBI7_9BACI 7-cyano-7-deazaguanine s ynthase OS=Bacillus toyonensis OX=155322 GN=queC PE=3 S V=1

SEQ ID NO: 36370 - protein, 220 aa, Bacillus tropicus; identical to SEQ ID NO: 36317
  misc_feature (1)..(220): tr|A0A5C5A691|A0A5C5A691_9BACI 7-cyano-7-deazaguanine s ynthase OS=Bacillus tropicus OX=2026188 GN=queC PE=3 SV =1

SEQ ID NO: 36371 - protein, 220 aa, Bacillus tropicus; identical to SEQ ID NO: 36197
  misc_feature (1)..(220): tr|A0A4Y6F856|A0A4Y6F856_9BACI 7-cyano-7-deazaguanine s ynthase OS=Bacillus tropicus OX=2026188 GN=queC PE=3 SV =1

SEQ ID NO: 36372 - protein, 220 aa, Bacillus urumqiensis
  misc_feature (1)..(220): tr|A0A2P6MEV3|A0A2P6MEV3_9BACI 7-cyano-7-deazaguanine s ynthase OS=Bacillus urumqiensis OX=1548213 GN=queC PE=3 SV=1
MSFNGEKAIVVFSGGQDSTTCLLWALKQFDEVFTVTFDYGQRHRKEIEQAEAIAEELNVSHRVLDMSLLNQLAPNALTREDIEIEESEDGPPSTFVEGRNHLFFSFAAVLGRQLGARHIITGVCETDFSGYPDCRDSFVKSLNVTLNLAMDADFVIHTPLMWLDKKETWQLADELSGLEFIRTRTLTCYNGIVGDGCGKCPACVLRCRGLEQYLEEKEQS

SEQ ID NO: 36373 - protein, 219 aa, Bacillus vallismortis
  misc_feature (1)..(219): tr|A0A410WHN1|A0A410WHN1_BACVA 7-cyano-7-deazaguanine s ynthase OS=Bacillus vallismortis OX=72361 GN=queC PE=3 SV=1
MKKEKAIVVFSGGQDSTTCLLWALQEFKEVETVTFHYNQRHSQEVEVAKSIAEKLGVKNHLLDMSLLNQLAPNALTRNDIDIEAKDGELPSTFVPGRNLVFLSFASILAYQIGARHIITGVCETDFSGYPDCRDEFVKSCNVTVNLAMEKPFVIHTPLMWLNKAETWKLADELGALDFVKNNTLTCYNGIIADGCGECPACHLRSRGYEEYMAMKGERA

SEQ ID NO: 36374 - protein, 219 aa, Bacillus vallismortis; identical to SEQ ID NO: 36194
  misc_feature (1)..(219): tr|A0A1W6HHS5|A0A1W6HHS5_BACVA 7-cyano-7-deazaguanine s ynthase OS=Bacillus vallismortis OX=72361 GN=queC PE=3 SV=1

SEQ ID NO: 36375 - protein, 219 aa, Bacillus velezensis; identical to SEQ ID NO: 36194
  misc_feature (1)..(219): sp|A7Z3Y6|QUEC_BACVZ 7-cyano-7-deazaguanine synthase OS =Bacillus velezensis (strain DSM 23117 / BGSC 10A6 / FZ B42) OX=326423 GN=queC PE=3 SV=2

SEQ ID NO: 36376 - protein, 219 aa, Bacillus velezensis; identical to SEQ ID NO: 36194
  misc_feature (1)..(219): tr|A0A1D9PIK5|A0A1D9PIK5_9BACI 7-cyano-7-deazaguanine s ynthase OS=Bacillus velezensis OX=492670 GN=queC PE=3 S V=1

SEQ ID NO: 36377 - protein, 221 aa, Bacillus vietnamensis
  misc_feature (1)..(221): tr|A0A0P6WKQ3|A0A0P6WKQ3_9BACI 7-cyano-7-deazaguanine s ynthase OS=Bacillus vietnamensis OX=218284 GN=queC PE=3 SV=1
MNTEKALVVFSGGQDSTTCLFWAKKAFKEVEAVTFNYGQRHVAELDCAREIAEDLNVPHHVLDMSLLNQLAPSALTRTDEEITQKEGELPSTFVPGRNLLFLSFAGILAKQIGAKHIVTGVCETDFSGYPDCRDIFVKSLNVSLNLSMDEQFVIHTPLMWINKAETWEMADELGAFHYIQENTLTCYNGLKGSGCGECPACELRQKGLDEYINEKKGGEGL

SEQ ID NO: 36378 - protein, 220 aa, Bacillus vietnamensis; identical to SEQ ID NO: 36199
  misc_feature (1)..(220): tr|A0A5D4K9M5|A0A5D4K9M5_9BACI 7-cyano-7-deazaguanine s ynthase OS=Bacillus vietnamensis OX=218284 GN=queC PE=3 SV=1

SEQ ID NO: 36379 - protein, 222 aa, Bacillus wakoensis
  misc_feature (1)..(222): tr|W4PYC4|W4PYC4_9BACI 7-cyano-7-deazaguanine synthase OS=Bacillus wakoensis JCM 9140 OX=1236970 GN=queC PE=3 SV=1
MRNEKAVVVFSGGQDSTTCLLWALKQFKEVATVTFDYGQRHHEEITCAREIAEELGVSFHVLDMTLINQLSANALTRKDIEVKAGENGELPSTFVPGRNHLFLSFAAVYAQAIGARHIITGVCETDFSGYPDCRDSFVKSLNVTLNLAMDEQFVIHTPLMWLNKAETWKLADQLGSLEFIRAKTLTCYHGVRGDGCGECPACQLRKKGLDDYLTEKQGGSTI

SEQ ID NO: 36380 - protein, 218 aa, Bacillus weihaiensis
  misc_feature (1)..(218): tr|A0A1L3MXM9|A0A1L3MXM9_9BACI 7-cyano-7-deazaguanine s ynthase OS=Bacillus weihaiensis OX=1547283 GN=queC PE=3 SV=1
MKNDKAVVVFSGGQDSTTCLFWAMKQFKEVVAVTFNYNQRHSAEIEVASSIAKELGIQHHLLDMSLLNQLAPNALTRADIEIEQKDGELPSTFVPGRNLLFLSFATILANQIGAKHIVTGVCETDFSGYPDCRDAFVKSCNVTLNLALDKPFVIHTPLMWINKAETWKLADDLGVLNFVREKTLTCYNGIIADGCGECPACELRQKGLNEYLHEKGVK

SEQ ID NO: 36381 - protein, 221 aa, Bacillus wiedmannii
  misc_feature (1)..(221): tr|A0A2C4Q0N5|A0A2C4Q0N5_9BACI 7-cyano-7-deazaguanine s ynthase OS=Bacillus wiedmannii OX=1890302 GN=queC PE=3 SV=1
MYSNDKAIVVFSGGQDSTTCLFWAMQQFAEVEAVTFNYNQRHKLEIDCAAEIVNELGIKHTVIDMSLLNQLAPSALTRIDMEITHEEGELPSTFVDGRNLLFLSFAAVLAKQVGARHIVTGVCETDFSGYPDCRDVFVKSLNVTLNLSMDYPFVIHTPLMWIDKADTWKLSDELGAFEFIREKTLTCYNGIIGDGCGECPACQLRKAGLDTYLQERKEGNK

SEQ ID NO: 36382 - protein, 220 aa, Bacillus wiedmannii; identical to SEQ ID NO: 36191
  misc_feature (1)..(220): tr|A0A1A9PNF5|A0A1A9PNF5_9BACI 7-cyano-7-deazaguanine s ynthase OS=Bacillus wiedmannii OX=1890302 GN=queC PE=3 SV=1

SEQ ID NO: 36383 - protein, 220 aa, Bacillus wudalianchiensis
  misc_feature (1)..(220): tr|A0A1B9AC31|A0A1B9AC31_9BACI 7-cyano-7-deazaguanine s ynthase OS=Bacillus wudalianchiensis OX=1743143 GN=queC PE=3 SV=1
MSKEKAVVVFSGGQDSTTCLFWAKERFDEVIAVTFDYGQRHRLELECAADIAKDLNIPHHILDMSLLNQLAPNALTRTDIDITEKDGEPPSTFVEGRNLLFLSFAAVLAKQYDARHIITGVCETDFSGYPDCRDVFIKSLNVTLNLSMDYSFVIHTPLMWLDKAETWELADELGAFDYVRERTLTCYNGIKGSGCGECPACKLRQNGLNKYVAKREAGSK

SEQ ID NO: 36384 - protein, 218 aa, Bacillus xiamenensis
  misc_feature (1)..(218): tr|K2MEZ1|K2MEZ1_9BACI 7-cyano-7-deazaguanine synthase OS=Bacillus xiamenensis OX=1178537 GN=queC PE=3 SV=1
MRNEKAVVVFSGGQDSTTCLLWALQQFKEVETVTFHYNQRHQEEIDVAKRIADKLGVKNHLLDMSLLNQLAPNALTRDDIDIEEKEGELPSTFVPGRNLVFLSFASILAYQIGARHIITGVCETDFSGYPDCRDEFVKSCNVTVNLAMEKPFVIHTPLMWLNKAETWKLADDLNALDFVKNETLTCYNGIISDGCGECPACKLRKNGYDTYMKMKEAN

SEQ ID NO: 36385 - protein, 220 aa, Bacillus zeae
  misc_feature (1)..(220): tr|A0A398B187|A0A398B187_9BACI 7-cyano-7-deazaguanine s ynthase OS=Bacillus zeae OX=1917180 GN=queC PE=3 SV=1
MLKDEKALVVFSGGQDSTTCLFWALETFREVEAVTFDYNQRHHQEIQCAQAIAKEFGIVHHTLDMSLLNQLAPNALTRPDIEVADGKEGELPSTFVPGRNLVFLSFAGILARQTGAKHVVTGVCETDFSGYPDCRDVFVKSLNVTLNLSMADEFVIHTPLMWLNKAETWKLADDLGRLDFVRERTLTCYNGIIADGCGECPACKLRKNGLEEYLLSRKGE

SEQ ID NO: 36386 - protein, 218 aa, Bacillus zhangzhouensis
  misc_feature (1)..(218): tr|A0A081L6Z8|A0A081L6Z8_9BACI 7-cyano-7-deazaguanine s ynthase OS=Bacillus zhangzhouensis OX=1178540 GN=queC P E=3 SV=1
MKNEKAVVVFSGGQDSTTCLLWALQQFEEVETVTFHYNQRHQEEIDVAKRIADKLGVKNHLLDMSLLNQLAPNALTRDDIDIVEKEGELPSTFVPGRNLVFLSFASILAYQIGARHIITGVCETDFSGYPDCRDEFVKSCNVTVNLAMEKPFVIHTPLMWLNKAETWKLADELDALDFVKNETLTCYNGIISDGCGECPACKLRKNGYDTYMEMKEAK

SEQ ID NO: 36387 - protein, 231 aa, Unknown
  misc_feature (1)..(231): tr|A0A0J8YVB3|A0A0J8YVB3_9GAMM 7-cyano-7-deazaguanine s ynthase OS=bacteria symbiont BFo2 of Frankliniella occi dentalis OX=1628856 GN=queC PE=3 SV=1
MKKAVVVFSGGQDSTTCLVQAIQHYDEVHCITFDYGQRHQQEIAIAKQLTERLGVAAHKVMDVTLLNELAISSLTRDNIPVPGYQPNATELPSTFVPGRNILFLTLASIYAYQVEAEAVITGVCETDFSGYPDCRDEFVKALNQAVVLGMAKDVRFETPLMWLNKAETWALADYWGQLPLIKDHTLTCYNGIAGSGCGECAACHLRAKGLEQYLNAPDETMKELKSKNHLS

SEQ ID NO: 36388 - protein, 231 aa, Unknown
  misc_feature (1)..(231): tr|A0A0J8YHN1|A0A0J8YHN1_9GAMM 7-cyano-7-deazaguanine s ynthase OS=bacteria symbiont BFo1 of Frankliniella occi dentalis OX=1628855 GN=queC PE=3 SV=1
MKRAVVVFSGGQDSTTCLIQALQQYDEVHCITFDYGQRHRAEIDIAGELSQALGARAHKVLDVTMLNELAVSSLTRDNIPVPTYDPEASGLPSTFVPGRNILFLTLASIYAYQIEAEAVIAGVCETDFSGYPDCRDEFVKALNHAVALGMARDVRFETPLMWLNKAETWALADYWQQLALVRDQTLTCYNGIKGSGCGDCAACHLRANGLQEYQQNPSAVMQAMKTKTGLQ

SEQ ID NO: 36389 - protein, 216 aa, Bacteriodetes bacterium
  misc_feature (1)..(216): tr|A0A521WPF2|A0A521WPF2_9BACT 7-cyano-7-deazaguanine s ynthase OS=Bacteriodetes bacterium OX=2507565 GN=queC P E=3 SV=1
MDSCVTAAIAHREYELAFLHLNYGQRTERRELQAFNDIADFYNVRKRLVVDVQHLKNIGGSSLTDATIEVSQADLARKGIPSSYVPFRNANILSIAVSWGEVLQAKKIFIGAVEEDSSGYPDCRREFYDAFNTVIRLGTKPETTLEIITPVILMKKFEIVRKGIELAAPLQLSWSCYRNEEVACGECDSCALRLRGFQMAGIEDPISYSVRPNYLV

SEQ ID NO: 36390 - protein, 228 aa, Bacteriodetes bacterium
  misc_feature (1)..(228): tr|A0A522FV33|A0A522FV33_9BACT 7-cyano-7-deazaguanine s ynthase OS=Bacteriodetes bacterium OX=2507565 GN=queC P E=3 SV=1
MKSKSAIVLMSGGMDSAVCTGIARSEGYEIAALHLNYGQRTESRELKSYYDLCNYYKIEKKLVVNVEHLSLIGGSALTDEKITIENADLSRKDIPLTYVPFRNANILSIAVSWAEVIGAEVIYIGATQADSSGYPDCRKEFFLAFQDAINEGTKSETNIKIITPLIEMTKMDIVVAGYELKVPFELTWSCYQESETACGVCDSCALRLRGFQQAGIDDPLSYKIKPIY

SEQ ID NO: 36391 - protein, 220 aa, Bacterioplanes sanyensis
  misc_feature (1)..(220): tr|A0A222FPU5|A0A222FPU5_9GAMM 7-cyano-7-deazaguanine s ynthase OS=Bacterioplanes sanyensis OX=1249553 GN=queC PE=3 SV=1
MADKAVVIYSGGMDSFTILNKAKQQGHELYALTFDYGQKHKKEIEFAKRVCSELDVHHKIIDITAINQLLQSSSLTSDKDIPEGHYEDQNMKSTVVPNRNMILLSLAIGYAVDIGASKVFYGAHSGDHAIYPDCRPEFVLAMNDVAKLANYEPVDIVTPYLNSDKIEILKDGLAMGLDYGKSWTCYNGREKACGKCGSCVERLEAFEKNNAADPLAYEAS

SEQ ID NO: 36392 - protein, 232 aa, Bacteriovorax sp.
  misc_feature (1)..(232): tr|T0DF83|T0DF83_9PROT 7-cyano-7-deazaguanine synthase OS=Bacteriovorax sp. BAL6_X OX=1201290 GN=queC PE=3 SV= 1
MKSDKLAVVLVSGGMDSLVCAAIANEKHKNLAFLHLNYGQKTEERELDCFQKIADYYGVDKSLRKVIDVSFLKQIGGSSLTDDGIDVKQYKGESEEIPDSYVPFRNTHIIAMAVSWSEVVGAKNIYIGAVNEDSSGYPDCRPSYYAAYNELIKQGTKDGDIEIITPVIDMAKNEIVQKAVDLGAPLKFSYSCYARGDKACGVCDSCALRLRGFQKAGIEDPIEYDQRPNYLS

SEQ ID NO: 36393 - protein, 232 aa, Bacteriovorax sp.
  misc_feature (1)..(232): tr|T0SJ90|T0SJ90_9PROT 7-cyano-7-deazaguanine synthase OS=Bacteriovorax sp. Seq25_V OX=1201288 GN=queC PE=3 SV =1
MSKSKELAVVLVSGGMDSLVSAAIANEAHEHLAFLHLNYGQKTEERELDCFHKIADHYGVDPSLRKIIDVSFLKQIGGSSLTDDGIDVKQFKGDSEEIPDSYVPFRNTHIIAMAVSWSEVVGAKKIYIGAVDEDSSGYPDCRPSYYAAYNNLIKEGTKAGDISIITPVISLKKHEIVNKALELKAPLIHSYSCYARGDKACGVCDSCALRLRGFQKAGVEDPIEYVTRPNYA

SEQ ID NO: 36394 - protein, 278 aa, Bacteriovorax stolpii
  misc_feature (1)..(278): tr|A0A2K9NWP1|A0A2K9NWP1_9PROT Uncharacterized protein OS=Bacteriovorax stolpii OX=960 GN=C0V70_17870 PE=4 SV= 1
MNPSGKAVAILFSGGTDSTLTAAMLQENFEKVHLVTYDRFGFHATDNTAVQTQALKERYGEDRFVHTFLNVDKLFQHVSYENYFENIKKHGLFNLSTCGLCKLSMHVRTIKYCIDNEVYFVADGANQAMTMEPAQMKPVIDEMKRMYAHFGITYFNPVFEMDGPEDKDFINKSNAKLLARESDYSVASFENEKTPGFRLYKMGLAPSPNVKGSDYDKKRQPRCFQFIIFNIFALKYFMANKTYEEYTDLTTKFYSDKIKSMIKLIENRNDKKVKEMLD

SEQ ID NO: 36395 - protein, 232 aa, Bacteriovorax stolpii
  misc_feature (1)..(232): tr|A0A2K9NRZ5|A0A2K9NRZ5_9PROT 7-cyano-7-deazaguanine s ynthase OS=Bacteriovorax stolpii OX=960 GN=queC PE=3 SV =1
MTQKSRDLAVCLVSGGMDSLVCAAIANTEYENLAFLHLNYGQKTEERELESFKKIAEFYKVPKNLQKIIDVSFLKQIGGSSLTDDNIDVKKYKGDSEEIPDSYVPFRNTHIISMAVSWAEVVGAKKIFIGAVYEDSSGYPDCRPSYYKAVNALIKEGTKNGDIEVITPVIFMKKDEIVKKAVELHAPLEFSYSCYERNDKACGVCDSCALRLRGFQKAGIEDPIEYVTRPKY

SEQ ID NO: 36396 - protein, 223 aa, Unknown
  misc_feature (1)..(223): tr|A0A4Q3V215|A0A4Q3V215_9BACT 7-cyano-7-deazaguanine s ynthase OS=bacterium OX=1869227 GN=queC PE=3 SV=1
MKSVVLLSGGLDSATCLAMARADGTEPYALTVLYGQRHTEEIEASKKVAEALGAVEHKFVRVELNAIGGSALTDDIEVPKDRDESEMADIPVTYVPARNTVMLSLALGYAEVTGAEAIYAGVNAVDYSGYPDCRPEYIAAFQELARLATKAGVEGRPLEIRVPLIQLTKPEIIRRGLALGVDYGITHSCYDPIDGKPCGRCDACLIRQKAFAELGMEDPALAR

SEQ ID NO: 36397 - protein, 243 aa, Unknown
  misc_feature (1)..(243): tr|A0A2E3WJA9|A0A2E3WJA9_9BACT 7-cyano-7-deazaguanine s ynthase OS=bacterium OX=1869227 GN=queC PE=3 SV=1
MKQALVILSGGQDSITCLFWAISNGYNCSALTFDYDQLHNIEIESAKKAAQIAGIKNHEISTIGPLFSGNSPLTNKSIELEQYSNLADVSPGIQKTFVPGRNLLFLSLAANKAYSMNIDTMITGICQEDFGGYPDCRSDFIKSLEETIKLGMEKEIKILTPLMDMKKSEIVMMGKNLPKECWEALSFSHTSYDGKYPPTSNDHANLLRARGFEEAGLPDPLVERAVAENLMELPKTRNYENQD

SEQ ID NO: 36398 - protein, 222 aa, Unknown
  misc_feature (1)..(222): tr|A0A532U2A6|A0A532U2A6_9BACT 7-cyano-7-deazaguanine s ynthase OS=bacterium (candidate division B38) B3_B38 OX =2012999 GN=queC PE=3 SV=1
MKQLAIVLVSGGVDSCVTAAIANLNHDLALLHLNYRQRTEERELRAFHDIADFYKVKKRLVTDVDYLRQIGGSSLTDESIEVTPARPGGLALPATYVPFRNTHLLSIAVSWGEVIRARKIFIGASQHDSPGYPDCRPEYYRAFNRLIEVGTRPQTTLEVVTPLINLTKREIVLKGMELAAPLHLTWSCYQRNDLACGVCHSCMQRRKAFQEAGISDPIPYLT

SEQ ID NO: 36399 - protein, 249 aa, Unknown
  misc_feature (1)..(249): tr|A0A2M7GWG5|A0A2M7GWG5_9BACT 7-cyano-7-deazaguanine s ynthase OS=bacterium (Candidatus Ratteibacteria) CG15_B IG_FIL_POST_REV_8_21_14_020_41_12 OX=2014291 GN=queC PE =3 SV=1
MKKAIILLSGGIDSSTTLYLAKSQGYQPTALIFDYHQRHKKEIESAKKIAKSAPSSYKLVKISFPEGGSSLLDPNLPLRLHPHLPPGASLPSRGRIEERGREKIPFTYVPARNIIFLSYALSCAETWGSRAIFIGANQVDYSGYPDCRASFIAAFNRMVKEGTKSKNIKVIAPLMKMNKGEIIKLGMKLGVPYHLTWSCYEGKEKPCLKCDSCKFRLKGFREAGITDPLLFNHRGTENTEKKLPRNHEI

SEQ ID NO: 36400 - protein, 222 aa, Unknown
  misc_feature (1)..(222): tr|A0A2G9Y9K4|A0A2G9Y9K4_9BACT 7-cyano-7-deazaguanine s ynthase OS=bacterium (Candidatus Ratteibacteria) CG23_c ombo_of_CG06-09_8_20_14_all_48_7 OX=2014292 GN=queC PE= 3 SV=1
MKKTVVLLSGGLDSATVLYWAKKRGYTIFPLAFDYGQRHKNEISAAKKLARAAGVGLEVIRISLPWKGSSLLDPKVPLPQSSSLQKVGAAIPSTYVPGRNLIFLAFGFSYAEAIGASFVLIGANSIDFSGYPDCRPQFFRILNRLVLEGTKKGIEGKPMKVLAPLVRLSKAGIIRLGMRLKVPYRLTWSCYAGGKKPCGKCDSCLLRAKGFAEAGIPDPLVY

SEQ ID NO: 36401 - protein, 248 aa, Unknown
  misc_feature (1)..(248): tr|A0A3A8ZTT8|A0A3A8ZTT8_9BACT ATP-dependent sacrificia l sulfur transferase LarE OS=bacterium 0.1xD8-71 OX=232 0099 GN=larE PE=4 SV=1
MDLSHFFKDTPKAALAFSGGVDSAYLLYAAMHLGADVRAYYVKSAFQPQFELEDARRLAGQLSADLRILEVDVLTDSNIAENPCDRCYHCKKRIFAAIAQAAAEDGYQVLLDGTNASDEEGDRPGMRALRELEVRSPLRECGLTKETIRGLSKEAGLFTWDKPAYACLATRIPTGETITGEKLQAAEAAEDYLFTLGFTDFRVRRLGEAARLQFPAGQMEKVLFKREEILTELKRYYQAVLLDLEGRE

SEQ ID NO: 36402 - protein, 230 aa, Unknown
  misc_feature (1)..(230): tr|A0A3A9FMW3|A0A3A9FMW3_9BACT 7-cyano-7-deazaguanine s ynthase OS=bacterium 1XD42-54 OX=2320110 GN=queC PE=3 S V=1
MKEKAMVLFSGGVDSTTCLGVAIDRFGKENVIPLSIVYGQKHEKEMEAARKVLAYYGLKGMELDLTPIFAESDCSLLSHSGRKIPEGSYASQLEGQGGVPVSTYVPFRNGLFLASAASMALSMKCSYIYYGAHRDDAAGNAYPDCSEAFFDSMNQAVYEGCGKALRIEAPFIHCNKADVVKEGLRLGVPYELTWSCYEGGEYPCGHCGTCIDRQKAFEANGMSDPALLHK

SEQ ID NO: 36403 - protein, 248 aa, Unknown
  misc_feature (1)..(248): tr|A0A3A9A036|A0A3A9A036_9BACT ATP-dependent sacrificia l sulfur transferase LarE OS=bacterium 1xD42-87 OX=2320 113 GN=larE PE=4 SV=1
MNLSTFFKENPKAAVAFSGGVDSAYLLCAAKTAGADVRAYYVKSAFQPRFELEDAKRLCGELDIELKILTVDVLADRAVRENPADRCYHCKRLIFTTIAEAAEEDGYKMLLDGTNASDEAGERPGMRALRELSVCSPLRECGLTKQEIRRLSREAGLFTWEKPAYACLATRIPAGEEITEEKLNSTEAAEDFLFSLGFTDFRVRRFGEAARLQFPASQFGRVLEKREGIIKELKRYYKAVLLDMEARA

SEQ ID NO: 36404 - protein, 229 aa, Unknown
  misc_feature (1)..(229): tr|A0A3A8YQ76|A0A3A8YQ76_9BACT 7-cyano-7-deazaguanine s ynthase OS=bacterium 1xD8-6 OX=2320116 GN=queC PE=3 SV= 1
MKAMVLFSGGIDSSTCLGMAVERYGKENVIALSISYGQKHEKEMQAGAAVADYYGVSHICLDMAEIFKYSDCSLLKHSAMEIPEEAYAEQLKKTEGQPVSTYVPFRNGLFLSTAASIALSKGCSVIYYGAHADDAVGNAYPDCSSSFNRAISEAIYIGSGNQLRVEAPFVNMTKAQIVKIGLERKVPYQLTWSCYEGKDRPCGVCGTCIDRAEAFRLNGVKDPLDGMED

SEQ ID NO: 36405 - protein, 401 aa, Unknown
  misc_feature (1)..(401): tr|A0A4Q2B0B0|A0A4Q2B0B0_9BACT Uncharacterized protein OS=bacterium 1XD8-92 OX=2320884 GN=D6D47_44970 PE=4 SV= 1
MIIAHTQDGVVELRLNQLISDMSFVEIDNTMVIDLLNIFLEIYVADISFKRQSDHPRFLQIIAYVDSKNCPIWRENTKLIEKLAGFVTEGDGDKWQIDIEPVEYEFEAQQLSFIKTTADNISLLSGGLDSFCGAYRNEIEGKKTLYCGYKTSNVDTSAINNVANFLNNRIGNLGIRTYSRVNQKKFTYTQRTRSLLFFSLAVMTAVKEGIGIVNINENGIMTLNPSFQSRGTTKTTHPKTIYLYQTILKNVGIRVQLNHPFLFMTKGEMVNLLSLDYKRHIKDTRSCSRSMHDPRYDTSTKVSCGTCVPCLLRKISMAAYDLEKYDNEYDIPYEGNMDEEEYRSSLNYYTTFYDYIKSGEIFSELVIKQRYYHNVDYYERTFEMLKKFSVEFEVFIKKYGG

SEQ ID NO: 36406 - protein, 228 aa, Unknown
  misc_feature (1)..(228): tr|A0A0S4M8Q3|A0A0S4M8Q3_9BACT 7-cyano-7-deazaguanine s ynthase OS=bacterium 2013Arg42i OX=1561003 GN=queC PE=3 SV=1
MPEDNSRRGVVLVSGGMDSAVLIAHLANQGYELYAISFEYGQRSCYETVLARELCHTYGVLRHWVQRIDFPWGGSSLIDKSKDIPQRLPSSDEVHNTYVPGRNTIFLSFALSCAEVVGASKVFIGANELDYSNYPDCRKNYFDAYNNLVTQAVPRAVGFHSISIEAPFVNFSKSDIVVLGYSLCVDFSRTLSCYQAIDNVLACGCCSACLFRRRAFVVSGVPDTTLYA

SEQ ID NO: 36407 - protein, 626 aa, Unknown
  misc_feature (1)..(626): tr|A0A1H7ZGM2|A0A1H7ZGM2_9BACT Queuosine biosynthesis p rotein QueC OS=bacterium A37T11 OX=1855384 GN=SAMN05216 436_105220 PE=4 SV=1
MINSNSHVILCGGVNLPRKYKKYASNHIHYLSADPSSREHNINLELPHFIQMVNCHFPDRIKDLLEIAGYVYAADRMIGRGTNNNVEFHSWARQLNFYIRVRDVSFWSNPAIISSLSEALTFVSGDHSYSFIFEGGGFDIGQRNLYDHEAIQLEKKDNSIIGLFSGGLDSLAGALEILTTTDKKLILVSHRSNTTGVSKIQKGIHKLLESDFPERIQYYSFYCNLHGERAVEETQRTRIFLYTAIAYSLSTLASEKEIYVFENGVTSLNFSKRADLINARASRTTHPKTLKLFENFYSLVGEQERPIVHPFLYNTKTDIFNKIKAAGKLNYINSTISCTKTFLSFENNSQATHCGGCSQCVDRRLAAFASGLQDYDAIYDTDISKDPITNPESRTHLHDYIRAVVRYSSFTEMNFQFEMLAELTDIVQYLEGQRPAEKAMKIFALLKTHTKQLLNAIKSIQLLQDPLKPKVPNTLHAYIDERVYLKPPVECLIETIKSKLSVSIPQAFEHEKPKHENALNDLIHALIQGESSDYGREYPAIKFSVSRVIPDHSFLEIYDLLIEAKYLRGNTSKAAITDQIGADITKYPAERHKLFIIYDPERKIANDLQFSRDIEKQPNCFVFIIR

SEQ ID NO: 36408 - protein, 236 aa, Unknown
  misc_feature (1)..(236): tr|A0A1H9P887|A0A1H9P887_9BACT 7-cyano-7-deazaguanine s ynthase OS=bacterium A52C2 OX=1855383 GN=queC PE=3 SV=1
MKTIVICSGGLDSVSLAHRVAAERELIGLISFDYGQRHSKELGFAASCARRLGVPHQIVDIRDIGRSLSGSALTDDVAVPDGHYAEETMRVTVVPNRNAIMLAIAFGVAVSRGADAVATAVHGGDHFIYPDCRPGFIDAFQAMQNHALDGYASVRLSAPYVNVPKSAIVADGTKHGTPFEETWSCYKGGEHHCGRCGTCVERREAFHLAGITDPTVYEDPDFWRGAVERAGERAAG

SEQ ID NO: 36409 - protein, 273 aa, Unknown
  misc_feature (1)..(273): tr|A0A1V5UNT1|A0A1V5UNT1_9BACT 7-cyano-7-deazaguanine s ynthase OS=bacterium ADurb.Bin243 OX=1866936 GN=queC PE =3 SV=1
MNKTGKTKGSSKPASLKKTGKSNKTNAAKKSSTVRKTDARKIKKDTAVVLLSGGMDSAAALGVLAQKYQPAALHLNYGQRTEAKELDCFVRLCDHYGIKQRLIVDVSYLEQIGGSSLTDHKMIVPKADLDSNEVPNTYVPFRNAHILCIATSWAEVIGAKRIFIGAVSEDSSGYPDTRPEFYEAFEKVIKTGTRAGGAIKIETPVIDLSKAEIVKLGLKLKVPFKYTWSCYVGNEKACGVCDSCALRLRGFARAGAKDPIEYEQTVFKTEIFV

SEQ ID NO: 36410 - protein, 234 aa, Unknown
  misc_feature (1)..(234): tr|A0A1V5T2A5|A0A1V5T2A5_9BACT 7-cyano-7-deazaguanine s ynthase OS=bacterium ADurb.Bin270 OX=1866926 GN=queC PE =3 SV=1
MQHRSSGNDFVALLSGGLDSYVAVRMAASRMKFNLAITFDYGQRAAKKEIDTAARIASEFNAEHKVIEIGWMRDETRTALVDLHKKIPSTDARRVDAKAAENAAAVWVPNRNGVFISIAAAFSEARGIGSVIAGFNAEEAMTFPDNSEKFIKASNLSLSMSTMSGVKLLSPTSKMTKAEIANEFCNLKLDPEKIWCCYFGKKLLCGRCESCARTIRAFRKTPIWKVIKKRFAER

SEQ ID NO: 36411 - protein, 228 aa, Unknown
  misc_feature (1)..(228): tr|A0A1V5PM28|A0A1V5PM28_9BACT 7-cyano-7-deazaguanine s ynthase OS=bacterium ADurb.Bin363 OX=1866927 GN=queC PE =3 SV=1
MKNLAIVLVSGGMDSCVTTAIAKQTFEVAFLHLNYGQRTESREFRAFHNIADYYDVGKRLIVNIDYLKQIGGSSLTDSSIKIPRRSLSNQTPAEIPSSYVPFRNTHIIAIAVSWAEVIGAEKIFIGAVEEDSSGYPDCRKSYYEAYNKLIEVGTKPETHIEIVTPVIDMKKSEIVRKGIELEAPLHLTWSCYGNSDLACGECDSCLLRLRGFREAGVEDPIGYVRPDG

SEQ ID NO: 36412 - protein, 227 aa, Unknown
  misc_feature (1)..(227): tr|A0A1V5NJ33|A0A1V5NJ33_9BACT 7-cyano-7-deazaguanine s ynthase OS=bacterium ADurb.Bin374 OX=1866937 GN=queC PE =3 SV=1
MTNRPLAVVVASGGMDSCVSAAIALQTYDLAMFHLNYGQLTEARELRAFREQTAFYNAKHILEVDAGHFRQIGGSALTDRTLAVPDAKNLGKGVPVTYVPFRNANILAMAVSWAEVIGAVRVFIGAVEEDSSGYPDCRESFIDAFNVAIREGTRPDSGIRVEAPLLHLSKGQIVTRGLELGAPLHLSWSCYQGEAEACGTCESCALRLRGFAAAGATDPIPYAKPSA

SEQ ID NO: 36413 - protein, 156 aa, Unknown
  misc_feature (1)..(156): tr|A0A1V5MBK2|A0A1V5MBK2_9BACT 7-cyano-7-deazaguanine s ynthase OS=bacterium ADurb.Bin425 OX=1866929 GN=queC PE =3 SV=1
MDHFEVEDSKEPALPSGVATTFVPGRNILFFTIAANRAYVHNVDSIVVGVAQQDYGGYPDCRQDFISKLEAALVSGLDRRLEIVTPLMNMTKKETVELAQSLPGCLDALAYSTTCYEGHFPPCGKCHSCVLRAKGFAEAGVNDPLLERAAVAISKV

SEQ ID NO: 36414 - protein, 226 aa, Unknown
  misc_feature (1)..(226): tr|A0A1V5M1X0|A0A1V5M1X0_9BACT 7-cyano-7-deazaguanine s ynthase OS=bacterium ADurb.Bin429 OX=1866930 GN=queC PE =3 SV=1
MNAVALISGGLDSATAAAMAVADGYTLYALTICYGQRHLREVDAARAVAAALGAREHKVVDIALREIGGSALTADIPVPESRSADEMAAGIPVTYVPARNTIFLAVALGYAEVVGAETLVLGVNQVDYSGYPDCREEFLAAFETLANLATKAGVEGTAHFRVYAPLLHLTKAEIIREGLRLGVDYGLTWSCYAGGDVACGRCDSCLLRLAGFREAGVRDPQPYAEY

SEQ ID NO: 36415 - protein, 221 aa, Unknown
  misc_feature (1)..(221): tr|A0A244C5K2|A0A244C5K2_9BACT 7-cyano-7-deazaguanine s ynthase OS=bacterium AM6 OX=1954209 GN=queC PE=3 SV=1
MKKAVVLLSGGMDSAAVIAMAQEQGFAVHALSVRYGQRHTSELDAAARVAKAQGVIVHKTVDVDLRSIGGSALTDDIDVPEAGGEGIPVTYVPARNTIMLSLALGWAEVLGANDIFCGVNAVDYSGYPDCRPEFIAAFQALANLATKSGVEGAGITVHAPLQFLSKGQIVSEGVRLGVDFGLTVSCYNADANGAACGQCDACRLRAQGFADAGVADPTLYA

SEQ ID NO: 36416 - protein, 339 aa, Unknown
  misc_feature (1)..(339): tr|A0A2N5ZKT6|A0A2N5ZKT6_9BACT Uncharacterized protein OS=bacterium BM706 OX=2053465 GN=C0601_02280 PE=4 SV=1
MLCKRCVMPESKPDIYLNEQGLCNICSAFESQNNNRKDDTVFHETELVKILNKHRGKHKYDCLVMISGGKDSTSSLYYIVKKYKLNPLAMTFDHGFENEEAIYNIKNAVDSLKVDWIFFKTDFMKEMFAEIIRTKSKAVICHLCSIWYMQFTYETARRYDIPIIIAGWTKGQSNIPDIISKGKCDIDAPEYQSMAKATKKFLKEHVRKMPKYKDFPMSMEEVIKRAAKKHKATVLSPHWFLKTPVEEYTRLIQEELGWRFPKESYPEKSTNCLLNFLSVLLSLKHYGYTHYHVEMSKMINLNMMTRDEALDLLEKNWDDKMIDDVLTRLGLSRKDIEDG

SEQ ID NO: 36417 - protein, 226 aa, Unknown
  misc_feature (1)..(226): tr|A0A2N5ZI83|A0A2N5ZI83_9BACT 7-cyano-7-deazaguanine s ynthase OS=bacterium BM706 OX=2053465 GN=queC PE=3 SV=1
MKKAISLLSGGLDSVVSTFKAMENFDLRLCLFFDYGQKALNKELEAATFYSDLMGVKLEIIKLDFLKKITVTALVNEQLPPHMTLEALEDPEFVRQSALAVWVPNRNGLFVNIAGCYCDSMDINNVITGFNFEEASTFSDNSIEFIDAINNSLKYSTSNSCKVVSPFCNNSKSVIVKEAIHLNIDLSKIFSCYNNDEKQCGICESCIRLKKALSDNDIDYSKWFLI

SEQ ID NO: 36418 - protein, 233 aa, Unknown
  misc_feature (1)..(233): tr|A0A2H6EGC2|A0A2H6EGC2_9BACT 7-cyano-7-deazaguanine s ynthase OS=bacterium BMS3Abin03 OX=2005711 GN=queC PE=3 SV=1
MSEKRENIAVIAVSGGLDSCVTAAIAKQEYELAFAHFNYGQRTEKRELKAFNDIADFYNVEKRLIIDYTHLSKIGGSSLTDKNIEVTKADLTSKEIPTSYVPFRNANILSGCVSWAEVLGARAVFIGAVFEDSSGYPDCRPAFFEAFGKIIDIGTKPETSVKIVTPIIHLSKAEIVKKGTELNAPLYLTWSCYQNEDVACGVCDSCALRLRGFQQAGIEDPILYEVKPDYWIK

SEQ ID NO: 36419 - protein, 235 aa, Unknown
  misc_feature (1)..(235): tr|A0A2H6EMZ2|A0A2H6EMZ2_9BACT 7-cyano-7-deazaguanine s ynthase OS=bacterium BMS3Abin04 OX=2005712 GN=queC PE=3 SV=1
MEKKKLAVIALSGGMDSCVTAAIANQDYNLALLHINYGQKTENRELTAFHDIAEFYNAEKKMVIEFTHFQKIGGSSLTDKNIEISKADLENKEIPTSYVPFRNANILSACVSWAEVIDAEAIFIGAVYEDSSGYPDCRPDFFSAFEQVINLGTKPQTQIKIETPIIYMKKSEIIQKGLELNAPFSLTWSCYQNEEEACGVCDSCALRLRAFQELGLEDPIPYKTRPNYAKKQQEQ

SEQ ID NO: 36420 - protein, 251 aa, Unknown
  misc_feature (1)..(251): tr|A0A2H6F340|A0A2H6F340_9BACT 7-cyano-7-deazaguanine s ynthase OS=bacterium BMS3Abin06 OX=2005714 GN=queC PE=3 SV=1
MSFKDMKLAVVLLSGGVDSTTTLAIAKAEGREIYALSFAYGQRHKIELESARRIAEKFNVKKYRVVNFDLRDIGGSALTSDMEVPKSMKRGSGETERRRNEHVIPVSDSIPVTYVPARNTIFLSFALAWAETLEAEDIFIGANAVDYSGYPDCRPEFIKAFEDMANLATKASVEGKVKFKIQVPLIKLTKAEIIKKGTELGVDYSLTWSCYDPVTEQNKESGQYKPCMRCDSCRLRAKGFKEAGVKDPLIT

SEQ ID NO: 36421 - protein, 274 aa, Unknown
  misc_feature (1)..(274): tr|A0A2H6FDS9|A0A2H6FDS9_9BACT 7-cyano-7-deazaguanine s ynthase OS=bacterium BMS3Abin07 OX=2005715 GN=queC_2 PE =3 SV=1
MRAARRQAEPQGRSTCKRGHIFRLMKHGKKTAVVLLSGGIDSSTALAIAMSEGFDCYALSFDYSQRHKVELESAKRVAEHLGAKKHLVISFNLREIGGSALTSEIDVPKHELKTGSQKSGTTHIRTNHSNPRTRIPVTYVPARNTIFLSFGLGWAEVLNAPDIFIGANVVDYSGYPDCRPEYLRAYEKMANLATKISVEGKIKFRINAPLLHMTKNEIIKKGTELGLDYSLTWSCYDPGVTDSGKAVPCGRCDSCVIRAGGFRDAGITDPLLNR

SEQ ID NO: 36422 - protein, 198 aa, Unknown
  misc_feature (1)..(198): tr|A0A2H6F8V4|A0A2H6F8V4_9BACT 7-cyano-7-deazaguanine s ynthase OS=bacterium BMS3Abin07 OX=2005715 GN=queC_1 PE =3 SV=1
MGIVTLVSGGFDSTLMSMMAQEEGIALFPLFIDYGQLGATKEWEACQRLHERYKLPKVVRMDLSGFGNTIPSGITDPNLRINEDAFLPGRNLLFVVAGAAYALKVQADSVALGLLDPADHLFPDQTEKFVHESERMIEISMGKRISVLTPLIDFSKSDVLAMARVRRLQDTYSCHAGGDTPCGVCVACIEIANAKERN

SEQ ID NO: 36423 - protein, 232 aa, Unknown
  misc_feature (1)..(232): tr|A0A2H6FKU2|A0A2H6FKU2_9BACT 7-cyano-7-deazaguanine s ynthase OS=bacterium BMS3Abin08 OX=2005716 GN=queC PE=3 SV=1
MTETGKKKAVILLSGGIDSSTTLAIALSEGFQCYALTFDYSQRHGRELESAGRVAESTGADKHLVISFDLREIGGSALTSPDISVPREKSPGAIPVTYVPARNTIFLSFALGWAEVLGASDIFIGANSVDYSGYPDCRPEYLRAFEEMANLATRASVEGELGFRIRAPLLYLTKGEIIRKGRELGLDYGLTWSCYDPTPEGRPCLVCDSCRYRNKGFQEAGLPDPLLSQQPG

SEQ ID NO: 36424 - protein, 283 aa, Unknown
  misc_feature (1)..(283): tr|A0A2H6FXQ0|A0A2H6FXQ0_9BACT 7-cyano-7-deazaguanine s ynthase OS=bacterium BMS3Abin10 OX=2005718 GN=queC PE=3 SV=1
MKRAVVLLSGGIDSTTSLAIAKAEGFGIYAISFDYGQRHSIELSSAKQCAAYFDVKKHIVISFDLREIGGSALTSDIEVPKVSLGKTTHDEKEVEKIRSWEDKNSQPLNLSASQLPEAQPDIPVTYVPARNTIFLSFALAFAESIGSENIFIGANAVDYSGYPDCRPEFIKAFESMANLATKASVEGRARFLIHAPLITLTKAEIIKKGAELGVDHSLTWSCYDPQPATEDEKMRRCEDKQSQPPNFLASELLKYVPCMRCDSCILRARGFKEAGITDPLILK

SEQ ID NO: 36425 - protein, 235 aa, Unknown
  misc_feature (1)..(235): tr|A0A2H6G180|A0A2H6G180_9BACT 7-cyano-7-deazaguanine s ynthase OS=bacterium BMS3Abin11 OX=2005719 GN=queC PE=3 SV=1
MVDKADKADKAVVLLSGGLDSATALAIARNEGYQCFALSFDYGQRNRVELEAARRVANAGGVAEHRILNLPIGELGGSALTDDAIDLPKVSEFEDSGIPVTYVPARNTVFLSMALAMAEIYGARDIFIGANAVDYSGYPDCRPGFILAFENLANLATREGVQGEGFRIRAPLIDMSKADIINTGVRLGVDYSLTISCYNPSPDGLACGVCDSCHLRADGFNQTDTADPTVYWPVR

SEQ ID NO: 36426 - protein, 241 aa, Unknown
  misc_feature (1)..(241): tr|A0A2H6IE78|A0A2H6IE78_9BACT 7-cyano-7-deazaguanine s ynthase OS=bacterium BMS3Bbin07 OX=2005730 GN=queC PE=3 SV=1
MKKAVILLSGGIDSSTTLAIARSEGYECYTLTFDYSQRHRRELESAEKVAEALGVKRHLVTRFDLREIGGSALTGEGEVPKHKAEAAGRKLEFNKSSIVNRQSSIPVTYVPARNTIFLSFALGWAEVLEAGDIFIGANAVDYSGYPDCRPEYLHAFEAMANLATRASVEGKIKFRILAPLLYLTKGEIIRRGAELGFDYGLTWSCYDPAPDGRPCLRCDSCKFREKGFSEAGLKDPLLLQK

SEQ ID NO: 36427 - protein, 272 aa, Unknown
  misc_feature (1)..(272): tr|A0A2H6ISH9|A0A2H6ISH9_9BACT tRNA(Ile)-lysidine synth ase OS=bacterium BMS3Bbin09 OX=2005732 GN=tilS_2 PE=4 S V=1
MTPEKKYKNLLDSLKKMKRVVIAFSGGVDSTFLLKAATLSGLGEILAVTGQSESLPEQELSFTKEIAGSFNVKHKIIVTEELKDNNYAENPPDRCYYCKKELFTRLSDIASRENYLYVLDGTNADDIHDRRPGRQASVENNVKSPLLDAGLNKKEIRKISRDLGLPTWDKPATPCLSSRFPYGHKITAEGLLRVDRAEAFIREFGIKELRVRSHSNAARIEVHPEDFAKLTEDTAREKIVNFLRSLGYENITLDLRGFRSGSSNEFIEKNKE

SEQ ID NO: 36428 - protein, 244 aa, Unknown
  misc_feature (1)..(244): tr|A0A2H6IXJ2|A0A2H6IXJ2_9BACT 7-cyano-7-deazaguanine s ynthase OS=bacterium BMS3Bbin10 OX=2005733 GN=queC PE=3 SV=1
MSADNRQNTAALLLFSGGQDSTACLAWALERYARVETVGFDYGQRHNIELSCRQRVREEISERFPQWRARLGADHMIEMPALGKISDTALTRDVAIEMQQNGLPNTFVPGRNLLFFTYAAALAYRRGLMALIGGMCETDFSGYPDCREETLQTLAKAIRLGTEKDLVIETPLMHLTKAQTWALVHELGGDALTALIVEHTHSCYLGERGKRHEWGYGCGDCPACALRARGYREWRCETAAAQTR

SEQ ID NO: 36429 - protein, 246 aa, Unknown
  misc_feature (1)..(246): tr|A0A2H6J8W1|A0A2H6J8W1_9BACT 7-cyano-7-deazaguanine s ynthase OS=bacterium BMS3Bbin12 OX=2005735 GN=queC PE=3 SV=1
MSPVVEGLMNRTREPAPTSPDRPAVVLLSGGLDSATTLAVARARGYRCYALSLDYGQRQAAELDAARCVARGAAGHKVIRIDLGAIGGSALTDPAIPIPEHPSEGIPVTYVPARNTVFLSLALGWAEVLGARDLFIGVNAVDYSGYPDCRPEYIRAFEALAALATRAGVEGARFRVHAPLIRLSKADIIREGLHLGLDYAVTVSCYAADSEGRACGVCDACRIRAAGFHAAGVPDPTRYQPGRGAV

SEQ ID NO: 36430 - protein, 232 aa, Unknown
  misc_feature (1)..(232): tr|A0A2H6JRK7|A0A2H6JRK7_9BACT 7-cyano-7-deazaguanine s ynthase OS=bacterium BMS3Bbin14 OX=2005737 GN=queC PE=3 SV=1
MSHDHREAVILLSGGLDSTTVLALALSQGYACSCLSFSYGQRQKIELQKARALSKKMGARRHLVLRLDLDTIGGSALTTAIDVPKDRDFSAMDQGIPVTYVPGRNIIFLSHAVAWAEVIGASDIFLGINAVDFSGYPDCRPDFLAAFEKMANLGTRSGSEDKPFTLHAPLMHLRKKEIIEMGMSLGVDYSMTHSCYDPRGGLACGRCDACRLRLRGFAEAGMVDPVSYDLNP

SEQ ID NO: 36431 - protein, 230 aa, Unknown
  misc_feature (1)..(230): tr|A0A101VUP0|A0A101VUP0_9BACT 7-cyano-7-deazaguanine s ynthase OS=bacterium BRH_c32 OX=1734400 GN=queC PE=3 SV =1
MNKKLAVVALSGGMDSCVTAAYAKQEYDLALLHVNYGQRTQKRELKAFHDIAEFYNVKNKLVIDFSHFTQIGGSSLTDNKMDVTIADLNNHEVPTTYVPFRNANILSAATAWAEVLNANAIFIGAVYEDASGYPDCRPDFYKAFEEVIRIGTKPKTDIKVITPIINFSKEEIVKKGIELNAPLHLTWSCYQNDEEACGVCDSCAFRLRGFQKAGFDDPIPYNTKPNYNLL

SEQ ID NO: 36432 - protein, 225 aa, Unknown
  misc_feature (1)..(225): tr|A0A2M7YW41|A0A2M7YW41_9BACT 7-cyano-7-deazaguanine s ynthase OS=bacterium CG_4_9_14_3_um_filter_65_15 OX=197 5567 GN=queC PE=3 SV=1
MSTRSKAIVLVSGGLDSAVCLGEAAREHDLALLHVNYGQRTEGRELRAFEDLAVHYGVTEKLVVDITHLKQIGGSSLVDESRAVETGLPEPGAGIPSTYVPFRNAHILSVAVSWAEVNGATRIFIGAVEEDGSGYPDCRQEFYDRFTAAVQAGTRLGHRLTVVTPLIHLDKAAIVLRGRELSVPLQLTWSCYTGQDVACGECESCRLRLRGFAQAGVSDPIPYRA

SEQ ID NO: 36433 - protein, 228 aa, Unknown
  misc_feature (1)..(228): tr|A0A1J5CV27|A0A1J5CV27_9BACT 7-cyano-7-deazaguanine s ynthase OS=bacterium CG2_30_54_10 OX=1805403 GN=queC PE =3 SV=1
MTNKLKPLAVIVASGGMDSTVCISIAAQRYEPALFHLNYGQRTEKRELKAFLDLVRHFNVRHTLVVDASHFRQIGGSALTDENIAIPSFGRLEKGVPVTYVPFRNGNILAMAVSWAEVIGAGKVFIGAVEEDSSGYPDCRETFIKAFNHAVRAGTKAARALSIFAPLLHLTKKDIVIKGVNLGSPFHLTWSCYQGESEACGVCDSCVLRLKGFEQAGIQDSIPYRKQA

SEQ ID NO: 36434 - protein, 236 aa, Unknown
  misc_feature (1)..(236): tr|A0A3A9AVE6|A0A3A9AVE6_9BACT 7-cyano-7-deazaguanine s ynthase OS=bacterium D16-34 OX=2320120 GN=queC PE=3 SV= 1
MQKQQRALVLCSGGLDSTTLLARVIESYGSQNVVALAVQYGQKHVRELQSAQAVADYYGVPLKMIDVAAIFADSSCSLLSHSDSEIPHESYDEQLSCTQDAPVVSTYVPFRNGLFLSCAASMALSLECSTLYYGAHHDDWAGDAYPDCSREFVEAMDSAIRLGSADQLHVEAPFVTWSKADIVAEGMRLGVPYELTWSCYEGGDEPCGKCATCIDRARAFEVNGLVDPLYMRKDAK

SEQ ID NO: 36435 - protein, 248 aa, Unknown
  misc_feature (1)..(248): tr|A0A3A9C6T1|A0A3A9C6T1_9BACT ATP-dependent sacrificia l sulfur transferase LarE OS=bacterium D16-54 OX=232010 4 GN=larE PE=4 SV=1
MKLQEFFACHPRAAVAFSGGVDSAYLLYAAKQYAKEVRAYYVKSEFQPRFELDDAKRLARELGAEMRILNQNILSVPGVRENPSDRCYYCKRALFRTITEAAESDGFSVLLDGTNASDEAGDRPGMRALAELSVFSPLRECGLTKSQVRRLSKEAGLFTWDKPAYACLATRIPTGEEITGDKLSATEDAESYLFSLGFTDFRVRSQNGHGRLQIPEPQFALLLKHRKAILTKLKKYYKTVSVDLEVRE

SEQ ID NO: 36436 - protein, 232 aa, Unknown
  misc_feature (1)..(232): tr|A0A3A8WTF8|A0A3A8WTF8_9BACT 7-cyano-7-deazaguanine s ynthase OS=bacterium D16-59 OX=2320098 GN=queC PE=3 SV= 1
MKAMILLSGGIDSTTCLGMAVERFGRENVIALSISYGQKHEKEVLASERVAEYYGIEQMKLDLAEIFKYSDCSLLQHSSQEVPEEAYAEQLEKMDGKPVTTYVPFRNGLFLSSAASIALSRGCSVVYYGAHADDAAGNAYPDCSDAFNCAISEAIYIGSGGQLRVEAPFVGMAKAEVVKTGLELNVPYELTWSCYEGKEKPCMVCGTCIDRAEAFRLNGIADPLLERLNNSL

SEQ ID NO: 36437 - protein, 231 aa, Unknown
  misc_feature (1)..(231): tr|A0A3A9AZI8|A0A3A9AZI8_9BACT 7-cyano-7-deazaguanine s ynthase OS=bacterium D16-63 OX=2320119 GN=queC PE=3 SV= 1
MTQQGKALVLCSGGLDSTVLLARYVERLGAASVYALSISYGQRHQREVEAARAVAARYGVEQRFLDLGAIFADSACSLLAGSAEPLPTGAYAEQQVAAGGGPVSTYVPFRNGLFLSAAASMALSLECSVVGYGAHHDDWAGAAYPDCSAEFVGAMARAVSEGTGGQLSLEAPFVAWSKADIVAEGLRLGVPFELTWSCYEGGEAPCGRCATCLDRAAAFAAHGVADPALAA

SEQ ID NO: 36438 - protein, 224 aa, Bathymodiolus sp.
  misc_feature (1)..(224): tr|A0A482YXS1|A0A482YXS1_9BACT 7-cyano-7-deazaguanine s ynthase OS=bacterium endosymbiont of Bathymodiolus sp. 5 South OX=1181670 GN=queC PE=3 SV=1
MSKAVILLSGGLDSTTTLAIAKSQAFDCYALSFDYGQKQKSELNAAKQLAELFSATEHRTMRISLSDIGGSALTDSAIEVPKFKPSDEIPVTYVPARNTIFLSYAMAWAEVLECQDIFIGVNALDYSGYPDCRKEYIKSFEVMANLATKQGVEGKKLTIHTPLINLHKAQIIQKGLSLGVDYSLTTTCYQADNNGDACGFCDACEYRKLGFKEAGVPDPTRYQK

SEQ ID NO: 36439 - protein, 226 aa, Escarpia laminata
  misc_feature (1)..(226): tr|A0A497TNP8|A0A497TNP8_9BACT 7-cyano-7-deazaguanine s ynthase OS=bacterium endosymbiont of Escarpia laminata OX=1221601 GN=queC PE=3 SV=1
MLKTKKAVILLSGGLDSATVLAIAQQQGYTCHALSMEYGQRHMAELGAARRVAQSLNAAEHKMVRIGLETIGGSALTDSAIPVPDHAEEGIPVTYVPARNTVFLSLALGWAEVLCAQDIFIGVNAVDYSGYPDCRPEFIHSFEQLANLATKAGVEGKQFKVHTPLIDMSKAEIISTGIRLGVDYNLTISCYQADPEGRACGVCDSCRLRAKGFQDAAIDDPTSYRC

SEQ ID NO: 36440 - protein, 217 aa, Unknown
  misc_feature (1)..(217): tr|A0A132HVK2|A0A132HVK2_9BACT 7-cyano-7-deazaguanine s ynthase OS=bacterium F083 OX=1768114 GN=queC PE=3 SV=1
MKPDTLLIYSGGVDSTTMLYEYRDRIALALSFHYGSNHNDAELACARWHCARLGIRQVVIPLGFMAQHFRSALFEGADAVPGQKYDEQSMHSTVVPFRNGIMLSIAAGMAESEGLRQVMMANHSGDHSIYPDCRPAFVDAMGAAISAGTYDGVVLDAPYTRLTKADIVRRGTALGVDYGHTWSCYKGGEHACGVCGTCVERREAFAAAGQKDPAMEE

SEQ ID NO: 36441 - protein, 219 aa, Unknown
  misc_feature (1)..(219): tr|A0A202DQF9|A0A202DQF9_9BACT 7-cyano-7-deazaguanine s ynthase OS=bacterium F11 OX=1932698 GN=queC PE=3 SV=1
MKKRKAVVLLSGGMDSAVALWWAKKKGWSCFALSFDYGQRHKKEINQARLLARTAQVPFRLVRFSLPWGGSSLTDSRKALPKNRPTRKMRDRIPSTYVPARNTIFLSFALSWADQMKSEAIVIGANAIDYSGYPDCRPRYMKAFERVSKEGTRQGVEMKSKISILTPLLNLTKVDIVKLGQSLNVPLHLTWSCYAGKSRPCDRCDSCRLREKGFQEAGI

SEQ ID NO: 36442 - protein, 233 aa, Unknown
  misc_feature (1)..(233): tr|A0A2H5VPF9|A0A2H5VPF9_9BACT 7-cyano-7-deazaguanine s ynthase OS=bacterium HR08 OX=2035403 GN=queC_2 PE=3 SV= 1
MTRRAVVLLSGGIDSTTTLAIARAEGYDVYALSVRYGQRHEIELERARAIADAFGVARHLMITIDLREIGGSALTDERIAVPKDRTPEEIGAEIPITYVPGRNTIFLAFALAWAEVLGAEDIFFGANVLDYSGYPDCRPEYLRAFEHMANLATRAGVSGQARFRLHAPLLLMTKAEIIRRGRELGVDYRLTWSCYDPVEREGEVLACGRCDSCQIRRRGFAEAGIEDPIPYAN

SEQ ID NO: 36443 - protein, 221 aa, Unknown
  misc_feature (1)..(221): tr|A0A2H5VKC6|A0A2H5VKC6_9BACT 7-cyano-7-deazaguanine s ynthase OS=bacterium HR08 OX=2035403 GN=queC_1 PE=3 SV= 1
MSESAAACVLTSGGLDSAVLVAELLPQYARVFPVYVRSGLRWEEVELHWLQRFLNHLRDARLEPLTIMTLPIEDIYGRHWSVTGDGVPEREAAWDSVYLPGRNLILLAKAAVFCALRGVSTIALGLLEGNPFPDATPSFLSLMAQTASQGLAHPIVILAPYRGLSKHEIIRRGRHLPLDLTFSCISPVGHHHCGRCSKCAERQQAFAQAGLLDPTAYAHAP

SEQ ID NO: 36444 - protein, 231 aa, Unknown
  misc_feature (1)..(231): tr|A0A2H5VRX8|A0A2H5VRX8_9BACT 7-cyano-7-deazaguanine s ynthase OS=bacterium HR09 OX=2035404 GN=queC PE=3 SV=1
MGEGMSGDKAVVLLSGGMDSATAAAWARARWPWVGALSVDYGQRHAFELQAARRVAESLKLSEHRVIKVDLRAFGGSALTDELAVPKNRENIGEGIPVTYVPARNTVLLALLLAYAETRGARHLVMGANVLDYSGYPDCRPDFLRAFQRVANLGTKAGREGAGFEVHAPLLHLTKAGIVRLGFQLGLAFELTFSCYDPPEEGVHCGACDACRLRRQGFAEANFPDPTRYAT

SEQ ID NO: 36445 - protein, 221 aa, Unknown
  misc_feature (1)..(221): tr|A0A2H5VZX2|A0A2H5VZX2_9BACT 7-cyano-7-deazaguanine s ynthase OS=bacterium HR10 OX=2035405 GN=queC_2 PE=3 SV= 1
MSESAAVCVLTSGGLDSAVLVAELLPRYARVFPVYVRSGLQWEEVELHWLRQFLNRLRDARLEPLTIMTLPMEDIYGGHWSVTGDGVPEREAAWDSVYLPGRNIILLAKAAVFCALRGVSTIAIGLLEGNPFPDATPSFLSLMAQTVSQGLAHPIAILAPYRGLSKHEIIRRGRHLPLDLTFSCISPIGHHHCGRCSKCAERQQAFAQAGILDPTAYAHAP

SEQ ID NO: 36446 - protein, 233 aa, Unknown
  misc_feature (1)..(233): tr|A0A2H5VWS7|A0A2H5VWS7_9BACT 7-cyano-7-deazaguanine s ynthase OS=bacterium HR10 OX=2035405 GN=queC_1 PE=3 SV= 1
MAGKAVVLLSGGIDSTTTLAIARAEGYEVYALSFRYGQRHEIELERARAIAAAFGVARHLVIAIDLREIGGSALTDESLAVPKDRTPEEIGAEIPVTYVPGRNTIFLAFALAWAEVLGAEDIFFGANVLDYSGYPDCRPEYLRAFEQMANLATRAGVSGQARFRIHAPLLSMTKAEIIRRGRELGVDYRLTWSCYDPVARGGEILACGRCDSCQLRRRGFAEAGVEDPIPYAN

SEQ ID NO: 36447 - protein, 210 aa, Unknown
  misc_feature (1)..(210): tr|A0A2H5W5T9|A0A2H5W5T9_9BACT 7-cyano-7-deazaguanine s ynthase OS=bacterium HR11 OX=2035406 GN=queC PE=3 SV=1
MRELVVVLFSGGLDSTVALWWALRQGWNAIPLSIDYKGRPGGEREAARQIAALARAELLEVPLPFYRDLQGWRQDGPLPADLAEANPVYLPAKNLLFYAIAAYYAEVLGATRIVGGHYRHDGTRFPDASAAYFARLGGLITEGLYSRRPHLELPFLDMTKAAIVRLGLDLGAPLDRTWSCYWDGPTPCGRCEGCREKEVALQAVESGLGR

SEQ ID NO: 36448 - protein, 203 aa, Unknown
  misc_feature (1)..(203): tr|A0A2H5WIR5|A0A2H5WIR5_9BACT 7-cyano-7-deazaguanine s ynthase OS=bacterium HR13 OX=2035408 GN=queC_2 PE=3 SV= 1
MSAHKIAVLFSGGVESTTLLYMYLQRKEIVYPVYIKMGESWESLELENALRLWQYTKSRYASLRPLRVINLQVSGAVRRSPYQVSEIFIPLRNMSLITACAIYALSKRVSRLAIGSLGLYPFPDNSNSYIKELERLISEGSGTAFSIEMPLFGLEKGKIVKEFYGKVPYHLTLSCAMPKKVGNKILHCGKCIKCKERQEALLG

SEQ ID NO: 36449 - protein, 203 aa, Unknown
  misc_feature (1)..(203): tr|A0A2H5WGL0|A0A2H5WGL0_9BACT 7-cyano-7-deazaguanine s ynthase OS=bacterium HR13 OX=2035408 GN=queC_1 PE=3 SV= 1
MDSATLLWLSKREFDKVYAISFDYGQRHKVEIKYAKDLAKMAQVEEHFIVEVPHYSVLKGSALLDKEISVPKGEYPQEEPPITTVPMRNLTFISIAASFADTLEIDHIGIGVHALDSPYPDCRPEFITSAEAAVNASSIFVAKTKKRIHIYAPFLGMSKRDIALIGRDLGVPFEKTYSCYVGTEPPCGECAACIQRKQALSFL

SEQ ID NO: 36450 - protein, 237 aa, Unknown
  misc_feature (1)..(237): tr|A0A2H5WMC6|A0A2H5WMC6_9BACT 7-cyano-7-deazaguanine s ynthase OS=bacterium HR14 OX=2035409 GN=queC PE=3 SV=1
MELSVSQQRAPSAVVLLSGGQDSTTCLYWAKRHFEKVYALTFDYGQRHRIELDAARTVAQMAGVAHHLILRVCELEQLGGSALLSDIPIQETGGRGNLPNTFVPGRNLLFLVLAAAWAYQLECHHLVGGMCQTDYSGYPDCRRATIDALEQAIRLGMEWDITIHTPLMFLTKAESVKLAIEVGALEALAYSHTCYEGRFPPCGQCPACRLRARGFEEAGIEDPLIVRARSTISSPQA

SEQ ID NO: 36451 - protein, 229 aa, Unknown
  misc_feature (1)..(229): tr|A0A2H5WTD3|A0A2H5WTD3_9BACT 7-cyano-7-deazaguanine s ynthase OS=bacterium HR15 OX=2035410 GN=queC PE=3 SV=1
MMEKIAPSAVVLLSGGQDSTTCLYWAKKRFDRLYALTFDYGQRHRIELDAAHTIARMAGVAEHRILRMSELEELGGSALLSDAPIQETSGRGNLPNTFVPGRNLLFLTLAAAWAYQLECHDLVGGMCQTDYSGYPDCRRATIDALEEAIRLGMEWEIRIHTPLMFLTKAQSVKLAAEVGAMDALAYSHTCYEGRFPPCGICPACRLRAKGFEEAGVEDPLLIRAREMAI

SEQ ID NO: 36452 - protein, 233 aa, Unknown
  misc_feature (1)..(233): tr|A0A2H5WZF3|A0A2H5WZF3_9BACT 7-cyano-7-deazaguanine s ynthase OS=bacterium HR16 OX=2035411 GN=queC PE=3 SV=1
MGTLVLLSGGMDSAVAAAWAKRTLPPPYHALSVDYGSIHNERELSCARKIADLLGMEWHQASVVLPHGMASGLLKGHEWSQRLAEGEHARERGLPVSFVPARNAILLSLAAGLAYSLSLRHIVGGMHPGDNFGYPDCRQQFLQSMERALQLALDEYPLQFHFPYHTLLQGEGDAVEAKATVIRLAQHMDVLPLLKYTHTCYQGQYPPCGQCAACQLRAKAFERAGIADPLLTG

SEQ ID NO: 36453 - protein, 238 aa, Unknown
  misc_feature (1)..(238): tr|A0A2H5XGL3|A0A2H5XGL3_9BACT 7-cyano-7-deazaguanine s ynthase OS=bacterium HR18 OX=2035413 GN=queC PE=3 SV=1
MSAPNLLPTLKPAEHGETALVLLSGGQDSTTCLYWALHYFPKVEAIGFHYGQKHAVELEQARKIAEQAGLPFTVLDLRGLLHGSALTEHDQDVSAAHPLAPHLPASFVPGRNALFLTLAASYGFTRGIHDLVGGMCQTDYSGYPDCRRAFIDAMERALSLALDTTIRIHTPLMHLTKAETWRLARELGILDVIIEQTHTDYNGDRSERHAWGYGRLDNPASILRARGYEEAKARGWLD

SEQ ID NO: 36454 - protein, 228 aa, Unknown
  misc_feature (1)..(228): tr|A0A2H5XVS7|A0A2H5XVS7_9BACT 7-cyano-7-deazaguanine s ynthase OS=bacterium HR20 OX=2035415 GN=queC PE=3 SV=1
MSKIAVVALSGGMDSLVTLAEIRAEGYDIAALHFNYGQRTERRELEAFHAICDHYAIETRLVVDVAYLAAIGASSLTDPNIEVERANLERTGIPSSYVPFRNANILAIATSWAEALGASAIGIGAVEEDSSGYPDCRREFFSAFERVIELGTKPETHITILTPVIGYRKAEIVRRGIELGVPFELSWSCYARSDIACGECDSCALRLRGFQQAGVEDPIPYAVRPHYA

SEQ ID NO: 36455 - protein, 231 aa, Unknown
  misc_feature (1)..(231): tr|A0A2H5Y150|A0A2H5Y150_9BACT 7-cyano-7-deazaguanine s ynthase OS=bacterium HR21 OX=2035416 GN=queC PE=3 SV=1
MAAQARLAVALMSGGMDSAVAAALVRQAGYELAGLHISYGHRTAARERRAFEALCDAWGIVRRLVVSLEHLRLIGGSALTDPAIPVPEGELSRQGIPPTYVPFRNANLLAIAVSWAEVLGASAVVIGAVEEDSSGYPDCRKVFYEAFQRVIELGTRPETRIKLLTPVIQLRKRDIVRRGVELGVPFQLTWSCYQREDLACGECDSCLLRLRGFREAGVEDPLPYARIPSGV

SEQ ID NO: 36456 - protein, 230 aa, Unknown
  misc_feature (1)..(230): tr|A0A2H5YRL4|A0A2H5YRL4_9BACT 7-cyano-7-deazaguanine s ynthase OS=bacterium HR26 OX=2035421 GN=queC PE=3 SV=1
MTGARTTIGRAVVLLSGGLDSTTAAYLARAEGYELYALSFDYGQRHRRELESAAAVARAVGAVEHRIVTIDLAQWGGSSLTGAGPIPTEPTAGIPSTWVPARNLIFLAVASGYAEVIGASAIFIGVSQVDYSGYPDCRGEFLEAYQRAADLASKQFVEEGKRIPVLAPFLHLPKAGIIRLGLALGVDYSLTWSCYQGGTEPCGACDSCRLRTKAFAEAGVPDPLLSSARP

SEQ ID NO: 36457 - protein, 226 aa, Unknown
  misc_feature (1)..(226): tr|A0A2H5YY54|A0A2H5YY54_9BACT 7-cyano-7-deazaguanine s ynthase OS=bacterium HR27 OX=2035422 GN=queC PE=3 SV=1
MATERRPRRAVVLLSGGLDSTTLAYLLDAYGFELYGLSFRYGQRHERELAAARAVAERLRFAEHRIVTVDLAQWGGSSLVGAGEIPSEPTPGIPSTYVPVRNLVFLAIAHAYAEAIDADAVAIAVSQVDYSGYPDCRGEFLAAYQQAADLASRRFVETGRRIPVLAPFLDVPKASIVRLGLRLGVDYGLTWSCYRGGEHPCQQCDSCRLRAQAFAEVGVPDPLLGG

SEQ ID NO: 36458 - protein, 239 aa, Unknown
  misc_feature (1)..(239): tr|A0A2H5Z257|A0A2H5Z257_9BACT 7-cyano-7-deazaguanine s ynthase OS=bacterium HR28 OX=2035423 GN=queC PE=3 SV=1
MDSNTLPRRAVILLSGGLDSTTLAYLLHTYGFQLYGLSFRYGQRHERELLAAQAVAQRLSFAEHRIVTLDLAQWGGSSLVGAGEIPSQPTSGIPSTYVPVRNLIFLAVAHAYAEAIDADAVAIAVSQVDYSGYPDCRGEFLAAYQQAADLASRRFVETGRRIPVLAPFLDVPKSAIIRLGLRLGVDYSLTWSCYRGGEWPCQECDSCRLRARAFAEVGVPDPLLAPPAAPRGTTGAVDR

SEQ ID NO: 36459 - protein, 239 aa, Unknown
  misc_feature (1)..(239): tr|A0A2H6A464|A0A2H6A464_9BACT 7-cyano-7-deazaguanine s ynthase OS=bacterium HR33 OX=2035428 GN=queC PE=3 SV=1
MARRRAVVLLSGGVDSTTTLAIARAEGFETYALTFRYGQRHEIEVEAARRVARSLGAKEHAVVGIDLTLFGGSALTADIPVPKDRAADEIASGIPVTYVPARNTIFLSFALAWAEVLGAGDIFIGVNALDYSGYPDCRPEYIEAYQRMADLATKAGVEGRQRLKIHTPLIGLKKHEIIRRGLELGVDYSLTHSCYDPLPGGEACGRCDSCILRIKGFAEAGVQDPIKYAAKYAGYRVGP

SEQ ID NO: 36460 - protein, 280 aa, Unknown
  misc_feature (1)..(280): tr|A0A2H6AI20|A0A2H6AI20_9BACT 7-cyano-7-deazaguanine s ynthase OS=bacterium HR36 OX=2035431 GN=queC_2 PE=3 SV= 1
MQSRSLCVLVISSLRCRHKIMIAVSPMRWLAVEAKAVVLLSGGLDSATTLAVARSEGYAVYALTVDYGQRHRRELQAAQRVAESLGVVEHRIVRLDLRAIGGSALTDNIQVPKDRAMEEIEHGIPVTYVPARNTVLLGLALGYAEVVGAFDIFIGCNAIDYSGYPDCRPEFLRQFEALANVATKAGVEGLGVFRVHAPLLYLSKANIIREGKRLGVNFRLTHSCYEPTEEGLACGRCDSCRLRLKGFLEAQERDSIGYAYVPPEYSAAVAVAEKPRKAGR

SEQ ID NO: 36461 - protein, 243 aa, Unknown
  misc_feature (1)..(243): tr|A0A2H6AGA6|A0A2H6AGA6_9BACT 7-cyano-7-deazaguanine s ynthase OS=bacterium HR36 OX=2035431 GN=queC_1 PE=3 SV= 1
MQEMMAVDWADLPKEVPLAVLVSGGLDSAVLLGLAAQRQRLVQPIYIRCGLCWETVELSYLRHFLQALDQPSLRPVVILDLPVADLYDRHWSLDGRNVPGAASADDAVYLPGRNVLLLSKALLWCHLHQVCVLALGTLRGNPFADATPTFMQRMADLVNQACQAQLRVLQPLRLLDKSQVLALGRHLPLRWTFSCIAPQNHRHCGRCNKCAERQRAFAQCALPDPTEYATEPSNYPDKQATEH

SEQ ID NO: 36462 - protein, 224 aa, Unknown
  misc_feature (1)..(224): tr|A0A2H6ALN3|A0A2H6ALN3_9BACT 7-cyano-7-deazaguanine s ynthase OS=bacterium HR37 OX=2035432 GN=queC PE=3 SV=1
MSKKAVTVVSGGIDSSTLLYKTLREGYIPYAITFIYGQKHSKEIDSARRICATLGVSHRVLDLGGLREILSGSALTDPGVDIPEVPETAEYYETLKTTIVPNRNSIFLSIAVGYAVSLGANYVFFGAHHSDRGVYPDCRKEFVQAFEFAERLATDNHNLVVSAPFVDMTKAQIVKLGAELGVPFKDTWSCYKGGRVHCGVCSSCRERKRAFREAGVLDPTEYER

SEQ ID NO: 36463 - protein, 110 aa, Unknown
  misc_feature (1)..(110): tr|A0A2H6AQU0|A0A2H6AQU0_9BACT 7-cyano-7-deazaguanine s ynthase OS=bacterium HR38 OX=2035433 GN=queC PE=3 SV=1
MTPITGSLAAKMGVEEVYLGVIKDDFASHPRLEAYLALVKKFLEFNQVQLKMPLSGLTKQEVVALGHELGVPLEETWSCVASGEAPCGACNPCIAREEAFALADAKALAR

SEQ ID NO: 36464 - protein, 220 aa, Unknown
  misc_feature (1)..(220): tr|A0A3L7ZZM5|A0A3L7ZZM5_9BACT 7-cyano-7-deazaguanine s ynthase OS=bacterium J10(2018) OX=2320122 GN=queC PE=3 SV=1
MTKEKDALMVLSGGMDSTTMLYDHADSIALAVTFHYGSNHNEREAVCARYHCERLGIELIEIDLAFMGRHFSSALLNGADAIPEGHYADSNMKATVVPFRNGIMLAVAAGLAESRGLQAVMLANHAGDHSIYPDCRPGFVTTMGAAIAAGTYEHIELRAPYTGMTKGEIASRGKALGIDYSKTYSCYKGAEKHCGRCATCVERREALAEAGITDNTPYED

SEQ ID NO: 36465 - protein, 230 aa, Unknown
  misc_feature (1)..(230): tr|A0A202E0X9|A0A202E0X9_9BACT 7-cyano-7-deazaguanine s ynthase OS=bacterium K02(2017) OX=1932696 GN=BVY03_0254 0 PE=3 SV=1
MANLSLILLSGGLDSSLSLLIARQESQLQCAITINYGQKSFIQEMNAAAKICGHYHIQHQTIQIPFLADQKNHPFFNNDLKCPQPELNELDNLSTTQNTAKAVWVPNRNGVFINIAAAIAEQQNINSIYVGFNAEEATTFPDNSQDFITAINNSLSYSTLNQVKVKCPTIEMHKTEILNNLITQDFPLPYLWSCYNNQDNMCGLCESCKRLKRALINNQQQPLTQSLFNN

SEQ ID NO: 36466 - protein, 232 aa, Unknown
  misc_feature (1)..(232): tr|A0A4S1HWV0|A0A4S1HWV0_9BACT 7-cyano-7-deazaguanine s ynthase OS=bacterium M00.F.Ca.ET.141.01.1.1 OX=2563898 GN=queC PE=3 SV=1
MKTLAVCSGGLDSVSLAHMVAAEHELTGLLSFDYGQRHRKELGFAALCAQRLKVPHQIIDIGEIGRGLSGSALTSSIDVPDGHYAEDTMKITVVPNRNAIMLAIAFGLAAAHSAEAVAAAVHGGDHFIYPDCRPAFIEAFQTMQDRALDGYAQIRLYAPYVNLGKADIVADGARYGTPFAETWSCYKGGVRHCGRCGTCVERREAFHLAGHADPTDYEDADFWLEALRRRRA

SEQ ID NO: 36467 - protein, 221 aa, Unknown
  misc_feature (1)..(221): tr|A0A4S1I0N4|A0A4S1I0N4_9BACT 7-cyano-7-deazaguanine s ynthase OS=bacterium M00.F.Ca.ET.141.01.1.1 OX=2563898 GN=queC PE=3 SV=1
MKKAVVLLSGGMDSAAVIALAQEQGFAVHALSVRYGQRHTSELDAAARVAKAQGVVAHKTVDVDLRSIGGSALTDDIDVPEAGGAGIPVTYVPARNTIMLSLALGWAEVLGANDIFCGVNAVDYSGYPDCRPEFVAAFEALANLATKSGVEGAGIKVHAPLQFLSKGQIVSEGVRLGVDFGLTVSCYNADANGAACGHCDACRLRAQGFAEAGVPDPTLYA

SEQ ID NO: 36468 - protein, 232 aa, Unknown
  misc_feature (1)..(232): tr|A0A4S1APA0|A0A4S1APA0_9BACT 7-cyano-7-deazaguanine s ynthase OS=bacterium M00.F.Ca.ET.146.01.1.1 OX=2563899 GN=queC PE=3 SV=1
MNALVICSGGLDSVSLAHKVATEQKLIGLLSFDYGQRHKKELGFASICAKRLGVPHQIVDIRDVGRNLSGSALTDSVDVPDGHYAEDPMRITVVPNRNAIMLAIAFGVAAAQQADAVATAVHGGDHFIYLDCRPAFIDAFQTMQNHALAGYADIRLYAPYVNMSKADIVSEGAKYATPFEATWSCYKGGARHCGRCGTCIERREAFDLAGIADPTDYEDADFWLHAVQTRSA

SEQ ID NO: 36469 - protein, 232 aa, Unknown
  misc_feature (1)..(232): tr|A0A4S1APC3|A0A4S1APC3_9BACT 7-cyano-7-deazaguanine s ynthase OS=bacterium M00.F.Ca.ET.146.01.1.1 OX=2563899 GN=queC PE=3 SV=1
MKTLAVCSGGLDSVSLAHMVAAEHELTGLLSFDYGQRHRKELGFAALCAQRLKVPHQIIDIGEIGRGLSGSALTGSIDVPDGHYAEDTMKITVVPNRNAIMLAIAFGLAAAHSAEAVAAAVHGGDHFIYPDCRPAFIEAFQTMQDRALDGYAQIRLYAPYVNLGKADIVADGARYGTPFAETWSCYKGGVRHCGRCGTCVERREAFHLAGHADPTDYEDADFWLEALRRRRA

SEQ ID NO: 36470 - protein, 232 aa, Unknown; identical to SEQ ID NO: 36466
  misc_feature (1)..(232): tr|A0A4S1B0G3|A0A4S1B0G3_9BACT 7-cyano-7-deazaguanine s ynthase OS=bacterium M00.F.Ca.ET.152.01.1.1 OX=2563900 GN=queC PE=3 SV=1

SEQ ID NO: 36471 - protein, 243 aa, Unknown
  misc_feature (1)..(243): tr|A0A4S0YJ48|A0A4S0YJ48_9BACT 7-cyano-7-deazaguanine s ynthase OS=bacterium M00.F.Ca.ET.155.01.1.1 OX=2563901 GN=queC PE=3 SV=1
MIRKDAKRSALVLFSGGQDSATCLAWALERYETVETLGFDYGQRHRVELECREGFRSAVARTFPAWGERLGDDHMIDLSVLGAISDTAMTREIEIEATANGLPNTFVPGRNLMFMTIAAAIAYRRGLQVLVGGMCETDFSGYPDCRDDTMKALQVALNLGMDSRFLLETPLMWLDKADTWRLAHELGGDELVELVRVETHTCYVGERAELHAWGFGCGECPACRLRKRGYEAYLAGEKVTEPA

SEQ ID NO: 36472 - protein, 232 aa, Unknown; identical to SEQ ID NO: 36468
  misc_feature (1)..(232): tr|A0A4S0ZAW6|A0A4S0ZAW6_9BACT 7-cyano-7-deazaguanine s ynthase OS=bacterium M00.F.Ca.ET.156.01.1.1 OX=2563902 GN=queC PE=3 SV=1

SEQ ID NO: 36473 - protein, 232 aa, Unknown
  misc_feature (1)..(232): tr|A0A4S0Z951|A0A4S0Z951_9BACT 7-cyano-7-deazaguanine s ynthase OS=bacterium M00.F.Ca.ET.156.01.1.1 OX=2563902 GN=queC PE=3 SV=1
MKTLAVCSGGLDSVSLAHMVAAEHELTGLLSFDYGQRHRKELGFAALCAQRLKVPHQIIDIGEIGRGLSGSALTSSIDVPDGHYAEDTMKITVVPNRNAIMLAIAFGLAAAHSAEAVAAAVHGGDHFIYPDCRPAFIEAFQTMQDRALDGYAQIRLYAPYVNLRKADIVADGARYGTPFAETWSCYKGGVRHCGRCGTCVERREAFHLAGHADPTDYEDADFWLEALRRRRA

SEQ ID NO: 36474 - protein, 232 aa, Unknown; identical to SEQ ID NO: 36466
  misc_feature (1)..(232): tr|A0A4S0WMV6|A0A4S0WMV6_9BACT 7-cyano-7-deazaguanine s ynthase OS=bacterium M00.F.Ca.ET.157.01.1.1 OX=2563903 GN=queC PE=3 SV=1

SEQ ID NO: 36475 - protein, 232 aa, Unknown; identical to SEQ ID NO: 36468
  misc_feature (1)..(232): tr|A0A4S0WLB2|A0A4S0WLB2_9BACT 7-cyano-7-deazaguanine s ynthase OS=bacterium M00.F.Ca.ET.157.01.1.1 OX=2563903 GN=queC PE=3 SV=1

SEQ ID NO: 36476 - protein, 232 aa, Unknown; identical to SEQ ID NO: 36468
  misc_feature (1)..(232): tr|A0A4S0VIY6|A0A4S0VIY6_9BACT 7-cyano-7-deazaguanine s ynthase OS=bacterium M00.F.Ca.ET.159.01.1.1 OX=2563904 GN=queC PE=3 SV=1

SEQ ID NO: 36477 - protein, 232 aa, Unknown; identical to SEQ ID NO: 36466
  misc_feature (1)..(232): tr|A0A4S0VK84|A0A4S0VK84_9BACT 7-cyano-7-deazaguanine s ynthase OS=bacterium M00.F.Ca.ET.159.01.1.1 OX=2563904 GN=queC PE=3 SV=1

SEQ ID NO: 36478 - protein, 232 aa, Unknown; identical to SEQ ID NO: 36466
  misc_feature (1)..(232): tr|A0A4S2JVZ4|A0A4S2JVZ4_9BACT 7-cyano-7-deazaguanine s ynthase OS=bacterium M00.F.Ca.ET.162.01.1.1 OX=2563905 GN=queC PE=3 SV=1

SEQ ID NO: 36479 - protein, 232 aa, Unknown; identical to SEQ ID NO: 36469
  misc_feature (1)..(232): tr|A0A4S0YHH7|A0A4S0YHH7_9BACT 7-cyano-7-deazaguanine s ynthase OS=bacterium M00.F.Ca.ET.163.01.1.1 OX=2563906 GN=queC PE=3 SV=1

SEQ ID NO: 36480 - protein, 232 aa, Unknown; identical to SEQ ID NO: 36468
  misc_feature (1)..(232): tr|A0A4S0YAB4|A0A4S0YAB4_9BACT 7-cyano-7-deazaguanine s ynthase OS=bacterium M00.F.Ca.ET.163.01.1.1 OX=2563906 GN=queC PE=3 SV=1

SEQ ID NO: 36481 - protein, 458 aa, Unknown
  misc_feature (1)..(458): tr|A0A4V3PFJ6|A0A4V3PFJ6_9BACT Uncharacterized protein OS=bacterium M00.F.Ca.ET.168.01.1.1 OX=2563907 GN=EN811 _23180 PE=4 SV=1
MKVLDGEYPALKIAVIERGSRAKGDFQPVEISKSIVFKMKDLDDYRTKNWDNRIYDVLTLIAAVEFCDKTCRRPAWGWMRRFEVSLPVFEPIQWEDPHNVSALVSALKLLTGDEWVFSFTPRTGGPDDDVGRQSRLEFGDGNRIVMPFSDGLDSRAVSALLSAGGRSDRLIRVRVGSKKDDRPRRGDRKLPFLNIPFKVKPGPDGFNESSARTRGFKFTLMSAIAAYLLGTHDVVMPESGQGALGPSLVHTGHGYEDYRNHPRFLAKMERFFAALFGYQVTYRLPRLWRTKGETLRDFAALGGDETEWLDTRSCWQQNRNSSVNGKWRHCGICAACMLRRLSFHAAEVAEPADNYIWESLAASDFRSGAAKGFNKVTGAMEQYAIAGALHLDHLADLRSSPTHRKRMSRHAWQLSEELDISHQDAEGELFGLLERHEHEWKAFMKDLGPNSFVAQWLT

SEQ ID NO: 36482 - protein, 236 aa, Unknown; identical to SEQ ID NO: 35763
  misc_feature (1)..(236): tr|A0A4S1H4K8|A0A4S1H4K8_9BACT 7-cyano-7-deazaguanine s ynthase OS=bacterium M00.F.Ca.ET.168.01.1.1 OX=2563907 GN=queC PE=3 SV=1

SEQ ID NO: 36483 - protein, 232 aa, Unknown; identical to SEQ ID NO: 36466
  misc_feature (1)..(232): tr|A0A4S0Q707|A0A4S0Q707_9BACT 7-cyano-7-deazaguanine s ynthase OS=bacterium M00.F.Ca.ET.177.01.1.1 OX=2563908 GN=queC PE=3 SV=1

SEQ ID NO: 36484 - protein, 235 aa, Unknown
  misc_feature (1)..(235): tr|A0A4S0QHD5|A0A4S0QHD5_9BACT 7-cyano-7-deazaguanine s ynthase OS=bacterium M00.F.Ca.ET.177.01.1.1 OX=2563908 GN=queC PE=3 SV=1
MRTIVICSGGLDSVTLAHKVAAERTLIRLLSFDYGQRHKKELDYARRCAMRLGVPHDDVDITAVGRLLSGSALTGGGPVPEGHYAEDTMRVTVVPNRNAIMLAIAFGVAAAEQADAVAAAVHGGDHFIYPDCRPAFVEAFETMQRHALEGLAKIAFYTPFLQLSKADIVREGVRLDVPFAETWSCYQGGSLHCGRCGTCVERREAFHLAGQDDPTPYEDPDYWIEACRQHQARQR

SEQ ID NO: 36485 - protein, 233 aa, Unknown
  misc_feature (1)..(233): tr|A0A4S0N2C1|A0A4S0N2C1_9BACT 7-cyano-7-deazaguanine s ynthase OS=bacterium M00.F.Ca.ET.179.01.1.1 OX=2563909 GN=queC PE=3 SV=1
MTSTALVLFSGGQDSSTCLAWALDRFERIETVGFDYGQRHRIELDCRDTIRRELSAMNPVWAQRLGEDHTISLASLGEISKTALTSEIAIEMEDTGLPNTFVPGRNIIFLTFAAALAYRRGLKHIVGGMCETDYSGYPDCRDDTIKALQVALNLGMEKRFVLDTPLMWLDKADTWLLAKDLGGSRLVDTIVRDSHTCYLGERGDLHDWGYGCGTCPACELRAKGYQKFVAEQV

SEQ ID NO: 36486 - protein, 458 aa, Unknown; identical to SEQ ID NO: 36481
  misc_feature (1)..(458): tr|A0A4S0MQX2|A0A4S0MQX2_9BACT Uncharacterized protein OS=bacterium M00.F.Ca.ET.179.01.1.1 OX=2563909 GN=EN822 _23180 PE=4 SV=1

SEQ ID NO: 36487 - protein, 223 aa, Unknown
  misc_feature (1)..(223): tr|A0A4S0LPH6|A0A4S0LPH6_9BACT 7-cyano-7-deazaguanine s ynthase OS=bacterium M00.F.Ca.ET.180.01.1.1 OX=2563910 GN=queC PE=3 SV=1
MTQQPLNNNKAIVVFSGGQDSTTCLFWAKKHFDEVVLVTFEYGQRHDTEIQVAKQIAKEQAVEHHVLDMSLLSQLTPNALTQHDIDINEDEDGMPNTFVPARNLLFLSFAGALAYQTNTKHIITGVCETDFSGYPDCRDNFIKSMNVTLSLSMDKDFVIHTPLMWLDKKQTWALSDELGVLDYVRNRTLTCYNGIIGEGCGECPACKLRARGLNAYLKEKGAN

SEQ ID NO: 36488 - protein, 243 aa, Unknown; identical to SEQ ID NO: 36471
  misc_feature (1)..(243): tr|A0A4S0JEW0|A0A4S0JEW0_9BACT 7-cyano-7-deazaguanine s ynthase OS=bacterium M00.F.Ca.ET.191.01.1.1 OX=2563911 GN=queC PE=3 SV=1

SEQ ID NO: 36489 - protein, 236 aa, Unknown; identical to SEQ ID NO: 35763
  misc_feature (1)..(236): tr|A0A4S0GKB0|A0A4S0GKB0_9BACT 7-cyano-7-deazaguanine s ynthase OS=bacterium M00.F.Ca.ET.194.01.1.1 OX=2563912 GN=queC PE=3 SV=1

SEQ ID NO: 36490 - protein, 458 aa, Unknown; identical to SEQ ID NO: 36481
  misc_feature (1)..(458): tr|A0A4S0GCY2|A0A4S0GCY2_9BACT Uncharacterized protein OS=bacterium M00.F.Ca.ET.194.01.1.1 OX=2563912 GN=EN837 _21980 PE=4 SV=1

SEQ ID NO: 36491 - protein, 221 aa, Unknown; identical to SEQ ID NO: 36467
  misc_feature (1)..(221): tr|A0A4S0FGZ7|A0A4S0FGZ7_9BACT 7-cyano-7-deazaguanine s ynthase OS=bacterium M00.F.Ca.ET.199.01.1.1 OX=2563913 GN=queC PE=3 SV=1

SEQ ID NO: 36492 - protein, 232 aa, Unknown; identical to SEQ ID NO: 36473
  misc_feature (1)..(232): tr|A0A4S0E8L2|A0A4S0E8L2_9BACT 7-cyano-7-deazaguanine s ynthase OS=bacterium M00.F.Ca.ET.199.01.1.1 OX=2563913 GN=queC PE=3 SV=1

SEQ ID NO: 36493 - protein, 232 aa, Unknown; identical to SEQ ID NO: 36466
  misc_feature (1)..(232): tr|A0A4R9YUG2|A0A4R9YUG2_9BACT 7-cyano-7-deazaguanine s ynthase OS=bacterium M00.F.Ca.ET.205.01.1.1 OX=2563914 GN=queC PE=3 SV=1

SEQ ID NO: 36494 - protein, 232 aa, Unknown; identical to SEQ ID NO: 36466
  misc_feature (1)..(232): tr|A0A4R9TY84|A0A4R9TY84_9BACT 7-cyano-7-deazaguanine s ynthase OS=bacterium M00.F.Ca.ET.221.01.1.1 OX=2563915 GN=queC PE=3 SV=1

SEQ ID NO: 36495 - protein, 232 aa, Unknown; identical to SEQ ID NO: 36468
  misc_feature (1)..(232): tr|A0A4V3KMD9|A0A4V3KMD9_9BACT 7-cyano-7-deazaguanine s ynthase OS=bacterium M00.F.Ca.ET.221.01.1.1 OX=2563915 GN=queC PE=3 SV=1

SEQ ID NO: 36496 - protein, 232 aa, Unknown; identical to SEQ ID NO: 36466
  misc_feature (1)..(232): tr|A0A4R9U2Y7|A0A4R9U2Y7_9BACT 7-cyano-7-deazaguanine s ynthase OS=bacterium M00.F.Ca.ET.222.01.1.1 OX=2563916 GN=queC PE=3 SV=1

SEQ ID NO: 36497 - protein, 232 aa, Unknown; identical to SEQ ID NO: 36468
  misc_feature (1)..(232): tr|A0A4V3KMU8|A0A4V3KMU8_9BACT 7-cyano-7-deazaguanine s ynthase OS=bacterium M00.F.Ca.ET.222.01.1.1 OX=2563916 GN=queC PE=3 SV=1

SEQ ID NO: 36498 - protein, 232 aa, Unknown; identical to SEQ ID NO: 36469
  misc_feature (1)..(232): tr|A0A4R9T3X4|A0A4R9T3X4_9BACT 7-cyano-7-deazaguanine s ynthase OS=bacterium M00.F.Ca.ET.227.01.1.1 OX=2563917 GN=queC PE=3 SV=1

SEQ ID NO: 36499 - protein, 232 aa, Unknown; identical to SEQ ID NO: 36468
  misc_feature (1)..(232): tr|A0A4R9T2J8|A0A4R9T2J8_9BACT 7-cyano-7-deazaguanine s ynthase OS=bacterium M00.F.Ca.ET.227.01.1.1 OX=2563917 GN=queC PE=3 SV=1

SEQ ID NO: 36500 - protein, 243 aa, Unknown; identical to SEQ ID NO: 36471
  misc_feature (1)..(243): tr|A0A4R9RHZ3|A0A4R9RHZ3_9BACT 7-cyano-7-deazaguanine s ynthase OS=bacterium M00.F.Ca.ET.228.01.1.1 OX=2563918 GN=queC PE=3 SV=1

SEQ ID NO: 36501 - protein, 223 aa, Unknown; identical to SEQ ID NO: 36487
  misc_feature (1)..(223): tr|A0A4R9SET0|A0A4R9SET0_9BACT 7-cyano-7-deazaguanine s ynthase OS=bacterium M00.F.Ca.ET.229.01.1.1 OX=2563919 GN=queC PE=3 SV=1

SEQ ID NO: 36502 - protein, 232 aa, Unknown; identical to SEQ ID NO: 36466
  misc_feature (1)..(232): tr|A0A4R9RQ32|A0A4R9RQ32_9BACT 7-cyano-7-deazaguanine s ynthase OS=bacterium M00.F.Ca.ET.230.01.1.1 OX=2563920 GN=queC PE=3 SV=1

SEQ ID NO: 36503 - protein, 232 aa, Unknown; identical to SEQ ID NO: 36468
  misc_feature (1)..(232): tr|A0A4R9RH33|A0A4R9RH33_9BACT 7-cyano-7-deazaguanine s ynthase OS=bacterium M00.F.Ca.ET.230.01.1.1 OX=2563920 GN=queC PE=3 SV=1

SEQ ID NO: 36504 - protein, 263 aa, Unknown
  misc_feature (1)..(263): tr|A0A5J4E2I9|A0A5J4E2I9_9BACT 7-cyano-7-deazaguanine s ynthase OS=bacterium MnTg02 OX=2080452 GN=queC PE=4 SV= 1
MTQKRKDPSPYSNLLVMTVRPLDDNAALVLFSGGQDSTVCLAWALTRYGRVETVGFDYGQRHKVELECRQNVLDVIGKDFPEWAAKLGEDHVLQLPALGQLSNTALTRDVEIEMTGSGLPNTFVPGRNLLFFTYAAALGYRRGLGRLVGGMCETDYSGYPDCRDATLQTLAKAIQLGTEADFKIETPLMQRDKTETWSLAAKLGGPSLVDMIIEHTHSCYKGDRSQRYEWGYGCGSCPACELRARGFHAWRENESAQLADETS

SEQ ID NO: 36505 - protein, 227 aa, Unknown
  misc_feature (1)..(227): tr|A0A5J4EC25|A0A5J4EC25_9BACT 7-cyano-7-deazaguanine s ynthase OS=bacterium MnTg04 OX=2080454 GN=queC PE=4 SV= 1
MNSQDTKKAVVLVSGGLDSATTLAIAKDQGFDCFALSFDYQQRHRSELVAAGKIAKFFEVSEHRLMKIDTGGPSGSALTDMDIAIPDTLQQGIPVTYVPARNTVFLALALGYAEVIGASAIFIGVNAVDYSGYPDCRPEFIDAFEVLSNVATKAAVQGRRMRIQTPLIAMDKARIIRTGIELGIDYSITVSCYQADSEGRACGVCDSCRLRSAGFEAAGIADPTVYA

SEQ ID NO: 36506 - protein, 217 aa, Unknown
  misc_feature (1)..(217): tr|A0A132GTZ6|A0A132GTZ6_9BACT 7-cyano-7-deazaguanine s ynthase OS=bacterium P201 OX=1768112 GN=queC PE=3 SV=1
MKDAVIIISGGMDSTTMLYEFKDEIALAITFDYGSTQNGRERVCAVTHCQRLGIKHIIVPLEFMHRYFKSALLMTADDIPEGNYDDENMKSTVVPFRNGIMLAIAAGIAESNGLKRVMIANHAGDHSIYPDCRPGFVNAMSEAMSEGTYENIKVYAPYTHLSKKEIAEHGKALGLDYTETYSCYKGGEKHCGKCGTCRERRQALLDAGIEDHTEYES

SEQ ID NO: 36507 - protein, 237 aa, Unknown
  misc_feature (1)..(237): tr|A0A4Q2RM17|A0A4Q2RM17_9BACT 7-cyano-7-deazaguanine s ynthase OS=bacterium RmlP001 OX=2316527 GN=queC PE=3 SV =1
MADAAADRAIVLFSGGQDSTTCLAWALDRFASVETVGFDYGQRHRVELDVRAPLLARLAADCPGLAGRLGPDHLLDLSVLGQLSDTALTRDVAISMGENGLPTSFVPGRNLLFLTFAAALAYRRGIKHIVTGVCETDYSGYPDCRDDTIKAMQLALNLGMEARFVLHTPLMWIDKAETWRMAERLGGPALVDLVRDGTHTCYAGDRTHRHAWGYGCGTCPACELRARGYREFTAGAA

SEQ ID NO: 36508 - protein, 238 aa, Unknown
  misc_feature (1)..(238): tr|A0A4Q2U387|A0A4Q2U387_9BACT 7-cyano-7-deazaguanine s ynthase OS=bacterium RmlP026 OX=2316528 GN=queC PE=3 SV =1
MAGQDEARAIVLFSGGQDSATCLAWALDRFAHVETVGFDYRQRHRVELDVRAPFLDGLRAGFPAWAGRLGPDHMLDLAVLGQLSDTALTRDVAISMGDNGLPTSFVPGRNLLFLTFAAALAYRRGIKHIVTGVCETDFSGYPDCRDDTIKAMQLALNLGMEARFVLHTPLMWIDKAATWRLAEGLGGAPLVDLVRDDTHTCYTGDRAHRHDWGYGCGVCPACELRAKGYREFRSQSVP

SEQ ID NO: 36509 - protein, 244 aa, Unknown
  misc_feature (1)..(244): tr|A0A177Q1D3|A0A177Q1D3_9BACT 7-cyano-7-deazaguanine s ynthase OS=bacterium SCGC AG-212-C10 OX=1799370 GN=queC PE=3 SV=1
MHGIVLLSGGLDSTTVAAHALEAGYELRGLAINYGQLHARELSSAQAVADRLGFPLLVADAPFYARMASHSALTDAAGFALPEHRAPEAMAADIPITYVPLRNTFFVTIAAAALESWMLALIENDRSDPATLDPAIFVGANAIDYSGYPDCRPEFYDAIAETVRLGSKLGTQYGVRMRIEAPIIAMGKADIVRHATRLGAPLELTWSCYAGQEWPCGVCDSCVLRAAGFAEAGLPDPALARIRR

SEQ ID NO: 36510 - protein, 225 aa, Unknown
  misc_feature (1)..(225): tr|A0A1E4L964|A0A1E4L964_9BACT 7-cyano-7-deazaguanine s ynthase OS=bacterium SCN 57-13 OX=1660157 GN=queC PE=3 SV=1
MPKCVLLLSGGLDSATVLAVARDLGFDVYALSVLYGQRHQVEVDAAVRVAAALGATEHRFVSVNLDTLGGSALTDSGLDVPKDRDESAMQDIPITYVPARNTVMLSLALGYAEVVGATDIFVGVNAVDYSGYPDCRPEYIAAFEHLAQLATKAGVEGKRMRIHAPLIALTKVQIIERGLSLGVDYGMTHSCYDPLPNGRACGRCDSCILRKNAFAELGMDDPVLV

SEQ ID NO: 36511 - protein, 228 aa, Unknown
  misc_feature (1)..(228): tr|A0A3R8AKE0|A0A3R8AKE0_9BACT 7-cyano-7-deazaguanine s ynthase OS=bacterium TMED144 OX=1986778 GN=queC PE=3 SV =1
MKKAIILLSGGLDSATCLSIALDLGYKCFGLSFDYGQRHKFELDCAKKLAKHYKIADHKIMKIDLRSFGGSALTADIEVPKHRDVDLQKNQIPITYVPARNTIFLSFALGYAEVINCNDIFIGVNALDYSGYPDCRPEFIESFEKMANLGTKSGIDSGSIKIHTPLIDLKKFEIILKANLLDLNFKMTHSCYDPDETNGRSCGHCDSCILRLAGFKKAKIDDPISYDE

SEQ ID NO: 36512 - protein, 229 aa, Unknown
  misc_feature (1)..(229): tr|A0A1Z8MNE2|A0A1Z8MNE2_9BACT 7-cyano-7-deazaguanine s ynthase OS=bacterium TMED15 OX=1986651 GN=queC PE=3 SV= 1
  misc_feature (50)..(50): Xaa can be any naturally occurring amino acid
MKSQKAIVLLSGGLDSATTLAIAQRENYRVFALSFRYGQRHTLELQYAQXLAKLKSVEKHVLVDIDLRIFGGSALTDDIPVPKKQSVAEIREEIPVTYVPARNTIFLAFALAWAETLSVRNIFIGVNALDYSGYPDCRPEYIQAYTEMANLATKAGVEGHRLQIHTPLIGLTKAEIIKTGTSLDVDYALTHSCYSPDNHGRHCGQCDACLLRRRGFEQAQVTDPTLYAI

SEQ ID NO: 36513 - protein, 259 aa, Unknown
  misc_feature (1)..(259): tr|A0A1Z9IQ87|A0A1Z9IQ87_9BACT 7-cyano-7-deazaguanine s ynthase OS=bacterium TMED161 OX=1986652 GN=CBD21_03305 PE=3 SV=1
MSYVLSFSGGLDSTSLLLHLICKKKPVYAISFDYGQKHKIEIEFAKKNIKLLEAHGLNVNHKIVNISSIVSLLESSLTDPNINIPNGHYMDSNMKSTFVPNRNAIFSSVIYAYAISIYKRTLKNTSICLGVHSGDHLIYPDCRPEFYNSIIESFHLGNWDSEFIDTYLPYINFSKSEIIKDGINSCKDLELDFNLIYSNTLTTYSPDEDGYSNGMTGSDVERILSFNELDLKDPGLYNKEWSELLEFALNCEKEIISKD

SEQ ID NO: 36514 - protein, 223 aa, Unknown
  misc_feature (1)..(223): tr|A0A1Z9VPE7|A0A1Z9VPE7_9BACT 7-cyano-7-deazaguanine s ynthase OS=bacterium TMED178 OX=1986653 GN=queC PE=3 SV =1
MKAIVLLSGGLDSATCLGYAQTRGFDLYALSFEYGQRHQSEIEAAKRLASRFQVIQHEIIELSYLAKIKGSSLTNHDQPIQRSSGKSIPDTYVPARNTIFLTHAMAWAEIIQCQHIFIGASSIDYSGYPDCRPEYIEAFENLANLATKSGVNGNKINIHAPLLHLSKAQTIQLGTELGVDYSQTVSCYQADPLGRACGACDSCYLRQKGFIESKIPDPTLYQN

SEQ ID NO: 36515 - protein, 240 aa, Unknown
  misc_feature (1)..(240): tr|A0A1Z9KV83|A0A1Z9KV83_9BACT 7-cyano-7-deazaguanine s ynthase OS=bacterium TMED181 OX=1986654 GN=queC PE=3 SV =1
MKRDPQHSDCDSVALASGGLDSSTVLAIAVDQGYRPLPLAFRYGQKHEIELDCLKKVAASLNLPAPLILDLPYSSVGGSALLGDGEIPSEPGEGAQNRGEIPTTYVPARNLVFLSLATAVAEARGVQDIWIGVNSLDYSGYPDCRPEFLEAFLRTVHLGTRDGSCADDSGEPYWRLQAPLAQMSKSEIVLKATELSLDLSLTHSCYNPNPEGAACGICDSCGLRKRGFEEAGVADPTRYT

SEQ ID NO: 36516 - protein, 263 aa, Unknown
  misc_feature (1)..(263): tr|A0A1Z9M7M4|A0A1Z9M7M4_9BACT 7-cyano-7-deazaguanine s ynthase OS=bacterium TMED198 OX=1986779 GN=CBD58_00305 PE=3 SV=1
MKESVISFSGGMDSSALLLDLLSSGYRVHCITFKYSQKHIIEVERAKSNIGYLGQNGFSDKLIHKVISIEDVFSKFNSSLIDEGQSIPEGYYEEESMISTFVPNRNAIFSSIIYGYSLSLSSKKKEKIILGLGVHAGDHSIYPDCRPDFYELLESAFKKGNWGSELLSFYLPFINDEKHSILKKTIVKLNSLGLDFKEFYRNTITSYNPDIHGKSDGKSGADVERILSFNKLGLVDPIEYTEAWPTVLERALSVESSFKEKSL

SEQ ID NO: 36517 - protein, 228 aa, Unknown
  misc_feature (1)..(228): tr|A0A1Z9RVD9|A0A1Z9RVD9_9BACT 7-cyano-7-deazaguanine s ynthase OS=bacterium TMED250 OX=1986657 GN=queC PE=3 SV =1
MKKAVILLSGGLDSTTCLAVAKSKSFSIYALSFRYGQRHEFEISAAKKIARSSQVNDHVVLDIDLRAFGGSALTDNIDVPKSRDGKIGGSEIPITYVPARNTIFLSFALAYAETIESQNIFIGVNALDYSGYPDCRPEYIKSFEKMSNLATKVGVEGKSKIKIHTPLIDLSKKEIIQEGIKLGVDYTKTHSCYDPGKNGIACGLCDACILRREGFEKANIKDPIEYAN

SEQ ID NO: 36518 - protein, 226 aa, Unknown
  misc_feature (1)..(226): tr|A0A424SHR2|A0A424SHR2_9BACT 7-cyano-7-deazaguanine s ynthase OS=bacterium TMED46 OX=1986782 GN=queC PE=3 SV= 1
  misc_feature (5)..(5): Xaa can be any naturally occurring amino acid
  misc_feature (58)..(58): Xaa can be any naturally occurring amino acid
  misc_feature (130)..(130): Xaa can be any naturally occurring amino acid
  misc_feature (137)..(137): Xaa can be any naturally occurring amino acid
  misc_feature (163)..(163): Xaa can be any naturally occurring amino acid
  misc_feature (167)..(167): Xaa can be any naturally occurring amino acid
  misc_feature (189)..(189): Xaa can be any naturally occurring amino acid
  misc_feature (214)..(214): Xaa can be any naturally occurring amino acid
  misc_feature (218)..(218): Xaa can be any naturally occurring amino acid
MKAVXLVSGGLDSTTCLAMAREKGFDLYALTFNYGQRHDHELNSAKMVVDFFNIQNHXIIDIDLAQFGGSALTDQIDVPKKRDLSDMAEIPVTYVPARNTVFLSLALAWAEVLGSFDIFIGVNALDYSGXPDCRPEXISSFEKTANLATKAGVSGSSFRIHTXLIDXTKSEIVKVGMDLGVDYSLTSSXYDPDQEGNPCGLCDACYLRLKGFKXAGIXDPLNYSNQ

SEQ ID NO: 36519 - protein, 264 aa, Unknown
  misc_feature (1)..(264): tr|A0A1Z8KQA1|A0A1Z8KQA1_9BACT 7-cyano-7-deazaguanine s ynthase OS=bacterium TMED6 OX=1986783 GN=CBB66_04230 PE =3 SV=1
MLENKCSVISFSGGMDSTSLLLNLLSKKHDIYAISFKYGQKHGVEVELAKKNIAYLQNNGFKDQITHKIFDISNILSSFNSSLVDQNQNVPEGHYESDTMKSTFVPNRNAIFFSLIYGYAISLAKNYKEKISVSIGAHTGDHAIYPDCRLDFFEKLFESFQIGNWDSDRIELYIPYINMDKKEILMDAEKSLNNLKLDFDTIFKNTITSYAPDNNGVSSGKTGSDIERILAFNSLNRKDPITYQDSWERVLDNALKTEKDFISE

SEQ ID NO: 36520 - protein, 228 aa, Unknown
  misc_feature (1)..(228): tr|A0A1Z8YZJ7|A0A1Z8YZJ7_9BACT 7-cyano-7-deazaguanine s ynthase OS=bacterium TMED80 OX=1986784 GN=queC PE=3 SV= 1
MNKVAVILLSGGLDSTTCAAIADKAQYELHGITINYGQKHNYELEASREVAKHLKFKSHAIIDIDLASFGGSSLVSDDIEIPKNRDIENVHDIPSTYVPARNTVFLSIALAKAETIKAFDIFIGVNAIDYSGYPDCRPEFISKFEDMMNVATKDAVQHIGKYTIHTPLIELTKAEIIKKGLDLGVDYNLTSSCYSPREKGKPCSQCDACKLRLKGFSDIGVEDPLNYN

SEQ ID NO: 36521 - protein, 241 aa, Unknown
  misc_feature (1)..(241): tr|A0A0A1PLQ2|A0A0A1PLQ2_9BACT 7-cyano-7-deazaguanine s ynthase OS=bacterium YEK0313 OX=1522316 GN=queC PE=3 SV =1
MAESGAADGSAGALVLFSGGQDSSTCLAWALDRFGSVETLGFDYGQRHHVELECRSAIRDGLARLDPAWAGRLGPDHTIGLKALGEISDTALTDDVAIAMTEGGLPNTFVPGRNLIFLTFAAALAYRRGLKHIVTGVCETDYSGYPDCRDDTIKALQVALNLGMDKRFVLHTPLMWIDKAETWALTERLGGEPLVTLIREQSHSCYLGDRSHRHDWGFGCGTCPACQLRADGYRRFVAAAA

SEQ ID NO: 36522 - protein, 218 aa, Bacteroidaceae bacterium
  misc_feature (1)..(218): tr|A0A5C6HK69|A0A5C6HK69_9BACT 7-cyano-7-deazaguanine s ynthase OS=Bacteroidaceae bacterium HV4-6-C5C OX=260030 9 GN=queC PE=3 SV=1
MNKETALVVFSGGQDSTTCLFWAKQKFKKVLALSFLYGQKHQKEVELARNIALKAGVPFEVMDVSFIGRLGHNSLTDVTMTMDQEKPADSYPNTFVPGRNLFFLSIAAVYAREHGIQHIVTGVSQTDFSGYPDCRDGFIKSLNVTLNLSMDEQFVIHTPLMWIDKAETWALADRLGVLDLVRNETLTCYNGIPGDGCGHCPACKLRREGLEKYLSTKR

SEQ ID NO: 36523 - protein, 213 aa, Bacteroidales bacterium
  misc_feature (1)..(213): tr|A0A1T5IME2|A0A1T5IME2_9BACT 7-cyano-7-deazaguanine s ynthase OS=Bacteroidales bacterium WCE2008 OX=1945891 G N=queC PE=3 SV=1
MKAVLIYSGGMDSTVLLYKYRKEIKLAVTFTYGARQDEEQTACAKENCELLGIDHLIIPLEFMGKYFRSSILKGGDDVPHGSYNDENMKSTVVPFRNGIMLSIAAGLAESRDLDTVLIANHAGDHTIYPDCRPEFIEAMGSAVNAGTFAGIKIVSPFCDITKRDIALIGKEEGVPFEKTYSCYEGRHKHCGVCGTCVERKEALEGFDPTEYEK

SEQ ID NO: 36524 - protein, 218 aa, Bacteroidales bacterium
  misc_feature (1)..(218): tr|A0A4U1GIW3|A0A4U1GIW3_9BACT 7-cyano-7-deazaguanine s ynthase OS=Bacteroidales bacterium OX=2030927 GN=queC P E=3 SV=1
MAKDSLIILSGGMDSVTLLHYRKDRIALAVSFDYGSNHNAREIECARQQCEMLGIEHLVIPLEFMGKYFRSSLLEGADSIPEGHYADDNMKSTVVPFRNGIMLSIACGLAESRDLRHVMMANHGGDHAIYPDCRPGFVAAMSEAMREGTYEGIDIEAAFTDITKSDIARLGKELGVDYSKTYSCYKGREKHCGKCGTCVERREAMAEAGIDDPTIYED

SEQ ID NO: 36525 - protein, 219 aa, Bacteroides acidifaciens
  misc_feature (1)..(219): tr|A0A4Y9GT83|A0A4Y9GT83_9BACE 7-cyano-7-deazaguanine s ynthase OS=Bacteroides acidifaciens OX=85831 GN=queC PE =3 SV=1
MNREAALVVFSGGQDSTTCLYWAKRNFKKVYALSFLYGQKHQKEVELAREIARKAEVEFDVMDVSFIGKLGRNSLTDDTMVMDQEKPADSAPNTFVPGRNLFFLSIAAVYAREHGINHLVTGVSQTDFSGYPDCRDAFIKSLNVTLNLAMDEQFVIHTPLMWIDKAETWALADELGVLELVRTETLTCYNGVQGDGCGHCPACTLRREGLEKYLKSKNQ

SEQ ID NO: 36526 - protein, 219 aa, Bacteroides acidifaciens
  misc_feature (1)..(219): tr|A0A3L7Z300|A0A3L7Z300_9BACE 7-cyano-7-deazaguanine s ynthase OS=Bacteroides acidifaciens OX=85831 GN=queC PE =3 SV=1
MNREAALVVFSGGQDSTTCLYWAKRNFKKVYALSFLYGQKHQKEVELAREIARKAEVEFDVMDVSFIGKLGRNSLTDDTMVMDQEKPADSAPNTFVPGRNLFFLSIAAVYARERGINHLVTGVSQTDFSGYPDCRDAFIKSLNVTLNLAMDEQFVIHTPLMWIDKAETWALADELGVLELVRTETLTCYNGVQGDGCGHCPACTLRREGLEKYLKSKNQ

SEQ ID NO: 36527 - protein, 233 aa, Bacteroides caccae
  misc_feature (1)..(233): tr|A0A413J5G5|A0A413J5G5_9BACE 7-cyano-7-deazaguanine s ynthase OS=Bacteroides caccae OX=47678 GN=DXA49_09040 P E=3 SV=1
MQKSSYEKKVLLYSGGMDSWLIDKIWKPDVKLYVDMGTKYSQEEIKRLPADVVVEKLDLSKWEREDKIIPLRNMYLIGIATNYGNEICLGATAGDRVLDKSPVFADIYEQLLNYLYQKQHWTEERKIKINLDFKRYTKAELVRAFIAQGGDMDEAFSSSFSCYTPEHGKECWSCKPCFRKFIAFALNGYPFTEDIIDRNVSYIRKEILPLIASGTYGRKQEEDEIMQVLSFYK

SEQ ID NO: 36528 - protein, 219 aa, Bacteroides caccae
  misc_feature (1)..(219): tr|A0A174RWG0|A0A174RWG0_9BACE 7-cyano-7-deazaguanine s ynthase OS=Bacteroides caccae OX=47678 GN=queC PE=3 SV= 1
MNKESALVVFSGGQDSTTCLFWAKRNFKKVYALSFLYGQKHEKEVELAREIARKAEVEFDVMDVSFIGSLGHNSLTDTSMVMDQEKPADSFPNTFVPGRNLFFLSIAAVYARERGINHLITGVSQTDFSGYPDCRDAFIKSLNVTLNLAMDEQFVIHTPLMWIDKAETWALADELGVLDVIRHETLTCYNGIPGDGCGHCPACTLRREGLEKYLKSKNQ

SEQ ID NO: 36529 - protein, 219 aa, Bacteroides caecimuri
  misc_feature (1)..(219): tr|A0A4S2DEF2|A0A4S2DEF2_9BACE 7-cyano-7-deazaguanine s ynthase OS=Bacteroides caecimuri OX=2516958 GN=queC PE= 3 SV=1
MNRETALVVFSGGQDSTTCLFWAKRNFKKVYALSFLYGQKHQKEVELAREIARKAEVEFDVMDVSFIGQLGHNSLTDTTMVMDQEKPADSVPNTFVPGRNLFFLSIAAVYARERGINHLVTGVSQTDFSGYPDCRDAFIKSLNVTLNLAMDEQFVIHTPLMWIDKAETWALADKLGVMELIRTETLTCYNGVQGDGCGHCPACTLRREGLEKYLKSKNQ

SEQ ID NO: 36530 - protein, 236 aa, Bacteroides caecimuris; identical to SEQ ID NO: 36434
  misc_feature (1)..(236): tr|A0A3A9BKT2|A0A3A9BKT2_9BACE 7-cyano-7-deazaguanine s ynthase OS=Bacteroides caecimuris OX=1796613 GN=queC PE =3 SV=1

SEQ ID NO: 36531 - protein, 219 aa, Bacteroides caecimuris
  misc_feature (1)..(219): tr|A0A1C7H2G8|A0A1C7H2G8_9BACE 7-cyano-7-deazaguanine s ynthase OS=Bacteroides caecimuris OX=1796613 GN=queC PE =3 SV=1
MNRETALVVFSGGQDSTTCLFWAKRNFKKVYALSFLYGQKHQKEVELAREIARKAEVEFDVMDVSFIGQLGHNSLTDTTMMMDQEKPADSVPNTFVPGRNLFFLSIAAVYARERGINHLVTGVSQTDFSGYPDCRDAFIKSLNVTLNLAMDEQFVIHTPLMWIDKAETWALADKLGVMELIRTETLTCYNGVQGDGCGHCPACTLRREGLEKYLKSKNQ

SEQ ID NO: 36532 - protein, 219 aa, Bacteroides cellulosilyticus
  misc_feature (1)..(219): tr|R6KNH0|R6KNH0_9BACE 7-cyano-7-deazaguanine synthase OS=Bacteroides cellulosilyticus CAG:158 OX=1263038 GN=q ueC PE=3 SV=1
MDKEVALVVFSGGQDSTTCLFWAKREFKRVVALSFLYGQKHEKEVELAREIARKADVEFEAMDVSFIGKLGHNSLTDTTMLMDQEKPAGSYPNTFVPGRNLFFLSIAAVYAREHGINHIVTGVSQTDFSGYPDCRDAFIKSLNVTLNLAMDEQFVIHTPLMWIDKAETWGLADELGVLDLIRNETLTCYNGIQGDGCGHCPACKLRREGLEKYLKQLSI

SEQ ID NO: 36533 - protein, 219 aa, Bacteroides cellulosilyticus
  misc_feature (1)..(219): tr|A0A108TFF7|A0A108TFF7_9BACE 7-cyano-7-deazaguanine s ynthase OS=Bacteroides cellulosilyticus OX=246787 GN=qu eC PE=3 SV=1
MDKEVALVVFSGGQDSTTCLFWAKREFKRVVALSFLYGQKHEKEVELAREIARKADVEFEAMDVSFIGKLGHNSLTDTTMLMDQEKPAGSYPNTFVPGRNFFFLSIAAVYAREHGINHIVTGVSQTDFSGYPDCRDAFIKSLNVTLNLAMDEQFVIHTPLMWIDKAETWGLADELGVLDLIRNETLTCYNGIQGDGCGHCPACKLRREGLEKYLKQLSI

SEQ ID NO: 36534 - protein, 218 aa, Bacteroides clarus
  misc_feature (1)..(218): tr|R6LKV7|R6LKV7_9BACE 7-cyano-7-deazaguanine synthase OS=Bacteroides clarus CAG:160 OX=1263039 GN=queC PE=3 S V=1
MNKEAALVVFSGGQDSTTCLFWAKREFKKVYALSFLYGQKHRKEVELAREIARKAEVEFEVMDVSFIGRLGHNSLTDPGMVMDKEKPADGVPNTFVPGRNLFFLSIAAVYAREKGIDHIVTGVSQTDFSGYPDCRDAFIKSLNVTLNLAMDGQFVLHTPLMWIDKAETWALADELGVLDLIRHETLTCYNGIPGDGCGHCPACKLRREGLEKYLAGKR

SEQ ID NO: 36535 - protein, 218 aa, Bacteroides clarus
  misc_feature (1)..(218): tr|A0A1Y4JXW2|A0A1Y4JXW2_9BACE 7-cyano-7-deazaguanine s ynthase OS=Bacteroides clarus OX=626929 GN=queC PE=3 SV =1
MNKEAALVVFSGGQDSTTCLFWAKREFKKVYALSFLYGQKHRKEVELAREIARKAEVEFEVMDVSFIGRLGHNSLTDPGMVMDKEKPADGVPNTFVPGRNLFFLSIAAVYAREKGINHIVTGVSQTDFSGYPDCRDAFIKSLNVTLNLAMDGQFVLHTPLMWIDKAETWALADELGVLDLIRHETLTCYNGIPGDGCGHCPACKLRREGLEKYLAGKR

SEQ ID NO: 36536 - protein, 219 aa, Bacteroides coprocola
  misc_feature (1)..(219): tr|A0A412GV36|A0A412GV36_9BACE 7-cyano-7-deazaguanine s ynthase OS=Bacteroides coprocola OX=310298 GN=queC PE=3 SV=1
MNKDAALVVFSGGQDSTTCLFWAKKHFKKVYALSFLYGQKHVKEVELAREIARKAEVDFHVMDVSFIGHLGKNSLTDTSIHMDEEKPEGTFPNTFVPGRNLFFLSIAAVYARERGINHIVTGVSQTDFSGYPDCRDAFIKSLNVTLNLAMEEQFVIHTPLMWIDKAQTWALADKLGVLDLVRNETLTCYNGIPGGGCGHCPACKLRREGLEKYLAIKNK

SEQ ID NO: 36537 - protein, 219 aa, Bacteroides coprocola
  misc_feature (1)..(219): tr|B3JMY1|B3JMY1_9BACE 7-cyano-7-deazaguanine synthase OS=Bacteroides coprocola DSM 17136 OX=470145 GN=queC PE =3 SV=1
MNKDAALVVFSGGQDSTTCLFWAKKHFKKVYALSFLYGQKHVKEVELAREIARKAEVDFHVMDVSFIGHLGKNSLTDTSIHMDEEKPEGTFPNTFVPGRNLFFLSIAAVYARERGINHIVTGVSQTDFSGYPDCRDAFIKSLNVTLNLAMEEQFVIHTPLMWIDKAQTWALADELGVLDLVRNETLTCYNGIPGDGCGHCPACKLRREGLEKYLAIKNK

SEQ ID NO: 36538 - protein, 222 aa, Bacteroides coprophilus
  misc_feature (1)..(222): tr|R6SFC7|R6SFC7_9BACE 7-cyano-7-deazaguanine synthase OS=Bacteroides coprophilus CAG:333 OX=1263041 GN=queC P E=3 SV=1
MNNETALVVFSGGQDSTTCLFWAKKHFKKVYALSFIYGQKHVKEVELAREIARKADVEFAVMDVSFIGHLGKNSLTDTSIHMDEEKPADSFPNTFVPGRNLFFLSIAAVHAREKGISHLVTGVSQTDFSGYPDCRDSFIKSLNVTLNLAMDEQFVIHTPLMWIDKAQTWALADELGVLDLIRHETLTCYNGIPGDGCGHCPACKLRREGLEKYLQSKNQTNE

SEQ ID NO: 36539 - protein, 222 aa, Bacteroides coprophilus
  misc_feature (1)..(222): tr|S0FBP4|S0FBP4_9BACE 7-cyano-7-deazaguanine synthase OS=Bacteroides coprophilus DSM 18228 = JCM 13818 OX=547 042 GN=queC PE=3 SV=1
MNNETALVVFSGGQDSTTCLFWAKKHFKKVYALSFIYGQKHVKEVELAREIARKADVEFAVMDVSFIGHLGKNSLTDTSIHMDEEKPADSFPNTFVPGRNLFFLSIAAVHAREKGISHLVTGVSQTDFSGYPDCRDSFIKSLNVTLNLAMDEQFVIHTPLMWIDKAQTWALADELGVLDLIRHETLTCYNGIPGDGCGHCPACKLRREGLEKYLQSKNQMNE

SEQ ID NO: 36540 - protein, 217 aa, Bacteroides coprosuis
  misc_feature (1)..(217): tr|F3ZRN9|F3ZRN9_9BACE 7-cyano-7-deazaguanine synthase OS=Bacteroides coprosuis DSM 18011 OX=679937 GN=queC PE =3 SV=1
MRNSKAIVLFSGGQDSTTCLYWAKKRFDKVYAISFDYGQKHSNEVDVARSIAQQANVEFIVLDAHYISQLSINALTDTSLEMDENNNCPNTFVPGRNLFFLSMAAVFAFEHDVQHIVTGVSQTDFSGYPDCRHNFIQSANLTLNLAMDKEFILHAPLMWLDKAGVWELSDKLGVFDLVKDHTLTCYNGVIAEGCGHCPACKLRNQGLQEYLLKREKR

SEQ ID NO: 36541 - protein, 223 aa, Bacteroides dorei
  misc_feature (1)..(223): tr|A0A412Z1W2|A0A412Z1W2_9BACE 7-cyano-7-deazaguanine s ynthase OS=Bacteroides dorei OX=357276 GN=queC PE=3 SV= 1
MNKSDALVVFSGGQDSTTCLFWAKKHFRKVYALSFIYGQKHVKEVELARAIAGKAGVEFKAMDVSFIGNLGKNSLTDTTITMDEVKPADSFPNTFVPGRNLFFLSIAAVYARELGINHIVTGVSQTDFSGYPDCRDAFIKSLNVTLNLAIDEQFVLHTPLMWIDKAETWALADELGVLDLIRHETLTCYNGVQGDGCGHCPACKLRREGLEKYLEIKAEREKR

SEQ ID NO: 36542 - protein, 223 aa, Bacteroides dorei
  misc_feature (1)..(223): tr|A0A076J2D5|A0A076J2D5_9BACE 7-cyano-7-deazaguanine s ynthase OS=Bacteroides dorei OX=357276 GN=queC PE=3 SV= 1
MNKSDALVVFSGGQDSTTCLFWAKKHFRKVYALSFIYGQKHVKEVELARAIAGKAGVEFKAMDVSFIGNLGKNSLTDTTITMDEVKPADSFPNTFVPGRNLFFLSIAAVYARELGINHIVTGVSQTDFSGYPDCRDAFIKSLNVTLNLAMDEQFVLHTPLMWIDKAETWALADELGVLDLIRHETLTCYNGVQGDGCGHCPACKLRREGLEKYLEIKAEREKR

SEQ ID NO: 36543 - protein, 218 aa, Bacteroides eggerthii
  misc_feature (1)..(218): tr|R5K4M1|R5K4M1_9BACE 7-cyano-7-deazaguanine synthase OS=Bacteroides eggerthii CAG:109 OX=1263043 GN=queC PE= 3 SV=1
MNKEAALVVFSGGQDSTTCLFWAKREFKKVYALSFLYGQKHRKEVDLAREIARKAGVEFEVMDVSLIGKLGRNSLTDTGMAMDEEKPADSFPNTFVPGRNLFFLSIAAVYAREKGINHIVTGVSQTDFSGYPDCRDTFIKSLNVTLNLAMDGQFVFHTPLMWIDKAETWALADELGVLDLIRHETLTCYNGIPGDGCGHCPACKLRREGLEKYLAGKG

SEQ ID NO: 36544 - protein, 231 aa, Bacteroides eggerthii
  misc_feature (1)..(231): tr|A0A415RZI2|A0A415RZI2_9BACE 7-cyano-7-deazaguanine s ynthase OS=Bacteroides eggerthii OX=28111 GN=queC PE=3 SV=1
MVSQSSNNKLISRVNKEAALVVFSGGQDSTTCLFWAKREFKKVYALSFLYGQKHRKEVDLAREIARKAGVEFEVMDVSLIGKLGRNSLTDTGMAMDEEKPADSFPNTFVPGRNLFFLSIAAVYAREKGINHIVTGVSQTDFSGYPDCRDTFIKSLNVTLNLAMDGQFVFHTPLMWIDKAETWALADELGVLDLIRHETLTCYNGIPGDGCGHCPACKLRREGLEKYLAGKG

SEQ ID NO: 36545 - protein, 219 aa, Bacteroides faecichinchillae
  misc_feature (1)..(219): tr|A0A1M5FIW8|A0A1M5FIW8_9BACE 7-cyano-7-deazaguanine s ynthase OS=Bacteroides faecichinchillae OX=871325 GN=qu eC PE=3 SV=1
MNRDRVLVVFSGGQDSTTCLFWAKRNFKKVYALSFLYGQKHEKEVELAREIARKAEVEFDVMDVSFIGKLGHNSLTDTTMVMDQEKPADSVPNTFVPGRNLFFLSIAAVYARERGINHLVTGVSQTDFSGYPDCRDAFIKSLNVTLNLAMDEQFVIHTPLMWIDKAETWALADQLGVLDVIRKETLTCYNGIPGDGCGHCPACKLRQEGLEKFLKSKNQ

SEQ ID NO: 36546 - protein, 220 aa, Bacteroides faecichinchillae
  misc_feature (1)..(220): tr|A0A4S4HZG1|A0A4S4HZG1_9BACE 7-cyano-7-deazaguanine s ynthase OS=Bacteroides faecichinchillae OX=871325 GN=qu eC PE=3 SV=1
MMNRDRVLVVFSGGQDSTTCLFWAKRNFKKVYALSFLYGQKHEKEVELAREIARKAEVEFDVMDVSFIGKLGHNSLTDTTMVMDQEKPADSVPNTFVPGRNLFFLSIAAVYARERGINHLVTGVSQTDFSGYPDCRDAFIKSLNVTLNLAMDEQFVIHTPLMWIDKAETWALADQLGVLDVIRKETLTCYNGIPGDGCGHCPACKLRQEGLEKFLKSKNQ

SEQ ID NO: 36547 - protein, 220 aa, Bacteroides faecis
  misc_feature (1)..(220): tr|A0A3E5GM05|A0A3E5GM05_9BACE 7-cyano-7-deazaguanine s ynthase OS=Bacteroides faecis OX=674529 GN=queC PE=3 SV =1
MMNREAALVVFSGGQDSTTCLFWAKRNFKKVYALSFLYGQKHQKEVELAREIARKAEVEFEVMDVSFIGTLGHNSLTDTAMVMDQEKPAGSVPNTFVPGRNLFFLSIAAVYARERGISHLVTGVSQTDFSGYPDCRDAFIKSLNVTLNLAMDEQFVIHTPLMWIDKAETWALADELGVLDLIRNETLTCYNGIQGDGCGHCPACTLRREGLEKYLKNKNQ

SEQ ID NO: 36548 - protein, 219 aa, Bacteroides faecis
  misc_feature (1)..(219): tr|R6VB45|R6VB45_9BACE 7-cyano-7-deazaguanine synthase OS=Bacteroides faecis CAG:32 OX=1263044 GN=queC PE=3 SV =1
MNREAALVVFSGGQDSTTCLFWAKRNFKKVYALSFLYGQKHQKEVELAREIARKAEVEFEVMDVSFIGTLGHNSLTDTAMVMDQEKPAGSVPNTFVPGRNLFFLSIAAVYARERGISHLVTGVSQTDFSGYPDCRDAFIKSLNVTLNLAMDEQFVIHTPLMWIDKAETWALADELGVLDLIRNETLTCYNGIQGDGCGHCPACTLRREGLEKYLKNKNQ

SEQ ID NO: 36549 - protein, 219 aa, Bacteroides finegoldii
  misc_feature (1)..(219): tr|C9L3A9|C9L3A9_9BACE 7-cyano-7-deazaguanine synthase OS=Bacteroides finegoldii DSM 17565 OX=483215 GN=queC P E=3 SV=1
MNREAALVVFSGGQDSTTCLFWAKRNFKKVYALSFLYGQKHQKEVEFAREIARKAEVEFDVMDVSFVGQLGHNSLTDTTMVMDQEKPADTVPNTFVPGRNLFFLSIAAVYARERGINHLVTGVSQTDFSGYPDCRDSFIKSLNVTLNLAMDEQFVIHTPLMWIDKAETWALADELGVLELIRNETLTCYNGVQGDGCGHCPACKLRREGLEKYLKSKNQ

SEQ ID NO: 36550 - protein, 219 aa, Bacteroides finegoldii; identical to SEQ ID NO: 36549
  misc_feature (1)..(219): tr|R6S643|R6S643_9BACE 7-cyano-7-deazaguanine synthase OS=Bacteroides finegoldii CAG:203 OX=1263045 GN=queC PE =3 SV=1

SEQ ID NO: 36551 - protein, 219 aa, Bacteroides fluxus
  misc_feature (1)..(219): tr|F3PSQ4|F3PSQ4_9BACE 7-cyano-7-deazaguanine synthase OS=Bacteroides fluxus YIT 12057 OX=763034 GN=queC PE=3 SV=1
MNRDTALVVFSGGQDSTTCLFWAKREFKKVYALSFLYGQKHRQEVELAREIARKAGVEFEVMDVSFIGRLGHNSLTDAGMEMDREKPADSFPNTFVPGRNLFFLSIAAVYARERGINHIVTGVSQTDFSGYPDCRDAFIKSLNVTLNLAMDEQFVLHTPLMWIDKAETWALADELGVLELIRHETLTCYNGIPGDGCGHCPACTLRREGLEKYLASVKG

SEQ ID NO: 36552 - protein, 219 aa, Bacteroides fragilis
  misc_feature (1)..(219): sp|Q64WB0|QUEC_BACFR 7-cyano-7-deazaguanine synthase OS =Bacteroides fragilis (strain YCH46) OX=295405 GN=queC PE=3 SV=2
MKNDSAVVLFSGGQDSTTCLFWAKKHFKKVYALSFLYGQKHAHEVELARGIAERAGVEFHVMDTSFIGSLGSNSLTDTSISMDEDKPKDSFPNTFVPGRNLFFLSIAAVFAREQGAFHLVTGVSQTDYSGYPDCRDSFIKSLNVTLNLAMDEQFVIHTPLMWIDKAETWALADELGVFDLVRNETLTCYNGIPADGCGHCPACKLRKQGLEEYLSKRNR

SEQ ID NO: 36553 - protein, 219 aa, Bacteroides fragilis; identical to SEQ ID NO: 36552
  misc_feature (1)..(219): sp|Q5LFI6|QUEC_BACFN 7-cyano-7-deazaguanine synthase OS =Bacteroides fragilis (strain ATCC 25285 / DSM 2151 / J CM 11019 / NCTC 9343) OX=272559 GN=queC PE=3 SV=1

SEQ ID NO: 36554 - protein, 220 aa, Bacteroides graminisolvens
  misc_feature (1)..(220): tr|A0A069D032|A0A069D032_9BACE 7-cyano-7-deazaguanine s ynthase OS=Bacteroides graminisolvens DSM 19988 = JCM 1 5093 OX=1121097 GN=queC PE=3 SV=1
MTDVEDAAVVLFSGGQDSTTCLFWAKKQFETVYALSFVYGQKHVHEVELAKGIAARAGVEFHVMDVSFISQLGRNSLTDTSLLMDEEKPADSFPNTFVPGRNLFFLSIAAVFARERGVRDIVTGVSQTDYSGYPDCRDSFIKSLNVTLNLAMDEQFILHTPLMWINKAQTWALADELGVLDVVRNETLTCYNGVPADGCGHCPACKLRGQGLDEYLKTKK

SEQ ID NO: 36555 - protein, 219 aa, Bacteroides graminisolvens
  misc_feature (1)..(219): tr|A0A3D2SCP7|A0A3D2SCP7_9BACE 7-cyano-7-deazaguanine s ynthase OS=Bacteroides graminisolvens OX=477666 GN=queC PE=3 SV=1
MTDVKDAAVVLFSGGQDSTTCLFWAKKQFKTVYALSFVYGQKHVHEVELARGIAERAGVEFHVMDVSFISQLGRNSLTDTSLMMDEEKPADSFPNTFVPGRNLFFLSIAAVFARERGVRDIVTGVSQTDYSGYPDCRDSFIKSLNVTLNLAMDEQFILHTPLMWINKAQTWALADELGVLDVVRNETLTCYNGVPADGCGHCPACKLRGQGLDEYLKTK

SEQ ID NO: 36556 - protein, 221 aa, Bacteroides helcogenes
  misc_feature (1)..(221): tr|E6SP46|E6SP46_BACT6 7-cyano-7-deazaguanine synthase OS=Bacteroides helcogenes (strain ATCC 35417 / DSM 2061 3 / JCM 6297 / P 36-108) OX=693979 GN=queC PE=3 SV=1
MNKVNKDAALVVFSGGQDSTTCLFWAKREFKKVYALSFLYGQKHQKEVELAREIAHRAKVEFEVMDVSFIGKLGHNSLTDMNMAMDQEKPKDGFPNTFVPGRNLFFLSVAAVYARERGISHIVTGVSQTDFSGYPDCRDVFVKSLNVTLNLAMDEQFVLHTPLMWIDKAETWALADELGVLDLVRHETLTCYNGVQGDGCGHCPACKLRKEGLDKYLAGKS

SEQ ID NO: 36557 - protein, 218 aa, Bacteroides intestinalis
  misc_feature (1)..(218): tr|R7E3V9|R7E3V9_9BACE 7-cyano-7-deazaguanine synthase OS=Bacteroides intestinalis CAG:315 OX=1263048 GN=queC PE=3 SV=1
MNKEVALVVFSGGQDSTTCLFWAKRKFRKVVALSFLYGQKHEKEVELAREIARDADVEFEVMDVSFIGKLGHNSLTDTTMVMDQEKPTDSFPNTFVPGRNLFFLSIAAVYAREHDINHIVTGVSQTDFSGYPDCRDAFIKSLNVTLNLAMDEQFVIHTPLMWIDKAETWALADKLGVLDLIRNKTLTCYNGIPGDGCGHCPACKLRREGLEKYLSHKC

SEQ ID NO: 36558 - protein, 218 aa, Bacteroides intestinalis
  misc_feature (1)..(218): tr|A0A415AIV7|A0A415AIV7_9BACE 7-cyano-7-deazaguanine s ynthase OS=Bacteroides intestinalis OX=329854 GN=queC P E=3 SV=1
MNREVALVVFSGGQDSTTCLFWAKRKFREVVALSFLYGQKHEKEVELAREIARDADVKFEVMDVSFIGKLGHNSLTDNTMVMDQEKPTDSFPNTFVPGRNLFFLSIAAVYAREHGINHIVTGVSQTDFSGYPDCRDAFIKSLNVTLNLAMDEQFVIHTPLMWIDKAETWALADELGVLDLIRNKTLTCYNGIPGDGCGHCPACKLRREGLEKYLSRKC

SEQ ID NO: 36559 - protein, 220 aa, Bacteroides luti
  misc_feature (1)..(220): tr|A0A1M5CQZ4|A0A1M5CQZ4_9BACE 7-cyano-7-deazaguanine s ynthase OS=Bacteroides luti OX=1297750 GN=queC PE=3 SV= 1
MRMSNESAVVLFSGGQDSTTCLFWAKRHFKKVYALSFLYGQKHQKEVDIARNIAEKADVEFHLMDASFISKLGSNSLTDSSIEMDQEKPADSFPNTFVPGRNLFFLSIAAVFAREKGVRHLVTGVSQTDFSGYPDCRDSFVKSLNVTLNLAMDEQFVIHTPLMWIDKTETWALADELGVFELVRNETLTCYNGIPADGCGHCPACKLRNHGLQEYLKRKN

SEQ ID NO: 36560 - protein, 218 aa, Bacteroides massiliensis
  misc_feature (1)..(218): tr|U6RNH5|U6RNH5_9BACE 7-cyano-7-deazaguanine synthase OS=Bacteroides massiliensis B84634 = Timone 84634 = DSM 17679 = JCM 13223 OX=1121098 GN=queC PE=3 SV=1
MNRSDALVVFSGGQDSTTCLFWAKKHFSKVYALSFVYGQKHVKEVELARSIAAGAGVEFEAMDVSFIGHLGKNSLTDTTIAMDQDKPADSFPNTFVPGRNLFFLSIAAVYAREHGINHIVTGVSQTDFSGYPDCRDAFIKSLNVTLNLAMDEQFVLHTPLMWIDKAETWALADELGVLDLIRRETLTCYNGIQGDGCGHCPACKLRREGLEKYLASKK

SEQ ID NO: 36561 - protein, 218 aa, Bacteroides nordii
  misc_feature (1)..(218): tr|A0A413VY66|A0A413VY66_9BACE 7-cyano-7-deazaguanine s ynthase OS=Bacteroides nordii OX=291645 GN=queC PE=3 SV =1
MINKNTALVVFSGGQDSTTCLFWAKREFKKVVALSFLYGQKHKKEVELAREIARNAGVEFEAMDVSFIGQLGHNSLTDTTMEMDQDKPADSFPNTFVPGRNLFFLSIAAVYARERGINHIVTGVSQTDFSGYPDCRDAFIKSLNVTLNLAMDEQFVLHTPLMWIDKAQTWALADELGVLDIIRNDTLTCYNGIQGDGCGHCPACKLRRQGLEEYLTRE

SEQ ID NO: 36562 - protein, 218 aa, Bacteroides nordii; identical to SEQ ID NO: 36561
  misc_feature (1)..(218): tr|I9RTW8|I9RTW8_9BACE 7-cyano-7-deazaguanine synthase OS=Bacteroides nordii CL02T12C05 OX=997884 GN=queC PE=3 SV=1

SEQ ID NO: 36563 - protein, 217 aa, Bacteroides oleiciplenus
  misc_feature (1)..(217): tr|A0A3E5BLW8|A0A3E5BLW8_9BACE 7-cyano-7-deazaguanine s ynthase OS=Bacteroides oleiciplenus OX=626931 GN=queC P E=3 SV=1
MNKEVALVVFSGGQDSTTCLFWAKRKFKKVVALSFLYGQKHEKEVELAREIARKADVDFEVMDVSFIGKLGHNSLTDITMVMDQEKPVDSFPNTFVPGRNLFFLSIAAVYARERGISHMVTGVSQTDFSGYPDCRDAFIKSLNVTLNLAMDEQFVIHTPLMWIDKAETWRLADELGVLELIRSETLTCYNGIPGDGCGHCPACKLRREGLEKYLNSK

SEQ ID NO: 36564 - protein, 217 aa, Bacteroides oleiciplenus
  misc_feature (1)..(217): tr|A0A1Q6GRW7|A0A1Q6GRW7_9BACE 7-cyano-7-deazaguanine s ynthase OS=Bacteroides oleiciplenus OX=626931 GN=queC P E=3 SV=1
MNKEVALVVFSGGQDSTTCLFWAKREFKKVIALSFLYGQKHEKEVELAREIARKADVEFEAMDVSFIGGLGHNSLTDATMIMDQEKPEGSFPNTFVPGRNLFFLSIAAVYARERGISHIVTGVSQTDFSGYPDCRDAFIKSLNVTLNLAMDEQFVIHTPLMWIDKAETWGLADELGVLELIRNETLTCYNGIPGDGCGHCPACKLRREGLEKYLNSK

SEQ ID NO: 36565 - protein, 219 aa, Bacteroides ovatus
  misc_feature (1)..(219): tr|A7M2H5|A7M2H5_BACO1 7-cyano-7-deazaguanine synthase OS=Bacteroides ovatus (strain ATCC 8483 / DSM 1896 / JC M 5824 / NCTC 11153) OX=411476 GN=queC PE=3 SV=1
MNREAALVVFSGGQDSTTCLFWAKRNFKKVYALSFLYGQKHQKEVELAREIARKAEVEFDVMDVSFIGQLGHNSLTDTTMVMDQEKPADSVPNTFVPGRNLFFLSIAAVYARERGINHLVTGVSQTDFSGYPDCRDAFIKSLNVTLNLAMDEQFVIHTPLMWIDKAETWALADELGVLELIRTETLTCYNGVQGDGCGHCPACTLRREGLEKYLKSKNQ

SEQ ID NO: 36566 - protein, 219 aa, Bacteroides ovatus; identical to SEQ ID NO: 36565
  misc_feature (1)..(219): tr|A0A139LGN7|A0A139LGN7_BACOV 7-cyano-7-deazaguanine s ynthase OS=Bacteroides ovatus OX=28116 GN=queC PE=3 SV= 1

SEQ ID NO: 36567 - protein, 221 aa, Bacteroides plebeius
  misc_feature (1)..(221): tr|A0A415JBU6|A0A415JBU6_9BACE 7-cyano-7-deazaguanine s ynthase OS=Bacteroides plebeius OX=310297 GN=queC PE=3 SV=1
MVNNKEALVVFSGGQDSTTCLFWAKKHFEKVYALSFLYGQKHEKEVELAREIARKAGVEFEVMDVSFIGHLGKNSLTDTSIHMDEEKPKDSFPNTFVPGRNLFFLSIAAVYARERGIHHMVTGVSQTDFSGYPDCRDSFIKSLNVTLNLAMEEQFVIHTPLMWIDKAQTWALADELGVLDLVRNETLTCYNGIPGDGCGHCPACKLRREGLEKYLASKQNK

SEQ ID NO: 36568 - protein, 221 aa, Bacteroides plebeius
  misc_feature (1)..(221): tr|A0A1Q6GH34|A0A1Q6GH34_9BACE 7-cyano-7-deazaguanine s ynthase OS=Bacteroides plebeius OX=310297 GN=queC PE=3 SV=1
MVNNKEALVVFSGGQDSTTCLFWAKKHFEKVYALSFLYGQKHEKEVELAREIARKAGVEFEVMDVSFIGHLGKNSLTDTSIHMDEEKPKDSFPNTFVPGRNLFFLSIAAVYAREKGIHHMVTGVSQTDFSGYPDCRDSFIKSLNVTLNLAMEEQFVIHTPLMWIDKAQTWALADELGVLDLVRNETLTCYNGIPGDGCGHCPACKLRREGLEKYLASKQNK

SEQ ID NO: 36569 - protein, 218 aa, Bacteroides pyogenes
  misc_feature (1)..(218): tr|W4P609|W4P609_9BACE 7-cyano-7-deazaguanine synthase OS=Bacteroides pyogenes JCM 6292 OX=1235809 GN=queC PE= 3 SV=1
MNKEAALVVFSGGQDSTTCLFWAKKHFKEVRALSFLYGQKHQKEVELAQGIAARANVPFDVMDVSFIGTLGRNSLTDAAMEMDKEKPEGSVPNTFVPGRNLFFLSIAAVYACERGIRQLVTGVSQTDFSGYPDCRDAFIKSLNVTLDLAMDEHFVIHTPLMWIDKTETWALADELGVMDLIRRETLTCYNGIQGDGCGECPACKLRREGLEKYLKQSL

SEQ ID NO: 36570 - protein, 216 aa, Bacteroides pyogenes
  misc_feature (1)..(216): tr|A0A5D3EB87|A0A5D3EB87_9BACE 7-cyano-7-deazaguanine s ynthase OS=Bacteroides pyogenes OX=310300 GN=FNG97_0496 5 PE=3 SV=1
MQTEFTKGVILVSGGLDSTTLMYQFVERNVEFVPLFVNYGQHCATKEYDTLLKVIPEQYKDKIETIDISSIFKYSKSRFIRPADLWKDDIKADDLYIPYRNVLLMTVAASFAQTIGLNKVYAAFINSNHAKEIDCSSAFFDKLEGLLSEYGSVKIEMPFRNLSKYEVAELGIELKAPIGVTFSCQASPDIPCGACPNCVDRLKALKELSLESIKHE

SEQ ID NO: 36571 - protein, 138 aa, Bacteroides reticulotermitis
  misc_feature (1)..(138): tr|W4UR31|W4UR31_9BACE 7-cyano-7-deazaguanine synthase OS=Bacteroides reticulotermitis JCM 10512 OX=1445607 GN =JCM10512_1946 PE=3 SV=1
MNKDAALVVFSGGQDSTTCLFWAKENFKKVYALSFLYGQKHQKEVDLAREIARKSAVDFEVMDVSFIGKLGRNSLTDASLVMDQEKPADSFPNTFVPGRNLFFLSIAAVYARERGINHIVTGVSQTDFSGYPDCGMLL

SEQ ID NO: 36572 - protein, 71 aa, Bacteroides reticulotermitis
  misc_feature (1)..(71): tr|W4URR6|W4URR6_9BACE 7-cyano-7-deazaguanine synthase OS=Bacteroides reticulotermitis JCM 10512 OX=1445607 GN =JCM10512_1947 PE=3 SV=1
MEEQFVLHTPLMWIDKTETWALADKLGVLDLVRNETLTCYNGIPGDGCGHCPACVLRREGLEKYLQTKQEE

SEQ ID NO: 36573 - protein, 222 aa, Bacteroides salanitronis
  misc_feature (1)..(222): tr|F0R8Q9|F0R8Q9_BACSH 7-cyano-7-deazaguanine synthase OS=Bacteroides salanitronis (strain DSM 18170 / JCM 135 67 / BL78) OX=667015 GN=queC PE=3 SV=1
MDKNKALVVFSGGQDSTTCLFWAKKHFKEVYALTFLYGQKHVKEVDLAREIARKAEVHFDVMDVSFIGHLGKNSLTDLSIPMDEEKPEGNYPNTFVPGRNLFFLSIAAVYARERGISHLVTGVSQTDFSGYPDCRDSFIKSLNVTLNLAMDEQFVIHTPLMWIDKAETWALADELGAFDIVRNDTLTCYNGIPGDGCGHCPACKLRREGLEKYLENKQCDNK

SEQ ID NO: 36574 - protein, 225 aa, Bacteroides salyersiae
  misc_feature (1)..(225): tr|I8Y9Q9|I8Y9Q9_9BACE 7-cyano-7-deazaguanine synthase OS=Bacteroides salyersiae CL02T12C01 OX=997887 GN=queC PE=3 SV=1
MMNKDTALVIFSGGQDSTTCLFWAKREFKKVCALSFLYGQKHQKEVELAREIARNAGVEFEVMDVSFIGKLGHNSLTDTTMVMDQEKPADSFPNTFVPGRNLFFLSIAAVYSRERGINHIVTGVSQTDFSGYPDCRDAFIKSLNVTLNLAMDEQFVLHTPLMWIDKAQTWALADELGVLEIIRNDTLTCYNGIQGDGCGHCPACKLRRQGLDEYLLSKNKFLRYG

SEQ ID NO: 36575 - protein, 225 aa, Bacteroides salyersiae; identical to SEQ ID NO: 36574
  misc_feature (1)..(225): tr|A0A4Q5FL69|A0A4Q5FL69_9BACE 7-cyano-7-deazaguanine s ynthase OS=Bacteroides salyersiae OX=291644 GN=queC PE= 3 SV=1

SEQ ID NO: 36576 - protein, 223 aa, Bacteroides sartorii
  misc_feature (1)..(223): tr|A0A4S2FRJ1|A0A4S2FRJ1_9BACE 7-cyano-7-deazaguanine s ynthase OS=Bacteroides sartorii OX=671267 GN=queC PE=3 SV=1
MNKSDALVVFSGGQDSTTCLFWAKKHFRRVYALSFIYGQKHVKEVELARAIAGKAGVEFKTMDVSFIGNLGKNSLTDTTIAMDEEKPAGSFPNTFVPGRNLFFLSIAAVYARELGINHIVTGVSQTDFSGYPDCRDAFIKSLNVTLNLAMDEQFVLHTPLMWIDKAETWALADELGVLDLIRHETLTCYNGIQGDGCGHCPACKLRREGLEKYLEIKAEKEKQ

SEQ ID NO: 36577 - protein, 223 aa, Bacteroides sartorii
  misc_feature (1)..(223): tr|R9I6V6|R9I6V6_9BACE 7-cyano-7-deazaguanine synthase OS=Bacteroides sartorii OX=671267 GN=queC PE=3 SV=1
MNKSDALVVFSGGQDSTTCLFWAKKHFRRVYALSFIYGQKHVKEVELARAIAGKAGVEFKAMDVSFIGNLGKNSLTDTTIAMDEEKPAGSFPNTFVPGRNLFFLSIAAVYARELGINHIVTGVSQTDFSGYPDCRDAFIKSLNVTLNLAMDEQFVLHTPLMWIDKAETWALADELGVLDLIRHETLTCYNGIQGDGCGHCPACKLRREGLEKYLEIKAEKEKQ

SEQ ID NO: 36578 - protein, 221 aa, Bacteroides sp.
  misc_feature (1)..(221): tr|A0A285TMG0|A0A285TMG0_9BACE 7-cyano-7-deazaguanine s ynthase OS=Bacteroides sp. AR29 OX=93975 GN=queC PE=3 S V=1
MSETKKSDALVVFSGGQDSTTCLFWAKREFKKVYALSFLYGQKHQKEVDLARAIARKAGVEFEVMDVSFIGRLGRNSLTDAGMEMDQEKPADSFPNTFVPGRNLFFLSIAAVYARERGINHIVTGVSQTDFSGYPDCRDAFIKSLNVTLNLAMDEQFVLHTPLMWIDKAETWALADELGVLELIRHETLTCYNGIPGDGCGHCPACTLRREGLEKFLASTK

SEQ ID NO: 36579 - protein, 218 aa, Bacteroides sp.
  misc_feature (1)..(218): tr|A0A4P6RDZ6|A0A4P6RDZ6_9BACE 7-cyano-7-deazaguanine s ynthase OS=Bacteroides sp. A1C1 OX=2528203 GN=queC PE=3 SV=1
MNRDTALVVFSGGQDSTTCLFWAKREFKKVYALSFLYGQKHQKEVDLARAIARKAGVEFEVMDVSFIGRLGHNSLTDAGMEMDQEKPADSFPNTFVPGRNLFFLSIAAVYARERGINHIVTGVSQTDFSGYPDCRDAFIKSLNVTLNLAMDEQFVLHTPLMWIDKAETWALADELGVLELIRHETLTCYNGIPGDGCGHCPACTLRREGLEKFLASTK

SEQ ID NO: 36580 - protein, 217 aa, Bacteroides stercorirosoris
  misc_feature (1)..(217): tr|A0A1M6K455|A0A1M6K455_9BACE 7-cyano-7-deazaguanine s ynthase OS=Bacteroides stercorirosoris OX=871324 GN=que C PE=3 SV=1
MNKEVALVVFSGGQDSTTCLFWAKREFKKVIALSFLYGQKHEKEVELAREIARKADVEFEAMDVSFIGGLGHNSLTDATMIMDQEKPEGSFPNTFVPGRNLFFLSIAAVYARERGISHMVTGVSQTDFSGYPDCRDAFIKSLNVTLNLAMDEQFVIHTPLMWIDKAETWGLADELGVLELIRNETLTCYNGIPGDGCGHCPACKLRREGLEKYLNSK

SEQ ID NO: 36581 - protein, 217 aa, Bacteroides stercoris
  misc_feature (1)..(217): tr|A0A108T4L0|A0A108T4L0_BACSE 7-cyano-7-deazaguanine s ynthase OS=Bacteroides stercoris OX=46506 GN=queC PE=3 SV=1
MNKEAALVVFSGGQDSTTCLFWAKREFRKVYALSFLYGQKHQKEVELAREIARKAEVEFEVMDVSFIGKLGHNSLTDPDMVMDREKPADGVPNTFVPGRNLFFLSIAAVYAREKGINHIVTGVSQTDFSGYPDCRDAFIKSLNVTLNLAMDEQFVLHTPLMWIDKAETWALADELGVLDLIRHETLTCYNGIPGDGCGHCPACKLRREGLEKYLAGK

SEQ ID NO: 36582 - protein, 217 aa, Bacteroides stercoris
  misc_feature (1)..(217): tr|B0NLJ9|B0NLJ9_BACSE 7-cyano-7-deazaguanine synthase OS=Bacteroides stercoris ATCC 43183 OX=449673 GN=queC P E=3 SV=1
MNKEAALVVFSGGQDSTTCLFWAKREFRKVYALSFLYGQKHQKEVELAREIARKAEVEFEVMDVSFIGKLGHNSLTDPDMVMDREKPADSVPNTFVPGRNLFFLSIAAVYAREKGINHIVTGVSQTDFSGYPDCRDAFIKSLNVTLNLAMDEQFVLHTPLMWIDKAETWALADELGVLDLIRHETLTCYNGIPGDGCGHCPACKLRREGLEKYLAGK

SEQ ID NO: 36583 - protein, 219 aa, Bacteroides thetaiotaomicron
  misc_feature (1)..(219): sp|Q8A7F8|QUEC_BACTN 7-cyano-7-deazaguanine synthase OS =Bacteroides thetaiotaomicron (strain ATCC 29148 / DSM 2079 / NCTC 10582 / E50 / VPI-5482) OX=226186 GN=queC P E=3 SV=2
MNRETALVVFSGGQDSTTCLFWAKRNFKKVYALSFLYGQKHQKEVELAREIARKAEVEFDVMDVSFIGTLGHNSLTDTTMVMDQEKPAGSVPNTFVPGRNLFFLSIAAVYARERGINHLVTGVSQTDFSGYPDCRDAFIKSLNVTLNLAMDEQFVIHTPLMWIDKAETWALADELGVLDLIRNETLTCYNGIQGDGCGHCPACTLRREGLEKYLKKKNQ

SEQ ID NO: 36584 - protein, 220 aa, Bacteroides thetaiotaomicron
  misc_feature (1)..(220): tr|A0A412GJY4|A0A412GJY4_BACT4 7-cyano-7-deazaguanine s ynthase OS=Bacteroides thetaiotaomicron OX=818 GN=queC PE=3 SV=1
MMNRETALVVFSGGQDSTTCLFWAKRNFKKVYALSFLYGQKHQKEVELAREIARKAEVEFDVMDVSFIGTLGHNSLTDTTMAMDQEKPAGSVPNTFVPGRNLFFLSIAAVYARERGINHLVTGVSQTDFSGYPDCRDAFIKSLNVTLNLAMDEQFVIHTPLMWIDKAETWALADELGVLDLIRNETLTCYNGIQGDGCGHCPACTLRREGLEKYLKKKNQ

SEQ ID NO: 36585 - protein, 218 aa, Bacteroides uniformis; identical to SEQ ID NO: 36579
  misc_feature (1)..(218): tr|A7VA14|A7VA14_BACUC 7-cyano-7-deazaguanine synthase OS=Bacteroides uniformis (strain ATCC 8492 / DSM 6597 / CIP 103695 / JCM 5828 / NCTC 13054 / VPI 0061) OX=4114 79 GN=queC PE=3 SV=1

SEQ ID NO: 36586 - protein, 237 aa, Bacteroides uniformis
  misc_feature (1)..(237): tr|A0A174UK45|A0A174UK45_BACUN 7-cyano-7-deazaguanine s ynthase OS=Bacteroides uniformis OX=820 GN=queC PE=3 SV =1
MPSLFPSLRGRARGEAFNKMNRDTALVVFSGGQDSTTCLFWAKREFKKVYALSFLYGQKHQKEVDLARAIARKAGVEFEVMDVSFIGRLGRNSLTDAGMEMDQEKPADSFPNTFVPGRNLFFLSIAAVYARERGINHIVTGVSQTDFSGYPDCRDAFIKSLNVTLNLAMDEQFVLHTPLMWIDKAETWALADELGVLELIRHETLTCYNGIPGDGCGHCPACTLRREGLEKFLASTK

SEQ ID NO: 36587 - protein, 223 aa, Bacteroides vulgatus
  misc_feature (1)..(223): sp|A6L2J2|QUEC_BACV8 7-cyano-7-deazaguanine synthase OS =Bacteroides vulgatus (strain ATCC 8482 / DSM 1447 / JC M 5826 / NBRC 14291 / NCTC 11154) OX=435590 GN=queC PE= 3 SV=1
MNKSDALVVFSGGQDSTTCLFWAKKHFRKVYALSFIYGQKHVKEVELARVIAGKAGVEFKAMDVSFIGNLGKNSLTDTTITMDEVKPADSFPNTFVPGRNLFFLSIAAVYARELGINHIVTGVSQTDFSGYPDCRDAFIKSLNVTLNLAMDEQFVLHTPLMWIDKAETWALADELGVLDLIRHETLTCYNGVQGDGCGHCPACKLRREGLEKYLEIKAEREKR

SEQ ID NO: 36588 - protein, 223 aa, Bacteroides vulgatus; identical to SEQ ID NO: 36587
  misc_feature (1)..(223): tr|A0A174F937|A0A174F937_BACVU 7-cyano-7-deazaguanine s ynthase OS=Bacteroides vulgatus OX=821 GN=queC PE=3 SV= 1

SEQ ID NO: 36589 - protein, 219 aa, Bacteroides xylanisolvens
  misc_feature (1)..(219): tr|A0A415KE43|A0A415KE43_9BACE 7-cyano-7-deazaguanine s ynthase OS=Bacteroides xylanisolvens OX=371601 GN=queC PE=3 SV=1
MNREVALVVFSGGQDSTTCLFWAKRNFKKVYALSFLYGQKHQKEVELAREIARKAEVEFDVMDVSFIGQLGHNSLTDTTIVMDQEKPADSVPNTFVPGRNLFFLGIAAVYARERGINHLVTGVSQTDFSGYPDCRDAFIKSLNVTLNLAMDEQFVIHTPLMWIDKAETWALADELGVLELIRTETLTCYNGVQGDGCGHCPACTLRREGLEKYLKSKNQ

SEQ ID NO: 36590 - protein, 219 aa, Bacteroides xylanisolvens
  misc_feature (1)..(219): tr|D6D566|D6D566_9BACE 7-cyano-7-deazaguanine synthase OS=Bacteroides xylanisolvens XB1A OX=657309 GN=queC PE= 3 SV=1
MNREAALVVFSGGQDSTTCLFWAKRNFKKVYALSFLYGQKHQKEVELAREIARKAEVEFDVMDVSFIGQLGHNSLTDTTMVMDQEKPADSVPNTFVPGRNLFFLSIAAVYARERGINHLVTGVSQTDFSGYPDCRDAFIKSLNVTLNLAMDEQFVIHTPLMWIDKAETWALADKLGVLELIRTETLTCYNGVQGDGCGHCPACTLRREGLEKYLKSKNQ

SEQ ID NO: 36591 - protein, 229 aa, Bacteroides xylanolyticus
  misc_feature (1)..(229): tr|A0A2S6HNA8|A0A2S6HNA8_9BACE 7-cyano-7-deazaguanine s ynthase OS=Bacteroides xylanolyticus OX=384636 GN=queC PE=3 SV=1
MKALVLLSGGVDSATCLGMAIEEYGRKNVCGLSISYGQKHAKELEAAKKIADYYEIEFISLDLSRIFAYSDCSLLTQSQQEIPRESYAKQLENSEGKPVSTYVPFRNGLFLSSAASIALSKGCSVIYYGAHSDDAAGNAYPDCSSSFQEAMSRAVYIGSGNQLTIKAPFVLWTKAEVVERGLMLHVPYELTWSCYEGGEEPCGKCGTCIDRAEAFAKNGIKDPALKRGE

SEQ ID NO: 36592 - protein, 223 aa, Bacteroidetes bacterium
  misc_feature (1)..(223): tr|S8FL62|S8FL62_9BACT 7-cyano-7-deazaguanine synthase OS=Bacteroidetes bacterium oral taxon 272 str. F0290 OX =888054 GN=queC PE=3 SV=1
MNNEDALVVFSGGQDSTTCLFWAKKYFRRVFAITFIYGQKHVNEVEIAKAVAAKADVDIYVVDVSLIGKLGANSLTDASIVMDREKPADTFPNTFVPGRNLFFLSIAAIYAREKGIRHLVTGVSQTDYSGYPDCRDAFVKSLNVTLDLAMDAQFAIHTPLMWIDKSQTWELADKLGVLDLVRHETLTCYNGIPGDGCGHCPACKLRREGLEKYLKIKTERETK

SEQ ID NO: 36593 - protein, 263 aa, Bacteroidetes bacterium
  misc_feature (1)..(263): tr|A0A256WL44|A0A256WL44_9BACT 7-cyano-7-deazaguanine s ynthase OS=Bacteroidetes bacterium 4572_77 OX=1972459 G N=B7C24_07275 PE=3 SV=1
MAKHVVVSLSGGMDSSTLLLRAINEYDTVTGISFDYGQKHRVELERAQSLINYLADNGHKVNYRQIKLDGLVDLLDSALVQGGDDVPEGHYEQDNMKETVVPNRNKMFASITQAVALSIANKTEETCDIALGIHAGDHAVYPDCRQEFRDADDAAFRIGNWEADRVGYFTPYLDTDKFGILQNGEILCAKLKIDFDEVYSRTNTSYKPFPSGNSDYKSASSVERIEAFIALGRKDPVQYEDETGEVDYEVAKKHVEKVLAEYV

SEQ ID NO: 36594 - protein, 231 aa, Bacteroidetes sp.
  misc_feature (1)..(231): tr|A0A3N0ZT11|A0A3N0ZT11_9BACT 7-cyano-7-deazaguanine s ynthase OS=Bacteroidetes/Chlorobi group bacterium ChocP ot_Mid OX=2382230 GN=queC PE=3 SV=1
MKNKKAVVLMSGGMDSAVTTAIAIHKGFQVFALHLNYGQRTQYREKKAFSDLVKYFGISELLEVDVSYFSQIGNSSLTDKKIEITTSLQISSSDTQCSNEIPSSYVPFRNGNILAIATSWAETINANAIFIGAMQLDYSGYPDCRREFFDAFEQAINLGTKPETKLKIITPIINFTKKDVVLKGKQLGVPFELTWSCYKDEDKACGVCDSCLLRLRGFEQARIIDPIKYKK

SEQ ID NO: 36595 - protein, 227 aa, Bacteroidetes sp.
  misc_feature (1)..(227): tr|A0A3N0ZCE7|A0A3N0ZCE7_9BACT 7-cyano-7-deazaguanine s ynthase OS=Bacteroidetes/Chlorobi group bacterium Naka2 016 OX=2382229 GN=queC PE=3 SV=1
MKLAVVLMSGGMDSATTVAVAKSVGYQVAGLHVTYGQRTQQRELKAFNDLCDYFQIEKRLVVPIDYLKAIGGSSLTDSRLQVEKAQLERKEIPSTYVPFRNGNLLAIATSWAEVIGATAVFIGATQQDSSGYPDCRIDFFLAFEKAIELGTKPETKISIQTPLINSTKKDIVRLGHNFGVPFELTWSCYRESEIACGECDSCALRLRGFQQAGLVDPIPYKTLPNYV

SEQ ID NO: 36596 - protein, 221 aa, Bacteroidia bacterium
  misc_feature (1)..(221): tr|A0A1Q3QJE2|A0A1Q3QJE2_9BACT 7-cyano-7-deazaguanine s ynthase OS=Bacteroidia bacterium 43-41 OX=1895720 GN=qu eC PE=3 SV=1
MTDYTNEDALVLFSGGQDSTTCLFWAKQTFRNVEALCFSYGQRHSVEIEAARNIAGIAGVPFQLLDASVISHLSPNSLTDSSITMDEEQPAGSYPNTFVPGRNMLFITFAVAIAYAKKIRHLITGVSEADYSGYPDCRDTFIHSLNATINLAMDKHFVIHTPLMHRNKAKVWELADELGVFDIVKNETLTCYNGIKAEGCGHCPACKLRNRGLREYLAERK

SEQ ID NO: 36597 - protein, 225 aa, Bacteroidia bacterium
  misc_feature (1)..(225): tr|A0A1M3ETS5|A0A1M3ETS5_9BACT 7-cyano-7-deazaguanine s ynthase OS=Bacteroidia bacterium 44-10 OX=1895721 GN=qu eC PE=3 SV=1
MMKDYKEQDALVLFSGGQDSTTCLYWAKQQFRSVYALCFTYGQRHSQEVENARRIAEMAGTPFQILDASIISRLAPNSLTNFSIEMDEEQPAGSYPNTFVPGRNLLFLTFAATIAYAKGIKHLVTGVSEADYSGYPDCRDTFIHSANATLNLAMDKQFVIHTPLMWRNKKEVWRLADELGVFNIVKNETLTCYNGILAEGCGHCPACKLRNKGLQDYLAERENNR

SEQ ID NO: 36598 - protein, 231 aa, Baia soyae
  misc_feature (1)..(231): tr|A0A4R2RUC8|A0A4R2RUC8_9BACL 7-cyano-7-deazaguanine s ynthase OS=Baia soyae OX=1544746 GN=queC PE=3 SV=1
MKKAVVVLSGGLDSATCVGIAKKEGWDIYPITFLYGQRHQHEVEKARLIAQHYGISDHKIVDVQFLGDIGGSSLTNHSIDVPTSGLTDDIPNTYVPGRNLIFLSLATAYAEVIGAEAIFTGVNALDYSGYPDCRPEFIQSMNETILLATKTGVTDNKLSIQTPIIHKTKAEIVEMGMKLGVPYHLTTSCYQGMEKACGECDSCLLRIEGFKKNQASDPIEYQIPIDWRGSL

SEQ ID NO: 36599 - protein, 231 aa, Baia soyae
  misc_feature (1)..(231): tr|A0A4R2RYX0|A0A4R2RYX0_9BACL 7-cyano-7-deazaguanine s ynthase OS=Baia soyae OX=1544746 GN=queC PE=3 SV=1
MKKKAVVVLSGGLDSTTCMGIAEHRGYELYPITFFYNQLHQREVEQAKCVAAHYGVSQSHKIVDLSYLGQLGGSALTDSTIQVPTTGVNEDEIPATYVPARNLIFLSMATAYAEVISAKKIFVGVSAVDYSGYPDCRPEFIQSMSETINLATKMGVTSGSEDRLSIEAPLIHLNKGETVKWGLELEVPYHLTTSCYQGSEEACGVCDSCLLRLKGFTENDATDPIPYAQKS

SEQ ID NO: 36600 - protein, 235 aa, Balnearium lithotrophicum
  misc_feature (1)..(235): tr|A0A521B7M4|A0A521B7M4_9BACT 7-cyano-7-deazaguanine s ynthase OS=Balnearium lithotrophicum OX=223788 GN=queC PE=3 SV=1
MDSAVVIFSGGLDSTTALYWAKRKFRRVYAITFYYGQRHSIEVEMAKKTAERAKVDEHLLFEVDLSKFGGSALTDKNLEVPETKSVEEIEERGIPITYVPFRNGVFISIAASYAESRGTTNIVGGWNIVDYSGYPDCRPEFLSAMEEALNRGTKLGSEGKDWKIHAPLIKLTKGEIIKLGLSLGADYSYSISCYRGEEVPCMRCDSCILRAKGWAEVGEEDHLIKRLKEEGKILE

SEQ ID NO: 36601 - protein, 200 aa, Balneola sp.
  misc_feature (1)..(200): tr|A0A3M8G2K3|A0A3M8G2K3_9BACT 7-cyano-7-deazaguanine s ynthase OS=Balneola sp. OX=2024824 GN=ED557_06255 PE=3 SV=1
MKDKSILLLSSGLESTVLAYTLKPKYALTIDYGQICAESEIKASSKICEQFDIQHFIYTCNLKSLGFGELFGEKKSSLSGLLEWTPYRNQFLLTIASMYAIKVGVEKIIIGTVKDDESYSDGRSLFFEQFNALLKCQEGGIQVMTPGINLSSFEMIKSSGISINILRWGFSCTKHKYACGICRSCLKKQHILEKLETEQY

SEQ ID NO: 36602 - protein, 377 aa, Balneola sp.
  misc_feature (1)..(377): tr|A0A3F3HZ84|A0A3F3HZ84_9BACT ExsB family protein OS=B alneola sp. OX=2024824 GN=CL671_02260 PE=4 SV=1
MKNTREYQICSRCIMDTTDPDIRFDSDGICNHCYRYDELLPQRVFEGKIAKQKLKDLVANIKSNGSKNDYDCLIGVSGGVDSTYVAYLTKKLGLKPLAVHFDNGWNSELAVNNIRKMLDRLDIDLYTHVIDWDSFKNLQLSFLKASTPDGEVPTDHAINALLFQIADKQNIKFIINGMNFATESMSVPSWAYGHSDWKYIKSVHKQFLNTPLPDYPKFNLFDLFRYSVLKGIKVVSILNYVEYNKDEVMGLISNELDWVYYGGKHYESVYTRFYQGYILPEKFNIDKRRGHLSDLIRSGQLKRESALIEIQKEGYEADLLAQDKQFVFKKLGISEVEFEEIMDLDVKSFKDYPNNFKKIGNIKKLVNKLRSKGLYSK

SEQ ID NO: 36603 - protein, 217 aa, Barnesiella intestinihominis
  misc_feature (1)..(217): tr|K0XIW2|K0XIW2_9BACT 7-cyano-7-deazaguanine synthase OS=Barnesiella intestinihominis YIT 11860 OX=742726 GN= queC PE=3 SV=1
MKDSLIVVSGGMDSITLLYEYADRIALAVSFDYGANHNHKEIPFARIHCERLKIKHIVIPLAFMKEYFRSSLLDGSDSVPEGHYADENMKSTVVPFRNGIMLSIACGIAESNGLKQVLIANHGGDHAIYPDCRSEFIQAMDKAMRSGTYENIGIFAPYTDISKTEIASRGKKLNLNYAETWSCYKGGEKHCGKCGTCVERKEALRDAGIEDQTEYED

SEQ ID NO: 36604 - protein, 217 aa, Barnesiella sp.
  misc_feature (1)..(217): tr|A0A1Y3WNZ5|A0A1Y3WNZ5_9BACT 7-cyano-7-deazaguanine s ynthase OS=Barnesiella sp. An55 OX=1965646 GN=queC PE=3 SV=1
MKDSLIVVSGGMDSVTLLHEYAARIALAVSFDYGANHNVKEIPFARLHCERLGIKHIVIPLAFMKEYFKSSLLSGGEAIPEGHYADENMKSTVVPFRNGIMLSIACGIAESNGLKQVLIANHGGDHAIYPDCRSSFIQAMNEAMREGTYEHIGILAPYTHITKSDIARRGKQLQVNYAETWSCYKGGTKHCGKCGTCVERKEALRDAGIDDPTEYED

SEQ ID NO: 36605 - protein, 217 aa, Barnesiella sp.
  misc_feature (1)..(217): tr|A0A1Y4H2C2|A0A1Y4H2C2_9BACT 7-cyano-7-deazaguanine s ynthase OS=Barnesiella sp. An22 OX=1965590 GN=queC PE=3 SV=1
MKDSLIVVSGGMDSITLLHEYADRIALGVSFDYGANHNAREIPFARLHCERLGIKHIVIPLAFMKEYFKSSLLSGGEAIPEGHYADENMKSTVVPFRNGIMLSIACGIAESNGLKRVLIANHGGDHAIYPDCRSSFIRVMNEAMREGTYEHIEILAPYTEITKTDIARRGKQLHVDYAATWSCYKGGEKHCGKCGTCVERKEALRDAGIDDPTEYEE

SEQ ID NO: 36606 - protein, 217 aa, Barnesiella viscericola
  misc_feature (1)..(217): tr|W0EL68|W0EL68_9BACT 7-cyano-7-deazaguanine synthase OS=Barnesiella viscericola DSM 18177 OX=880074 GN=queC PE=3 SV=1
MKDSLIVVSGGMDSITLLYEYADRIALGVSFDYGANHNAREIPFAHLHCERLGIRHIVIPLAFMKEYFKSSLLSGGEAIPEGHYADENMKSTVVPFRNGIMLSIACGIAESNGLKRVLIANHGGDHAIYPDCRSSFIEAMNQAMREGTYEHIEILAPYTHITKSDIARRGKRLQVNYAETWSCYKGGEKHCGKCGTCVERKEALHDAQIDDPTEYED

SEQ ID NO: 36607 - protein, 235 aa, Bartonella apis
  misc_feature (1)..(235): tr|A0A1U9MHV2|A0A1U9MHV2_9RHIZ 7-cyano-7-deazaguanine s ynthase OS=Bartonella apis OX=1686310 GN=queC PE=3 SV=1
MKTYLICSGGLDSVTLAYRLAHEKSLQGIISFDYGQRHKKELFFAKECARALGADYYPIDISAIGKNLSGSSLTDNIDVPDGYYAEDNMKSTVVPNRNAVFLSIAFAIASAKHGDSVAIAVHGGDHFIYADCRENFINAFNAMEQLSLEGQCQLFAPYVSCDKSDIVKDGVKYNVPFTKTWSCYKGGEHHCGRCGTCVERREAFALAGVDDPTIYEDNEFWIEAVKRNKNSKLLK

SEQ ID NO: 36608 - protein, 234 aa, Bartonella apis
  misc_feature (1)..(234): tr|A0A1U9MB26|A0A1U9MB26_9RHIZ 7-cyano-7-deazaguanine s ynthase OS=Bartonella apis OX=1686310 GN=queC PE=3 SV=1
MKTYLICSGGLDSVTLAYRLAHEQSLKGVISFDYGQRHKKELVFAQKCASRLGADYYPIDISAIGKNLSGSSLTDDIAVPDGYYAEENMKSTVVPNRNAVFLSIAFAIAAAKHGDSVAIAVHGGDHFIYADCRADFIDAFNKMEQLSLEGQCQLLTPYVDQDKSEIVKDGVKYNVPFADTWSCYKGGEHHCGRCGTCVERREAFALAGVDDPTIYEDNSFWIEAVNRNKAKKLR

SEQ ID NO: 36609 - protein, 229 aa, Basilea psittacipulmonis
  misc_feature (1)..(229): tr|A0A077DEQ1|A0A077DEQ1_9BURK 7-cyano-7-deazaguanine s ynthase OS=Basilea psittacipulmonis DSM 24701 OX=107268 5 GN=queC PE=3 SV=1
MKAIVIFSGGQDSTTCLIQALSQYGKENVQAITFYYGQRHAIELEKARWIAQDLGVKQVEMDLSLIKGITHNALMDENTRIEAPKDSLPNTFVDGRNALFLLYAAIYAKSQGIQHIIAGVCETDFSGYPDCRDVFIKSMNVTLNLAMDYSFVIDTPLMWLTKAQTWALADELGYLEYVQKHTHTCYEGVEGGCGKCPSCVLRDRGLQEYLNNKRSSLCLMTERTDNVTH

SEQ ID NO: 36610 - protein, 224 aa, Bathymodiolus azoricus
  misc_feature (1)..(224): tr|A0A1H6LMP5|A0A1H6LMP5_9GAMM 7-cyano-7-deazaguanine s ynthase OS=Bathymodiolus azoricus thioautotrophic gill symbiont OX=235205 GN=queC PE=3 SV=1
MSKAVILLSGGLDSTTTLAIAKSQGLDCYALSFDYGQKQKSELNSAKQVAELFSAIEHRTMSISLNDIGGSALTDSAIEVPKFKPSDGIPVTYVPARNTIFLSYAMAWAEVLDCQDIFIGVNALDYSGYPDCRKEYIKSFEIMANLATKQGVEGKKLTIHTPLIDLHKAQIIQKGLSLGVDYSLTTTCYQADNNGDACGFCDACEYRKLGFKKVGIPDPTRYQR

SEQ ID NO: 36611 - protein, 224 aa, Bathymodiolus brooksi
  misc_feature (1)..(224): tr|A0A482YJP3|A0A482YJP3_9BACT 7-cyano-7-deazaguanine s ynthase OS=Bathymodiolus brooksi thiotrophic gill symbi ont OX=1052209 GN=queC PE=3 SV=1
MSKAVILLSGGLDSTTTLAIAKSQGFDCYALSFDYGQKQKSELNSAKQISELFSTIEHRIMTISLNDIGGSALTDSAIDVPKFKKSNGIPITYVPARNTIFLSYAMAWAEVLECQDVFIGVNALDYSGYPDCRAEYISAFETMANLATKQGVEGQKLTIHTPLIDLHKAQIIQKGLALGVDYAMTTTCYQADENGDACGFCDACEYRKLGFKAAGIIDPTHYQK

SEQ ID NO: 36612 - protein, 228 aa, Bathymodiolus heckerae
  misc_feature (1)..(228): tr|A0A482YQF7|A0A482YQF7_9BACT 7-cyano-7-deazaguanine s ynthase OS=Bathymodiolus heckerae thiotrophic gill symb iont OX=1052212 GN=queC PE=3 SV=1
MSSANKKAVILLSGGLDSTTTLAIAQSQGFECFALSFDYGQKQKSELISATLAAKIFNTTKHRVMKISLSDIGGSALTDNNIDVPDFVESDEIPITYVPARNTIFLSYALAWAEVLDCQDIFIGVNALDYSGYPDCRQEYIDAFETMANLATKQSFEGQKISIHTPLIKLNKAQIIQLGLDLGVDYKNTTSCYQANDQGEACGVCDACEYRKIGFIKAGIDDPTRYQN

SEQ ID NO: 36613 - protein, 224 aa, Bathymodiolus heckerae
  misc_feature (1)..(224): tr|A0A482ZVW3|A0A482ZVW3_9BACT 7-cyano-7-deazaguanine s ynthase OS=Bathymodiolus heckerae thiotrophic gill symb iont OX=1052212 GN=queC PE=3 SV=1
MSRAVILLSGGLDSTTTLAIAKSQGFDCYALSFDYGQKQKSELKAATQIAKLFSVVKHKTINICLNDIGGSALTDDAIKVPKFKPSNEIPVTYVPARNTIFLSYAMAWAEVLDCQAIFIGVNALDYSGYPDCRASYINAFEVMANLATKQGVEGKKLTIHTPLIDLHKAQIIQKGLSLGVDYALTTTCYQADENGAACGFCDACEYRKLGFKEAEITDPTYYQK

SEQ ID NO: 36614 - protein, 223 aa, Bathymodiolus platifrons
  misc_feature (1)..(223): tr|A0A1Z5HA47|A0A1Z5HA47_9GAMM 7-cyano-7-deazaguanine s ynthase OS=Bathymodiolus platifrons methanotrophic gill symbiont OX=113268 GN=queC PE=3 SV=1
MTKKAIILLSGGLDSVTVLAMAKQQGYKVYALSFDYGQKHNAELVSARKIALDYQVAEHKIINLGLGSIGGSALTDEALDVPVTPQEGIPITYVPARNTVFLSFALGWAEVLDAHDIFIGVNAVDYSGYPDCRPQFIEAFQTLANIATKAGVEGHEIKIHAPLINMSKGKIIQRGIKLQVNYAQTVSCYAASPKGFACGVCDACRLRKIGFDEAGVPDPTHYL

SEQ ID NO: 36615 - protein, 224 aa, Bathymodiolus thermophilus
  misc_feature (1)..(224): tr|A0A1J5UM98|A0A1J5UM98_9GAMM 7-cyano-7-deazaguanine s ynthase OS=Bathymodiolus thermophilus thioautotrophic g ill symbiont OX=2360 GN=queC PE=3 SV=1
MSKAVVLLSGGLDSTTTLAIAKSQGFDCYALSFDYGQKQKSELNAAKQVSELFSATEHRIMTISLSDIGGSALTDSAIDVPKFKKSNDIPITYVPARNTIFLSYAMAWAEVLECQDIFIGVNALDYSGYPDCRAEYISAFETMANLATKQGVEGQKLTIHTPLINLHKAQIIQKGLSLGVDYAMTTTCYQADENGDACGFCDACEYRKLGFKEANIVDPTRYQK

SEQ ID NO: 36616 - protein, 238 aa, Baumannia cicadellinicola
  misc_feature (1)..(238): sp|Q1LTK2|QUEC_BAUCH 7-cyano-7-deazaguanine synthase OS =Baumannia cicadellinicola subsp. Homalodisca coagulata OX=374463 GN=queC PE=3 SV=1
MPHNQQIKKTVVVFSGGQDSTTCLIQALTQYDQVYCITFDYGQRHRAEICIARRLTITLGAYDHQIIDTSALNVLAASSLTRENIIVPLAEKNHMNSSLSTFVPGRNIVFLTLAAIYAYQVKAEVIITGVCETDFSGYPDCREKFIQALNKAVNLGMAYNIHFISPLMWLNKAETWALADYYQKLDLVCNETLTCYNGIQGKGCGFCTSCSLRARGLETYKQQPKLTMSSLKAKTGLP

SEQ ID NO: 36617 - protein, 231 aa, Bdellovibrio bacteriovorus
  misc_feature (1)..(231): sp|Q6MKZ5|QUEC_BDEBA 7-cyano-7-deazaguanine synthase OS =Bdellovibrio bacteriovorus (strain ATCC 15356 / DSM 50 701 / NCIB 9529 / HD100) OX=264462 GN=queC PE=3 SV=1
MKKNKKVVVLLSAGLDSTVNAYEAIKHHHEIVLALTFNYGQRAAKKELEASANIAKHLGIPHKVVELPWFKDFNKSSLLVEDQAVPTGSAVEIDNQQKSEETAKSVWVPNRNGIFLNIAAAYAEALGADAVIPGFNAEEAATFPDNSREFLEQATKSLWYSTSNHVTVGCYTAHLKKPDIVRLGQGLKVPWELIWPCYFSGDKWCGQCESCLRSKRAFASANIDVKHLFKE

SEQ ID NO: 36618 - protein, 233 aa, Bdellovibrio bacteriovorus
  misc_feature (1)..(233): tr|A0A150WJG3|A0A150WJG3_BDEBC 7-cyano-7-deazaguanine s ynthase OS=Bdellovibrio bacteriovorus OX=959 GN=queC PE =3 SV=1
MSSRSKKVVVLLSAGLDSTVNIYEAIKHRHEVVLALTFNYGQRAAVKEIECSAKIAKHLNVPHKVIDLPWFKDFNRSSLIVESEKVPTGKDVEIDNLEKSQDTKKSVWVPNRNGIFLNIAAAFAESLNATSVIPGFNAEEAVTFPDNTKEFMDKATQSLHYSTSNHVTVGCYTIHMKKPDMVRLGQGLKIPWEMSWPCYFTGDKWCGECESCQRAKRAFASANVDVKHLFKEA

SEQ ID NO: 36619 - protein, 197 aa, Bdellovibrio exovorus
  misc_feature (1)..(197): tr|M4V8I6|M4V8I6_9PROT 7-cyano-7-deazaguanine synthase OS=Bdellovibrio exovorus JSS OX=1184267 GN=A11Q_101 PE= 3 SV=1
MRTAVVLSGGIDSSAIAWWKKPDVAIFINYGQTPADAEESCARNVADRIGAEFSKISIDCKSIGSGSLASRDALSIAPAKEWWPFRNQLLITMAAARAVELGVKKLYFGSVSTDKFHADGRPLFFQQISSLLQSQEGELIVDTPAIELRTEELVKISEIPKDLLLITHSCHISNFPCGVCEGCIKHLAVLRILGIEY

SEQ ID NO: 36620 - protein, 228 aa, Bdellovibrio exovorus
  misc_feature (1)..(228): tr|M4VR36|M4VR36_9PROT 7-cyano-7-deazaguanine synthase OS=Bdellovibrio exovorus JSS OX=1184267 GN=queC PE=3 SV =1
MRKSSVVLLSAGLDSTVNFYAAMNETDVKLALTFDYGQKAAPKEIERSKMIANLLGVPHKIVELPWLKDLGASALTQDRMAIPAGKSALENPSMSVQTAKAVWVPNRNGVFLNIAASFAESLHAQLIVPGFNREEATTFPDNSLDFIRSARKAFSYSTANHVDVQCYTIAMAKNEIVDLGKKMRVPFESIWPCYQARDRWCGECESCERSKRAFKMAGLDFNYLYERY

SEQ ID NO: 36621 - protein, 231 aa, Bdellovibrio sp.
  misc_feature (1)..(231): tr|A0A514XHL9|A0A514XHL9_9PROT 7-cyano-7-deazaguanine s ynthase OS=Bdellovibrio sp. ZAP7 OX=2231053 GN=queC PE= 3 SV=1
MKNKKKVVVLLSSGLDSTVNIFEAIKHHHEVVLALTFNYGQKAAKKEIEQSAKIAKFLGVPHKVLDVTWFKEFNKSSLLVDDQKVPTGNDVEIDNMEKSAESAKSVWVPNRNGIFLNIAAAYAEALGADSVIPGFNAEEAATFPDNSIDYLKAATHAFSFSTSNKVTVGCYTAHLNKPAIVLLGQGLDVPWELTWPCYFAGDEWCGQCESCKRAKRAFASANVDVKNLFKE

SEQ ID NO: 36622 - protein, 227 aa, Bdellovibrio sp.
  misc_feature (1)..(227): tr|A0A2H0WF31|A0A2H0WF31_9PROT 7-cyano-7-deazaguanine s ynthase OS=Bdellovibrio sp. CG10_big_fil_rev_8_21_14_0_ 10_47_8 OX=1975526 GN=queC PE=3 SV=1
MKKSVVLLSGGMDSTVNLYQALKDSDVVLALTFNYGQQSAPKEIQVTRKITEKLKVPHRVLDLPFFNNWGQSSLLDRTKEVPRGKQVSIDDMDVSLKTAKSVWVPNRNGVFLNIAAGFAESLGAQVVIPGFNKEEAVTFPDNSQSFMKVTTEALRYSTANAVQVHCYTVEMMKSEIVALGQSLRVDWSLIWPCYLDGEHWCGQCESCQRSKRAFAAQNVAVGGYFIN

SEQ ID NO: 36623 - protein, 217 aa, Bdellovibrionaceae bacterium
  misc_feature (1)..(217): tr|A0A2D5ZYC5|A0A2D5ZYC5_9PROT 7-cyano-7-deazaguanine s ynthase OS=Bdellovibrionaceae bacterium OX=2026715 GN=q ueC PE=3 SV=1
MKSVVLLSSGLDSSVCFAEEVHAGRAVLALTFDYGQRAAERELLMAKAQADKAGVPHRVVKLDFFSQFSANALTSTSIDVPTSQVDIDSMEASVESAKSVWVPNRNGIFLSIAAGFAESCGAGLVVTGFNVEEAATFPDNTKDYMEKFTSSLSFSTSNKVRISSPTVDMDKTQIYKRGIELGVDFSVVWPCYFSGDQACGQCESCQRFERAKKKATV

SEQ ID NO: 36624 - protein, 215 aa, Bdellovibrionaceae bacterium
  misc_feature (1)..(215): tr|A0A2D6JMV5|A0A2D6JMV5_9PROT 7-cyano-7-deazaguanine s ynthase OS=Bdellovibrionaceae bacterium OX=2026715 GN=q ueC PE=3 SV=1
MSKAVVLLSSGLDSTVNLYEAHQDVGVALALFINYGQRAALREEQMAKASCEHLGIEFRSLDLKFIADFGGSSLTDSQKKLATNVEIDDLEASKISAKNVWVPNRNGILLNVAAGFAEALGADFVIPGFNKEEAATFPDNSQDFLDAMSESLGFSTANQVKAKCYTTGLLKPQIYRRALDLNVKTQFIWPCYESGEEHCKQCESCQRFYRAKAEA

SEQ ID NO: 36625 - protein, 232 aa, Bdellovibrionales bacterium
  misc_feature (1)..(232): tr|A0A1F3SMH3|A0A1F3SMH3_9PROT 7-cyano-7-deazaguanine s ynthase OS=Bdellovibrionales bacterium GWA2_49_15 OX=17 97384 GN=queC PE=3 SV=1
MKKSSDLAVALVSGGMDSLVTAAVACDSHTHVAFLHLNYGQNTERKELEAFHNIADFYHIPHNFRKVIDVTFLKQIGGSSLTDTTIKVKDFKGESSEIPDSYVPFRNTHLCAMAVSWSEVISAKKIYIGAVYEDSSGYPDCRPSYYAALNKLIKEGTKKGDIEVLTPVINLKKKEIVLKAIELKAPLHLSWSCYSNNDMACGICDSCALRLRGFQQAGIPDPLPYKVRPSYP

SEQ ID NO: 36626 - protein, 219 aa, Bdellovibrionales bacterium
  misc_feature (1)..(219): tr|A0A1F3SWH3|A0A1F3SWH3_9PROT 7-cyano-7-deazaguanine s ynthase OS=Bdellovibrionales bacterium RBG_16_40_8 OX=1 797388 GN=queC PE=3 SV=1
MEEVRSAVVLLSSGLDSTVNLYCARRELNISKAITFNYGQRAARREIEHSQKICKVLNIEHNIIEILWLGEWTSTSLVNTKVNVPQGEEIKIDDYQKSLKTAKAVWVPNRNGIFLNIAAALAESLEADYVIPGFNKEEAVTFPDNTQEYLDALENCFSFSTASKVKTLCFTADKNKSEIVQLGRKLQVPFDLMWPCYLGEEKICQKCESCKRFLGALEA

SEQ ID NO: 36627 - protein, 233 aa, Beggiatoa alba
  misc_feature (1)..(233): tr|I3CGT0|I3CGT0_9GAMM 7-cyano-7-deazaguanine synthase OS=Beggiatoa alba B18LD OX=395493 GN=queC PE=3 SV=1
MGQMAEEKAVVLVSGGLDSATTLAIAKSQGFECFALSFDYGQRHRVELNAAQTIADRLGASLHKTICLNMDSIGGSALTDAQIAVPTTGVGDAIPVTYVPARNTVFLAIALGWAEVLQAHHIFIGVNAVDYSGYPDCRPEFITAFEQLANLATKAGVEGQRMTIHTPLIDLSKAQIIQTGLALGVDYGVTISCYQPSPTGEACGVCDACRLRAEGFRQLGVVDPTQYQANAPI

SEQ ID NO: 36628 - protein, 228 aa, Beggiatoa leptomitoformis
  misc_feature (1)..(228): tr|A0A2N9YJ49|A0A2N9YJ49_9GAMM 7-cyano-7-deazaguanine s ynthase OS=Beggiatoa leptomitoformis OX=288004 GN=queC PE=3 SV=1
MGYATEKAVVLVSGGLDSATTLAIAKSQGFQCYALSFDYGQRHRVELTAAQEIAQCLGASAHKTICLNMDSIGGSALTDVHIAVPITGVTEQIPVTYVPARNTVFLSLALGWAEVLQAHHIFIGVNAVDYSGYPDCRPEFIAAFENLANLATKAGVEGQRMTIHTPLIDLTKAQIIQTGLALGVDYGRTISCYQPAAAGEACGVCDACRLRAEGFKQAGVSDPTLYQT

SEQ ID NO: 36629 - protein, 225 aa, Beggiatoa sp.
  misc_feature (1)..(225): tr|A7C4Q4|A7C4Q4_9GAMM 7-cyano-7-deazaguanine synthase OS=Beggiatoa sp. PS OX=422289 GN=queC PE=3 SV=1
MKKAVILVSGGLDSTTTLAIAKSQGYACYALSFDYGQRHRIELQAARQVAEHLGVVEHKFIHINLDSIGGSALTDTQINVPTQGLSDQIPITYVPARNTVFLALALGWAEVLSAYHIFIGVNAVDYSGYPDCRPKFVEAFEQLANFATKAGVEGHSFKIHTPLIHLTKAQIIQEGLRLGVDYNLTISCYQPNPNGYACGMCDACRLRADGFSRLDVPDPTQYHSI

SEQ ID NO: 36630 - protein, 398 aa, Beggiatoa sp.
  misc_feature (1)..(398): tr|A0A1W9XA47|A0A1W9XA47_9GAMM Uncharacterized protein OS=Beggiatoa sp. 4572_84 OX=1972449 GN=B6247_00640 PE=4 SV=1
MKMNYYLYRYLWPIYRVLVKHKLSNRCTICGLNEKCVTISDSVCEICRKEHTSKLATQAAELSKNPAAEKELDDLLTEAQGKGRGLYDAMFLFSGGKDSTYILTRLKTRYKQLRLVALTVDNGFRSPIGKQNAERICEHLDVDHLEIRPYQIFKKLYKYGFENFSHHGFVCTDFLEGELFQDIGRNLAAQLEIPLLVLGYTPEQVEETFLPKEFDEYHLYGSEDFKFKENQKFTRAKFLGVNLTDIFTPEEMNYWWDASKWSVERIPTLILPFQAWGYHKTEVVNEVVSLLHHILDEKSLNPMLTNDLYGGLGLFLDYKIFGYSPMFEQEFARYVRTGKEDVKQNRNLWESAEYLFLKPEKSVLDSPDMQFCLTKLGLTKPALDNIIKKSKAILEGKH

SEQ ID NO: 36631 - protein, 241 aa, Beijerinckia indica
  misc_feature (1)..(241): tr|B2ICM5|B2ICM5_BEII9 7-cyano-7-deazaguanine synthase OS=Beijerinckia indica subsp. indica (strain ATCC 9039 / DSM 1715 / NCIB 8712) OX=395963 GN=queC PE=3 SV=1
MPEHSSDTGNNKALVLFSGGQDSTTCLAWALDRFAFVETIGFSYGQRHVIELTQRQVVRASIARQFPAWAERLGDDHLVTIEALAEISQTALTRDMAIEMDAQGLPNTFVPGRNLLFLTFAGALGYRRGLKHIVGGMCETDFSGYPDCRDDTVKAMQVALNLGMDRRFVLETPLMWLDKAETWRLAEALGGQALVDLIIEETHTCYLGERGALHAWGHGCGQCPACVLRAKGYAAYRDGVA

SEQ ID NO: 36632 - protein, 231 aa, Beijerinckia sp.
  misc_feature (1)..(231): tr|A0A1H4MI53|A0A1H4MI53_9RHIZ 7-cyano-7-deazaguanine s ynthase OS=Beijerinckia sp. 28-YEA-48 OX=1882748 GN=que C PE=3 SV=1
MNTAALVLFSGGQDSATCLAWALERFDRVETVGFDYGQRHRIELDCRGRIRDGLTAMNPRWATRLGNDHTIDLNVLGQISDTALTRDVTIEMTDAGLPNTFVPGRNLVFLTFAATLAYRRGLKHIVGGMCETDYSGYPDCRDDTIKALQVALNLGMDKRFVLETPLMWIDKAETWRLAGRLGGQPLIDLIVEDSHTCYLGERGMRHPWGFGCGTCPACELRADGYRRFQAI

SEQ ID NO: 36633 - protein, 235 aa, Beijerinckiaceae bacterium
  misc_feature (1)..(235): tr|A0A4P7F503|A0A4P7F503_9RHIZ 7-cyano-7-deazaguanine s ynthase OS=Beijerinckiaceae bacterium OX=1978229 GN=que C PE=3 SV=1
MTETATALVLFSGGQDSTTCLALALDRYARIETVGFDYNQRHRVELDQRNLIRESLKKSFPAWGERLGEDHLISIGALAEISSTAMTEDIEIIVDESGLPNTFVPGRNLMFLTLAGAIAYRRGLKHIIGGMCETDFSGYPDCRDDTVKAMQLALNLGMDSRFVVETPLMWLDKAATWHLAETLGGARLVDLIIEQTHSCYLGERGLRHEWGYGCGTCPACRLRAEGWRKYAASRS

SEQ ID NO: 36634 - protein, 231 aa, Beijerinckiaceae bacterium
  misc_feature (1)..(231): tr|A0A522GPJ9|A0A522GPJ9_9RHIZ 7-cyano-7-deazaguanine s ynthase OS=Beijerinckiaceae bacterium OX=1978229 GN=que C PE=3 SV=1
MTALVLFSGGQDSTTCLAWALARFERVETIGFDYRQRHRVELDQRSIIRSEIVKLDPQWAARLGDDHLLDLGILGEISATAMTRDIAIIADEKGLPNTFVPGRNLMFFTLAAAVAFRRGLRHLIGGMCETDYSGYPDCRDDTLKAMQVALNLGMEKNFVVETPLMWLDKGDTWRLAETLGGKALVELVIEATHSCYLGERSRKWDWGYGCGACPACQLRAGGWKKYRAEKV

SEQ ID NO: 36635 - protein, 236 aa, Belnapia rosea
  misc_feature (1)..(236): tr|A0A1G6KIR6|A0A1G6KIR6_9PROT 7-cyano-7-deazaguanine s ynthase OS=Belnapia rosea OX=938405 GN=queC PE=3 SV=1
MRDDAALVLFSGGQDSATCLAWALARFAHVETVGFDYGQRHRVELEMRDVFRTRLMRENAGWAPKLGEDHMLALDALRSVSDTALTRETEIAMQADGLPNTFVPGRNLLFLTFAAALAYRRGLKHLVAGMCETDYSGYPDCRDDTLKALQVAINLGMERRFVLHTPLMWRDKAATWALAERLGGAPLVEAVREDTHSCYLGDRSRRHDWGYGCGTCPACDLRRGGWERWRASLTAD

SEQ ID NO: 36636 - protein, 220 aa, Bergeriella denitrificans
  misc_feature (1)..(220): tr|A0A378UHD3|A0A378UHD3_BERDE 7-cyano-7-deazaguanine s ynthase OS=Bergeriella denitrificans OX=494 GN=queC PE= 3 SV=1
MSSEQALVIFSGGQDSTTCLLQAIENYGRSNVQAITFQYGQRHTLELECARRIAQDLGITQTVLDLSLMQHITRNALMSKDAEIQTAANGVPNTFVDGRNALFLLYAAIYAKGQGIKHIIAGVCETDFSGYPDCRDVFVKSMNVTLNLAMDYDFQIHTPLMYLTKAQTWKLADDLGRLNYVREHTHTCYNGVAGGCGECPSCLLRERGLAEYLQQKAQTS

SEQ ID NO: 36637 - protein, 220 aa, Bermanella marisrubri
  misc_feature (1)..(220): tr|Q1N1N4|Q1N1N4_9GAMM 7-cyano-7-deazaguanine synthase OS=Bermanella marisrubri OX=207949 GN=queC PE=3 SV=1
MTQEKAVVIYSGGMDSFTLLNKVVKEGYDVYALTFNYGQKHVKEVEVAKTVCQQLNVPHKILDISPINELMQSSSLVGSEEVPEGHYEAENMKSTVVPNRNMILLSLAIGYAVDIKASKVYYGAHSGDHAIYPDCRPEFVHAMNAVAGIANYEHVSIETPYLNSSKGEILKDGLSMGLSYEHTWTCYNGREKACGKCGACVERLEAFEENQATDPLAYEI

SEQ ID NO: 36638 - protein, 219 aa, Bermanella sp.
  misc_feature (1)..(219): tr|A0A1Y5D2S0|A0A1Y5D2S0_9GAMM 7-cyano-7-deazaguanine s ynthase OS=Bermanella sp. 47_1433_sub80_T6 OX=1856278 G N=queC PE=3 SV=1
MAKQKAVVIFSGGMDSFTLLNKVIKEGFEVYALTFDYGQKQVKEVHIAKTVCEGLSVPHKILDISAINQLMQSSSLIGSEDVPEGHYESEQMKSTVVPNRNMILLSLAIAYAVDIKAGKVYYGAHSGDHAIYPDCRPEFVHKMNEVAGIANYEHVSIETPYLNATKGEILEDGIKMGLSYENTWTCYNGREKACGKCGACVERLEAFAHNNATDPVEYE

SEQ ID NO: 36639 - protein, 219 aa, Bermanella sp.
  misc_feature (1)..(219): tr|A0A2D4S152|A0A2D4S152_9GAMM 7-cyano-7-deazaguanine s ynthase OS=Bermanella sp. OX=2024825 GN=queC PE=3 SV=1
MSKPKAVVIYSGGMDSFTLLNRVIKDGYDVYALTFNYGQKHVKEVEVASTVCQQLNVPHKILDISPINQLMQSSSLVGSIDVPEGHYEADNMKSTMVPNRNMILLSLAIGYAVDIEASKVYYGAHAGDHAIYPDCRPEFVHAMNDVAQIANYEPITIETPYLNSSKGEILKDGLGMNLTYEHTWTCYNGREKACGKCGACVERLEAFADNNATDPVEYE

SEQ ID NO: 36640 - protein, 227 aa, Unknown
  misc_feature (1)..(227): tr|B6BW82|B6BW82_9PROT 7-cyano-7-deazaguanine synthase OS=beta proteobacterium KB13 OX=314607 GN=queC PE=3 SV= 1
MSKKAIVLLSGGLDSLTTLAIAQNDGFDCYALHVIYGQRHSSETKAARNIAKKYNLAEFREINVDMSWLKSSALTNHDMTIPEERSEGIPVTYVPARNTIMMSFAAAWAESLAISHLFLGVNAVDYSGYPDCRPEFIDAFKKMVNLGTKAAIEGTPFNIHTPLIGLTKDEIITKGCNLGVDYSMSISCYQADQNGNACGRCDSCYLRRQGFEKAGIKDPTPYQNVDN

SEQ ID NO: 36641 - protein, 246 aa, Unknown
  misc_feature (1)..(246): tr|A0A0N1LCG9|A0A0N1LCG9_9PROT 7-cyano-7-deazaguanine s ynthase OS=beta proteobacterium AAP99 OX=1523428 GN=que C PE=3 SV=1
MTTALVLFSGGQDSATCLAWALERFERVETVGFDYGQRHRVELEVRLRFLDALRARFPGWGRKLGEDHLIDMGVLGRISETSLTQDVAFRMNESGLPNTFVPGRNLLFFTFAAAVAYRRDLKVLVGGMCETDFSGYPDCRDDTLKALQVALNLGMDSRFAVETPLMWIDKAATWQMARDLGGAALVDLMIEHTHTCYRGDREHRHPWGYGCGECPACELRARGWAQHQTQLQAQLGSSGTLQAAAA

SEQ ID NO: 36642 - protein, 197 aa, Betaproteobacteria bacterium
  misc_feature (1)..(197): tr|A0A1F4E0Y5|A0A1F4E0Y5_9PROT 7-cyano-7-deazaguanine s ynthase OS=Betaproteobacteria bacterium RIFCSPLOWO2_12_ FULL_67_28 OX=1797503 GN=A3F77_18655 PE=3 SV=1
MSLVNLVSGGLDSTLVGVLAKEEDIAAFPLFIDYGQRAATNEWGACRVVHKKLGLAAPTRMDLSGFGQVIRSGLTCDEKDLKDEAFTPGRNLMFLVMGAAYAHQVGADAVATGLLSERFSLFPDQRAEFVASAERAIVQALGRPFRVLTPLFEFSKADVVKLAAEKGISGTYSCHAGTELPCGRCVSCLEFIGATSV

SEQ ID NO: 36643 - protein, 236 aa, Betaproteobacteria bacterium
  misc_feature (1)..(236): tr|A0A3N5P696|A0A3N5P696_9PROT 7-cyano-7-deazaguanine s ynthase OS=Betaproteobacteria bacterium OX=1891241 GN=q ueC PE=3 SV=1
MASEALQQTRDLPAVVLLSGGLDSATVLAIAIREGYACHAISFRYGQRHAIELDRARVIARRLGAAEHIVVDIDLRQFGGSALTADIAVPKLRSAEEMSHGIPPTYVPARNTIFLSFALAWSETLGAADIFIGVNALDYSGYPDCRPEYIAAFERMANLGTKAGVEGRQRLRIHAPLIAMSKADIIRRGLALGVDYALTTSCYDPDASGAPCGACDSCLLRARGFAEAGVPDPLLA

SEQ ID NO: 36644 - protein, 233 aa, Bhargavaea beijingensis
  misc_feature (1)..(233): tr|A0A1G6Y7V2|A0A1G6Y7V2_9BACL 7-cyano-7-deazaguanine s ynthase OS=Bhargavaea beijingensis OX=426756 GN=queC PE =3 SV=1
MKQEKAVVVFSGGQDSTTCLFWALKNFAEVETVTFDYGQRHALEVECATDIAAELGVKHHVLDLSLIGQLAPSALTDKGIEVADGEDGGLPSTFVPGRNLLFFSFAGILANQIGAKHIVTGVSETDFSGYPDCRDAFVKSLNVTLNLAMDGPFVIHTPLMWLDKSQVWELSDRLGKLNYIRTKTLTCYNGIKADGCGECPACRLRRKGLETYVGKQSGNARPAGRPAEEVLQP

SEQ ID NO: 36645 - protein, 233 aa, Bhargavaea cecembensis
  misc_feature (1)..(233): tr|A0A163ETJ2|A0A163ETJ2_9BACL 7-cyano-7-deazaguanine s ynthase OS=Bhargavaea cecembensis OX=394098 GN=queC PE= 3 SV=1
MKQEKAVVVFSGGQDSTTCLFWALEQFAEVEAVTFDYGQRHALEVECAKDIAEELGVKHHVLDMALIGQLAPSALTDTGIEVADGEDGSLPSTFVPGRNLLFFSFAGILARQIGAKHIVTGVSETDFSGYPDCRDAFIKSLNVTLNLAMDGQFVIHTPLMWLDKSQVWELSDTLGKLDYVRTKTLTCYNGIQADGCGECPACRLRRKGLETFLEKKDGTILSLSGSAEGVAQP

SEQ ID NO: 36646 - protein, 233 aa, Bhargavaea cecembensis
  misc_feature (1)..(233): tr|M7NF48|M7NF48_9BACL 7-cyano-7-deazaguanine synthase OS=Bhargavaea cecembensis DSE10 OX=1235279 GN=queC PE=3 SV=1
MKQEKAVVVFSGGQDSTTCLFWAMENFSEVEAVTFDYGQRHALEVECAKDIAEELGVKHHILDMSLIGQLAPNALTDTGIEVADGEDGGLPSTFVPGRNLLFFSFAGILARQIGAKHIVTGVSETDFSGYPDCRDAFVKSLNVTLNLAMDGQFVIHTPLMWLDKSQVWELSDQLGKLDYVRTKTLTCYNGIQADGCGECPACRLRRKGLETYVGKKGGTVLPDGGSAEEVALP

SEQ ID NO: 36647 - protein, 233 aa, Bhargavaea ginsengi
  misc_feature (1)..(233): tr|A0A1H6YR34|A0A1H6YR34_9BACL 7-cyano-7-deazaguanine s ynthase OS=Bhargavaea ginsengi OX=426757 GN=queC PE=3 S V=1
MKQEKAVVVFSGGQDSTTCLFWALEQFAEVEAVTFDYGQRHALEVECAKAIAEELGIKHHVLDMSLIGQLAPSALTDTGIEVADGEYGGLPSTFVPGRNLLFFSFAGILARQIGAKHIVTGVSETDFSGYPDCRDSFVKSLNVTLNLAVDGQFVIHTPLMWLDKSQVWGLSDRLGKLDYVRTKTLTCYNGIQADGCGECPACRLRRKGLETFLGKKGGSTLPDGGSAEEVALP

SEQ ID NO: 36648 - protein, 220 aa, Bibersteinia trehalosi
  misc_feature (1)..(220): tr|A0A3R8LED6|A0A3R8LED6_BIBTR 7-cyano-7-deazaguanine s ynthase OS=Bibersteinia trehalosi OX=47735 GN=queC PE=3 SV=1
MNKPKKAVVIFSGGQDSTTCLFQAIKEFGKENVEVITFQYGQRHVIELEKAKWIAQDLGVKQTLIDTSVIKAITSNALMSESEIKQEGNTPNTFVDGRNALFLLYTAIYAKGQGIQTIFTGVCETDFSGYPDCRDVFIKSMNVTLNLAMDYNFNIRTPLMYLTKKETWALADELGAFDYIREHTHTCYLGVEGGCHTCPSCILREKGLNEYLAEKEQNNA

SEQ ID NO: 36649 - protein, 220 aa, Bibersteinia trehalosi; identical to SEQ ID NO: 36648
  misc_feature (1)..(220): tr|A0A4V7IAM8|A0A4V7IAM8_BIBTR 7-cyano-7-deazaguanine s ynthase OS=Bibersteinia trehalosi USDA-ARS-USMARC-188 O X=1263829 GN=queC PE=3 SV=1

SEQ ID NO: 36650 - protein, 251 aa, Bifidobacterium longum
  misc_feature (1)..(251): tr|B7GTM4|B7GTM4_BIFLS 7-cyano-7-deazaguanine synthase OS=Bifidobacterium longum subsp. infantis (strain ATCC 15697 / DSM 20088 / JCM 1222 / NCTC 11817 / S12) OX=391 904 GN=Blon_1859 PE=3 SV=1
MIQNHNRVALLLSGGPDSTTLLYDLLNQGKEIYAVTFNFGETEGCNESQHAQRIVTNLHSERLHHYQYDFSEQFKRFYELPQPQFLRKAFGPFVVAPNKEEHVQPFGSAIALMLMASWALKHDIVDVYYAVHSNDAVFHDNHASYFEALHTVTVECEGDEYGVTFHTPYLSINKCAVIQKGMGLGVPFGDTWSCALGGTVHCGVCDPCRDRRTSFEILGIKDPVLYEHDIFAESREEVNILESPKHISVVA

SEQ ID NO: 36651 - protein, 251 aa, Bifidobacterium longum; identical to SEQ ID NO: 36650
  misc_feature (1)..(251): tr|A0A4S5BHK1|A0A4S5BHK1_BIFLI 7-cyano-7-deazaguanine s ynthase OS=Bifidobacterium longum subsp. infantis OX=16 82 GN=queC PE=3 SV=1

SEQ ID NO: 36652 - protein, 252 aa, Bifidobacterium magnum
  misc_feature (1)..(252): tr|A0A087BBB6|A0A087BBB6_9BIFI Uncharacterized protein OS=Bifidobacterium magnum OX=1692 GN=BMAGN_0272 PE=4 SV =1
MNNKVNNFPVVEILWTGGFDSTFRVTELSLLPVVIQPYYLSDNRQSEPNELNAIKQITKNLCTRSATKAVFRPLIIISKAERVQDNLISAAYKRTRATDFFGSQYDWLGRFATEHKGIELSIHHDDKAIELINKYGAIKKIEIPTIGTNYILDQDKSPEDLNTLFRNYHLPLAMITKIQMREWYRTHHYEDVMNLTWFCYSPINGEPCGKCNPCTYTIEEGLTERFTRGGLRRYHIKKGIRGIKNLVKAIIR

SEQ ID NO: 36653 - protein, 700 aa, Bilophila sp.
  misc_feature (1)..(700): tr|G1UZL5|G1UZL5_9DELT Uncharacterized protein OS=Bilop hila sp. 4_1_30 OX=693988 GN=HMPREF0178_00731 PE=4 SV=1
MQDKRYIICGNAPTDGIEENPDRDLRLRLWGKDGPDKITLRIEDIHKKMSKDVPDSFQDLLEIATYVYSADQAIPRGADDVDSFGHGWRRDLHFIIPVRKPDFWNGDDIHQALRSTLGFLSDDNYHFEFVKLKEAQAFQGYLKFDDDGRLFGYPEQVVMFSGGLDSLAGAIDEVLNEKHKVVLVTHKSTPKLNTRHRRLEKMIADKAGENAPLHIGVRVNKNKGLNCEYTQRSRSFLYVSIGATIAKMLNLKSVRFYENGVISLNLPVCAQVVGGRATRTTHPRVIQGFQEIISLVAGEPFTIENPYIWKTKAGVIEVITKAGCQDMIAASTTCTHTWEMTNHHTHCGTCSQCIDRRFAMIAAKADQYDPVEAYKADIFTQSRSKDEDKIMTAAYLERANQVREQDDITQFIARFSEVSRVFRYLNGNSGKVAQKVYDLYKRHAKEVCDAMDTMVGRNITAIRQHTLPGDCLLRTVYESGSVISVPAIPVEQKQPDNYFRKRGGVWAARFNGNAEVLVTGVDKGAEYINFLLARPNKETSVYEIVCGFAIDSCNAVLNSNETDEGFQVTQGVPLGDTGFVADRKAVEQYRETAHELLREIEEARAENNDAEIQRLENEMTQITAAINEAVGLGGKLRNSNDKRKNIRDAFRSAVNRAITYLEKYDKPLAAHLKEFIKCGNEPVYRTEEEIVWEVRPIVNE

SEQ ID NO: 36654 - protein, 239 aa, Bilophila sp.
  misc_feature (1)..(239): tr|G1V347|G1V347_9DELT 7-cyano-7-deazaguanine synthase OS=Bilophila sp. 4_1_30 OX=693988 GN=queC PE=3 SV=1
MTSNTDSSALVIFSGGQDSATCLGWALNRFDRVFTVGFDYGQRHHVEMECRRNVLNAVRSDASLPASWAARLGEDTLLSLGLFNQIGETAMTSDMEIAFNEQGIPNTFVPGRNLVFLTAAAALAWRKGIRHLVMGVCETDFSGYPDCRDDTVKAMQVALNLGMDARFVVHTPLMWLDKARTWTLAEQEGGAPFVECVRTVTHTCYIGDRGELHPWGYGCGQCPACKLREHGWKEYSEGK

SEQ ID NO: 36655 - protein, 239 aa, Bilophila wadsworthia; identical to SEQ ID NO: 36654
  misc_feature (1)..(239): tr|E5Y8H5|E5Y8H5_BILWA 7-cyano-7-deazaguanine synthase OS=Bilophila wadsworthia 3_1_6 OX=563192 GN=queC PE=3 S V=1

SEQ ID NO: 36656 - protein, 232 aa, Biostraticola sp.
  misc_feature (1)..(232): tr|A0A4U2UKI7|A0A4U2UKI7_9ENTR 7-cyano-7-deazaguanine s ynthase OS=Biostraticola sp. BGMRC 2031 OX=2575567 GN=q ueC PE=3 SV=1
MKRAVVVFSGGQDSTTCLIQALTQYDEVDCVTFDYGQRHRAEIDIARGLAHELGARIHKVIDVGLLNELAASSLTRDNIPLPNFDEQAGDLPSTFVPGRNILFLTLASIYAYQVGAQTVITGVCETDFSGYPDCRDEFIKTLNQAVSLGMARDIRFVTPLMWLNKAETWALADYYHQLDKVRHETLTCYNGIQGDGCGQCAACHLRARGLQTYLSDPDRVAAEMRRKTALPA

SEQ ID NO: 36657 - protein, 201 aa, Biostraticola sp.
  misc_feature (1)..(201): tr|A0A4U2UEQ1|A0A4U2UEQ1_9ENTR 7-cyano-7-deazaguanine s ynthase OS=Biostraticola sp. BGMRC 2031 OX=2575567 GN=F CN80_17985 PE=3 SV=1
MKTALLLSGGMDSIAIAWWKRPDIALTLDYGQQAANAEIKAATATCEALGIEHHIIRIDCRSLGSGDMAGTAMDPNAPSSDWWPYRNQMLISLAAMKAITLGVTHLWIGTVKSDETHLDGTIGFISRISELMSFQEGGMVVEAPAITLSTSELIRISDVTPGGLAWAHSCHKANIPCGNCRGCNKYFQVLDDVGYDLDRSR

SEQ ID NO: 36658 - protein, 231 aa, Biostraticola tofi
  misc_feature (1)..(231): tr|A0A4R3YPV7|A0A4R3YPV7_9ENTR 7-cyano-7-deazaguanine s ynthase OS=Biostraticola tofi OX=466109 GN=queC PE=3 SV =1
MKRAVVVFSGGQDSTTCLIQALSQYDEVHCVTFDYGQRHRAEIDIARELSVSLGAVAHKFIDAGLLNALAVSSLTRDSIPVPRFDDQTDALPSTFVPGRNILFLTLAAIYAYQVGAESVITGVCETDFSGYPDCRDEFVRALNTAVTLGLARHIRFITPLMWLNKAETWALAAHYGKLDVIRHHTLTCYNGIKGDGCGECAACHLRAKGLADYQQDPTAVMASLRRKSPQL

SEQ ID NO: 36659 - protein, 221 aa, Bisgaardia hudsonensis
  misc_feature (1)..(221): tr|A0A4R2N099|A0A4R2N099_9PAST 7-cyano-7-deazaguanine s ynthase OS=Bisgaardia hudsonensis OX=109472 GN=queC PE= 3 SV=1
MQNSNKAVVIFSGGQDSTTCLFLAIQEFGVENVEVVTFQYGQRHAIELEKAQWIAQDLGVKQTLIDTSVIKAITNNALMDKNATIENKDNMPNTFVDGRNALFLLYTAIYAKGQNINTIFTGVCETDFSGYPDCRDVFIKSMNVTLNLAMDYNFNIRTPLMYLTKKQTWALADKLGAFDYIREHTHTCYLGVEGGCGSCPSCVLREKGLKEYLKERQSCSK

SEQ ID NO: 36660 - protein, 226 aa, Blastocatellia bacterium
  misc_feature (1)..(226): tr|A0A357F0U3|A0A357F0U3_9BACT 7-cyano-7-deazaguanine s ynthase OS=Blastocatellia bacterium OX=2052146 GN=queC PE=3 SV=1
MGERDQIAVVLVSGGMDSLVTAAIAGAECNELAFLHLSYGQRTEARERRAFNEIADFYKIKHRMDISLGYLTRIGGSSLTDHSLPVSVANLESDEIPTSYVPFRNANMLSIAVSWAEVIGANAIYIGAVAEDSSGYPDCRPEFYAAFQKAVDIGTRPETRIEIRTPIIALSKAEIVKKGTEFGAPFQLTWSCYRNEELACGRCDSCALRLRGFRQAGITDPIEYET

SEQ ID NO: 36661 - protein, 248 aa, Blastocatellia bacterium
  misc_feature (1)..(248): tr|A0A3B9LQJ2|A0A3B9LQJ2_9BACT 7-cyano-7-deazaguanine s ynthase OS=Blastocatellia bacterium OX=2052146 GN=queC PE=3 SV=1
MGGHDDRVSADSEVAGSTADSVAVCLVSGGMDSCVTAAVANDEAADLAFLHVSYGQRTEARELRAFEEIADHYAVKHRLVVSLEHLGKIGGSSLTDKGIEVTSPNLASHGIPTSYVPFRNAHLLSVATSWAEVIRAGSVYIGAVAEDSSGYPDCRPEFYEAFQRVVMLGTKPETSIEIKTPVIRLKKSQIVELGQRLNAPLQLTWSCYARSDQACGDCDSCALRLRAFREAGVKDPIPYLLDSKRFAY

SEQ ID NO: 36662 - protein, 237 aa, Blastochloris sp.
  misc_feature (1)..(237): tr|A0A348G0D6|A0A348G0D6_9RHIZ 7-cyano-7-deazaguanine s ynthase OS=Blastochloris sp. GI OX=2233851 GN=queC PE=3 SV=1
MTSPDLSALVLLSGGQDSTTCLGWALDRFDRVETVGFDYGQRHRVELEVRERIRGRIEGLKPAWSGRLGSDHLIELSVLGQISDTALTRDAAIALADSGLPTTFVPGRNLIFLGFAAALAYRRGIRHIVAGMCETDYSGYPDCRDDTIKAMQVALSLGLDRRVTIHTPLMWIDKAATFALALAIAGPQFLDLVVEETHTCYVGDRTQRHPWGFGCGVCPACRLRAEGWARFRKEDGC

SEQ ID NO: 36663 - protein, 235 aa, Blastochloris viridis
  misc_feature (1)..(235): tr|A0A0H5BK42|A0A0H5BK42_BLAVI 7-cyano-7-deazaguanine s ynthase OS=Blastochloris viridis OX=1079 GN=queC PE=3 S V=1
MPTPDHAALVLFSGGQDSTVCLGWALDRFDTVETVGFAYGQRHHVELAVRPRIRARLEALKPNWVGRLGDDHIIDLGVLGRLSETALTRDVEIRLADSGLPTTFVPGRNLIFLSFAAALAYRRGIRHLVAGMCETDYSGYPDCRDDTVKAMQVALSLGLDRPVTVHTPLMWVDKAATFALAEAIGGPTFLDVVVEDTHSCYLGDRATRHPWGYGCGGCPACRLRAEGWARFQKVR

SEQ ID NO: 36664 - protein, 231 aa, Blastomonas fulva
  misc_feature (1)..(231): tr|A0A222X505|A0A222X505_9SPHN 7-cyano-7-deazaguanine s ynthase OS=Blastomonas fulva OX=1550728 GN=queC PE=3 SV =1
MRKAMTQPQKTAVVLLSGGLDSMVSAARAIEQGFAVAALTIDYNQRHRVEIEAARKIAAHIGAVRHIVLPLDLRQFGGSALTDDIDVPKTGVGEDIPVTYVPARNLIFLSLTLGWAEALGARDIFIGVNALDYSGYPDCRPEFIQGFERLADLATKAGDQGEPFTIHAPLQFLGKAEIAAEAARLGLDPGMSWSCYDPTPEGKACGLCDSCRLRKQGFADAGLVDPTVYAA

SEQ ID NO: 36665 - protein, 227 aa, Blastomonas natatoria
  misc_feature (1)..(227): tr|A0A2V3V2S9|A0A2V3V2S9_9SPHN 7-cyano-7-deazaguanine s ynthase OS=Blastomonas natatoria OX=34015 GN=queC PE=3 SV=1
MSEPQKTAVVLLSGGLDSMVSAARAREAGFAVAALTIDYNQRHRVEIDAARSIAAHIGAVRHIVLPLDLRQFGGSALTDDIDVPKTAVGQDIPVTYVPARNLIFLSLTLGWAEALGARDIFIGVNALDYSGYPDCRPEFIQGFERLADLATKAGDQGEPFTIHAPLQYLGKAEIAAEAVRLGLDPAMSWSCYDPLPDGRACGLCDSCRLRKQGFADAGLVDGTIYAA

SEQ ID NO: 36666 - protein, 231 aa, Blastomonas sp.
  misc_feature (1)..(231): tr|W9BWI1|W9BWI1_9SPHN 7-cyano-7-deazaguanine synthase OS=Blastomonas sp. CACIA14H2 OX=1419876 GN=queC PE=3 SV =1
MRYRMSEPQKTAVVLLSGGLDSMVSAARAQEAGFAVAALTIDYNQRHRVEIEAAKAIAARIGAVRHILLPLDLRQFGGSALTDDIDVPKTGVGPDIPVTYVPARNLIFLSLTLGWAEALGARDIFIGVNALDYSGYPDCRPEFIAGFERLADLATKAGDQGEPFTIHAPLQYLGKAEIAAEAIRLGLDPAMSWSCYDPTPDGRACGLCDSCRLRKQGFADAGLTDGTVYAA

SEQ ID NO: 36667 - protein, 227 aa, Blastomonas sp.
  misc_feature (1)..(227): tr|A0A2D6H3W0|A0A2D6H3W0_9SPHN 7-cyano-7-deazaguanine s ynthase OS=Blastomonas sp. OX=1909299 GN=queC PE=3 SV=1
MTDLRKTAVVLLSGGLDSMVSAARAKEQGFDVAALTIDYNQRHRVEIEAARTIAAHIGAVRHIVLPLDLRQFGGSALTDDIDVPKTGVGQDIPVTYVPARNLIFLSLTLGWAEALGARDIFIGVNALDYSGYPDCRPEFIQGFERLADLATKAGDQGEPFTIHAPLQYLGKAEIAAEAVRLGLDPAMSWSCYDPLPDGRACGLCDSCRLRKQGFADAGLTDGTVYAA

SEQ ID NO: 36668 - protein, 218 aa, Blastopirellula cremea
  misc_feature (1)..(218): tr|A0A368KJG9|A0A368KJG9_9PLAN 7-cyano-7-deazaguanine s ynthase OS=Blastopirellula cremea OX=1031537 GN=queC PE =3 SV=1
MAKVVVVVSGGMDSATLLYHILDQGHEARAISVDYGQRHVKELDYARQLCEGVGVAHQVADLSAINPIFGNNSLSGREMEIPEGHYAEESMKQTVVPNRNMLLLSVAIAAAAANKFQAVAYGAHSGDHAIYPDCRPEFAEAMDQAARLCDWNPIELWRPFVHLDKGQIAKRGVDLGVPFEKTWTCYKGLELHCGKCGACVERREAFASQGLLDPTEYA

SEQ ID NO: 36669 - protein, 219 aa, Blastopirellula marina
  misc_feature (1)..(219): tr|A3ZMY4|A3ZMY4_9PLAN 7-cyano-7-deazaguanine synthase OS=Blastopirellula marina DSM 3645 OX=314230 GN=queC PE =3 SV=1
MSKVVAVVSGGMDSATLLYHLIDAGHDVRAISINYGQRHVKELDYARQLCDKVGVPQIVADLSAINPLFGANSLSGREIEIPEGHYAEENMKLTVVPNRNMILLSVSIAWAISQECVAVAYGAHSGDHAIYPDCRPEFAAAMDQAAKLCDWSAVELWRPFVDIDKGDIAQRGSELGVPYELTWTCYKGLAEHCGKCGACVERKEAFAKHGLVDPTAYMA

SEQ ID NO: 36670 - protein, 219 aa, Blastopirellula marina
  misc_feature (1)..(219): tr|A0A2S8FL60|A0A2S8FL60_9PLAN 7-cyano-7-deazaguanine s ynthase OS=Blastopirellula marina OX=124 GN=queC PE=3 S V=1
MAKVVVVVSGGMDSATLLYYILAEGHETRAISVDYGQRHVKELDYARQLCEGVNVPHQVADLSAINPIFGNNSLSGRDMEVPEGHYAEESMKQTVVPNRNMLLLSVAIASAAANKFNAVAYGAHSGDHAIYPDCRPEFAEAMDQAARLCDWNPIELWRPFVHLDKGQIAKRGVDLGVPFEKTWTCYKGLDLHCGKCGACVERKEAFSGNGLLDPTQYAD

SEQ ID NO: 36671 - protein, 225 aa, Blastopirellula sp.
  misc_feature (1)..(225): tr|A0A2G2J996|A0A2G2J996_9PLAN 7-cyano-7-deazaguanine s ynthase OS=Blastopirellula sp. OX=2024826 GN=queC PE=3 SV=1
MTKAYILLSGGIDSSALLARANLIHEGSVKAISVDYGQKHNIELVHAANVAKHMGISHEIVDMSFAMGKGGLSDPSLEVPKVSYEDLPHGVSPTYVPNRNMLMLSMLVSKAAADPDAEFAYYGAHAEDSENDAYPDCSPEFVNAMVKAVSIATYGKITLDAPFVDNTKAEVVANGEQIGVPWELTWSCYEGGLIHCGTCSTCRARRDAFIGARVTDPTVYREVPT

SEQ ID NO: 36672 - protein, 218 aa, Blastopirellula sp.
  misc_feature (1)..(218): tr|A0A2G2KLR8|A0A2G2KLR8_9PLAN 7-cyano-7-deazaguanine s ynthase OS=Blastopirellula sp. OX=2024826 GN=queC PE=3 SV=1
MEKVVVVSSGGMDSATLLYHMVDAGHQVKSLSINYGQRHVKEIDFAKRLADHLQIEHAVADISAINHLLGNNSLSGREIDIPEGHYEEESMKLTVVPNRNMILLSVAIAWAVSNKFDAVAYGAHSGDHAIYPDCRPEFAEAMDQAAQLCDWNPVKLLRPFVHLDKGDIAQRGHELGVPFAETWTCYKGQEKHCGKCGACTERKEAFAKHGLKDVTDYA

SEQ ID NO: 36673 - protein, 231 aa, Blautia hydrogenotrophica
  misc_feature (1)..(231): tr|C0CIL2|C0CIL2_BLAHS 7-cyano-7-deazaguanine synthase OS=Blautia hydrogenotrophica (strain DSM 10507 / JCM 14 656 / S5a33) OX=476272 GN=queC PE=3 SV=1
MSEKAMVLFSGGVDSTTCLGLAIEKYGVQNVIPLSVQYGQKHEKEVEAARRILEYYGIEGMELDLTPIFAYSDCSLLSHSEKEIPEASYAEQLRENEGVPVSTYVPFRNGLFLACAASIALSRECSCIYYGAHRDDAAGSAYPDCSESFFESMNRAVYEGSGQQIRIEAPFIKMNKAQIVAEGLRLKVPYEFTWSCYEGKEKPCGVCGTCIDRSEAFKVNGVEDPAYRGES

SEQ ID NO: 36674 - protein, 231 aa, Blautia hydrogenotrophica; identical to SEQ ID NO: 36673
  misc_feature (1)..(231): tr|A0A173T5S2|A0A173T5S2_9FIRM 7-cyano-7-deazaguanine s ynthase OS=Blautia hydrogenotrophica OX=53443 GN=queC P E=3 SV=1

SEQ ID NO: 36675 - protein, 227 aa, Blautia luti
  misc_feature (1)..(227): tr|A0A564VV22|A0A564VV22_9FIRM 7-cyano-7-deazaguanine s ynthase OS=Blautia luti OX=89014 GN=queC PE=3 SV=1
MKALVLASGGVDSTTCLGLAVNKYGKENVIALTVAYGQKHTKEIEAARKTAEYYGVEHLYLDLEPIFRYSDCSLLKHSDREIPHESYAEQLKETDGSPVSTYVPFRNGLFLSSAASIALSKNCSVIYYGAHADDAAGNAYPDCSSAFHNAINEAIYQGSGGQLKVEAPFVSCTKAEVVKTGLELKVPYELTWSCYEGGEKPCGVCGTCIDRAEAFRLNGVKDPALDR

SEQ ID NO: 36676 - protein, 227 aa, Blautia obeum
  misc_feature (1)..(227): tr|A0A367FWR9|A0A367FWR9_9FIRM 7-cyano-7-deazaguanine s ynthase OS=Blautia obeum OX=40520 GN=queC PE=3 SV=1
MKALVLASGGVDSTTCLGLAVNKYGKENVIALTVAYGQKHTKEIEAARKTAEYYGVEHLYLDLEPIFRYSDCSLLKHSDREIPHESYAEQLKETDGSPVSTYVPFRNGLFLSSAASIALSKNCSVIYYGAHADDAAGNAYPDCSSAFHNAINEAIYQGSGGQLKVEAPFVSCTKAEVVKTGLELNVPYELTWSCYEGGEKPCGVCGTCIDRAEAFRLNGVKDPALDR

SEQ ID NO: 36677 - protein, 226 aa, Blautia obeum
  misc_feature (1)..(226): tr|A0A411ZLI6|A0A411ZLI6_9FIRM 7-cyano-7-deazaguanine s ynthase OS=Blautia obeum OX=40520 GN=queC PE=3 SV=1
MKAMVLFSGGIDSTTCLGMAVEKYGPENVIALSIAYGQKHTKEIEASDKIVKYYNVEHIYLDLAKIFQYSDCSLLSHSDKEIPKESYNDQIKSTNGSPVSTYVPFRNGLFLSSAASIALSKGCSEIYYGAHADDAAGSAYPDCSSDFNNAINEAIYLGSGKQIKVVAPFINATKDQVVKKGLEINVPYKYTWSCYEGGEKPCGKCGTCIDRAKAFELNGIKDPAME

SEQ ID NO: 36678 - protein, 227 aa, Blautia sp.
  misc_feature (1)..(227): tr|A0A416RK65|A0A416RK65_9FIRM 7-cyano-7-deazaguanine s ynthase OS=Blautia sp. AF19-34 OX=2292963 GN=queC PE=3 SV=1
MKALVLFSGGIDSTTALGLAIQKYGKDQVIALSVSYGQKHDKEIKAAIAVAQYYGVEHLFLDLSKIFQYSNCSLLQQSTEDIPEESYAEQISKTNGDKPVSTYVPFRNGLFLSSAASIALSKDCEVIYYGAHADDSAGFAYPDCSPVFNQAMNEAIWEGSGHQLKIEAPFVNVSKAEVVRTGLELGVPYELTWSCYEGGEKPCGKCGTCIDRAAAFQANHMEDPALR

SEQ ID NO: 36679 - protein, 229 aa, Blautia sp.
  misc_feature (1)..(229): tr|A0A1Y3YFH7|A0A1Y3YFH7_9FIRM 7-cyano-7-deazaguanine s ynthase OS=Blautia sp. An46 OX=1965636 GN=queC PE=3 SV= 1
MGDKAMVLFSGGIDSTTCLGLAIEKYGKENVIPLSVFYGQKHEKEVEAARKILEYYEIKGMEMDLSSIFAYSSCSLLAHSQEEIPESSYGEQLAQTGGAPVSTYVPFRNGLFLSCAASLALSLDCSVVYYGAHRDDAAGNAYPDCSRAFYDSMNQAVYEGSGKALYIEAPFIDKNKAEIVAEGLRLKVPYEFTWSCYEGKEFPCGVCGTCIDRQKAFEANGIKDPALGE

SEQ ID NO: 36680 - protein, 224 aa, Unknown
  misc_feature (1)..(224): tr|A0A1U9VPE3|A0A1U9VPE3_9RALS 7-cyano-7-deazaguanine s ynthase OS=blood disease bacterium A2-HR MARDI OX=19446 48 GN=queC PE=3 SV=1
MKKRAIVLLSGGLDSATVLAMANAQGFETYALSMRYGQRHSSELEAAKKVAAALGAVRHEIVDLDLRRFGGSALTDDALEVPTTGVKEGIPITYVPARNTIMLSLALGWAEAVGARDLFFGANAVDYSGYPDCRPEFVAAYETLANLATKAGVEGDRIRVNAPIIAMTKAEIIQAGARLGVDYSLTVSCYQADDEGRACGVCDSCRIRRAGFETAGVADPTRYR

SEQ ID NO: 36681 - protein, 224 aa, Unknown; identical to SEQ ID NO: 36680
  misc_feature (1)..(224): tr|G2ZWZ2|G2ZWZ2_9RALS 7-cyano-7-deazaguanine synthase OS=blood disease bacterium R229 OX=741978 GN=queC PE=3 SV=1

SEQ ID NO: 36682 - protein, 246 aa, Bombella intestini
  misc_feature (1)..(246): tr|A0A1S8GNL2|A0A1S8GNL2_9PROT 7-cyano-7-deazaguanine s ynthase OS=Bombella intestini OX=1539051 GN=queC PE=3 S V=1
MTTSSSPSASHQAAQNRRALVLFSGGQDSATCLAWALHHFDHVETVGFAYGQRHAVELDCRTTLRQSISAQNPHWAKKLGEDHTIDLASLGALSDTALTRDAEISMGENGLPNTFVPGRNLIFLTFAAALAFRRSIRHIITGVCETDYSGYPDCRDDTIKALQVALNLGMEQRFVLHTPLMWINKAQTWQLCHDLGGSALTETIRHESHSCYKGDRTHEHAWGFGCGDCPACTLRAEGWRQYQEGA

SEQ ID NO: 36683 - protein, 242 aa, Bordetella ansorpii
  misc_feature (1)..(242): tr|A0A157QVB0|A0A157QVB0_9BORD 7-cyano-7-deazaguanine s ynthase OS=Bordetella ansorpii OX=288768 GN=queC PE=3 S V=1
MLAPTPDTRRALVLFSGGQDSTTCLAWALDRYAHVETVAFDYGQRHRIELDARLNVLRELRAGYPQWTAKLGEDHLLDLSVLGQVGDTALTSDRQIEMQENGLPNTFVPGRNLLFLTLAAALGYRRQLDVLVGGMCETDFSGYPDCRDDTIKAQQVALSLGLGSRVTIETPLMWRDKAQTWELARALGGLALVDLIVEHSHTCYLGERGGRHDWGYGCGTCPACELRAAGWLRWKAGQQAAV

SEQ ID NO: 36684 - protein, 242 aa, Bordetella ansorpii
  misc_feature (1)..(242): tr|A0A157SBP2|A0A157SBP2_9BORD 7-cyano-7-deazaguanine s ynthase OS=Bordetella ansorpii OX=288768 GN=queC PE=3 S V=1
MLAPTPDTRRALVLFSGGQDSTTCLAWALDRYAHVETVAFDYGQRHRIELDARLNVLRELRAGYPQWTARLGEDHLLDLSVLGQVGDTALTSDRQIEMQENGLPNTFVPGRNLLFLTLAAALGYRRQLDVLVGGMCETDFSGYPDCRDDTIKAQQVALSLGLGSRVTIETPLMWRDKAQTWDLARALGGLALVDLIVEHSHTCYLGERGARHDWGYGCGTCPACELRAAGWLRWKAGQYAAV

SEQ ID NO: 36685 - protein, 244 aa, Bordetella avium
  misc_feature (1)..(244): sp|Q2KZT1|QUEC_BORA1 7-cyano-7-deazaguanine synthase OS =Bordetella avium (strain 197N) OX=360910 GN=queC PE=3 SV=1
MHFPVFIMQNHQRRALVLFSGGQDSTTCLAWALDRYAHVETVAFDYGQRHRIELDARLNVLREIRGRFPAWAARLGQDHLLDLKVLGQVGDTAMTSDRAIEMQANGLPNTFVPGRNLLFLTLAAALGYRRQLDVLVGGMCETDFSGYPDCRDDTMKAQQVALSLGLGSRVTIETPLMWLDKADTWALADSLGGESLVQTIVEESHTCYVGERGQRHDWGYGCGECPACVLRKAGWSRWAERAPR

SEQ ID NO: 36686 - protein, 242 aa, Bordetella bronchialis
  misc_feature (1)..(242): tr|A0A193FST3|A0A193FST3_9BORD 7-cyano-7-deazaguanine s ynthase OS=Bordetella bronchialis OX=463025 GN=queC PE= 3 SV=1
MQNHERRALVLFSGGQDSTTCLAWALERYAHVETVAFDYGQRHRIELDARRDVLRELRARRPDWSSRLGEDHLLDLSVLGQVGDTALTSERRIEMQANGLPNTFVPGRNLLFLTLAAALGYRRQLDVLVGGMCETDFSGYPDCRDDTMKAQQIALALGLGTRVTIETPLMWLDKAQTWALAHRLGGDELVGIIVEDSHTCYLGERGARHDWGYGCGTCPACALRKAGWERWAAGQAAPLPPV

SEQ ID NO: 36687 - protein, 244 aa, Bordetella bronchiseptica
  misc_feature (1)..(244): tr|A0A0C6P8E6|A0A0C6P8E6_BORBO 7-cyano-7-deazaguanine s ynthase OS=Bordetella bronchiseptica 253 OX=568707 GN=q ueC PE=3 SV=1
MFRCLMQNHQRRALVLFSGGQDSTTCLAWALERYAHVETLGFDYGQRHRVELDARQVVLRELRANFPDWAQRLGDDHLLDLGILAQLGDTAMTSDREIEMQANGLPNTFVPGRNLLFLTLAAALGYRRQLDVLVGGMCETDFSGYPDCRDDTIKSQQVTLGLGLGTRVTIETPLMWLDKAQTWELADRLGGQALVDMVIEHSHTCYLGERGQRHDWGYGCGHCPACALRKNGWERWVAGAAHAD

SEQ ID NO: 36688 - protein, 244 aa, Bordetella bronchiseptica
  misc_feature (1)..(244): sp|Q7WQB2|QUEC_BORBR 7-cyano-7-deazaguanine synthase OS =Bordetella bronchiseptica (strain ATCC BAA-588 / NCTC 13252 / RB50) OX=257310 GN=queC PE=3 SV=1
MFRCLMQNHQRRALVLFSGGQDSTTCLAWALERYAHVETLGFDYGQRHRVELDARQVVLRELRANFPDWAQRLGDDHLLDLGILAQVGDTAMTSDREIEMQANGLPNTFVPGRNLLFLTLAAALGYRRQLDVLVGGMCETDFSGYPDCRDDTIKSQQVTLGLGLGTRVTIETPLMWLDKAQTWELADRLGGQALVDMVIEHSHTCYLGERGQRHDWGYGCGHCPACALRKNGWERWVAGAAHAD

SEQ ID NO: 36689 - protein, 242 aa, Bordetella flabilis
  misc_feature (1)..(242): tr|A0A193G861|A0A193G861_9BORD 7-cyano-7-deazaguanine s ynthase OS=Bordetella flabilis OX=463014 GN=queC PE=3 S V=1
MQNHQRRALVLFSGGQDSTTCLAWALERYAHVETVAFDYGQRHRIELDARLNVRRELCARRPDWAARLGEDHLLDLSVLSQVGDTALTSDRQIEMQANGLPNTFVPGRNLMFLTVAAALAYRRQLDVLVGGMCETDFSGYPDCRDDTIKAQQVVLGLGLATRMTIETPLMWLDKAQTWALAQRLGGDALVETVVEHSHTCYLGERGARHDWGYGCGTCPACALRKAGWERWVAGAAADLPPG

SEQ ID NO: 36690 - protein, 237 aa, Bordetella genomosp.
  misc_feature (1)..(237): tr|A0A261QU96|A0A261QU96_9BORD 7-cyano-7-deazaguanine s ynthase OS=Bordetella genomosp. 7 OX=1416805 GN=queC PE =3 SV=1
MPNHQRRALVLFSGGQDSTTCLAWALARYAHVETVAFDYGQRHRIELDARINVLNQLRAAFPHWSEKLGADHVLDLRVLGQVGDTAMTSERAIEMQANGLPNTFVPGRNLLFLTLAAALGYRRQLDVLVGGMCETDFSGYPDCRDDTIKAQQVALGLGLGTRVTIETPLMWIDKADTWDLARQLGGQALVDIVVEHSHTCYLGERGARHGWGYGCGTCPACALRKAGWERWRNRAKA

SEQ ID NO: 36691 - protein, 245 aa, Bordetella genomosp.
  misc_feature (1)..(245): tr|A0A261RV52|A0A261RV52_9BORD 7-cyano-7-deazaguanine s ynthase OS=Bordetella genomosp. 1 OX=1395607 GN=queC PE =3 SV=1
MLNHQRRALVLFSGGQDSTTCLAWALDRYEHVETVAFDYGQRHRIELDARLNVLREIRAQFPQWAARLGEDHLLDLKVLGQVGDTAMTSDRAIEMQANGLPNTFVPGRNLLFLTLAAALGYRRELDVLVGGMCETDFSGYPDCRDDTIKAQQVALGLGLGTRLTIETPLMWIDKSETWALAEQLGGPALVDTIVEHSHTCYLGERGMRHAWGHGCGQCPACVLRKAGFERWVEDKAARQADGPGA

SEQ ID NO: 36692 - protein, 239 aa, Bordetella hinzii
  misc_feature (1)..(239): tr|A0A0H4VT75|A0A0H4VT75_9BORD 7-cyano-7-deazaguanine s ynthase OS=Bordetella hinzii OX=103855 GN=queC PE=3 SV= 1
MQNHQRRALVLFSGGQDSTTCLAWALDRYAHVETVAFDYGQRHRIELDARLNVLRGIRGQFPDWAARLGEDHLLDLKVLGQVGDTAMTSERAIEMQANGLPNTFVPGRNLLFLTLAAALGYRRQLDVLVGGMCETDFSGYPDCRDDTIKAQQVALSLGLGARLTIETPLMWLDKADTWALADSLGGPELVQTIVEESHTCYLGERGQRHDWGYGCGECPACSLRKSGWLRWVARAETEG

SEQ ID NO: 36693 - protein, 237 aa, Bordetella holmesii
  misc_feature (1)..(237): tr|A0A158M0G8|A0A158M0G8_9BORD 7-cyano-7-deazaguanine s ynthase OS=Bordetella holmesii CDC-H585-BH OX=1331206 G N=queC PE=3 SV=1
MQNHQRRALVLFSGGQDSSTCLAWALQRYAHVETVAFDYGQRHRIELDARLNVLREFRARFPDWAARLGEDHLLDLKVLGQVGDTAMTSDRAIEMQANGLPNTFVPGRNLLFLTLAAALGYRRQLDVLVGGMCETDFSGYPDCRDDTIKAQQVALGLGLGARVTIETPLMWLDKADTWALADTLGGPDLVQIIVQESHTCYLGERGQRHDWGYGCGECPACSLRKAGWLRWVARAED

SEQ ID NO: 36694 - protein, 244 aa, Bordetella parapertussis; identical to SEQ ID NO: 36688
  misc_feature (1)..(244): tr|K0MAU9|K0MAU9_BORPB 7-cyano-7-deazaguanine synthase OS=Bordetella parapertussis (strain Bpp5) OX=1208660 GN =queC PE=3 SV=1

SEQ ID NO: 36695 - protein, 244 aa, Bordetella parapertussis
  misc_feature (1)..(244): sp|Q7WCA8|QUEC_BORPA 7-cyano-7-deazaguanine synthase OS =Bordetella parapertussis (strain 12822 / ATCC BAA-587 / NCTC 13253) OX=257311 GN=queC PE=3 SV=1
MFRCLMQNHQRRALVLFSGGQDSTTCLAWALERYAHVETLGFDYGQRHRVELDARQVVLRELRANFPDWAQRLGDDHLLDLGILAQVGDTAMTSDREIEMQANGLPNTFVPGRNLLFLTLAAALGYRRQLDVLVGGMCETDFSGYPDCRDDTIKSQQVTLGLGLGTRVTIETPLMWLDKAQTWELADRLGGQALVDMVIEHSHTCYLGERGQRHDWGYGCGHCPACALRKNGWERWVAGAAYAD

SEQ ID NO: 36696 - protein, 244 aa, Bordetella pertussis; identical to SEQ ID NO: 36688
  misc_feature (1)..(244): sp|Q7W0D1|QUEC_BORPE 7-cyano-7-deazaguanine synthase OS =Bordetella pertussis (strain Tohama I / ATCC BAA-589 / NCTC 13251) OX=257313 GN=queC PE=3 SV=2

SEQ ID NO: 36697 - protein, 239 aa, Bordetella pertussis
  misc_feature (1)..(239): tr|A0A0E8BXR4|A0A0E8BXR4_BORPT 7-cyano-7-deazaguanine s ynthase OS=Bordetella pertussis OX=520 GN=queC PE=3 SV= 1
MQNHQRRALVLFSGGQDSTTCLAWALERYAHVETLGFDYGQRHRVELDARQVVLRELRANFPDWAQRLGDDHLLDLGILAQVGDTAMTSDREIEMQANGLPNTFVPGRNLLFLTLAAALGYRRQLDVLVGGMCETDFSGYPDCRDDTIKSQQVTLGLGLGTRVTIETPLMWLDKAQTWELADRLGGQALVDMVIEHSHTCYLGERGQRHDWGYGCGHCPACALRKNGWERWVAGAAHAD

SEQ ID NO: 36698 - protein, 238 aa, Bordetella petrii
  misc_feature (1)..(238): tr|A9IDM6|A9IDM6_BORPD 7-cyano-7-deazaguanine synthase OS=Bordetella petrii (strain ATCC BAA-461 / DSM 12804 / CCUG 43448) OX=340100 GN=queC PE=3 SV=1
MQNHSRRALVLFSGGQDSTTCLAWALDRYAHVETVAFDYGQRHRIELDARLNVLRELRAQFPQWAGRLGEDHLLDLRVLGQVGDTAMTSERAIEMQANGLPNTFVPGRNLLFLALAAALGYRRQLDVLVGGMCETDFSGYPDCRDDTIKAQQVALGLGLGTRVTIETPLMWIDKADTWALARQLGGQALVALIVEHSHTCYLGERGARHDWGYGCGTCPACALRKAGWQRWRDQAGDA

SEQ ID NO: 36699 - protein, 239 aa, Bordetella pseudohinzii
  misc_feature (1)..(239): tr|A0A0J6CAX2|A0A0J6CAX2_9BORD 7-cyano-7-deazaguanine s ynthase OS=Bordetella pseudohinzii OX=1331258 GN=queC P E=3 SV=1
MQNHQRRALVLFSGGQDSTTCLAWALDRYAHVETVAFDYGQRHRIELDARLNVLRAIRGQFPDWAARLGEDHLLDLKVLGQVGDTAMTSERAIEMQANGLPNTFVPGRNLLFLTLAAALGYRRQLDVLVGGMCETDFSGYPDCRDDTIKAQQVALSLGLGARLTIETPLMWLDKADTWALADSLGGPELVQTIVEESHTCYLGERGQRHDWGYGCGECPACSLRKAGWLRWVARAEAEG

SEQ ID NO: 36700 - protein, 236 aa, Bordetella sp.
  misc_feature (1)..(236): tr|A0A1E3ZGW5|A0A1E3ZGW5_9BORD 7-cyano-7-deazaguanine s ynthase OS=Bordetella sp. SCN 67-23 OX=1660091 GN=queC PE=3 SV=1
MDARKALVLFSGGQDSTTCLAWALDRYARVETVGFDYGQRHRVELDARGNVLREIRARFPAWSTRLGEDHAIDLSVLGALSDTALTRDTEIRMTDAGLPNTFVPGRNLVFLTMAAALAYRRGLEVVVGGMCETDFSGYPDCRDDTVKALQVAVSLGMGQRFTFETPLMWLDKAQTWQLAEDLGGDALVEVVAEHSHTCYLGDRSKRFDWGYGCGTCPACELRAAGYGRWRQVPGGE

SEQ ID NO: 36701 - protein, 239 aa, Bordetella sp.
  misc_feature (1)..(239): tr|A0A3T0NJ19|A0A3T0NJ19_9BORD 7-cyano-7-deazaguanine s ynthase OS=Bordetella sp. J329 OX=1977852 GN=queC PE=3 SV=1
MIPLREKRALVLFSGGQDSATCLAWALSRYQHVETLGFDYGQRHRVELDCRTRLRKLVADMNPDWAPRLAEDHLLPVDFFRHLGQTAMTDDVAITMQADGLPNTFVPGRNLLFLTLAAALAYRRNLNVLIGGMTEADYSGYPDCRDNTMKALQVALSLGIDRQLTIETPLMWLDKTEIWDLAWRLGGDVLVETIRQESHTCYLGTRDTLHSWGYGCGSCPACTLRARGYVRWAANRLVA

SEQ ID NO: 36702 - protein, 237 aa, Bordetella trematum
  misc_feature (1)..(237): tr|A0A157RBK4|A0A157RBK4_9BORD 7-cyano-7-deazaguanine s ynthase OS=Bordetella trematum OX=123899 GN=queC PE=3 S V=1
MQNHQRRALVLFSGGQDSTTCLAWALQRYAHVETVAFDYGQRHHIELQARQHVLRELHAAFPEWAARLGEDHVLDLKVLGQVGDTAMTSERAIEMQDNGLPNTFVPGRNLLFLNLAAALGYRRQLDVLVGGMCETDFSGYPDCRDDTIKAQQVALSLGLGARVTIETPLMWLDKAEAWALARELGGQALVDLIVEHSHTCYLGERGRRHDWGYGCGECPACALRAAGWQRWTQTPAA

SEQ ID NO: 36703 - protein, 240 aa, Bosea lathyri
  misc_feature (1)..(240): tr|A0A1H6BBA5|A0A1H6BBA5_9BRAD 7-cyano-7-deazaguanine s ynthase OS=Bosea lathyri OX=1036778 GN=queC PE=3 SV=1
MNTSRALVLFSGGQDSTVALAWALERFEVVETVGFDYGQRHRVELECRQIIRDKLPGLSRRYADRLGPDHVVDLKALGAISDTALTRETEIAFTDAGLPTTFVPGRNLIFLTFAAALAYRRDARHIVLGVCETDYSGYPDCRDDTIKAMQVALGLGLDRRLVLHTPLMWRDKAQTFALAKAVGGQPLLDLVIEDSHSCYLGDRTRRHDWGFGCGHCPACDLRAKGYGAYLISPEDSGPSQ

SEQ ID NO: 36704 - protein, 240 aa, Bosea lupini
  misc_feature (1)..(240): tr|A0A1H7VW27|A0A1H7VW27_9BRAD 7-cyano-7-deazaguanine s ynthase OS=Bosea lupini OX=1036779 GN=queC PE=3 SV=1
MTSRALVLFSGGQDSTVALAWALERFAAVETVGFDYGQRHRVELECRETIRARLPGLAPAYADRLGPDHLLDLKTLGAISDTALTSESEIAFAETGLPTTFVPGRNLIFLSFAAALAYRRDCKHIVLGVCETDYSGYPDCRDDTIKAMQVALALGLDRRLVLHTPLMWRDKAQTFALAKELGGEPLLELVVEDTHSCYLGDRSKRHPWGYGCGHCPACDLRARGFAAYEAAPDDSGPRGC

SEQ ID NO: 36705 - protein, 242 aa, Bosea sp.
  misc_feature (1)..(242): tr|A0A0N1BBX5|A0A0N1BBX5_9BRAD 7-cyano-7-deazaguanine s ynthase OS=Bosea sp. AAP35 OX=1523417 GN=queC PE=3 SV=1
MTASRALVLFSGGQDSTVALAWALERFDEVETVGFDYGQRHRVELNCRTVIRDRLPTLSPIYARRLGPDHLVDLAALGAISETALTRDTEIAFAETGLPTTFVPGRNLIFLTFAAALAYRRNARHIVLGVCETDYSGYPDCRDDTIKAMQVALGLGLDRRLVLHTPLMWRDKAQTFALARALGGEPLLDLVIADSHSCYLGDRSTRHDWGYGCGHCPACDLRAKGYTAYLISPDDSGPSHDT

SEQ ID NO: 36706 - protein, 245 aa, Bosea sp.
  misc_feature (1)..(245): tr|A0A1Q3NU25|A0A1Q3NU25_9BRAD 7-cyano-7-deazaguanine s ynthase OS=Bosea sp. 67-29 OX=1895723 GN=queC PE=3 SV=1
MASAGTSRALVLFSGGQDSTTALAWALDRFDAVETVGFDYGQRHRVEMQCRLTIRGKLPALSSTYAGRLGPDHVVDLAALGALSETALTRETEIVFAETGLPTTFVPGRNLIFLTFAAALAYRRNLKHIVLGVCETDYSGYPDCRDDTIKAMQVALGLGLDRRLALHTPLMWRDKAETFALARQIGGQALLDLVLEETHSCYLGNRSTRHGWGYGCGHCPACDLRAKGYAAYLAAPGNSGPSYDS

SEQ ID NO: 36707 - protein, 242 aa, Bosea thiooxidans
  misc_feature (1)..(242): tr|A0A0Q3M0V0|A0A0Q3M0V0_9BRAD 7-cyano-7-deazaguanine s ynthase OS=Bosea thiooxidans OX=53254 GN=queC PE=3 SV=1
MSASRALVLFSGGQDSTTALAWALDRFDAVETVGFDYGQRHRVEMDCRLAIRDKLPALSARYAERLGPDHVVDLAALGAISETALTRETEIVFAETGLPTSFVPGRNLIFLTFAAALAYRRDLRHIVLGVCETDYSGYPDCRDDTIKAMQVALGLGLDRRLVLHTPLMWRDKAQTFALARRLGGQALLDLVLEESHSCYLGDRTTRHGWGFGCGRCPACDLRAKGYAAYLATPDDSGPSYDT

SEQ ID NO: 36708 - protein, 248 aa, Bosea vaviloviae
  misc_feature (1)..(248): tr|A0A1D7U872|A0A1D7U872_9BRAD 7-cyano-7-deazaguanine s ynthase OS=Bosea vaviloviae OX=1526658 GN=queC PE=3 SV= 1
MAAAASASESRALVLFSGGQDSTVALAWALERFASVETVGFDYGQRHRIELECRQIIRDKLPALSTLHSDRLGPDHLIDLKALGAISDTALTRETEIAFAETGLPTTFVPGRNLIFLSFAAALAYRRDCRHIVLGVCETDYSGYPDCRDDTIKAMQVALGLGLDRRLVLHTPLMWRDKAQTFALAKALGGQPLLDLVVEDSHSCYLGDRATRHAWGHGCGHCPACELRANGYAAYLISPDDTGPSHDT

SEQ ID NO: 36709 - protein, 240 aa, Bosea vaviloviae
  misc_feature (1)..(240): tr|A0A0N1F4C9|A0A0N1F4C9_9BRAD 7-cyano-7-deazaguanine s ynthase OS=Bosea vaviloviae OX=1526658 GN=queC PE=3 SV= 1
MTSRALVLFSGGQDSTVALAWALARFEQVETIGFDYGQRHRVELECRKVIRDRLPALSPLYAQRLGPDHLIDLAALGAISETALTRDSEIAFAETGLPTTFVPGRNLIFLTFAAALAYRRDARHIVLGVCETDYSGYPDCRDDTIKAMQVALGLGLDRRLVLHTPLMWRDKAQTFALATALGGQALLDLVVEDSHSCYLGDRSTRHAWGYGCGHCPACDLRGRGYAAYLTSPDDSGPSHD

SEQ ID NO: 36710 - protein, 242 aa, Bosea vestrisii
  misc_feature (1)..(242): tr|A0A543NQA9|A0A543NQA9_9BRAD 7-cyano-7-deazaguanine s ynthase OS=Bosea vestrisii OX=151416 GN=queC PE=3 SV=1
MGESRALVLFSGGQDSTTALAWALDRFDAVETIGFDYGQRHRVEMECRQAIRAKLPALAATYAERLGPDHVVDLAALGAISETALTRETEIVFAETGLPTTFVPGRNLIFLTFAAALAYRRNLRHIVLGVCETDYSGYPDCRDDTIKAMQVALGLGLDRRLVLHTPLMWRDKAQTFALAREIGGQALLDLVLEETHSCYLGDRATRHGWGYGCGHCPACDLRAKGFAAYLAAPGNSGPSYDT

SEQ ID NO: 36711 - protein, 218 aa, Bowmanella sp.
  misc_feature (1)..(218): tr|A0A4Q9XJ19|A0A4Q9XJ19_9ALTE 7-cyano-7-deazaguanine s ynthase OS=Bowmanella sp. JS7-9 OX=1605368 GN=queC PE=3 SV=1
MAQKAVVIYSGGMDSFTLLNKVHCSGTKVYALSFNYGQKHKKELDYAARVCQTLGINHKVVDISSINSLLAGSALTSEMDMPEGHYEDDNMKQTVVPNRNMILLSLAVGYAVSLGAEQVYYGAHGGDHAIYPDCRPLFVEKMNDVCAIANYEAVSIDVPYLHNDKTEILRDGLAMGLDYSQTWTCYNGREKACGKCGACQERLEAFRENGQQDPLTYE

SEQ ID NO: 36712 - protein, 398 aa, Brachybacterium sp.
  misc_feature (1)..(398): tr|A0A2N6TYD7|A0A2N6TYD7_9MICO Queuosine biosynthesis p rotein queC OS=Brachybacterium sp. UMB0905 OX=2069310 G N=CJ197_14095 PE=4 SV=1
MAGGTDTVRSAVGWWLPSLGPVPTQAIDLVRIAGGAYLVDRLSGRPSAFTRRLHLTVEVADPEPWEGEAIDQLAQLLFWLTGDTWELQLVQDPTTPNDPIAGPSGGADSVALLSGGLDSYLGALHLLATLDEEPLFVGHYDTATAVRRAQNTVHSWLEEAHTPPPSYTQIEFTQVDDKKESSSRSRSLLFLALGTAVATSRGASKLFVPENGFTSLNLPLHPNRAGALSTRSTHPETFYRVNLLLQSLNLSLAVTNPFATFTKGEEMRLVADSHPPGGWDRIAGLTVSCSKLDGARIKGGNSTLNCGLCYACVTRRGAFIAAGVNDSTSYLSDGLTGNARLELLERRYSDRAAISYATTRGIDDDVIDAGTWPPDADLDEISDLARRGLAELGKVTLI

SEQ ID NO: 36713 - protein, 247 aa, Brachymonas denitrificans
  misc_feature (1)..(247): tr|A0A1H8EPN3|A0A1H8EPN3_9BURK 7-cyano-7-deazaguanine s ynthase OS=Brachymonas denitrificans DSM 15123 OX=11211 17 GN=queC PE=3 SV=1
MSLFPPLLPRHALVLFSGGQDSTTCLAHALSRYERVETIAFDYGQRHRVELDARLNVLQALRQQFPAWGERLGEDHLLDVNVLGHISETSLTRDTAFAMEASGLPNTFVPGRNLLFLTLAAALAYRRGMDVLVTGVCETDFSGYPDCRDDTMKAMQIALSLGMDKRLLIDTPLMWIDKAQTWQLAHELGDASGVADGGKALVDLIVEHSHTCYLGDREHRHAWGYGCGSCPACELRARGYARYSAAA

SEQ ID NO: 36714 - protein, 221 aa, Brachyspira sp.
  misc_feature (1)..(221): tr|R5HFC4|R5HFC4_9SPIR 7-cyano-7-deazaguanine synthase OS=Brachyspira sp. CAG:484 OX=1262759 GN=queC PE=3 SV=1
MNKSVILLSGGLDSLVSLGLAQKEYNVKLALTFDYGQKSAQDEIEASARISKYYGLKHEVITLEWLKNITTTSLVSDKDVPAGELLDNPEQSAKLVWVPNRNGLFLNIAGSYADAEGFTHILIGANKEEGETFPDNTQEFIERVNSEFEYSTQTHPKVLAPLINSDKNDIVRLALEHGIPLEYVKSCYKGGEKHCGECESCTRLKKALIHNGDTRFIKLLF

SEQ ID NO: 36715 - protein, 239 aa, Bradyrhizobiaceae bacterium
  misc_feature (1)..(239): tr|A0A3S0EES7|A0A3S0EES7_9BRAD 7-cyano-7-deazaguanine s ynthase OS=Bradyrhizobiaceae bacterium OX=2072420 GN=qu eC PE=3 SV=1
MSDTHDMTALVLFSGGQDSTTCLAWALDRFARIETIGFDYGQRHAIELDCRARLLDGLAQLRPEWAGKLGDGHTLEIPTLSAISETALTRDVAIEMGADGLPNTFVPGRNLVFLTFAAALAYRRGISHIVGGMCETDYSGYPDCRDETIKALQGALSLGMARPFELHTPLMWLSKAATWQLAYDLGGRDLVDLIRDQSHTCYLGERGARHDWGYGCGACPACDLRARGWHEYIAGSAQS

SEQ ID NO: 36716 - protein, 199 aa, Bradyrhizobiaceae bacterium
  misc_feature (1)..(199): tr|A0A431RTZ5|A0A431RTZ5_9BRAD 7-cyano-7-deazaguanine s ynthase OS=Bradyrhizobiaceae bacterium OX=2072420 GN=EK K33_06090 PE=3 SV=1
MTRSALLLSGGMDSTAIAFWKKPNIGITIDYGQRPAAAELRASAAVCAALGIEHIMARVDLSSFGSGDMAARPALGLAPRSEWWPYRNQALVTIAAMALISRDVDHLMIGTLRTDGHHADGTGEFVCHLAGLLAMQEGSMRLDAPAITFDAVELIKISGVPLDVLCWSHSCHSSDYACGECGGCRKHYRTMGAIGVDPY

SEQ ID NO: 36717 - protein, 237 aa, Bradyrhizobium arachidis
  misc_feature (1)..(237): tr|A0A1I7LPH2|A0A1I7LPH2_9BRAD 7-cyano-7-deazaguanine s ynthase OS=Bradyrhizobium arachidis OX=858423 GN=queC P E=3 SV=1
MSDAFSSQTALVLFSGGQDSTTCLAWALSRFARVETLGFEYGQRHAIELACRDRLLDGIKGLREDWALRLGESHTLSIPTLAAVSETALTRDVAIAMGADGLPNTFVPGRNLVFLTFAAALAYRRGITDIVGGMCETDYSGYPDCRDDTIRAMQAALSLGMARKFELHTPLMWIDKAATWKLAHDLGGDGLVDLIREQSHTCYLGERGAQHDWGYGCGECPACSLRAKGWREFVAGR

SEQ ID NO: 36718 - protein, 237 aa, Bradyrhizobium betae
  misc_feature (1)..(237): tr|A0A4Q1ULY8|A0A4Q1ULY8_9BRAD 7-cyano-7-deazaguanine s ynthase OS=Bradyrhizobium betae OX=244734 GN=queC PE=3 SV=1
MSDAFSSQTALVLFSGGQDSTTCLAWALSRFARVETLGFDYGQRHAVELDCRDRLVDGIKGLHADWATKLGESHTLSIPTLAAVSETALTRDVAIAMGADGLPNTFVPGRNLVFLTFAAALAYRRGITHIVGGMCETDYSGYPDCRDDTIRAMQAALSLGMARQFELHTPLMWIDKAATWKLAHDLGGDGLVDLIREHSHTCYLGERGAQHDWGYGCGECPACSLRAKGWREYVAAR

SEQ ID NO: 36719 - protein, 236 aa, Bradyrhizobium betae
  misc_feature (1)..(236): tr|A0A4Q1UNQ0|A0A4Q1UNQ0_9BRAD 7-cyano-7-deazaguanine s ynthase OS=Bradyrhizobium betae OX=244734 GN=queC PE=3 SV=1
MGAALSNSAALVLFSGGQDSATVLAWALKNYERVETIGFDYGQKHAVEMKQRAIFRSRLADEFPEMATRLGPDHVVALDLAGQIAGNIATYDVSRSEMLLRKKYIPGRNLIMMSLSASVAFRRGIETLACGVSETEYSGYPDCRRKAMSAIEAALNEATGFSWSVQCPLMELDKAGVWRLSRDLGGSALLELIREETHSCYEGAREKRHSWGYGCTQCDACRLREKGWREFSATSV

SEQ ID NO: 36720 - protein, 242 aa, Bradyrhizobium canariense
  misc_feature (1)..(242): tr|A0A1H1QJ88|A0A1H1QJ88_9BRAD 7-cyano-7-deazaguanine s ynthase OS=Bradyrhizobium canariense OX=255045 GN=queC PE=3 SV=1
MSTQSNDQFPTETALVLFSGGQDSATCLAWALQRFARVETLGFNYGQRHAIELECRGDLLDGMKSLRADWAAKLGDSHTLEIPTLAEISDTALTRDVAIEMGKDGLPNTFVPGRNLVFLTFAGALAYRRGITHIIGGMCETDYSGYPDCRDETIKALQAALSLGMDKQFQLHTPLMWLDKAGTWKLAHELGGAGLVDLIREHSHTCYLGERGARHDWGYGCGECPACALRAKGWREYAATTP

SEQ ID NO: 36721 - protein, 237 aa, Bradyrhizobium canariense
  misc_feature (1)..(237): tr|A0A1X3EAW2|A0A1X3EAW2_9BRAD 7-cyano-7-deazaguanine s ynthase OS=Bradyrhizobium canariense OX=255045 GN=queC PE=3 SV=1
MTDASSSETALVLFSGGQDSTTCLAWALNRFAHVETLGFDYGQRHAIELACRDRLFDGIKGLRTDWASRLGESHTLAIPTLAAVSETALTRDVAIAMGADGLPNTFVPGRNLVFLTFAAALAYRRGISYIVGGMCETDYSGYPDCRDDAIRAMQAALSLGMARKFELHTPLMWIDKAATWKLAHDLGGDGLVDLIREQSHTCYLGERGAQHDWGYGCGECPACSLRAKGWREYVAGR

SEQ ID NO: 36722 - protein, 237 aa, Bradyrhizobium centrolobii
  misc_feature (1)..(237): tr|A0A176YGJ4|A0A176YGJ4_9BRAD 7-cyano-7-deazaguanine s ynthase OS=Bradyrhizobium centrolobii OX=1505087 GN=que C PE=3 SV=1
MSEPFSSETALVLFSGGQDSTTCLAWALSRFARVETLGFEYGQRHAIELACRDRLLDGLKAVRTEWAEKLGESHTLSIPTLAAVSETALTRDVAIAMGADGLPNTFVPGRNLVFLTFAAALAYRRGVTHIVGGMCETDYSGYPDCRDETIRAMQAALSLGMAKKFELHTPLMWIDKAATWRLAHDLGGQGLVDLIREQSHTCYLGERGARHDWGYGCGECPACSLRAKGWKEYAAAS

SEQ ID NO: 36723 - protein, 238 aa, Bradyrhizobium daqingense
  misc_feature (1)..(238): tr|A0A562LCE3|A0A562LCE3_9BRAD 7-cyano-7-deazaguanine s ynthase OS=Bradyrhizobium daqingense OX=993502 GN=queC PE=3 SV=1
MNDAFSSETALVLFSGGQDSTTCLAWALSRFARVETLGFEYGQRHAIELACRDRLVDGIKSLREDWAEKLGESHTLSIPTLAAVSETALTRDVAIAMGADGLPNTFVPGRNLVFLTFAAALAYRRGITHIVGGMCETDYSGYPDCRDDTIRAMQAALSLGMARTFALHTPLMWIDKAATWKLAQDLGGEGLVDLIREQSHTCYLGERGAQHDWGYGCGECPACSLRAKGWREFVAERK

SEQ ID NO: 36724 - protein, 237 aa, Bradyrhizobium diazoefficiens
  misc_feature (1)..(237): sp|Q89LP8|QUEC_BRADU 7-cyano-7-deazaguanine synthase OS =Bradyrhizobium diazoefficiens (strain JCM 10833 / IAM 13628 / NBRC 14792 / USDA 110) OX=224911 GN=queC PE=3 S V=2
MSDAFSSETALVLFSGGQDSTTCLAWALSRFARVETLGFDYGQRHAVELACRDRLFDGLKGLRADWADKLGESHTLSIPTLAAISDTALTRDVAIAMGADGLPNTFVPGRNLVFLTFAAALAYRRGITHIVGGMCETDYSGYPDCRDETVRAMQAALSLGMARKFELHTPLMWIDKAATWKLAHDLGGEGLVDLIREQSHTCYLGERGAQHEWGYGCGECPACSLRAKGWNEYVAHR

SEQ ID NO: 36725 - protein, 243 aa, Bradyrhizobium diazoefficiens
  misc_feature (1)..(243): tr|A0A2A6MVK7|A0A2A6MVK7_9BRAD 7-cyano-7-deazaguanine s ynthase OS=Bradyrhizobium diazoefficiens OX=1355477 GN= queC PE=3 SV=1
MLKRGAMSDAFSSETALVLFSGGQDSTTCLAWALSRFARVETLGFDYGQRHAVELACRDRLFDGLKGLRADWADKLGESHTLSIPTLAAISDTALTRDVAIAMGADGLPNTFVPGRNLVFLTFAAALAYRRGITHIVGGMCETDYSGYPDCRDETVRAMQAALSLGMARKFELHTPLMWIDKAATWKLAHDLGGEGLVDLIREQSHTCYLGERGAQHEWGYGCGECPACSLRAKGWNEYVAHR

SEQ ID NO: 36726 - protein, 242 aa, Bradyrhizobium elkanii
  misc_feature (1)..(242): tr|A0A0D1P7I4|A0A0D1P7I4_BRAEL 7-cyano-7-deazaguanine s ynthase OS=Bradyrhizobium elkanii OX=29448 GN=queC PE=3 SV=1
MTHQNNSETALVLFSGGQDSTTCLAWALDRFARVEMLGFTYGQRHAIELDCRDRLLDGIRSVRPDWAAKLGDNHTLAIPTLSEISDTALTRDVAIEMGADGLPNTFVPGRNLVFLTFAAALAYRRGIRHIIGGMCETDYSGYPDCRDETIKALRSALNLGMARDFELHTPLMWLDKAATWRLAHELGGAGLVDLIREHSHTCYLGERGAQHDWGYGCGECPACSLRAKGWREYVAQGGGADR

SEQ ID NO: 36727 - protein, 239 aa, Bradyrhizobium elkanii
  misc_feature (1)..(239): tr|A0A4Q4K2G7|A0A4Q4K2G7_BRAEL 7-cyano-7-deazaguanine s ynthase OS=Bradyrhizobium elkanii OX=29448 GN=queC PE=3 SV=1
MTDQNASDTALVLFSGGQDSTTCLAWALSRFARVEMLGFTYGQRHAIELDCRDQLLAGIKRVRPEWSAKLGDSHTLDIPTLSEISDTALTRDVAIEMGADGLPNTFVPGRNLVFLTFAGALAYRRGIRHIIGGMCETDYSGYPDCRDETIKALQSALNLGMARDFELHTPLMWLDKAATWRLAHELGGAGLVDLIREHSHTCYLGERGAQHDWGYGCGECPACSLRAKGWREYVARGGP

SEQ ID NO: 36728 - protein, 236 aa, Bradyrhizobium erythrophlei
  misc_feature (1)..(236): tr|A0A1N6KE10|A0A1N6KE10_9BRAD 7-cyano-7-deazaguanine s ynthase OS=Bradyrhizobium erythrophlei OX=1437360 GN=qu eC PE=3 SV=1
MNNQSPSDTALVLFSGGQDSTTCLAWALQRFAHVEMIGFSYGQRHAIELACRDRLLTGMKALRPDWAAKLGESHTLEVPTLAEISDTALTRDVAIEMGADGLPNTFVPGRNLVFLTFAAALAYRRGIRHIIGGMCETDYSGYPDCRDETIKALNAALSLGMAKSFELHTPLMWLDKAATWKLAHDLGGAGLVDLIREHSHTCYLGERGAPHEWGYGCGECPACALRARGWREYSGR

SEQ ID NO: 36729 - protein, 245 aa, Bradyrhizobium erythrophlei
  misc_feature (1)..(245): tr|A0A1M5RDJ2|A0A1M5RDJ2_9BRAD 7-cyano-7-deazaguanine s ynthase OS=Bradyrhizobium erythrophlei OX=1437360 GN=qu eC PE=3 SV=1
MNANGQAMNERPSSETALVLFSGGQDSATCLAWALERFARVEMLGFDYGQRHAIELECRERLLDGFKSQRTDWAAKLGESHTLKIPTLAEISDTALTRDVAIAIGADGLPNTFVPGRNLVFLTFAAALAYRRGIDHIIGGMCETDYSGYPDCRDETIRALQTALNLGMNKEFQLHTPLMWLDKASTWKLANELGGAGLVDLIREHSHTCYLGERGARHDWGYGCGECPACALRAKGWREYAAAAA

SEQ ID NO: 36730 - protein, 238 aa, Bradyrhizobium genosp.
  misc_feature (1)..(238): tr|A0A4Q7FH20|A0A4Q7FH20_9BRAD 7-cyano-7-deazaguanine s ynthase OS=Bradyrhizobium genosp. SA-3 OX=508868 GN=que C PE=3 SV=1
MSDAFSSQTALVLFSGGQDSTTCLAWALSRFARVETLGFDYGQRHAIELACRDRLFEGIKGLRADWAAKLGDSHTLSIPTLAAVSETALTRDVAIAMGADGLPNTFVPGRNLVFLTFAAALAYRRGITHIVGGMCETDYSGYPDCRNETIRAMQAALSLGMARSFELHTPLMWIDKAATWKLAHDLGGDGLVDLIREQSHTCYLGERGAQHEWGYGCGECPACGLRAKGWREFVAGRK

SEQ ID NO: 36731 - protein, 237 aa, Bradyrhizobium guangdongense
  misc_feature (1)..(237): tr|A0A410V7A9|A0A410V7A9_9BRAD 7-cyano-7-deazaguanine s ynthase OS=Bradyrhizobium guangdongense OX=1325090 GN=q ueC PE=3 SV=1
MSEAFSSQTALVLFSGGQDSTTCLTWALSRFARVETLGFEYGQRHAVELDCRQRLFDGIKTLRSDWAAKLGESHTLSIPTLAAVSETALTRDVAIAMGADGLPNTFVPGRNLVFLTFAAALAYRRGITHIVGGMCETDYSGYPDCRDETIRAMQSALSLGMAREFELHTPLMWIDKAATWKLAHDLGGEGLVDLIRDQSHTCYLGERGARHDWGYGCGECPACSLRAKGWREYVAGR

SEQ ID NO: 36732 - protein, 237 aa, Bradyrhizobium guangzhouense
  misc_feature (1)..(237): tr|A0A4Q0RG80|A0A4Q0RG80_9BRAD 7-cyano-7-deazaguanine s ynthase OS=Bradyrhizobium guangzhouense OX=1325095 GN=q ueC PE=3 SV=1
MSDKFSSETALVLFSGGQDSTTCLAWALSRFARVETLGFEYGQRHAVELDCRDRLFEGIKALRADWAAKLGDSHTLSIPTLAAVSETALTRDVAIAMGADGLPNTFVPGRNLVFLTFAAALAYRRGISHIVGGMCETDYSGYPDCRDETIRAMQSALSLGMARRFELHTPLMWIDKAATWKLAHDLGGDALVDLIREQSHTCYLGERGARHDWGYGCGECPACSLRAKGWREFVAGR

SEQ ID NO: 36733 - protein, 237 aa, Bradyrhizobium huanghuaihaiense
  misc_feature (1)..(237): tr|A0A562RI91|A0A562RI91_9BRAD 7-cyano-7-deazaguanine s ynthase OS=Bradyrhizobium huanghuaihaiense OX=990078 GN =queC PE=3 SV=1
MIDAFSSQTALVLFSGGQDSTTCLAWALNRFARVETLGFEYGQRHAIELACRDRLFDGIKGLRADWAAKLGESHTLSIPTLAAVSETALTRDVAIAMGADGLPNTFVPGRNLVFLTFAAALAYRRGITHIVGGMCETDYSGYPDCRDETIRAMQAALSLGMARPFELHTPLMWIDKAATWNLAHDLGGDGLVDLIREQSHTCYLGERGAQHDWGYGCGECPACSLRAKGWREYVAGR

SEQ ID NO: 36734 - protein, 237 aa, Bradyrhizobium icense
  misc_feature (1)..(237): tr|A0A1B1UHF0|A0A1B1UHF0_9BRAD 7-cyano-7-deazaguanine s ynthase OS=Bradyrhizobium icense OX=1274631 GN=queC PE= 3 SV=1
MSDRSSSETALVLFSGGQDSTTCLAWALRRFARVEMLGFSYGQRHAIELECRDRLLAGIKSLRPDWAAKLGESHTLEIPTLAEISDTALTRDVAIAMGADGLPNTFVPGRNLVFLTFAAALAYRRGIGHIVGGMCETDYSGYPDCRDHTIKALQSALNLGMAKNFELHTPLMWLDKAATWKLAHELGGAGLVDLIREQSHTCYLGERGAQHDWGYGCGECPACTLRAKGWREYAALS

SEQ ID NO: 36735 - protein, 235 aa, Bradyrhizobium icense
  misc_feature (1)..(235): tr|A0A533J7Z9|A0A533J7Z9_9BRAD 7-cyano-7-deazaguanine s ynthase OS=Bradyrhizobium icense OX=1274631 GN=queC PE= 3 SV=1
MYNKETAMVLFSGGQDSTTCLAWALDRFARVEMLGFAYGQRHAIELDCRDRLLAGIRSAYPDWTAKLGESHTLEIPTLAEISDTALTRDVEIKMGADGLPNTFVPGRNLVFLTFAAALAYRRGIRHIVGGMCETDYSGYPDCRDETIKALQNALNLGMAKNFELHTPLMWLDKANTWKLAHDLGGAGLVDLIREHSHTCYLGERGAQHDWGYGCGECPACSLRAKGWREYAASNA

SEQ ID NO: 36736 - protein, 237 aa, Bradyrhizobium japonicum
  misc_feature (1)..(237): tr|A0A023XEL1|A0A023XEL1_BRAJP 7-cyano-7-deazaguanine s ynthase OS=Bradyrhizobium japonicum SEMIA 5079 OX=47628 2 GN=queC PE=3 SV=1
MSDAFSSQTALVLFSGGQDSTTCLAWALSRFARVETLGFDYGQRHAIELACRDRLFDGIKGLRADWAARLGESHTLSIPTLAAVSETALTRDVAIAMGADGLPNTFVPGRNLVFLTFAAALAYRRGITHVVGGMCETDYSGYPDCRDDTIRAMQAALSLGMARQFELHTPLMWIDKAATWQLAHDLGGAGLVDLIREQSHTCYLGERGAQHDWGYGCGECPACSLRAKGWREFAAGR

SEQ ID NO: 36737 - protein, 237 aa, Bradyrhizobium japonicum
  misc_feature (1)..(237): tr|A0A4Y3YIL3|A0A4Y3YIL3_BRAJP 7-cyano-7-deazaguanine s ynthase OS=Bradyrhizobium japonicum OX=375 GN=queC PE=3 SV=1
MSDAFSSQTALVLFSGGQDSTTCLAWALSRFARVETLGFDYGQRHAIELACRDRLFDGIKGLRTDWAARLGESHTLSIPTLAAVSETALTRDVAIAMGADGLPNTFVPGRNLVFLTFAAALAYRRGITHIVGGMCETDYSGYPDCRDDTIRAMQAALSLGMARQFELHTPLMWIDKAATWQLAHDLGGAGLVDLIREQSHTCYLGERGAQHDWGYGCGECPACSLRAKGWREFAAGR

SEQ ID NO: 36738 - protein, 236 aa, Bradyrhizobium jicamae
  misc_feature (1)..(236): tr|A0A0R3M4R3|A0A0R3M4R3_9BRAD 7-cyano-7-deazaguanine s ynthase OS=Bradyrhizobium jicamae OX=280332 GN=queC PE= 3 SV=1
MSDQSSSETALVLFSGGQDSTTCLAWALRRFARVEMLGFSYGQRHAIELACRDRLLSGMKSLQPDWAAKLGDSHTLEIPTLAEISDTALTRDVAIAMGADGLPNTFVPGRNLVFLTFAAALAYRRGIRHIVGGMCETDYSGYPDCRDETIKALQGALNLGMAKNFELHTPLMWLDKANTWKLAHELGGAGLVDLIREHSHTCYLGERGAQHDWGYGCGECPACALRAKGWREYAGA

SEQ ID NO: 36739 - protein, 196 aa, Bradyrhizobium lablabi
  misc_feature (1)..(196): tr|A0A1H4XVQ8|A0A1H4XVQ8_9BRAD 7-cyano-7-deazaguanine s ynthase OS=Bradyrhizobium lablabi OX=722472 GN=SAMN0544 4171_3118 PE=3 SV=1
MKRATVLLSGGIDSAATALFLKSSGFAVRGLFVDYGQASLVLEQKAVDRLRHLIGITVDEICASSLSSQGVGELTGRNAFLVFSAALLGNCRSGAIAIGIHSGTPYYDCSPDFLEKVDALVQECSAGKLFVLAPFVRWSKDDVYSYFLSQSIPLDETYSCEAGTAPSCGQCASCLDRKRLECSLRGAPSDSETPQN

SEQ ID NO: 36740 - protein, 236 aa, Bradyrhizobium lablabi
  misc_feature (1)..(236): tr|A0A2H9VCV4|A0A2H9VCV4_9BRAD 7-cyano-7-deazaguanine s ynthase OS=Bradyrhizobium lablabi OX=722472 GN=queC PE= 3 SV=1
MSETNSETALVLFSGGQDSTTCLAWALNRFARVEMLGFAYGQRHAIELDCRERLLSGIQSVRPDWTAKLGESHTLEIPTLAEISDTALTRDVAIAMGEDGLPNTFVPGRNLVFLTFAAALAYRRGIRHIIGGMCETDYSGYPDCRDETIKALQSALNLGMAKNFELHTPLMWLDKASTWKLAHDLGGAGLVDLIREHSHTCYLGERGAQHDWGFGCGECPACSLRAKGWREYAARR

SEQ ID NO: 36741 - protein, 237 aa, Bradyrhizobium liaoningense
  misc_feature (1)..(237): tr|A0A151FIV4|A0A151FIV4_9BRAD 7-cyano-7-deazaguanine s ynthase OS=Bradyrhizobium liaoningense OX=43992 GN=queC PE=3 SV=1
MSDAFSSETALVLFSGGQDSTTCLAWALSRFARVETLGFDYGQRHAIELACRDRLFEGIKALRAEWAAKLGESHTLSIPTLAAVSETALTRDVAIAMGADGLPNTFVPGRNLVFLTFAAALAYRRGISHIVGGMCETDYSGYPDCRDETIRAMQAALSLGMARKFELHTPLMWIDKAATWKLAHDLGGEGLVDLIREQSHTCYLGERGAQHDWGYGCGECPACSLRAKGWRQFVAGK

SEQ ID NO: 36742 - protein, 425 aa, Bradyrhizobium liaoningense
  misc_feature (1)..(425): tr|A0A151FIT7|A0A151FIT7_9BRAD 7-cyano-7-deazaguanine s ynthase OS=Bradyrhizobium liaoningense OX=43992 GN=A1D3 1_35900 PE=3 SV=1
MKIICALPDYDFASNPGSLGVVLYGQASNATLGSAGGAIKDVIRRKKYHPAARAWDFLSIALSVVTADLAGHRDRSPDGWTREFELEVAVADPEFWTSQVDSLESLLRYLTTDRWQLRFIGGGFQPAPERDVVRPKEDCIVLLSGGLDSFIGAIDIVANGHRPFAVSQSVRGDDEKQDDFASLIGGGLSHLRLNHNAHVPDPEDMPSQRARSIAFMAYGVLSATSLDRYHSGERITLNVCENGFISINPPLTDMRLGSLSTRTCHPVVLTILQRVLDAADLRVQITNPYQSKTKGEMLAEGLDQPLLLANAHRTTSCGRFKRYGYKHCGRCVPCLIRRAAFTHWGVADRTTYKYKSLYKDDKEHARSDDVRAAAMAVADVKERGVEAWLGASLSSSLIYDKDVLRQVARRGLDEVARFLQTQKIR

SEQ ID NO: 36743 - protein, 236 aa, Bradyrhizobium lupini; identical to SEQ ID NO: 35763
  misc_feature (1)..(236): tr|K5D0V0|K5D0V0_RHILU 7-cyano-7-deazaguanine synthase OS=Bradyrhizobium lupini HPC(L) OX=1229491 GN=queC PE=3 SV=1

SEQ ID NO: 36744 - protein, 240 aa, Bradyrhizobium macuxiense
  misc_feature (1)..(240): tr|A0A109JSL7|A0A109JSL7_9BRAD 7-cyano-7-deazaguanine s ynthase OS=Bradyrhizobium macuxiense OX=1755647 GN=queC PE=3 SV=1
MNDQINPDTALVLFSGGQDSTTCLAWALSRFARVEMLGFTYGQRHAIELECRDRLLDGIKALRPDWAARLGDSHTLAIPTLSEISDTALTRDVAIEMGADGLPNTFVPGRNLVFLTFAAALAYRRGIRHVIGGMCETDYSGYPDCRNDTIKALQSALNLGMAKNFELHTPLMWLDKAATWRLADELGGAGLVDLIREHSHTCYLGERGALHDWGYGCGECPACTLRAKGWREYAAQHVNH

SEQ ID NO: 36745 - protein, 242 aa, Bradyrhizobium macuxiense
  misc_feature (1)..(242): tr|A0A560MD91|A0A560MD91_9BRAD 7-cyano-7-deazaguanine s ynthase OS=Bradyrhizobium macuxiense OX=1755647 GN=queC PE=3 SV=1
MTDQNTSDTALVLFSGGQDSTTCLAWALSRFARVEMLGFSYGQRHAVELDCRDRLLAGIKQMRPDWAAKLGDSHTLAIPTLSEISDTALTRDVAIEMGADGLPNTFVPGRNLVFLTFAAALAYRRGIRHIIGGMCETDYSGYPDCRDETIKALQSALNLGMAKDFELHTPLMWLDKAATWRLAHELGGAGLVDLIREHSHTCYLGERGAQHDWGYGCGECPACSLRAKGWREYVAQGGDDNH

SEQ ID NO: 36746 - protein, 234 aa, Bradyrhizobium manausense
  misc_feature (1)..(234): tr|A0A0R3D8F1|A0A0R3D8F1_9BRAD 7-cyano-7-deazaguanine s ynthase OS=Bradyrhizobium manausense OX=989370 GN=queC PE=3 SV=1
MTDFTSEAALVLFSGGQDSATCLAWALSRFARVETVGFAYGQRHAIELTCCDQLLNGLKKLRVDWASKLGDKHTLEIPTLSAISKTALTREMTIEIGADGMPNTFVPGRNLIFLTFAAALAYPRRISHIVGGMCEKDHSCAPDCRDVTIRALNNALNHGMLRDFHLHTPLMWLDKAAIWRLGSELGGAELVDLIREHSHTCYLGERGARHDWGFGCGECPACAVRAKGWREFSC

SEQ ID NO: 36747 - protein, 254 aa, Bradyrhizobium manausense
  misc_feature (1)..(254): tr|A0A0R3D618|A0A0R3D618_9BRAD 7-cyano-7-deazaguanine s ynthase OS=Bradyrhizobium manausense OX=989370 GN=queC PE=3 SV=1
  misc_feature (237)..(237): Xaa can be any naturally occurring amino acid
MSDTFSSQTALVLFSGGQDSTTCLAWALSRFARVETLGFEYGQRHAVELDCRDRLFEGIKDLRADWAAKLGESHTLSIPTLAAVSETALTRDVAIAMGADGLPNTFVPGRNLVFLTFAAALAYRRGITHIVGGMCETDYSGYPDCRDETIRAMQSALSLGMARAFELHTPLMWIDKAATWKLAHDLGGDALVDLIREQSHTCYLGERGARHEWGYGCGECPACSLRAKGWREFVAGXSSAVIASEAKQSIIFPR

SEQ ID NO: 36748 - protein, 249 aa, Bradyrhizobium nanningense
  misc_feature (1)..(249): tr|A0A4Q0RVX3|A0A4Q0RVX3_9BRAD 7-cyano-7-deazaguanine s ynthase OS=Bradyrhizobium nanningense OX=1325118 GN=que C PE=3 SV=1
MSDTFSSETALVLFSGGQDSTTCLAWALSRFARVETLGFDYGQRHAIELACRERLFDGVKGLRADWAAKLGDSHTLSIPTLAAVSETALTRDVEIAMGADGLPNTFVPGRNLVFLTFAAALAYRRGITHIVGGMCETDYSGYPDCRDETIRAMQTALSLGMARKFELHTPLMWIDKAATWKLAQDLGGEGLVDLIREHSHTCYLGERGAQHDWGYGCGECPACSLRAKGWREFVAGRGHTFGVITREGG

SEQ ID NO: 36749 - protein, 237 aa, Bradyrhizobium neotropicale
  misc_feature (1)..(237): tr|A0A176YZ01|A0A176YZ01_9BRAD 7-cyano-7-deazaguanine s ynthase OS=Bradyrhizobium neotropicale OX=1497615 GN=qu eC PE=3 SV=1
MSDTFSTETALVLFSGGQDSTTCLAWALSRFARVETLGFEYGQRHAIELACRDQLLGGLKGLRAEWASGLGESHTLSIPTLAAVSETALTRDVAIAMGADGLPNTFVPGRNLVFLTFAAALAYRRGITHIVGGMCETDYSGYPDCRDETIRAMQAALSLGMARKFELHTPLMWIDKAATWKLAHDLGGQGLVDLIREQSHTCYLGERGAQHDWGYGCGECPACSLRAKGWKEYVAAS

SEQ ID NO: 36750 - protein, 238 aa, Bradyrhizobium oligotrophicum
  misc_feature (1)..(238): tr|M4Z8X6|M4Z8X6_9BRAD 7-cyano-7-deazaguanine synthase OS=Bradyrhizobium oligotrophicum S58 OX=1245469 GN=queC PE=3 SV=1
MSEQDKTALVLFSGGQDSTTCLAWALDRFARVETIGFAYGQRHAVELDCRGRLTDGIARVRPDWADKLGDSHTLDIPTLASISETALTRDVAIEMGADGLPNTFVPGRNLVFLTFAAALAYRRGIRHIVGGMCETDYSGYPDCRDETIKALQGALSLGMARSFELHTPLMWLSKAATWQLAHDLGGAGLVDLIRDQSHTCYLGERGARHEWGYGCGQCPACELRAKGWREYIAGGAPF

SEQ ID NO: 36751 - protein, 237 aa, Bradyrhizobium ottawaense
  misc_feature (1)..(237): tr|A0A2U8PEX0|A0A2U8PEX0_9BRAD 7-cyano-7-deazaguanine s ynthase OS=Bradyrhizobium ottawaense OX=931866 GN=queC PE=3 SV=1
MSDAISSQTALVLFSGGQDSTTCLAWALSRFSRVETLGFDYGQRHAIELDCRDRLFDGIKDLRADWAAKLGESHTLSIPTLAAVSETALTRDVAIAMGADGLPNTFVPGRNLVFLTFAAALAYRRGITHIVGGMCETDYSGYPDCRDDTIRAMQAALSLGMARPFELHTPLMWIDKAATWQLAQDLGGEGLVDLIREHSHTCYLGERGAQHEWGYGCGECPACSLRAKGWREFVAGR

SEQ ID NO: 36752 - protein, 237 aa, Bradyrhizobium retamae
  misc_feature (1)..(237): tr|A0A0R3MWI3|A0A0R3MWI3_9BRAD 7-cyano-7-deazaguanine s ynthase OS=Bradyrhizobium retamae OX=1300035 GN=queC PE =3 SV=1
MSDQSPSETALVLFSGGQDSTTCLAWALRQFARVEMLGFSYGQRHAIELDCRDRLLSGLRSLRPDWAAKLGESHTLEIPTLAEISDTALTRDVAIEMGADGLPNTFVPGRNLVFLTFAAALAYRRGIRHIVGGMCETDYSGYPDCRDETIKAMQSALNLGMAKNFELHTPLMWLDKAATWRLAHELGGAGLVDLIREHSHTCYLGERGAQHDWGYGCGECPACALRAKGWREYAALA

SEQ ID NO: 36753 - protein, 237 aa, Bradyrhizobium rifense
  misc_feature (1)..(237): tr|A0A5D3KPX4|A0A5D3KPX4_9BRAD 7-cyano-7-deazaguanine s ynthase OS=Bradyrhizobium rifense OX=515499 GN=queC PE= 3 SV=1
MSDGFSSQTALVLFSGGQDSTTCLAWALSRFAHVETLGFEYGQRHAVELDCRDRLFDGIRGLRADWAAKLGESHTLSIPTLAAVSETALTRDVAIAMGADGLPNTFVPGRNLVFLTFAAALAYRRGITHIVGGMCETDYSGYPDCRDDTIRAMQAALSLGMARAFELHTPLMWIDKAATWKLAQDLGGDGLVDLIREQSHTCYLGERGAQHDWGYGCGECPACSLRAKGWREFVAGR

SEQ ID NO: 36754 - protein, 237 aa, Bradyrhizobium sacchari
  misc_feature (1)..(237): tr|A0A560KKC2|A0A560KKC2_9BRAD 7-cyano-7-deazaguanine s ynthase OS=Bradyrhizobium sacchari OX=1399419 GN=queC P E=3 SV=1
MSDAFSSDTALVLFSGGQDSTTCLAWALSRFARVETLGFEYGQRHAIELVCRDRLFDGLKGLRADWAARLGESHTLSIPTLAAVSETALTRDVAIAMGADGLPNTFVPGRNLVFLTFAAALAYRRGITHIVGGMCETDYSGYPDCRDETIRAMQAALSLGMARKFELHTPLMWIDKAATWKLAHDLGGDGLVDLIREQSHTCYLGERGAQHDWGYGCGACPACSLRAKGWREFVAGK

SEQ ID NO: 36755 - protein, 208 aa, Bradyrhizobium sacchari
  misc_feature (1)..(208): tr|A0A560HW20|A0A560HW20_9BRAD 7-cyano-7-deazaguanine s ynthase OS=Bradyrhizobium sacchari OX=1399419 GN=FBZ95_ 110109 PE=3 SV=1
MTPVLLLASGGLDSTTVAYWLHEKGETILPIFFDYGQHCVETEWATLHHVLPKTRVIAPRRIDISGIFCGSKSRLIAEPNLWLDNVDDSDLYIPYRTLLFFSCAAAVAQTVKLTQVYSGFINSNHAKELDCSATFLNSLDALAENVGPVRFNMPFRDKTKTEIVELARGLEVPIGSTFSCQVYSDIPCGACPNCVERIKAIEGAGLAT

SEQ ID NO: 36756 - protein, 238 aa, Bradyrhizobium shewense
  misc_feature (1)..(238): tr|A0A1C3VYN1|A0A1C3VYN1_9BRAD 7-cyano-7-deazaguanine s ynthase OS=Bradyrhizobium shewense OX=1761772 GN=queC P E=3 SV=1
MSDPLSSQTALVLFSGGQDSTTCLAWALSRFSRVETLGFDYGQRHAVELDCRDRLFDGIKDLRADWAAKLGESHTLSIPTLAAVSETALTRDVAIAMGADGLPNTFVPGRNLVFLTFAAALAYRRGITHIVGGMCETDYSGYPDCRDDTIRAMQAALSLGMARQFELHTPLMWIDKAATWQLAQDLGGEGLVDLIREHSHTCYLGERGAQHEWGFGCGECPACSLRAKGWREFVAGRK

SEQ ID NO: 36757 - protein, 236 aa, Bradyrhizobium sp.
  misc_feature (1)..(236): sp|A4YUN8|QUEC_BRASO 7-cyano-7-deazaguanine synthase OS =Bradyrhizobium sp. (strain ORS 278) OX=114615 GN=queC PE=3 SV=2
MSEQDATALVLFSGGQDSTTCLAWALDRFARVETIGFSYGQRHGIELDCRARLRDGIAQLRADWADKLGCEHTLDIPTLAAISETALTRDVAIEMGADGLPNTFVPGRNLVFLTFAAALAYRRGIRHIVGGMCETDYSGYPDCRDETIKALQVALSLGMARPFELHTPLMWLTKAATWQLAHDLGGRGLVDLIRDESHTCYLGERGARHDWGHGCGRCPACELRAHGWRAYVGGGA

SEQ ID NO: 36758 - protein, 242 aa, Bradyrhizobium sp.
  misc_feature (1)..(242): tr|A0A1B9Z0V1|A0A1B9Z0V1_9BRAD 7-cyano-7-deazaguanine s ynthase OS=Bradyrhizobium sp. LMTR 3 OX=189873 GN=queC PE=3 SV=1
MSDQSPSETALVLFSGGQDSTTCLAWALRRFARVEMLGFSYGQRHAIELECRDRLLSGLRSLRPDWAAKLGESHTLEIPTLAEISDTALTRDVAIEMGADGLPNTFVPGRNLVFLTFAAALAYRRGIRHIVGGMCETDYSGYPDCRDETIKALQSALNLGMAKNFELHTPLMWLDKAATWKLAHELGGAGLVDLIREHSHTCYLGERGAQHDWGYGCGECPACALRAKGWREYSVVVTREGG

SEQ ID NO: 36759 - protein, 237 aa, Bradyrhizobium stylosanthis
  misc_feature (1)..(237): tr|A0A560E5S6|A0A560E5S6_9BRAD 7-cyano-7-deazaguanine s ynthase OS=Bradyrhizobium stylosanthis OX=1803665 GN=qu eC PE=3 SV=1
MSDAFSSQTALVLFSGGQDSTTCLAWALSRFARVETLGFEYGQRHAIELACRDSLFDGVKALRPDWAAKLGESHTLSIPTLAAVSETALTRDVAIAMGADGLPNTFVPGRNLVFLTFAAALAYRRGITHIVGGMCETDYSGYPDCRNDTIQAMQAALSLGMARQFELHTPLMWIDKAATWKLAHDLGGEGLVDLIREKSHTCYLGERGARHDWGYGCGECPACSLRAKGWREFAAAR

SEQ ID NO: 36760 - protein, 237 aa, Bradyrhizobium valentinum
  misc_feature (1)..(237): tr|A0A0R3LK60|A0A0R3LK60_9BRAD 7-cyano-7-deazaguanine s ynthase OS=Bradyrhizobium valentinum OX=1518501 GN=queC PE=3 SV=1
MSDQSSSETALVLFSGGQDSTTCLAWALRRFARVEMLGFSYGQRHAIELECRDRLLSGIKSLRPDWAAKLGESHTLEIPTLSEISDTALTRDVAIAMGEDGLPNTFVPGRNLVFLTFAAALAYRRGIRHIIGGMCETDYSGYPDCRNETIKALQSALNLGMAKNFELHTPLMWLDKASTWKLAHELGGAGLVDLIREHSHTCYLGERGAQHDWGYGCGECPACALRAKGWREYAERA

SEQ ID NO: 36761 - protein, 238 aa, Bradyrhizobium vignae
  misc_feature (1)..(238): tr|A0A4Q0R379|A0A4Q0R379_9BRAD 7-cyano-7-deazaguanine s ynthase OS=Bradyrhizobium vignae OX=1549949 GN=queC PE= 3 SV=1
MSDASSSETALVLFSGGQDSTTCLAWALSRFARVETLGFDYGQRHAIELACRDRLLDGIKELRADWAAKLGESHTLSIPTLAAVSETALTRDVAIAMGADGLPNTFVPGRNLVFLTFAAALAYRRGISHIVGGMCETDYSGYPDCRDETIRAMQAALSLGMAKQFELHTPLMWIDKAATWKLAHDLGGDGLVDLIREQSHTCYLGERGAQHDWGYGCGECPACSLRAKGWREYVAGRK

SEQ ID NO: 36762 - protein, 269 aa, Bradyrhizobium yuanmingense
  misc_feature (1)..(269): tr|A0A1C3W2F7|A0A1C3W2F7_9BRAD 7-cyano-7-deazaguanine s ynthase OS=Bradyrhizobium yuanmingense OX=108015 GN=que C PE=3 SV=1
MPKAGPRSQRKAAELADFHRLAGKSCDAKARAMSDAFSSQTALVLFSGGQDSTTCLAWALSRFARVETLGFDYGQRHAIELACRDRLLDGIKGLRADWAARLGESHTLSIPTLAAVSETALTRDVAIAMGADGLPNTFVPGRNLVFLTFAAALAYRRGISHIVGGMCETDYSGYPDCRDETVRAMQAALSLGMARQFELHTPLMWIDKAATWKLAHDLGGAGLVDLIREQSHTCYLGERGARHDWGYGCGECPACSLRAKGWNEYVAGR

SEQ ID NO: 36763 - protein, 457 aa, Bradyrhizobium yuanmingense
  misc_feature (1)..(457): tr|A0A4E0QEP2|A0A4E0QEP2_9BRAD Uncharacterized protein OS=Bradyrhizobium yuanmingense OX=108015 GN=EOW77_00342 90 PE=4 SV=1
MNITSYKPKISERAVDVVEAGRRPRKGRIGLELNRDLEFSTDALRSYAFARWEPMIYDAMVVAAAVEFSDRAIKRPSRGWTRKTEVRIPVHDPMRWSDPSVSGALHEVLGFLTGDLWEIGFVKRAKIESSPVQECLQIPRPTKAVIAYSDGMDSRAVAGLLGKTLGEELVRVRVGAKAAGKPVVDGRLQPFTKVPYKFKSVLTNGETTARSRGFKFALISGLAAYLTNASDILVPESGQGAIGPALVTVSHGYPDYRNHPRFTRLMSRFLKALTGHAVEFKFPRLWNTKGETLRAFAALPEGDSWKDTKSCWRDSRWSTLNGTKLQCGVCAACMLRRMSVHAAGLSEAPGRYICEDLRAPTFAEAIHPEFQRKSAAFEQYAIAGTLHLDHMADMAEDDARPAVRRHAVLTGMALGLSAKDAEEKLVGMLERHAAEWNGFVNDLGARSFVRKWTRASK

SEQ ID NO: 36764 - protein, 237 aa, Bradyrhizobium zhanjiangense
  misc_feature (1)..(237): tr|A0A4Q0QNX7|A0A4Q0QNX7_9BRAD 7-cyano-7-deazaguanine s ynthase OS=Bradyrhizobium zhanjiangense OX=1325107 GN=q ueC PE=3 SV=1
MSDAFSSQTALVLFSGGQDSTTCLAWALSRFARVETLGFDYGQRHAIELACRDRLFAGIKALRADWAAKLGESHTLSIPTLAAVSETALTRDVAIAMGADGLPNTFVPGRNLVFLTFAAALAYRRGITHIVGGMCETDYSGYPDCRDETIRAMQAALSLGMARSFELHTPLMWIDKAATWKLAHELGGEGLVDLIREQSHTCYLGERGAQHDWGYGCGECPACSLRAKGWREFVAGR

SEQ ID NO: 36765 - protein, 237 aa, Bradyrhizobium zhanjiangense
  misc_feature (1)..(237): tr|A0A4V1L4F1|A0A4V1L4F1_9BRAD 7-cyano-7-deazaguanine s ynthase OS=Bradyrhizobium zhanjiangense OX=1325107 GN=q ueC PE=3 SV=1
MSDAFSSQTALVLFSGGQDSTTCLAWALSRFARVETLGFDYGQRHAIELACRDRLFEGIKGLRADWAAKLGESHTLSIPTLAAVSETALTRDVAIAMGADGLPNTFVPGRNLVFLTFAAALAYRRGITHIVGGMCETDYSGYPDCRDETIRAMQAALSLGMARSFELHTPLMWIDKAATWKLAHDLGGDGLVDLIREQSHTCYLGERGAQHDWGYGCGECPACSLRAKGWREFVAGR

SEQ ID NO: 36766 - protein, 424 aa, Branchiibius sp.
  misc_feature (1)..(424): tr|A0A151BVP0|A0A151BVP0_9MICO Queuosine biosynthesis p rotein queC OS=Branchiibius sp. NY16-3462-2 OX=1807500 GN=AZH51_15870 PE=4 SV=1
MTACGAYVVRAQGDKKSRLQGYDTLKWPTAPGHTKSVVSDLAWNLAPLQDVAPAVADLVHIAAGAYMADRSTRRGARFSRDIALHVTVVAPELWTEELLDTTSELLGWLTGDTWNLTVAGGAEVDFEETLKVGENGSVALLSGGLDSFLGAIQLLMSGAETIFVGHKDSATSIRGAQSTVGTWLGQSFAPAPSYTRVQLAQAIRRREPSSRSRAFMFLSLGVAVASSLGSRSLIIPENGYTGINLPLRPNRGGALSTRSTHPETFRRVAEILTALNIDVTVTNPFEWMTKGEMMQSIRGLRPPSGWQETAAATLSCSKLGGNWFGGSPNLNCGLCVPCMVRRATFIKAEVPDKTQYLCHAISGTHLAELIDARRGDIEAVRYAIEAGADADAIDSGTWPPDYDLDRVEGLVQRGLDELAMLELP

SEQ ID NO: 36767 - protein, 207 aa, Brenneria alni
  misc_feature (1)..(207): tr|A0A421DJA5|A0A421DJA5_9GAMM 7-cyano-7-deazaguanine s ynthase OS=Brenneria alni OX=71656 GN=BIY29_18760 PE=3 SV=1
MKKVIVLSSGGLDSTTVIYDLISNKYKVKPIFFDYGQHCVKTEWERLNDVLPKQSDEPEYINISDLFRGSKSRLITEANLWKDDIKDDDLYVPYRTLLFLSAASARAQTLNITEVFAGFINSNHAKEIDCSCEFLNSIDNLTENIGPVRIKLPFRHMSKSDVARKAIELEVPIGKTFSCQAMSKFPCGACPNCVERLAALRETGLLT

SEQ ID NO: 36768 - protein, 231 aa, Brenneria alni
  misc_feature (1)..(231): tr|A0A421DTB0|A0A421DTB0_9GAMM 7-cyano-7-deazaguanine s ynthase OS=Brenneria alni OX=71656 GN=queC PE=3 SV=1
MKRAVVVFSGGQDSTTCLIQALKHYDEVHCITFDYGQRHRAEIDIARELARQLGTTAHKILDVGLLNELAASSLTRENIPVPDYDADAQGLPSTFVPGRNILFLTLASIYAYQVGAQVVITGVCETDFSGYPDCRDEFVKALNQAVVLGIARDIRYVTPLMWLNKAETWALADYYQQLATVRHHTLTCYNGIKGDGCGHCAACHLRAKGLEQYQNDPVGVMSALKQKTGLK

SEQ ID NO: 36769 - protein, 434 aa, Brenneria goodwinii
  misc_feature (1)..(434): tr|A0A0G4JXI5|A0A0G4JXI5_9GAMM Uncharacterized protein OS=Brenneria goodwinii OX=1109412 GN=BN1221_03089 PE=4 SV=1
MTQLVFHHDHRQLPLAGDNLLPVQLYGLSGQGRGDISVIGNPAIDRIRRLGVQIPAQVMDFLSIALAVTAADTFVQRESSEDGWTRQLSLRLPLHEPSRWIGLKKELESALHFLSGDIWDFEFCDGGYAPPEPYSQHSRFHLIKLKELDCVSLFSGGLDSAIGAIDLLTLGRAPLLVSHAYKGDKSRQDQIAERLNGRYSRFEINADPHLYQGATDITMRTRSLNFLAFAAVGACAVQEVSQQKKIDLFVPENGFISLNAPLTPRRIGTLSTRTTHPHFIASIQQLFDAVGIPCQIINPYQFKTKGQMVYQCLDKQLLSEVVESTVSCSHWKRTDQQCGVCVPCIIRRASLHAGGINRDADYTFQSLAKVMNEIDRRDDLIALRIAIAQKSTLKIGTWVAKSGPLPVAAFNNFKQVFMDGLNEVENYLLSEGIV

SEQ ID NO: 36770 - protein, 232 aa, Brenneria goodwinii
  misc_feature (1)..(232): tr|A0A0G4JQ54|A0A0G4JQ54_9GAMM 7-cyano-7-deazaguanine s ynthase OS=Brenneria goodwinii OX=1109412 GN=queC PE=3 SV=1
MKRAVVVFSGGQDSTTCLIQALKHYDEVHCITFDYGQRHRAEIDIARELALQLGATAHKVLDVGLLNELAISSLTRENIPVPDYDDGETQGLPSTFVPGRNILFLTLASIYAYQVGAETVITGVCETDFSGYPDCRDEFVKALNQAIVLGMARDIRFVTPLMWLNKAETWALADYYQQLDTVRYHTLTCYNGIKGDGCGHCAACHLRANGLQEYQRDPAAVMATLKQKTGLQ

SEQ ID NO: 36771 - protein, 231 aa, Brenneria nigrifluens
  misc_feature (1)..(231): tr|A0A2U1UW74|A0A2U1UW74_9GAMM 7-cyano-7-deazaguanine s ynthase OS=Brenneria nigrifluens DSM 30175 = ATCC 13028 OX=1121120 GN=queC PE=3 SV=1
MKRAVVVFSGGQDSTTCLIQALKQYDDVHCITFDYGQRHRAEIDIARALARRLGATAHKVLDAGLLNELAASSLTRENIPVPDYDSESQGLPSTFVPGRNILFLTLAAIYAYQVGAQAVITGVCETDFSGYPDCRDEFIKALNHAVVLGTARDIRFVTPLMWLNKAETWALADYYQQLETVRDHTLTCYNGIKGEGCGQCAACRLRANGLEQYRRDPAGVMAALKQKSGLQ

SEQ ID NO: 36772 - protein, 231 aa, Brenneria roseae
  misc_feature (1)..(231): tr|A0A2U1U072|A0A2U1U072_9GAMM 7-cyano-7-deazaguanine s ynthase OS=Brenneria roseae subsp. americana OX=1508507 GN=queC PE=3 SV=1
MKRAVVVFSGGQDSTTCLIQALQQYDEVHCITFDYGQRHRAEIDIAKELALTLGVAAHKVLDVGLLNELAASSLTRENIPVPDYDANVQGVPSTFVPGRNILFLTLASIYAYQVGAEAVITGVCETDFSGYPDCRDEFVKALNQAIVLGIARDIRFETPLMWLNKAETWALADYYQQLDTIRHHTLTCYNGIKGDGCGHCAACHLRANGLEQYQSDPANIMSALKNKTGLR

SEQ ID NO: 36773 - protein, 231 aa, Brenneria rubrifaciens
  misc_feature (1)..(231): tr|A0A4P8QWX7|A0A4P8QWX7_9GAMM 7-cyano-7-deazaguanine s ynthase OS=Brenneria rubrifaciens OX=55213 GN=queC PE=3 SV=1
MKRAVVVFSGGQDSTTCLIQALQQYDEVHCITFDYGQRHRAEIDIARELALALGAAAHKMLDVGLLNELAASSLTRENIPVPDYDVNAQGVPSTFVPGRNILFLTLASIYAYQVGAEAVITGVCETDFSGYPDCRDEFVNALNHAIVLGIARDIRFETPLMWLNKAETWALADYYQQLDTIRHHTLTCYNGIKGDGCGHCAACHLRANGLEQYQRDPINIMLTLKHKTGLK

SEQ ID NO: 36774 - protein, 231 aa, Brenneria salicis
  misc_feature (1)..(231): tr|A0A366IBJ1|A0A366IBJ1_9GAMM 7-cyano-7-deazaguanine s ynthase OS=Brenneria salicis ATCC 15712 = DSM 30166 OX= 714314 GN=queC PE=3 SV=1
MKRAVVVFSGGQDSTTCLIQALQNYDEVHCITFNYGQRHRAEIDIARELALTLGVAAHKVLDVGLLNELAASSLTRENIPVPDYDANAQGVPSTFVPGRNILFLTLASIYAYQVDAQAVITGVCETDFSGYPDCRDEFIKALNQAIVLGIARDIRFETPLMWLNKAETWALADYYQQLDTVRYHTLTCYNGIKGDGCGQCAACHLRANGLKQYQDEPAKIMLALKHKSGLK

SEQ ID NO: 36775 - protein, 231 aa, Brenneria sp.; identical to SEQ ID NO: 36771
  misc_feature (1)..(231): tr|G7LNS0|G7LNS0_9GAMM 7-cyano-7-deazaguanine synthase OS=Brenneria sp. EniD312 OX=598467 GN=queC PE=3 SV=1

SEQ ID NO: 36776 - protein, 231 aa, Brenneria sp.
  misc_feature (1)..(231): tr|A0A5J5G0G9|A0A5J5G0G9_9GAMM 7-cyano-7-deazaguanine s ynthase QueC OS=Brenneria sp. L3-3HA OX=2590031 GN=queC PE=4 SV=1
MKRAVVVFSGGQDSTTCLIQALTQYDEVHCITFDYGQRHRVEIEVASDLARRLGAAAHKVLDVGILNELAVSSLTRDNIPVPKYSEDVQGLPATFVPGRNILFLTLAAIYAYQVEAGVVITGVCETDFSGYPDCRDEFVKSLNHAVTLGIARDIRFVTPLMWLNKAETWALADYYHQLDTVRHHTLTCYNGIKGEGCGECAACHLRANGLSEYQADPAGLMATLKQKTGLS

SEQ ID NO: 36777 - protein, 237 aa, Breoghania sp.
  misc_feature (1)..(237): tr|A0A346R011|A0A346R011_9RHIZ 7-cyano-7-deazaguanine s ynthase OS=Breoghania sp. L-A4 OX=2304600 GN=queC PE=3 SV=1
MSATQADLDKALVLFSGGQDSATCLAWALERYAHVETLGFDYGQRHVVELACRATLRDRFAALKPEWAQRLGEDHTIDLSALGAVSDTALTRDVEIAMAEGGLPNTFVPGRNLMFLTFAAALAYRRGIKHIVTGVCETDYSGYPDCRDDTIKALQVALNLGMESRFVLHTPLMWIDKARTWRLAEDLGGTPLVETIVEHSHSCYMGTRDTLHPWGYGCGACPACELRAKGFAAHAAG

SEQ ID NO: 36778 - protein, 222 aa, Brevibacillus agri
  misc_feature (1)..(222): tr|A0A3M8AHD2|A0A3M8AHD2_9BACL 7-cyano-7-deazaguanine s ynthase OS=Brevibacillus agri OX=51101 GN=queC PE=3 SV= 1
MKKEKAVVVFSGGQDSTTCLFWAKQQFGEVETITFDYGQRHKLEIECAQQIARELGVANTVLDMSLLNQLAPNALTRTDIDITQEEGQLPSTFVDGRNLLFLSFAGVFAKQKGARHLVTGVCETDFSGYPDCRDAFIKSLNVTLNLSMDYPFVIHTPLMWLDKAQTWKLADELGAFTYIREKTLTCYNGIKGDGCGECPACRLRKAGLDAYLSEKNEQGAHA

SEQ ID NO: 36779 - protein, 223 aa, Brevibacillus brevis
  misc_feature (1)..(223): tr|C0ZJI5|C0ZJI5_BREBN 7-cyano-7-deazaguanine synthase OS=Brevibacillus brevis (strain 47 / JCM 6285 / NBRC 10 0599) OX=358681 GN=queC PE=3 SV=1
MMKKEKAVVVFSGGQDSTTCLFWAKEQFGEVETLTFDYGQRHKLEIECAQQIAAELGVKNSVLDMSLLNQLAPNALTRTDIDITQEEGQLPSTFVDGRNLLFLSFAGVFAKQRGARHLITGVCETDFSGYPDCRDAFIKSLNVTLNLSMDYPFVIHTPLMWLNKAQTWKLADDLGAFTYIRENTLTCYNGIKGDGCGECPACHLRKAGLDTYLSEKNQPGEKA

SEQ ID NO: 36780 - protein, 222 aa, Brevibacillus brevis
  misc_feature (1)..(222): tr|A0A291BQ86|A0A291BQ86_BREBE 7-cyano-7-deazaguanine s ynthase OS=Brevibacillus brevis X23 OX=1200792 GN=queC PE=3 SV=1
MKKEKAVVVFSGGQDSTTCLFWAKEQFGEVETLTFDYGQRHKLEIECAQQIAAELGVKNSVLDMSLLNQLAPNALTRTDIDITQEEGQLPSTFVDGRNLLFLSFAGVFAKQRGARHLVTGVCETDFSGYPDCRDAFIKSLNVTLNLSMDYPFVIHTPLMWLNKAQTWKLADDLGAFTYIRENTLTCYNGIKGDGCGECPACHLRKAGLDTYLSEKNQPGEQA

SEQ ID NO: 36781 - protein, 222 aa, Brevibacillus choshinensis
  misc_feature (1)..(222): tr|A0A0Q3SW38|A0A0Q3SW38_BRECH 7-cyano-7-deazaguanine s ynthase OS=Brevibacillus choshinensis OX=54911 GN=queC PE=3 SV=1
MKKEKAVVVFSGGQDSTTCLFWAKQQFGEVETITFDYGQRHKLEIECAQEIAQELGVANTVLDMSLLNQLAPNALTRTDIDITQEEGQLPSTFVDGRNLLFLSFAGVFAKQRGARHLITGVCETDFSGYPDCRDSFVKSLNVTLNLSMDYPFVIHTPLMWLNKAETWKLADDLGAFTYIREKTLTCYNGIKGDGCGECPACHLRKAGLDTYLSEKNLQGEHA

SEQ ID NO: 36782 - protein, 223 aa, Brevibacillus fluminis
  misc_feature (1)..(223): tr|A0A3M8DFX3|A0A3M8DFX3_9BACL 7-cyano-7-deazaguanine s ynthase OS=Brevibacillus fluminis OX=511487 GN=queC PE= 3 SV=1
MERMKQEKAVVVFSGGQDSTTCLFWAKKQFGEVEVLTFNYGQRHKQEIECARAIAAEQGVNHTILDMSLLNQLAPNALTRDDVAIEQKEGELPSTFVDGRNLLFLSFAAVYAKQAGARHLVTGVCETDFSGYPDCRDIFVKSLNVTLNLSMDYSFVIHTPLMWLNKAETWKLADELGAFDYVREKTLTCYNGIIGDGCGECPACKLRKAGLVSYLAERQEANA

SEQ ID NO: 36783 - protein, 215 aa, Brevibacillus fluminis
  misc_feature (1)..(215): tr|A0A3M8DWU2|A0A3M8DWU2_9BACL 7-cyano-7-deazaguanine s ynthase OS=Brevibacillus fluminis OX=511487 GN=queC PE= 3 SV=1
MKTGKAIVVFSGGQDSTTCLFWALNRFKEVETVTFNYGQRHRFELDCASDIAKELSIKHHILDMSLLNQLAPNALTRKDIEIKSEEGKLPTTFVDGRNLLFLSFAAILAKQVGARNIVTGVCETDFSGYPDCRDVFIKSLNVTLNLAMDYQFIIDTPLMWLNKAQTWALADQLGVLDFVRYKTLTCYNGIIADGCGECPSCKLRKKGLDEYLSST

SEQ ID NO: 36784 - protein, 222 aa, Brevibacillus formosus
  misc_feature (1)..(222): tr|A0A220MKT0|A0A220MKT0_9BACL 7-cyano-7-deazaguanine s ynthase OS=Brevibacillus formosus OX=54913 GN=queC PE=3 SV=1
MKKEKAVVVFSGGQDSTTCLFWAKEQFGEVETLTFDYGQRHKLEIECAQQIAAELGVKNSVLDMSLLNQLAPNALTRTDIDITQEEGQLPSTFVDGRNLLFLSFAGVFAKQRGARHLVTGVCETDFSGYPDCRDAFIKSLNVTLNLSMDYPFVIHTPLMWLNKAQTWKLADDLGAFTYIRENTLTCYNGIKGDGCGECPACHLRKAGLDTYLSEKNHPGEQA

SEQ ID NO: 36785 - protein, 223 aa, Brevibacillus formosus
  misc_feature (1)..(223): tr|A0A4Y4I1S5|A0A4Y4I1S5_9BACL 7-cyano-7-deazaguanine s ynthase OS=Brevibacillus formosus OX=54913 GN=queC PE=3 SV=1
MMKKEKAVVVFSGGQDSTTCLFWAKEQFGEVETLTFDYGQRHKLEIECAQQIAAELGVKNSVLDMSLLNQLAPNALTRTDIDITQEEGQLPSTFVDGRNLLFLSFAGVFAKQRGARHLITGVCETDFSGYPDCRDAFIKSLNVTLNLSMDYPFVIHTPLMWLNKAQTWKLADDLGAFTYIRENTLTCYNGIKGDGCGDCPACHLRKAGLDTYLSEKNQPGEQA

SEQ ID NO: 36786 - protein, 222 aa, Brevibacillus gelatini
  misc_feature (1)..(222): tr|A0A3M8BCE3|A0A3M8BCE3_9BACL 7-cyano-7-deazaguanine s ynthase OS=Brevibacillus gelatini OX=1655277 GN=queC PE =3 SV=1
MKKEKAVVVFSGGQDSTTCLFWAKQQFGEVETITFDYGQRHKLEIECAQQIARELGVANTVLDMSLLNQLAPNALTRTDIDITQEEGQLPSTFVDGRNLLFLSFAGVFAKQKGARHLVTGVCETDFSGYPDCRDAFIKSLNVTLNLSMDYPFVIHTPLMWLNKAQTWKLADELGAFTYIREKTLTCYNGIKGDGCGECPACHLRKAGLDAYLSEKKEQGAHA

SEQ ID NO: 36787 - protein, 225 aa, Brevibacillus invocatus
  misc_feature (1)..(225): tr|A0A3M8C2S4|A0A3M8C2S4_9BACL 7-cyano-7-deazaguanine s ynthase OS=Brevibacillus invocatus OX=173959 GN=queC PE =3 SV=1
MESMKQEKAVVVFSGGQDSTTCLFWAKQQFGEVETITFDYGQRHKLEIECAQQIARELGVNNTVLDMSLLNQLAPNALTRTDIDITQEEGQLPSTFVDGRNLLFLSFAGVFAKQKGARHLVTGVCETDFSGYPDCRDSFIKSLNVTLNLAMDYPFVIHTPLMWLNKAQTWKLADDLGAFTYIREKTLTCYNGIKGDGCGECPACHLRKAGLDTYLSEKNEQGTTV

SEQ ID NO: 36788 - protein, 222 aa, Brevibacillus laterosporus
  misc_feature (1)..(222): tr|A0A502J1D9|A0A502J1D9_BRELA 7-cyano-7-deazaguanine s ynthase OS=Brevibacillus laterosporus OX=1465 GN=queC P E=3 SV=1
MKKDKAVVVFSGGQDSTTCLFWAQKQFGEVEVVTFDYGQRHKQEIDCAQKIAKEQGVKQTIMDMSLLNQLAPNALTRNDVQIEQVEGEIPNTCVDGRNLLFLSFAAVYAKQISARHIITGVCETDFSGYPDCRDSFIKSLNVTLQLAMDYPFVIHTPLMWLNKAQTWKLSDELGAFEYVREKTLTCYNGVIGDGCGECPACQLRAAGLKAYEEERAHNGKLL

SEQ ID NO: 36789 - protein, 222 aa, Brevibacillus laterosporus
  misc_feature (1)..(222): tr|H0UFU5|H0UFU5_BRELA 7-cyano-7-deazaguanine synthase OS=Brevibacillus laterosporus GI-9 OX=1118154 GN=queC P E=3 SV=1
MKKDKAVVVFSGGQDSTTCLFWALKQFGEVEVVTFDYGQRHKQEIECAQRIAKEQGVGQTIMDMSLLNQLAPNALTRDDVAIEQVEGEIPNTFVDGRNLLFLSFAAVYAKQIGARHIITGVCETDFSGYPDCRDSFIKSLNVTLQLAMDYPFVIHTPLMWLNKAQTWKLSDELGAFEYIREKTLTCYNGVIGDGCGECPACQLRAAGLEAYEEERANNGKLL

SEQ ID NO: 36790 - protein, 222 aa, Brevibacillus nitrificans
  misc_feature (1)..(222): tr|A0A3M8CWF5|A0A3M8CWF5_9BACL 7-cyano-7-deazaguanine s ynthase OS=Brevibacillus nitrificans OX=651560 GN=queC PE=3 SV=1
MKMEKAVVVFSGGQDSTTCLFWAKQQFGEVETITFDYGQRHKLEIECAQQIARELGVNNTVLDMSLLNQLAPNALTRTDIDITQEEGQLPSTFVDGRNLLFLSFAGVFAKQRGARHLVTGVCETDFSGYPDCRDSFVKSLNVTLNLAMDYPFVIHTPLMWLNKAETWMLADDLGAFTYIREKTLTCYNGIKGDGCGECPACHLRKAGLDTYLSEKNQQGEQV

SEQ ID NO: 36791 - protein, 222 aa, Brevibacillus panacihumi
  misc_feature (1)..(222): tr|V6M421|V6M421_9BACL 7-cyano-7-deazaguanine synthase OS=Brevibacillus panacihumi W25 OX=1408254 GN=queC PE=3 SV=1
MKKEKAVVVFSGGQDSTTCLFWAKQQFGEVETITFDYGQRHKLEIECAQQIAQELGVNNTVLDMSLLNQLAPNALTRTDIAITQEEGQLPSTFVDGRNLLFLSFAAVFAKQKGARHIVTGVCETDFSGYPDCRDAFIKSLDVTLNLAMDYPFVIHTPLMWLNKAQTWKLADDLGAFTYIREKTLTCYNGIKGDGCGECPACHLRKAGLDTYLSEKTAQGADA

SEQ ID NO: 36792 - protein, 222 aa, Brevibacillus panacihumi
  misc_feature (1)..(222): tr|A0A3M8CSM5|A0A3M8CSM5_9BACL 7-cyano-7-deazaguanine s ynthase OS=Brevibacillus panacihumi OX=497735 GN=queC P E=3 SV=1
MKKEKAVVVFSGGQDSTTCLFWAKQQFGEVETITFDYGQRHKLEIECAQQIARELGVSNTVLDMSLLNQLAPNALTRTDIAITQEEGQLPSTFVDGRNLLFLSFAAVFAKQKGARHIVTGVCETDFSGYPDCRDAFIKSLDVTLNLAMDYPFVIHTPLMWLNKAQTWKLADDLGAFTYIREKTLTCYNGIKGDGCGECPACRLRKAGLGAYLSEKTAQGADA

SEQ ID NO: 36793 - protein, 222 aa, Brevibacillus parabrevis
  misc_feature (1)..(222): tr|A0A4Y3PL72|A0A4Y3PL72_BREPA 7-cyano-7-deazaguanine s ynthase OS=Brevibacillus parabrevis OX=54914 GN=queC PE =3 SV=1
MKKEKAVVVFSGGQDSTTCLFWAKQQFGEVETITFDYGQRHKLEIECAKEIARELGVANTVLDMSLLNQLAPNALTRTDINITQEEGQLPSTFVDGRNLLFLSFAGVFAKQKGARHLVTGVCETDFSGYPDCRDAFVKSLNVTLNLSMDYPFVIHTPLMWLDKAQTWKLADELGAFTYIREKTLTCYNGIKGDGCGECPACHLRKAGLDKYLSEKTQSGANV

SEQ ID NO: 36794 - protein, 223 aa, Brevibacillus reuszeri
  misc_feature (1)..(223): tr|A0A0K9YLS5|A0A0K9YLS5_9BACL 7-cyano-7-deazaguanine s ynthase OS=Brevibacillus reuszeri OX=54915 GN=queC PE=3 SV=1
MKKEKAIVVFSGGQDSTTCLFWAKQQFGEVETLTFDYGQRHKLEIECAQQIARELGVPNTVLDMSLLNQLAPNALTRTDIDITQEKGQLPSTFVDGRNLLFLSFAGVFAKQRGARHLVTGVCETDFSGYPDCRDSFIKSLNVTLNLSMDYPFVIHTPLMWLTKAQTWKLADELGAFPYIRENTLTCYNGIKGDGCGECPACQLRKAGLDTYLSEREQSGERAI

SEQ ID NO: 36795 - protein, 220 aa, Brevibacillus sp.
  misc_feature (1)..(220): tr|A0A553KQF8|A0A553KQF8_9BACL 7-cyano-7-deazaguanine s ynthase OS=Brevibacillus sp. LEMMJ03 OX=2595056 GN=queC PE=3 SV=1
MKQEKAVVVFSGGQDSTTCLFWARKQFGDVAAITFDYQQRHKLEIECARQIAGELGVEHTVLDMSLLNQLAPNALTRTDIPIAQEDGQLPSTFVDGRNLLFLSFAAVFAKQRGARHLVTGVCETDFSGYPDCRDAFIKSLNVTLNLAMDYPFVIHTPLMWLNKAETWKLADELGAFDFIREKTLTCYNGIKGDGCGECPACTLRKAGLEAYLRERGEVKA

SEQ ID NO: 36796 - protein, 222 aa, Brevibacillus sp.
  misc_feature (1)..(222): tr|J2ZM73|J2ZM73_9BACL 7-cyano-7-deazaguanine synthase OS=Brevibacillus sp. BC25 OX=1144308 GN=queC PE=3 SV=1
MKKEKAVVVFSGGQDSTTCLFWAKEQFGEVETLTFDYGQRHKLEIECAQQIAAELGVKNSVLDMSLLNQLAPNALTRTDIDITQEEGQLPSTFVDGRNLLFLSFAGVFAKQRGACHLVTGVCETDFSGYPDCRDAFIKSLNVTLNLSMDYPFVIHTPLMWLNKAQTWKLADDLGAFTYIRENTLTCYNGVKGDGCGECPACHLRKAGLDTYLSEKNQPGEKA

SEQ ID NO: 36797 - protein, 221 aa, [Brevibacterium] frigoritolerans
  misc_feature (1)..(221): tr|A0A4Y8U8L7|A0A4Y8U8L7_9BACI 7-cyano-7-deazaguanine s ynthase OS=[Brevibacterium] frigoritolerans OX=450367 G N=queC PE=3 SV=1
MKKKEKAVVVFSGGQDSTTCLFWALERFEEVEAVTFDYNQRHSLEIECAQNIAKELGVNHHILDMSLLNQLAPNALTRSDIAVADGEEGELPSTFVPGRNLLFLSFAGVLASQIGAKHIVTGVCETDFSGYPDCRDVFIKSLNVTLNLSMDQSFVIDTPLMWLNKEETWELADQLGAFDFVREKTLTCYNGIISDGCGDCPACNLRKKGLDDYVIRRKVLS

SEQ ID NO: 36798 - protein, 221 aa, [Brevibacterium] frigoritolerans; identical to SEQ ID NO: 36342
  misc_feature (1)..(221): tr|A0A3T0ME15|A0A3T0ME15_9BACI 7-cyano-7-deazaguanine s ynthase OS=[Brevibacterium] frigoritolerans OX=450367 G N=queC PE=3 SV=1

SEQ ID NO: 36799 - protein, 218 aa, Brevibacterium ravenspurgense
  misc_feature (1)..(218): tr|A0A150H5W2|A0A150H5W2_9MICO 7-cyano-7-deazaguanine s ynthase OS=Brevibacterium ravenspurgense OX=479117 GN=q ueC PE=3 SV=1
MYSGGPDSTTLLFDLIEQGIEVDALFLNFDEKGGDFARSVAAKFAGQIAFHEYDIAPFMRNFYGLPQPMLMRKAQGFGMCLEEDPYVQPFGSAIALTLAASWAVKHGSRDVYYAVHDGDSHFQDNNRSYFELLSDLTRSCEGEQYEINFQTPYLGMTKAEVISRGEMLGVDFEQTWSCAHTEDIHCGECPPCIDRRMAFRLAEVVDPVQYASDLTGVK

SEQ ID NO: 36800 - protein, 218 aa, Brevifollis gellanilyticus
  misc_feature (1)..(218): tr|A0A512MD55|A0A512MD55_9BACT 7-cyano-7-deazaguanine s ynthase OS=Brevifollis gellanilyticus OX=748831 GN=queC PE=3 SV=1
MKTLVLLSGGMDSTTALYWAQKEHEVVGAVSFDYGSKHNAKELEQAAWHCQQFGLRHDVVALPFVNELFTSDLLQSGGEIPDGHYAHENMKRTVVPFRNGIMLAIACGIAESREAQALVIAAHAGDHTIYPDCREPFMQAMADSMREGTYARIELLRPFIAMDKAAIAKLGDELGIDFAHTWSCYKGGAVHCGTCGTCVERREAFELAGLRDVTRYLH

SEQ ID NO: 36801 - protein, 232 aa, Brevirhabdus pacifica
  misc_feature (1)..(232): tr|A0A1U7DHR3|A0A1U7DHR3_9RHOB 7-cyano-7-deazaguanine s ynthase OS=Brevirhabdus pacifica OX=1267768 GN=queC PE= 3 SV=1
MKTIVICSGGLDSVSLAHSVAAQGNLMGLVAFDYGQRHAKELDSARACAKRLGVWFQLVDLRAAGALLSGSALTDNVEVPDGHYAEESMRITVVPNRNAIMLTVAFGIAQARGAEAVATAVHGGDHFIYPDCRPGFVEAFDTMQAHAMEGYGRVRLLAPFVHQPKSAIVTEGARHNTPFAETWSCYKGGEIHCGRCGTCVERREAFHLAGVEDPTPYADPDFWRAAIAAKEA

SEQ ID NO: 36802 - protein, 201 aa, Brevundimonas abyssalis
  misc_feature (1)..(201): tr|U2ZFS1|U2ZFS1_9CAUL 7-cyano-7-deazaguanine synthase OS=Brevundimonas abyssalis TAR-001 OX=1391729 GN=queC P E=3 SV=1
MGFDYGQRHAVEMQARLRVRDGMARVLPGVADRLGPDHVVDITGFGRIADSALTSDRAIEMDARGLPTTFVPGRNLVFLTYAAALADRRGLQVLVGGMCETDFSGYPDCRRETMDAMQQALSLGLDKPVSIETPLMQLTKAETWALAHDLGGDALVQLIIEDSHTCYLGDRDHRHPWGYGCGTCPACELRAAGYDQWAAGA

SEQ ID NO: 36803 - protein, 425 aa, Brevundimonas diminuta
  misc_feature (1)..(425): tr|A0A3D4DCI2|A0A3D4DCI2_BREDI ATPase OS=Brevundimonas diminuta OX=293 GN=DIV82_04690 PE=4 SV=1
  misc_feature (391)..(391): Xaa can be any naturally occurring amino acid
MTGFASYRANEAPLLIDAVEADAPLRDGATPALLGQSLCLDTRGLTSFFFARFDRRLYDLLVVAAAVEFCDRFKRRPGWGWSRAFDVRVAVHEPEVWSAPEAKALLEETVSFLTGDVWRFCFEARLRDEPAPVTLPLPLPPYCALIMPYSEGLDSLAVHALTAHATNSELVRVRLGSGGVDKAVLDKDRKPFARVPYKVSVPNNAESSARSRGFKFAVVTAIAAAMSGVQRIIVTESGQGVLGPVLVRSGHAYPDYRVHPAFSRKMESLFLALTGHEIRYEYPRLWYTKGETMAAAKALPTPPDFVTRTRSCWQSSQQASVDGSRRQCGICAACMLRRVSMFAAEIDEPADRYVWENLTVTEFDTGAAAAFQGHTRALREYGIAGVLHMEXSYASLQTRLVKMKALCWPRPELCWIATLRNGVAS

SEQ ID NO: 36804 - protein, 238 aa, Brevundimonas diminuta
  misc_feature (1)..(238): tr|L1QFP2|L1QFP2_BREDI 7-cyano-7-deazaguanine synthase OS=Brevundimonas diminuta 470-4 OX=1035191 GN=queC PE=3 SV=1
MSEIDSHPTTSALVLFSGGQDSATCLAWALERFDRVETVGFDYGQRHAVEMQARQAVRREVIKALPQWADRLGDDHVVDLTGFGAIGETAMTTQRAIEADARGLPNTFVPGRNLIFLVAAAALADRRGLEALIGGMCETDYSGYPDCRNDTIQATARALSLGLDKSVPVETPLMFLTKAQTWKLAERIGGRALVEAIIEHSHTCYLGDRTQRHAWGYGCGTCPACELRAAGYAEWAAA

SEQ ID NO: 36805 - protein, 243 aa, Brevundimonas intermedia
  misc_feature (1)..(243): tr|A0A4Y9RWX5|A0A4Y9RWX5_9CAUL 7-cyano-7-deazaguanine s ynthase OS=Brevundimonas intermedia OX=74315 GN=queC PE =3 SV=1
MSVILEKTSPTAIKTALVLFSGGQDSATCLAWALERFERVETVGFDYGQRHLVEMEARQAVRAGMKTALPQWADRLGDDHVVDLTGYGRIAESALTADRKIEMDARGLPTTFVPGRNLIFLVAAAALADRRGLEVLVGGMCETDFSGYPDCRHETMEAMARALSLGLDKAVVIDTPLMWLTKGQTWELAETLGGAKLVELIVEDSHTCYRGDRTHRHAWGYGCGECPACELRAAGYEDWVASR

SEQ ID NO: 36806 - protein, 238 aa, Brevundimonas naejangsanensis
  misc_feature (1)..(238): tr|A0A4P7BPJ2|A0A4P7BPJ2_9CAUL 7-cyano-7-deazaguanine s ynthase OS=Brevundimonas naejangsanensis OX=588932 GN=q ueC PE=3 SV=1
MSEIDLHPAASALILFSGGQDSATCLAWALERFERVETVGFDYGQRHAVEMEARQAVRREVVKALPQWADRLSDDHVVDLTGFGAIGETAMTTERAIEADARGLPNTFVPGRNLIFLVAAAALADRRGLEALIGGMCETDYSGYPDCRNDTIQATARALSLGLDKPVPVETPLMFLTKAQTWELAERIGGAALVEAIIEFSHTCYLGDRTQRHAWGYGCGACPACELRAAGYAEWAAA

SEQ ID NO: 36807 - protein, 238 aa, Brevundimonas naejangsanensis
  misc_feature (1)..(238): tr|A0A494RR86|A0A494RR86_9CAUL 7-cyano-7-deazaguanine s ynthase OS=Brevundimonas naejangsanensis OX=588932 GN=q ueC PE=3 SV=1
MSVIAQHSEKSALVLFSGGQDSATCLAWALERFDRVETVGFDYGQRHAVEMQARQSVRAELVKALPQWVDRLGDDHVVDLTGFGAIGETAMTTERAIEADARGLPNTFVPGRNLIFLVAAAALADRRGLEVLIGGMCETDYSGYPDCRNETIQATARALSLGLDKSVPVETPLMFLTKAQTWALADQIGGRALVETIIEFSHTCYLGDRTHRHAWGYGCGTCPACELRAAGYAEWAAA

SEQ ID NO: 36808 - protein, 239 aa, Brevundimonas nasdae
  misc_feature (1)..(239): tr|A0A0B4C827|A0A0B4C827_9CAUL 7-cyano-7-deazaguanine s ynthase OS=Brevundimonas nasdae OX=172043 GN=queC PE=3 SV=1
MSAILEKKPTSALVLFSGGQDSATCLAWALERFERVETVGFDYGQRHLVEMQARQSVRDGMKTALPQWADRLGDDHVVDLTGYGRIAESALTADRKIEMDARGLPTTFVPGRNLIFLVAAAALADRRGLEVLVGGMCETDYSGYPDCRHETMEAMARALSLGLDKPVVIDTPLMWLTKAQTWDLAHSIGGDRLIELIIEDSHTCYQGDRTHRHAWGYGCGSCPACELRAAGYDEWASGR

SEQ ID NO: 36809 - protein, 224 aa, Brevundimonas sp.
  misc_feature (1)..(224): tr|A0A0Q7TGQ5|A0A0Q7TGQ5_9CAUL 7-cyano-7-deazaguanine s ynthase OS=Brevundimonas sp. Root1423 OX=1736462 GN=que C PE=3 SV=1
MFSGGQDSATCLAWALERFSRVETVGFDYGQRHAVEMEARLKVREGMQAVLPQWAGRLGPDHVVDLTGYGRIAESALTADRAIELDARGLPTTFVPGRNLVFLTCAAALADRRGLDVLVGGMCETDFSGYPDCRRDTIDAMATALSLGLDKPVVIETPLMALTKAETWALADRIGGAPLVELIIEASHTCYRGDRDHRHAWGYGCGDCPACELRAAGHSEWAGA

SEQ ID NO: 36810 - protein, 236 aa, Brevundimonas sp.
  misc_feature (1)..(236): tr|A0A0Q7T6Q7|A0A0Q7T6Q7_9CAUL 7-cyano-7-deazaguanine s ynthase OS=Brevundimonas sp. Root1423 OX=1736462 GN=que C PE=3 SV=1
  misc_feature (12)..(12): Xaa can be any naturally occurring amino acid
MGFDYGQRHAVXLFSGGQDSATCLAWALERFSRVETVGFDYGQRHAVEMEARLKVREGMLAVLPRWAARLGPDHVVDLTGYGRISESALTTDRAIEMDARGLPSTFVPGRNLVFLTCAAALADRRNLEVLVGGMCETDFSGYPDCRRDTIDAMAAALSLGLDRPVVIDTPLMTLTKAETWALADRIGGPALVELIVEASHTCYRGDRAHRHPWGYGCGDCPACELRAAGHAEWAAA

SEQ ID NO: 36811 - protein, 238 aa, Brevundimonas subvibrioides
  misc_feature (1)..(238): tr|D9QK65|D9QK65_BRESC 7-cyano-7-deazaguanine synthase OS=Brevundimonas subvibrioides (strain ATCC 15264 / DSM 4735 / LMG 14903 / NBRC 16000 / CB 81) OX=633149 GN=qu eC PE=3 SV=1
MTETQPAPSSALVLFSGGQDSATCLAWALERFDRVETVGFDYGQRHAVEMDARLRVRAGMPRVLPRLADRLGPDHVVDLTGFGAIGETAMTTDRAIEVGARGLPTTFVPGRNLIFLTAAAALADRRGLEVLVGGMCETDFSGYPDCRRETMDAMERALSLGLDRPVPIQTPLMWLTKARTWALADAIGGAALVDLIVEDSHTCYRGDRTHRHAWGYGCGACPACELRAAGWDGWVASR

SEQ ID NO: 36812 - protein, 238 aa, Brevundimonas subvibrioides
  misc_feature (1)..(238): tr|A0A258FHQ2|A0A258FHQ2_9CAUL 7-cyano-7-deazaguanine s ynthase OS=Brevundimonas subvibrioides OX=74313 GN=queC PE=3 SV=1
MTETPPNPTSALVLFSGGQDSATCLAWALERYERVETVGFDYGQRHAVEMRARLNVRDAMLRALPRLAGRLGSDQVVDLTGFGAIGETAMTTDRAIEIGARGLPTTFVPGRNLVFLSVAAALADRRGLDVLVGGMCETDFSGYPDCRRDTIEAMGRALSLGLDKPVPIETPLMALTKAQTWALADRVGGAALVDLIVEDSHTCYRGDRAHRHAWGYGCGECPACDLRAAGWAEWTASA

SEQ ID NO: 36813 - protein, 238 aa, Brevundimonas vancanneytii
  misc_feature (1)..(238): tr|A0A4P1K5L3|A0A4P1K5L3_9CAUL 7-cyano-7-deazaguanine s ynthase OS=Brevundimonas vancanneytii OX=1325724 GN=que C PE=3 SV=1
MSAIVQHSEKTALVLFSGGQDSATCLAWALERFDRVETVGFDYGQRHAVEMQARQSVREELVKALPQWADRLGDDHVVDLTGFGAIGETAMTTERAIEADARGLPNTFVPGRNLIFLVAAAALADRRGLEVLIGGMCETDYSGYPDCRNDTIQATARALSLGLDKSVPVETPLMFLTKAQTWELADQIGGRVLVEAIIEFSHTCYLGDRTHRHVWGYGCGACPACELRAAGYAQWAAA

SEQ ID NO: 36814 - protein, 239 aa, Brevundimonas vesicularis
  misc_feature (1)..(239): tr|A0A2X1B6G1|A0A2X1B6G1_BREVE 7-cyano-7-deazaguanine s ynthase OS=Brevundimonas vesicularis OX=41276 GN=queC P E=3 SV=1
MSVILEKTPTSALVLFSGGQDSATCLAWALERFERVETVGFDYGQRHLVEMQARQAVRDGMKTALPRWADRLGDDHVVDLTGYGRIAESALTADRKIEMDARGLPTTFVPGRNLIFLVAAAALADRRGLEVLVGGMCETDYSGYPDCRHETMEAMARALSLGLDKPVIIDTPLMWLTKAQTWELAHRIGGDRLIELIIEDSHTCYQGDRTHRHAWGYGCGSCPACELRAAGYDEWASGR

SEQ ID NO: 36815 - protein, 243 aa, Brevundimonas vesicularis
  misc_feature (1)..(243): tr|A0A1Z3UE36|A0A1Z3UE36_BREVE 7-cyano-7-deazaguanine s ynthase OS=Brevundimonas vesicularis OX=41276 GN=queC P E=3 SV=1
MSVILEKTSPTASKTALVLFSGGQDSATCLAWALERFVRVETVGFDYGQRHLVEMQARQAVREGMKTALPQWADRLGDDHVVDLTGYGRIAESALTADRKIEMDARGLPTTFVPGRNLIFLVAAAALADRRGLEVLVGGMCETDYSGYPDCRHETMEAMARALSLGLDKPVVIDTPLMWLTKAQTWELADRIGGDTLIELIIEDSHTCYQGDRTHRHVWGYGCGSCPACELRAAGYDEWASER

SEQ ID NO: 36816 - protein, 239 aa, Brevundimonas viscosa
  misc_feature (1)..(239): tr|A0A1I6S1N3|A0A1I6S1N3_9CAUL 7-cyano-7-deazaguanine s ynthase OS=Brevundimonas viscosa OX=871741 GN=queC PE=3 SV=1
MSEIGQNPEISALVLFSGGQDSATCLAWALDRFARVETVGFDYGQRHAVEMEARLEVRARMAALRKDWADRLGPDHVVDLTGYGRIAESALTAERAIELDARGLPTTFVPGRNLVFLTVAAALADRRGLDVLVGGMCETDYSGYPDCRRDTIEAMARALSLGLDKPLVIETPLMALTKSETWALAQRIGGPPLVDLIVEASHTCYRGDRDQRHAWGYGCGDCPACELRAVGYGEWAARP

SEQ ID NO: 36817 - protein, 232 aa, Brucella abortus
  misc_feature (1)..(232): tr|A0A0M1WC35|A0A0M1WC35_BRUAO 7-cyano-7-deazaguanine s ynthase OS=Brucella abortus NCTC 8038 OX=575591 GN=queC PE=3 SV=1
MKTLVICSGGLDSVSLAHKMAAEHELTGLLSFDYGQRHKKELDFAQACAKRLGVPHQIIDIRTIGASLTGSALTDDVDVPDGHYAEETMKVTVVPNRNAIMLAIAFGVAAAQKADAVALAVHGGDHFIYPDCRPGFIEAFQTMQKHALDGYADVKLLAPYVHATKADIVADGAKYRTPFEATWSCYKGADRHCGRCGTCVERREAFHLAGIDDPTSYEDADFWRATTQKRNA

SEQ ID NO: 36818 - protein, 232 aa, Brucella abortus; identical to SEQ ID NO: 36817
  misc_feature (1)..(232): sp|Q2YR96|QUEC_BRUA2 7-cyano-7-deazaguanine synthase OS =Brucella abortus (strain 2308) OX=359391 GN=queC PE=3 SV=1

SEQ ID NO: 36819 - protein, 232 aa, Brucella canis
  misc_feature (1)..(232): sp|A9M959|QUEC_BRUC2 7-cyano-7-deazaguanine synthase OS =Brucella canis (strain ATCC 23365 / NCTC 10854) OX=483 179 GN=queC PE=3 SV=1
MKTLVICSGGLDSVSLAHKMAAEHELTGLLSFDYGQRHKKELDFAQACAKRLGVPHQIIDIRTIGASLTGSALTDDVDVPDGHYAEETMKVTVVPNRNAIMLVIAFGVAAAQKADAVALAVHGGDHFIYPDCRPGFIEAFQTMQKHALDGYADVKLLAPYVHATKADIVADGAKYRTPFEATWSCYKGADRHCGRCGTCVERREAFHLAGIDDPTSYEDADFWRATTQKRNA

SEQ ID NO: 36820 - protein, 232 aa, Brucella ceti; identical to SEQ ID NO: 36817
  misc_feature (1)..(232): tr|C0G802|C0G802_9RHIZ 7-cyano-7-deazaguanine synthase OS=Brucella ceti str. Cudo OX=595497 GN=queC PE=3 SV=1

SEQ ID NO: 36821 - protein, 232 aa, Brucella melitensis; identical to SEQ ID NO: 36817
  misc_feature (1)..(232): sp|Q8YJI8|QUEC_BRUME 7-cyano-7-deazaguanine synthase OS =Brucella melitensis biotype 1 (strain 16M / ATCC 23456 / NCTC 10094) OX=224914 GN=queC PE=3 SV=1

SEQ ID NO: 36822 - protein, 232 aa, Brucella melitensis; identical to SEQ ID NO: 36817
  misc_feature (1)..(232): sp|C0RFL5|QUEC_BRUMB 7-cyano-7-deazaguanine synthase OS =Brucella melitensis biotype 2 (strain ATCC 23457) OX=5 46272 GN=queC PE=3 SV=1

SEQ ID NO: 36823 - protein, 232 aa, Brucella microti; identical to SEQ ID NO: 36817
  misc_feature (1)..(232): tr|C7LEK1|C7LEK1_BRUMC 7-cyano-7-deazaguanine synthase OS=Brucella microti (strain CCM 4915) OX=568815 GN=queC PE=3 SV=1

SEQ ID NO: 36824 - protein, 232 aa, Brucella neotomae
  misc_feature (1)..(232): tr|A0A381B9T4|A0A381B9T4_BRUNE 7-cyano-7-deazaguanine s ynthase OS=Brucella neotomae OX=29460 GN=queC PE=3 SV=1
MKTLVICSGGLDSVSLTHKMAAEHELTGLLSFDYGQRHKKELDFAQACAKRLGVPHQIIDIRTIGASLTGSALTDDVDVPDGHYAEETMKVTVVPNRNAIMLAIAFGVAAAQKADAVALAVHGGDHFIYPDCRPGFIEAFQTMQKHALDGYADVKLLAPYVHATKADIVADGAKYRTPFEATWSCYKGADRHCGRCGTCVERREAFHLAGIDDPTSYEDADFWRATTQKRNA

SEQ ID NO: 36825 - protein, 232 aa, Brucella ovis; identical to SEQ ID NO: 36817
  misc_feature (1)..(232): tr|N8N3P7|N8N3P7_BRUOV 7-cyano-7-deazaguanine synthase OS=Brucella ovis IntaBari-2002-82-58 OX=1293916 GN=queC PE=3 SV=1

SEQ ID NO: 36826 - protein, 232 aa, Brucella ovis; identical to SEQ ID NO: 36817
  misc_feature (1)..(232): sp|A5VSU2|QUEC_BRUO2 7-cyano-7-deazaguanine synthase OS =Brucella ovis (strain ATCC 25840 / 63/290 / NCTC 10512 ) OX=444178 GN=queC PE=3 SV=1

SEQ ID NO: 36827 - protein, 232 aa, Brucella pinnipedialis; identical to SEQ ID NO: 36817
  misc_feature (1)..(232): tr|A0A0E1X9S9|A0A0E1X9S9_9RHIZ 7-cyano-7-deazaguanine s ynthase OS=Brucella pinnipedialis M292/94/1 OX=520462 G N=queC PE=3 SV=1

SEQ ID NO: 36828 - protein, 232 aa, Brucella sp.; identical to SEQ ID NO: 36817
  misc_feature (1)..(232): tr|D0RKE2|D0RKE2_9RHIZ 7-cyano-7-deazaguanine synthase OS=Brucella sp. F5/99 OX=437701 GN=queC PE=3 SV=1

SEQ ID NO: 36829 - protein, 232 aa, Brucella sp.
  misc_feature (1)..(232): tr|A0A1P8S3Q3|A0A1P8S3Q3_9RHIZ 7-cyano-7-deazaguanine s ynthase OS=Brucella sp. 09RB8910 OX=1844051 GN=queC PE= 3 SV=1
MKTLVICSGGLDSVSLAHKMAAEHELTGLLSFDYGQRHKKELDFAQACAKRLGVPHQIINIRTIGASLTGSALTDDVDVPDGHYAEETMKVTVVPNRNAIMLAIAFGVAAAQKADAVALAVHGGDHFIYPDCRPGFIDAFQTMQKHALDGYADVKLLAPYVHATKADIVADGAKYRTPFEATWSCYKGAERHCGRCGTCVERREAFHLAGIDDPTSYEDADFWRAATQKRNA

SEQ ID NO: 36830 - protein, 232 aa, Brucella suis; identical to SEQ ID NO: 36819
  misc_feature (1)..(232): tr|A0A4Z0F6N6|A0A4Z0F6N6_BRUSS 7-cyano-7-deazaguanine s ynthase OS=Brucella suis OX=29461 GN=queC PE=3 SV=1

SEQ ID NO: 36831 - protein, 232 aa, Brucella suis; identical to SEQ ID NO: 36819
  misc_feature (1)..(232): sp|Q8FYB3|QUEC_BRUSU 7-cyano-7-deazaguanine synthase OS =Brucella suis biovar 1 (strain 1330) OX=204722 GN=queC PE=3 SV=1

SEQ ID NO: 36832 - protein, 232 aa, Brucellaceae bacterium
  misc_feature (1)..(232): tr|A0A3P1V1H5|A0A3P1V1H5_9RHIZ 7-cyano-7-deazaguanine s ynthase OS=Brucellaceae bacterium VT-16-1752 OX=2487907 GN=queC PE=3 SV=1
MKTLVVCSGGLDSVSLAHRIAAEHDLTALLSFNYGQRHKKELDSAKACAERLSVPHQIIDIRTIGASLTGSALTDNVDVPDGHYAEETMKITVVPNRNAIMLAIAFGVAAAQKAEAVALAVHGGDHFIYPDCRPNFINAFQTMQNHALEGYADIKLLAPYVNASKADIVTDGARHDTPFEATWSCYKGGENHCGRCGTCVERREAFHLAGVKDPTVYEDADFWREAVARRNT

SEQ ID NO: 36833 - protein, 195 aa, Bryobacterales bacterium
  misc_feature (1)..(195): tr|A0A350UIA9|A0A350UIA9_9BACT 7-cyano-7-deazaguanine s ynthase (Fragment) OS=Bryobacterales bacterium OX=20267 91 GN=queC PE=3 SV=1
MKPAVCLLSGGLDSATTLACARRDGFAPFALSFDYGQRHRIELEAAARVARALGAHAHRTAVIDLRVFGGSALTADINVPKGRQTAEMAAEIPITYVPARNTIFLSFALAWAEVLGSSDIYLGVNAVDYSGYPDCRPDFIAAFEHLAALATKAGVEGHLPLRIHTPLITLAKSEIITLGLSLGVDFALTHSCYDP

SEQ ID NO: 36834 - protein, 233 aa, Bryobacterales bacterium
  misc_feature (1)..(233): tr|A0A3D1B0F5|A0A3D1B0F5_9BACT 7-cyano-7-deazaguanine s ynthase OS=Bryobacterales bacterium OX=2026791 GN=queC PE=3 SV=1
MPANAGNPKRAVCLLSGGLDSATTLAYALREGFETYALSFDYGQRHRIELEAAARVAVSLGAAEHRVVAVDLRGFGASALTDEIDVPKGRAAGEIAEGIPITYVPARNTVFLALATAWAEVLGAADIFIGVNALDYSGYPDCRPEFLHAFEAMANLATRAGVEGATKLRIQAPLLHLSKAKIVKLGRELGVNFALTHSCYDPDPNGRACGLCDSCLLRRKGFADAGMVDPAVC

SEQ ID NO: 36835 - protein, 235 aa, Bryocella elongata
  misc_feature (1)..(235): tr|A0A1H6CB63|A0A1H6CB63_9BACT 7-cyano-7-deazaguanine s ynthase OS=Bryocella elongata OX=863522 GN=queC PE=3 SV =1
MSEGTGKKAIVLLSGGLDSTTVVAMAHAQGYAVYALSFDYGQVHKAELHAAARVAKSQNVAQHAIIKLDLAALAHSALTGKGDVPKDRSLEEIGEGVPVTYVPARNTVFLSLALAWAESLGATDIFIGVNALDYSGYPDCRPEFIHAFETMANLATKIGTDGQRITIHTPLISMTKAQIVQAGIALGVDYSITTTCYDASDDGAACGSCDACLLRRRGFEEGGIADPTLYRGLTE

SEQ ID NO: 36836 - protein, 232 aa, Buchnera aphidicola
  misc_feature (1)..(232): tr|A0A4D6YH65|A0A4D6YH65_BUCRP 7-cyano-7-deazaguanine s ynthase OS=Buchnera aphidicola subsp. Rhopalosiphum pad i OX=98793 GN=queC PE=3 SV=1
MKKVLIIFSGGQDSTTCLIHYTNIYKEVYCITFDYNQLHKSEIDSARFISNYFNVKKHIFVDIKCLKNLSISSLTDEKISILDNHPLNCLLPSTFVPGRNILFLTLSSIYAFNNQIDSVVLGVNEIDFSGYPDCRNEFLKKMNDVIQIGMNCKINFESPLINLSKAEIWALSDYWNSTQFILDNTVTCYKGVQGKGCSQCQSCILRNDGFNKWKSNPSYYMKRLKEKFNFYN

SEQ ID NO: 36837 - protein, 232 aa, Buchnera aphidicola
  misc_feature (1)..(232): sp|Q8K986|QUEC_BUCAP 7-cyano-7-deazaguanine synthase OS =Buchnera aphidicola subsp. Schizaphis graminum (strain Sg) OX=198804 GN=queC PE=3 SV=1
MKKILIIFSGGQDSTTCLIHYTNIYKEIYCITFDYNQLHKSEIDSARFISNYFNVKKHIFVDLKCLKNLSISSLTDEKISILDNHPLNFSLPSTFVPGRNILFLTLSSIYAFNHQINSIVLGVNEIDFSGYPDCRNAFLKKMNDVVQIGMNCKINFQSPLINLSKAEIWALSDYWNSTQFILNNTVTCYQGIQGKGCGQCQSCILRNDGFNKWKSNPSYYMKKLKEKFNFDN

SEQ ID NO: 36838 - protein, 234 aa, Budvicia aquatica
  misc_feature (1)..(234): tr|A0A2C6DMN7|A0A2C6DMN7_9GAMM 7-cyano-7-deazaguanine s ynthase OS=Budvicia aquatica OX=82979 GN=queC PE=3 SV=1
MKRAVVVFSGGQDSTTCLIQALKQYDEVHCVTFDYGQRHQAEIDVARDLAITLGASAHKVMDVGLLNELAISSLTRDNIPVPKTSGDDIPSTFVPGRNILFLTLSAIYAYQIKAEAVITGVCETDFSGYPDCRDEFVKSLNHAVSLGMAYDIRFETPLMWLDKAETWALADYYSQLDLIRHQTLTCYNGIKGDGCGECPSCHLRANGLSRYLDNKQAIMGSLNTKLMLGSVKPD

SEQ ID NO: 36839 - protein, 244 aa, Burkholderia ambifaria
  misc_feature (1)..(244): tr|A0A2S9L2K7|A0A2S9L2K7_9BURK 7-cyano-7-deazaguanine s ynthase OS=Burkholderia ambifaria OX=152480 GN=queC PE= 3 SV=1
MIRTDAKDGALVLFSGGQDSATCVAWALERYQTVETLGFDYGQRHRVELECREGVRDALKHRFPAWAGRLGDDHMIDLSVLGAISDTAMTRTIEIETTANGLPNTFVPGRNLLFMTIAAAIAYRRGLRVLVGGMCETDFSGYPDCRDDTMKALQVALNLGMDTRIVLETPLMWLDKAQTWQLAEQLGGDALVELIRVETHTCYVGERAELHDWGFGCGECPACKLRKRGYEAYLKGERVTEAPL

SEQ ID NO: 36840 - protein, 244 aa, Burkholderia ambifaria; identical to SEQ ID NO: 36839
  misc_feature (1)..(244): sp|Q0BAU3|QUEC_BURCM 7-cyano-7-deazaguanine synthase OS =Burkholderia ambifaria (strain ATCC BAA-244 / AMMD) OX =339670 GN=queC PE=3 SV=1

SEQ ID NO: 36841 - protein, 244 aa, Burkholderia anthina
  misc_feature (1)..(244): tr|A0A104KJJ9|A0A104KJJ9_9BURK 7-cyano-7-deazaguanine s ynthase OS=Burkholderia anthina OX=179879 GN=queC PE=3 SV=1
MIRTDAKDGALVLFSGGQDSATCVAWALERYQTVETLGFDYGQRHRVELECREGVREALKRKFPAWSDRLGDDHMIDLSVLGAISDTAMTRTIEIETAANGLPNTFVPGRNLMFMTIAAAIAYRRGLRVLVGGMCETDFSGYPDCRDDTMKALQVALNLGMDTRIVLETPLMWLDKAQTWQLAEQLGGDALVELIRVETHTCYVGERAELHDWGFGCGECPACKLRKRGYEAYLKGERVTEAPL

SEQ ID NO: 36842 - protein, 244 aa, Burkholderia catarinensis
  misc_feature (1)..(244): tr|A0A1J9NRM1|A0A1J9NRM1_9BURK 7-cyano-7-deazaguanine s ynthase OS=Burkholderia catarinensis OX=1108140 GN=queC PE=3 SV=1
MIRTDAKDGALVLFSGGQDSATCVAWALERYQTVETLGFDYGQRHRVELECREGVRETLKSRFPAWSDRLGDDHMVDLSVLGAISDTAMTRTIEIETAANGLPNTFVPGRNLLFMTIAAAIAYRRGLRVLVGGMCETDFSGYPDCRDDTMKALQVALNLGMDTRIVLETPLMWLDKAQTWQLAEQLGGEALVELIRVETHTCYVGERAELHDWGFGCGECPACKLRKRGYEAYLKGERVTEAPL

SEQ ID NO: 36843 - protein, 156 aa, Burkholderia cenocepacia
  misc_feature (1)..(156): tr|A2VUG7|A2VUG7_9BURK 7-cyano-7-deazaguanine synthase OS=Burkholderia cenocepacia PC184 OX=350702 GN=BCPG_016 42 PE=3 SV=1
MTRMIEIETTANGLPNTFVPGRNLMFMTIAAAIAYRRGLRVLVGGMCETDFSGYPDCRDDTMKALQVALNLGMDTRMVLETPLMWLDKAQTWQLAEQLGGEALVELIRVETHTCYVGERAELHDWGFGCGECPACKLRKRGYEAYLKGERVTEAPL

SEQ ID NO: 36844 - protein, 244 aa, Burkholderia cenocepacia
  misc_feature (1)..(244): sp|A0KBJ0|QUEC_BURCH 7-cyano-7-deazaguanine synthase OS =Burkholderia cenocepacia (strain HI2424) OX=331272 GN= queC PE=3 SV=1
MIRTDAKDGALVLFSGGQDSATCVAWALERYQTVETLGFDYGQRHRVELECREGVREALKHRFPAWSDRLGDDHMIDLSVLGAISDTAMTRTIEIETTANGLPNTFVPGRNLMFMTIAAAIAYRRGLRVLVGGMCETDFSGYPDCRDDTMKALQVALNLGMDTRMVLETPLMWLDKAQTWQLAEQLGGEALVELIRVETHTCYVGERAELHDWGFGCGECPACKLRKRGYEAYLKGERVTEAPL

SEQ ID NO: 36845 - protein, 244 aa, Burkholderia cepacia
  misc_feature (1)..(244): tr|A0A0U4BDQ9|A0A0U4BDQ9_BURCE 7-cyano-7-deazaguanine s ynthase OS=Burkholderia cepacia JBK9 OX=1395570 GN=queC PE=3 SV=1
MIRTDAKDGALVLFSGGQDSATCVAWALERYQTVETLGFDYGQRHRVELECREGVREALKRDFSAWSDRLGDDHMIDLSVLGAISDTAMTRTIEIETTANGLPNTFVPGRNLMFMTIAAAIAYRRGLRVLVGGMCETDFSGYPDCRDDTMKALQVALNLGMDTRIVLETPLMWLDKAQTWQLAEQLGGEALVELIRVETHTCYVGERAELHDWGFGCGECPACKLRKRGYEAYLKGERVTEAPL

SEQ ID NO: 36846 - protein, 244 aa, Burkholderia cepacia
  misc_feature (1)..(244): tr|A0A118KQG6|A0A118KQG6_BURCE 7-cyano-7-deazaguanine s ynthase OS=Burkholderia cepacia OX=292 GN=queC PE=3 SV= 1
MIRTDAKDGALVLFSGGQDSATCVAWALERYQTVETLGFDYGQRHRVELECREGVREALKRDFPAWSDRLGDDHMIDLSVLGAISDTAMTRTIEIETAANGLPNTFVPGRNLMFMTIAAAIAYRRGLRVLVGGMCETDFSGYPDCRDDTMKALQVALNLGMDTRMVLETPLMWLDKAQTWQLAEQLGGEALVELIRVETHTCYVGERAELHEWGFGCGECPACKLRKRGYEAYLKGERVTEAPL

SEQ ID NO: 36847 - protein, 244 aa, Burkholderia contaminans
  misc_feature (1)..(244): tr|A0A2S5DWQ1|A0A2S5DWQ1_9BURK 7-cyano-7-deazaguanine s ynthase OS=Burkholderia contaminans OX=488447 GN=queC P E=3 SV=1
MIRTDAKDGALVLFSGGQDSATCVAWALERYQTVETLGFDYGQRHRVELECREGVREALKRDFPAWSGRLGDDHMIDLSVLGAISDTAMTRTIEIETAANGLPNTFVPGRNLMFMTIAAAIAYRRGLRVLVGGMCETDFSGYPDCRDDTMKALQVALNLGMDTRIVLETPLMWLDKAQTWQLAEQLGGEALVELIRVETHTCYVGERAELHEWGFGCGECPACKLRKRGYEAYLKGELVTEAPL

SEQ ID NO: 36848 - protein, 244 aa, Burkholderia contaminans
  misc_feature (1)..(244): tr|A0A1C8ZCU3|A0A1C8ZCU3_9BURK 7-cyano-7-deazaguanine s ynthase OS=Burkholderia contaminans OX=488447 GN=queC P E=3 SV=1
MIRTDAKDGALVLFSGGQDSATCVAWALERYQTVETLGFDYGQRHRVELECREGVREALKRDFPAWSDRLGDDHMIDLSVLGAISDTAMTRTIEIETAANGLPNTFVPGRNLMFMTIAAAIAYRRGLRVLVGGMCETDFSGYPDCRDDTMKALQVALNLGMDTRVVLETPLMWLDKAQTWQLAEQLGGEALVELIRVETHTCYVGERAELHDWGFGCGECPACKLRKRGYEAYLKGERVTEAPL

SEQ ID NO: 36849 - protein, 243 aa, Burkholderia dabaoshanensis
  misc_feature (1)..(243): tr|A0A2N7VSL6|A0A2N7VSL6_9BURK 7-cyano-7-deazaguanine s ynthase OS=Burkholderia dabaoshanensis OX=564714 GN=que C PE=3 SV=1
MIRTDAKHGALVLFSGGQDSTTCLAWALERYETVETLGFDYGQRHRVELECRDGVREAIVRSFPQWAERLGDDHMIDLSVLGAISETAMTREIQIESAANGLPNTFVPGRNLMFMTIAAAIAYRRGLSVLVGGMCETDFSGYPDCRDDTMKALQVALNLGMDSRFLVETPLMWLDKADTWRLARDLGGDALVELVRVQTHTCYVGERAELHAWGFGCGECPACRLRKRGYEAFLAGEKVTEPD

SEQ ID NO: 36850 - protein, 244 aa, Burkholderia diffusa
  misc_feature (1)..(244): tr|A0A1B4BVZ9|A0A1B4BVZ9_9BURK 7-cyano-7-deazaguanine s ynthase OS=Burkholderia diffusa OX=488732 GN=queC PE=3 SV=1
MIRTDAKDGALVLFSGGQDSATCVAWALERYQTVETLGFDYGQRHRVELECREGVRDALKRQFPAWAGRLGDDHMIDLSVLGAISDTAMTRTIEIETAANGLPNTFVPGRNLLFMTIAAAIAYRRGLRVLVGGMCETDFSGYPDCRDDTMKALQVALNLGMDTRIVLETPLMWLDKAQTWQLAEQLGGEALVELIRVETHTCYVGERAELHDWGFGCGECPACKLRKRGYEAYLKGERVTEAPL

SEQ ID NO: 36851 - protein, 244 aa, Burkholderia dolosa
  misc_feature (1)..(244): tr|A0A0D5IYP8|A0A0D5IYP8_9BURK 7-cyano-7-deazaguanine s ynthase OS=Burkholderia dolosa AU0158 OX=350701 GN=queC PE=3 SV=1
MIRKDAKDGALVLFSGGQDSATCVAWALERYQTVETLGFDYGQRHRVELECREGVRDALKRQFPAWAGRLGDDHMIDLSVLGAISDTAMTRAIEIETAANGLPNTFVPGRNLLFMTIAAAIAYRRGLRVLVGGMCETDFSGYPDCRDDTMKALQVALNLGMDTRIVLETPLMWLDKAQTWQLAEQLGGQALVELIRVETHTCYVGERAELHDWGFGCGECPACKLRKRGYDAYLKGERVTEAPL

SEQ ID NO: 36852 - protein, 244 aa, Burkholderia gladioli
  misc_feature (1)..(244): tr|F2LGW7|F2LGW7_BURGS 7-cyano-7-deazaguanine synthase OS=Burkholderia gladioli (strain BSR3) OX=999541 GN=que C PE=3 SV=1
MIRTDAKGGALVLFSGGQDSATCVAWALEHYSTVETLGFDYGQRHRVELECREGVREALRTRFPQWTNRLGDDHMIDLSVLGAISDTAMTRAIEIETSANGLPNTFVPGRNLLFMTIAAALAYRRGLKVLVGGMCETDFSGYPDCRDDTMKALQVALNLGMDTRMVLETPLMWLDKADTWRLAEQLGGAELVELVRVETHTCYVGERAELHDWGFGCGACPACKLRKRGYEAYRSGEQVTEMPA

SEQ ID NO: 36853 - protein, 244 aa, Burkholderia gladioli; identical to SEQ ID NO: 36852
  misc_feature (1)..(244): tr|A0A095HTX5|A0A095HTX5_BURGA 7-cyano-7-deazaguanine s ynthase OS=Burkholderia gladioli OX=28095 GN=queC PE=3 SV=1

SEQ ID NO: 36854 - protein, 244 aa, Burkholderia glumae
  misc_feature (1)..(244): tr|A0A2J9H6K6|A0A2J9H6K6_BURGL 7-cyano-7-deazaguanine s ynthase OS=Burkholderia glumae OX=337 GN=queC PE=3 SV=1
MIRTDAKGGALVLFSGGQDSATCVAWALERYQTVETLGFDYGQRHRVELECREGVREALRTRFPQWAGRLGDDHMIDLSVLGAISDTAMTRSIEIETAANGLPNTFVPGRNLLFMTIAAAVAYRRGLKVLVGGMCETDFSGYPDCRDDTMKALQVALNLGMDTRVVLETPLMWLDKADTWRLAEQLGGAALVELVRVETHTCYVGERAELHDWGFGCGACPACKLRRRGYEAYRNGGQVTEAPL

SEQ ID NO: 36855 - protein, 244 aa, Burkholderia glumae; identical to SEQ ID NO: 36854
  misc_feature (1)..(244): tr|C5AF29|C5AF29_BURGB 7-cyano-7-deazaguanine synthase OS=Burkholderia glumae (strain BGR1) OX=626418 GN=queC PE=3 SV=1

SEQ ID NO: 36856 - protein, 233 aa, Burkholderia insecticola
  misc_feature (1)..(233): tr|R4WLU7|R4WLU7_9BURK 7-cyano-7-deazaguanine synthase OS=Burkholderia insecticola OX=758793 GN=queC PE=3 SV=1
MLFSGGQDSATCLAWALERFRTVETLGFDYGQRHRVELECRDGFRAAIQREFPQWAERLGEDHMIDLSVLGAISDTAMTREIEIQATASGLPNTFVPGRNLLFMTIAAALAYRRGLKVLVGGMCETDFSGYPDCRDDTMKALQVALNLGMETRYALETPLMWLDKADTWRLAETLGGEALVELIRVETHTCYLGERAELNEWGFGCGQCPACKLRKRGYEAYRAGEQVTTAPV

SEQ ID NO: 36857 - protein, 244 aa, Burkholderia lata; identical to SEQ ID NO: 36848
  misc_feature (1)..(244): sp|Q39BV2|QUEC_BURL3 7-cyano-7-deazaguanine synthase OS =Burkholderia lata (strain ATCC 17760 / DSM 23089 / LMG 22485 / NCIMB 9086 / R18194 / 383) OX=482957 GN=queC P E=3 SV=1

SEQ ID NO: 36858 - protein, 244 aa, Burkholderia lata
  misc_feature (1)..(244): tr|A0A3G3HAW8|A0A3G3HAW8_BURL3 7-cyano-7-deazaguanine s ynthase OS=Burkholderia lata (strain ATCC 17760 / DSM 2 3089 / LMG 22485 / NCIMB 9086 / R18194 / 383) OX=482957 GN=queC PE=3 SV=1
MTRTDAKDGALVLFSGGQDSATCVAWALERYQTVETLGFDYGQRHRVELECREGVREALKRDFPAWSDRLGDDHMIDLSVLGAISDTAMTRTIEIETAANGLPNTFVPGRNLMFMTIAAAIAYRRGLRVLVGGMCETDFSGYPDCRDDTMKALQVALNLGMDTRVVLETPLMWLDKAQTWQLAEQLGGEALVELIRVETHTCYVGERAELHEWGFGCGECPACKLRKRGYEAYLKGERVTEAPL

SEQ ID NO: 36859 - protein, 206 aa, Burkholderia latens
  misc_feature (1)..(206): tr|A0A1B4NZ18|A0A1B4NZ18_9BURK 7-cyano-7-deazaguanine s ynthase OS=Burkholderia latens OX=488446 GN=WK25_20485 PE=3 SV=1
MKSALLLASGGLDSTTVGYQLAATGVEVVPIFFDYGQHCVDVEWSRVTEVLPADMRRPERFDISDIFRGSQSRLIREADLWTEEVKDDDLYIPYRTMLFFAAAAARAQTVAILDVYTGFINSNHAKEIDCTAAFMNSLDGLTSSIGPVRFHSPFRYSSKADVARVAAKLGVPIGRTYSCQASAQFPCGACPNCVERLNALKEAKLV

SEQ ID NO: 36860 - protein, 244 aa, Burkholderia latens
  misc_feature (1)..(244): tr|A0A1B4NVK0|A0A1B4NVK0_9BURK 7-cyano-7-deazaguanine s ynthase OS=Burkholderia latens OX=488446 GN=queC PE=3 S V=1
MIRTDAKDGALVLFSGGQDSATCVAWALERYQTVETLGFDYGQRHRVELECREGVREALKRQFPAWADRLGDDHMIDLSVLGAISDTAMTRTIEIETAANGLPNTFVPGRNLLFMTIAAAIAYRRGLRVLVGGMCETDFSGYPDCRDDTMKALQVALNLGMDTRVVLETPLMWLDKAQTWQLAEQLGGAALVELIRVETHTCYVGERAELHDWGFGCGECPACKLRKRGYEAYLKGERVTEAPL

SEQ ID NO: 36861 - protein, 244 aa, Burkholderia mallei
  misc_feature (1)..(244): sp|Q62MS6|QUEC_BURMA 7-cyano-7-deazaguanine synthase OS =Burkholderia mallei (strain ATCC 23344) OX=243160 GN=q ueC PE=3 SV=1
MIRTDAKDGALVLFSGGQDSATCVAWALERYQTVETLGFDYGQRHRVELECREGVRDALKRRFPQWSHKLGDDHLIDLSVLGSISDTAMTRAIEIETASNGLPNTFVPGRNLLFMTIAAAIAYRRGLRALVGGMCETDFSGYPDCRDDTMKALQVALNLGMDTRFVLETPLMWLDKADTWRLAEQLGGAPLVELIRVETHTCYVGERSELHDWGFGCGECPACKLRKRGYDAYLRGESVTEAPA

SEQ ID NO: 36862 - protein, 244 aa, Burkholderia mallei; identical to SEQ ID NO: 36861
  misc_feature (1)..(244): sp|A1V788|QUEC_BURMS 7-cyano-7-deazaguanine synthase OS =Burkholderia mallei (strain SAVP1) OX=320388 GN=queC P E=3 SV=1

SEQ ID NO: 36863 - protein, 244 aa, Burkholderia metallica
  misc_feature (1)..(244): tr|A0A1B4HXP4|A0A1B4HXP4_9BURK 7-cyano-7-deazaguanine s ynthase OS=Burkholderia metallica OX=488729 GN=queC PE= 3 SV=1
MIRTDAKDGALVLFSGGQDSATCVAWALERYQTVETLGFDYGQRHRVELECREGVRDALKRKFPAWSDRLGDDHMIDLSVLGAISDTAMTRTIEIETAANGLPNTFVPGRNLMFMTIAAAIAYRRGLRVLVGGMCETDFSGYPDCRDDTMKALQVALNLGMDTRIVLETPLMWLDKAQTWQLAEQLGGEALVELIRVETHTCYVGERAELHDWGFGCGECPACKLRKRGYEAYLKGERVTEAPL

SEQ ID NO: 36864 - protein, 244 aa, Burkholderia multivorans
  misc_feature (1)..(244): tr|A0A1W0ZJM3|A0A1W0ZJM3_9BURK 7-cyano-7-deazaguanine s ynthase OS=Burkholderia multivorans OX=87883 GN=queC PE =3 SV=1
MIRTDAKDGALVLFSGGQDSATCVAWALERYQTVETLGFDYGQRHRVELECREGVREALKRQFPAWADRLGDDHMIDLSVLGAISDTAMTRAIEIETAANGLPNTFVPGRNLLFMTIAAAVAYRRGLRVLVGGMCETDFSGYPDCRDDTMKALQVALNLGMDTRIVLETPLMWLDKAQTWQLAEQLGGQALVELIRVETHTCYVGERAELHDWGFGCGECPACKLRKRGYEAYLKGERVTEAPL

SEQ ID NO: 36865 - protein, 244 aa, Burkholderia multivorans
  misc_feature (1)..(244): sp|A9AC62|QUEC_BURM1 7-cyano-7-deazaguanine synthase OS =Burkholderia multivorans (strain ATCC 17616 / 249) OX= 395019 GN=queC PE=3 SV=1
MIRTDAKDGALVLFSGGQDSATCVAWALERYQTVETLGFDYGQRHRVELECREGVREALKRQFPAWADRLGDDHMIDLSVLGAISDTAMTRAIEIETAANGLPNTFVPGRNLLFMTIAAAIAYRRGLRVLVGGMCETDFSGYPDCRDDTMKALQVALNLGMDTRIVLETPLMWLDKAQTWQLAEQLGGQALVELIRVETHTCYVGERAELHDWGFGCGECPACKLRKRGYEAYLKGERVTEAPL

SEQ ID NO: 36866 - protein, 244 aa, Burkholderia novacaledonica
  misc_feature (1)..(244): tr|A0A2U3IBU5|A0A2U3IBU5_9BURK 7-cyano-7-deazaguanine s ynthase OS=Burkholderia novacaledonica OX=1544861 GN=qu eC PE=3 SV=1
MTRIDAKDSALVLFSGGQDSATCLAWALERYKTVETLGFDYGQRHRVELECREGFRAAVVREFPHWAARLGEDHMIDLSVLGAISDTAMTREIEIQANASGLPNTFVPGRNLLFMTIAAAVAYRRGLKVLVGGMCETDFSGYPDCRDDTMKALQVALNLGMETRYALETPLMWLDKADTWRLAETLGGESLVELIRIETHTCYVGERAELHDWGFGCGQCPACRLRKRGYEAYRAGEQVDVAPV

SEQ ID NO: 36867 - protein, 198 aa, Burkholderia oklahomensis
  misc_feature (1)..(198): tr|A0A381BZ58|A0A381BZ58_9BURK 7-cyano-7-deazaguanine s ynthase OS=Burkholderia oklahomensis OX=342113 GN=NCTC1 3388_03648 PE=3 SV=1
MRTALLLSGGMDSIAIAYWVRPAVGITVAYGQRAAQAEVRAAAAVCEALNIEHHVIDADLSTLGSGDMAGLAPSTLAPVSEWWPFRNQMLVTLAAMRAVALDVNRLLIGSLRTDGIHADGKPEFIAAMSAVLQCQEGGIALEAPAIKLSGAELIKTSGVPIDLLAWAHSCHVANEACGICRGCRKHYETLEELGFAPY

SEQ ID NO: 36868 - protein, 244 aa, Burkholderia oklahomensis
  misc_feature (1)..(244): tr|A0A381BU09|A0A381BU09_9BURK 7-cyano-7-deazaguanine s ynthase OS=Burkholderia oklahomensis OX=342113 GN=queC PE=3 SV=1
MIRTDAKDGALVLFSGGQDSATCVAWALERYQTVETLGFDYGQRHRVELECRDGVRDALKQRFPQWENKLGDDHMIDLSVLGAISDTAMTRAIEIETASNGLPNTFVPGRNLLFMTIGAAIAYRRGLRVLVGGMCETDFSGYPDCRDDTMKALQVTLNLGMDTRFVLETPLMWLDKADTWRLAEQLGGKPLVELIRVETHTCYVGERSELHDWGFGCGECPACKLRKRGYEAYQRGESVTEAPV

SEQ ID NO: 36869 - protein, 198 aa, Burkholderia plantarii
  misc_feature (1)..(198): tr|A0A0B6RYU4|A0A0B6RYU4_9BURK 7-cyano-7-deazaguanine s ynthase OS=Burkholderia plantarii OX=41899 GN=BGL_1c173 10 PE=3 SV=1
MRTALLLSGGMDSVAIAYWVRPEVGITVAYGQRAAQAEARAAAAVCDALNIEHHLIQADLSALGSGDMAGLSPATLAPVSEWWPFRNQMLVTLAAMKAVTLNVNRLMIGSLRTDDIHADGKPEFITAMSAVLQCQEGGITLDAPAIQLSGAELIKTSGVPTDLLAWAHSCHVANEACGMCRGCRKHYETLEELGLDPY

SEQ ID NO: 36870 - protein, 244 aa, Burkholderia plantarii
  misc_feature (1)..(244): tr|A0A0B6RXE9|A0A0B6RXE9_9BURK 7-cyano-7-deazaguanine s ynthase OS=Burkholderia plantarii OX=41899 GN=exsB PE=3 SV=1
MIRTDAKGGALVLFSGGQDSATCVAWALERYQTVETLGFDYGQRHRVELECREGVREALRTRFAQWAGRLGDDHMIDLSVLGAISDTAMTRSIEIEMADNGLPNTFVPGRNLLFMTIAAAVAYRRGLKVLVGGMCETDFSGYPDCRDDTMKALQVALNLGMDTRVVLETPLMWLDKADTWRLAEQLGGAALVELVRVETHTCYVGERAELHDWGFGCGACPACKLRRRGYEAYRNGEQVTEAPA

SEQ ID NO: 36871 - protein, 244 aa, Burkholderia pseudomallei; identical to SEQ ID NO: 36861
  misc_feature (1)..(244): sp|Q63YL0|QUEC_BURPS 7-cyano-7-deazaguanine synthase OS =Burkholderia pseudomallei (strain K96243) OX=272560 GN =queC PE=3 SV=1

SEQ ID NO: 36872 - protein, 244 aa, Burkholderia pseudomallei; identical to SEQ ID NO: 36861
  misc_feature (1)..(244): sp|Q3JXD3|QUEC_BURP1 7-cyano-7-deazaguanine synthase OS =Burkholderia pseudomallei (strain 1710b) OX=320372 GN= queC PE=3 SV=1

SEQ ID NO: 36873 - protein, 244 aa, Burkholderia pseudomultivorans
  misc_feature (1)..(244): tr|A0A132ED45|A0A132ED45_9BURK 7-cyano-7-deazaguanine s ynthase OS=Burkholderia pseudomultivorans OX=1207504 GN =queC PE=3 SV=1
MIRTDAKDGALVLFSGGQDSATCVAWALERYQTVETLGFDYGQRHRVELECREGVREALKRQFPQWSDRLGDDHMIDLSVLGAISDTAMTRTIEIETAANGLPNTFVPGRNLLFMTIAAAIAYRRGLRVLVGGMCETDFSGYPDCRDDTMKALQVALNLGMDTRIVLETPLMWLDKAQTWQLAEQLGGEALVELIRVETHTCYVGERAELHDWGFGCGECPACKLRKRGYEAYLKGERVTEAPL

SEQ ID NO: 36874 - protein, 244 aa, Burkholderia puraquae
  misc_feature (1)..(244): tr|A0A1X1PBC7|A0A1X1PBC7_9BURK 7-cyano-7-deazaguanine s ynthase OS=Burkholderia puraquae OX=1904757 GN=queC PE= 3 SV=1
MIRTDAKDGALVLFSGGQDSATCVAWALERYQTVETLGFDYGQRHRVELECREGVREALKREFSAWSDRLGDDHMIDLTVLGAISDTAMTRTIEIETAANGLPNTFVPGRNLMFMTIAAAIAYRRGLRVLVGGMCETDFSGYPDCRDDTMKALQVALNLGMDTRIVLETPLMWLDKAQTWQLAEQLGGEALVELIRVETHTCYVGERAELHDWGFGCGECPACKLRKRGYEAYLKGERVTEAPL

SEQ ID NO: 36875 - protein, 244 aa, Burkholderia pyrrocinia
  misc_feature (1)..(244): tr|A0A118Q4Z1|A0A118Q4Z1_BURPY 7-cyano-7-deazaguanine s ynthase OS=Burkholderia pyrrocinia OX=60550 GN=queC PE= 3 SV=1
MIRTDAKDGALVLFSGGQDSATCVAWALERYQTVETLGFDYGQRHRVELECREGVRDALKRQFPAWAERLGDDHMVDLSVLGAISDTAMTRAIEIETAANGLPNTFVPGRNLLFMTIAAAIAYRRGLRVLVGGMCETDFSGYPDCRDDTMKALQVALNLGMDTRIVLETPLMWLDKSQTWQLAEQLGGPALVELIRVETHTCYVGERAELHDWGFGCGECPACKLRKRGYEAYLKGERVTEAPL

SEQ ID NO: 36876 - protein, 244 aa, Burkholderia pyrrocinia
  misc_feature (1)..(244): tr|A0A087P2W8|A0A087P2W8_BURPY 7-cyano-7-deazaguanine s ynthase OS=Burkholderia pyrrocinia OX=60550 GN=queC PE= 3 SV=1
MIRTDAKDGALVLFSGGQDSATCVAWALERYQTVETLGFDYGQRHRVELECREGVREALKRDFSAWTDRLGDDHMIDLSVLGAISDTAMTRTIEIETTASGLPNTFVPGRNLLFMTIAAAIAYRRGLRVLVGGMCETDFSGYPDCRDDTMKALQVALNLGMDTRIVLETPLMWLDKAQTWQLAEQLGGEALVELIRVETHTCYVGERAELHDWGFGCGECPACKLRKRGYEAYLKGERVTEAPL

SEQ ID NO: 36877 - protein, 198 aa, Burkholderia reimsis
  misc_feature (1)..(198): tr|A0A365QPZ4|A0A365QPZ4_9BURK 7-cyano-7-deazaguanine s ynthase OS=Burkholderia reimsis OX=2234132 GN=DPV79_269 20 PE=3 SV=1
MRTALLLSGGMDSVAIAYWVRPEVGITVAYGQRAAQAEVRAAAAVCEALNIEHHVIETDLSALGSGDMAGLAPTTLAPVSEWWPFRNQMLVTLAAMKAVTLNVNKLLIGSLRTDGIHADGKPEFIAAMSAVLQCQEGGITLEAPAIKLSGAELIKTSGVPTDLLAWAHSCHVANEACGMCRGCRKHYETLEELGFDPY

SEQ ID NO: 36878 - protein, 244 aa, Burkholderia reimsis
  misc_feature (1)..(244): tr|A0A365QTJ6|A0A365QTJ6_9BURK 7-cyano-7-deazaguanine s ynthase OS=Burkholderia reimsis OX=2234132 GN=queC PE=3 SV=1
MIRTDAKDGALVLFSGGQDSATCVAWALERYQTVETLGFDYGQRHRVELECREGVREALKRDFPAWSDRLGDDHMIDLSVLGAISDTAMTRTIEIETAANGLPNTFVPGRNLMFMTIAAAIAYRRGLRVLVGGMCETDFSGYPDCRDDTMKALQVALNLGMDTRIVLETPLMWLDKAQTWQLAEQLGGEALVELIRVETHTCYVGERAELHEWGFGCGECPACKLRKRGYEAYLKGERVTEAPL

SEQ ID NO: 36879 - protein, 244 aa, Burkholderia seminalis
  misc_feature (1)..(244): tr|A0A103K2S6|A0A103K2S6_9BURK 7-cyano-7-deazaguanine s ynthase OS=Burkholderia seminalis OX=488731 GN=queC PE= 3 SV=1
MTRTDAKDGALVLFSGGQDSATCVAWALERYQTVETLGFDYGQRHIVELECREGVREALKRDFPAWSDRLGDDHMIDLSVLGAISDTAMTRTIEIETTANGLPNTFVPGRNLMFMTIAAAIAYRRGLRVLVGGMCETDFSGYPDCRDDTMKALQVALNLGMDTRMVLETPLMWLDKAQTWQLAEQLGGEALVELIRVETHTCYVGERAELHDWGFGCGECPACKLRKRGYEAYLKGERVTEAPL

SEQ ID NO: 36880 - protein, 244 aa, Burkholderia singularis
  misc_feature (1)..(244): tr|A0A118DNM2|A0A118DNM2_9BURK 7-cyano-7-deazaguanine s ynthase OS=Burkholderia singularis OX=1503053 GN=queC P E=3 SV=1
MIRTDAKDGALVLFSGGQDSATCVAWALERYETVETLGFDYGQRHRVELECREGVRDALKRDFPQWAGRLGDDHMIDLSVLGAISDTAMTRAIQIETAANGLPNTFVPGRNLLFMTIGAAIAYRRGLRALVGGMCETDFSGYPDCRDDTMKALQVALNLGMDTRFVVETPLMWLDKADTWRLAERLGGTRLVDLIRVETHTCYVGERSELHDWGFGCGECPACKLRKRGYEAYLCGEHVTQAPA

SEQ ID NO: 36881 - protein, 244 aa, Burkholderia singularis
  misc_feature (1)..(244): tr|A0A238H1Q9|A0A238H1Q9_9BURK 7-cyano-7-deazaguanine s ynthase OS=Burkholderia singularis OX=1503053 GN=queC P E=3 SV=1
MIRTDAKDGALVLFSGGQDSATCVAWALERYETVETLGFDYGQRHRVELECREGVRDALKRDFPQWAGRLGDDHMIDLSVLGAISDTAMTRAIQIETAANGLPNTFVPGRNLLFMTIGAAIAYRRGLRALVGGMCETDFSGYPDCRDDTMKALQVALNLGMDTRFVVETPLMWLDKADTWRLAEQLGGTRLVDLIRVETHTCYVGERSELHDWGFGCGECPACKLRKRGYEAYLCGEHVTQAPA

SEQ ID NO: 36882 - protein, 244 aa, Burkholderia sp.
  misc_feature (1)..(244): tr|A0A4R9MG36|A0A4R9MG36_9BURK 7-cyano-7-deazaguanine s ynthase OS=Burkholderia sp. USM B20 OX=1571773 GN=queC PE=3 SV=1
MIRTDAKDGALVLFSGGQDSATCVAWALERYQTVETLGFDYGQRHRVELECREGVRDALKRQFPAWADRLGDDHMVDLSVLGAISDTAMTRTIEIETAANGLPNTFVPGRNLLFMTIAAAIAYRRGLRVLVGGMCETDFSGYPDCRDDTMKALQVALNLGMDTRMVLETPLMWLDKAQTWQLAEQLGGEALVELIRVETHTCYVGERAELHDWGFGCGECPACKLRKRGYEAYLKGERVTEAPL

SEQ ID NO: 36883 - protein, 244 aa, Burkholderia sp.
  misc_feature (1)..(244): tr|A0A3P0SAC7|A0A3P0SAC7_9BURK 7-cyano-7-deazaguanine s ynthase OS=Burkholderia sp. Bp9004 OX=2184559 GN=queC P E=3 SV=1
MIRTDAKDGALVLFSGGQDSATCVAWALERYQTVETLGFDYGQRHRVELECREGVREALKRKFPAWSDRLGDDHMIDLSVLGAISDTAMTRTIEIETSANGLPNTFVPGRNLLFMTIAAAIAYRRGLRVLVGGMCETDFSGYPDCRDDTMKALQVALNLGMDTRVVLETPLMWLDKAQTWQLAEQLGGEALVELIRVETHTCYVGERAELHDWGFGCGECPACKLRKRGYEAYLKGERVTEAPL

SEQ ID NO: 36884 - protein, 244 aa, Burkholderia stabilis
  misc_feature (1)..(244): tr|A0A4Q2AS17|A0A4Q2AS17_9BURK 7-cyano-7-deazaguanine s ynthase OS=Burkholderia stabilis OX=95485 GN=queC PE=3 SV=1
MIRTDAKDGALVLFSGGQDSATCVAWALERYQTVETLGFDYGQRHRVELECREGVREALKRKFPAWSDRLGDDHMIDLSVLGAISDTAMTRTIEIETTANGLPNTFVPGRNLMFMTIAAAIAYRRGLRALVGGMCETDFSGYPDCRDDTMKALQVALNLGMDTRIVLETPLMWLDKAQTWQLAEQLGGEALVELIRVETHTCYVGERAELHDWGFGCGECPACKLRKRGYEAYLKGERVTEAPL

SEQ ID NO: 36885 - protein, 244 aa, Burkholderia stabilis
  misc_feature (1)..(244): tr|A0A498RN51|A0A498RN51_9BURK 7-cyano-7-deazaguanine s ynthase OS=Burkholderia stabilis OX=95485 GN=queC PE=3 SV=1
MIRTDAKDGALVLFSGGQDSATCVAWALERYQTVETLGFDYGQRHRVELECREGVREALKREFPAWSDRLGDDHMIDLSVLGAISDTAMTRTIEIETTANGLPNTFVPGRNLMFMTIAAAIAYRRGLRVLVGGMCETDFSGYPDCRDDTMKALQVALNLGMDTRIVLETPLMWLDKAQTWQLAEQLGGEALVELIRVETHTCYVGERAELHDWGFGCGECPACKLRKRGYEAYLKGERVTEAPL

SEQ ID NO: 36886 - protein, 206 aa, Burkholderia stagnalis
  misc_feature (1)..(206): tr|A0A125KIY9|A0A125KIY9_9BURK 7-cyano-7-deazaguanine s ynthase OS=Burkholderia stagnalis OX=1503054 GN=WT44_13 430 PE=3 SV=1
MKRALLLASGGLDSTTVGYQLAATGADVVPIFFDYGQHCVDVEWSRVNEVLPADMRRPERFDISDIFRGSQSRLIREADLWTEEVKDDDLYIPYRTMLFFAAAAARAQTIGILDVYTGFINSNHAKEIDCTAAFMNSLDGLTSSIGPVRFHSPFRYSSKVDVARAATELGVPIGRTYSCQASAQFPCGACPNCVERLNALKEAKLV

SEQ ID NO: 36887 - protein, 244 aa, Burkholderia stagnalis
  misc_feature (1)..(244): tr|A0A104LHY8|A0A104LHY8_9BURK 7-cyano-7-deazaguanine s ynthase OS=Burkholderia stagnalis OX=1503054 GN=queC PE =3 SV=1
MIRTDAKDGALVLFSGGQDSATCVAWALERYQTVETLGFDYGQRHRVELECREGVRDALKRQFPAWAERLGDDHMVDLSVLGAISDTAMTRAIEIETAANGLPNTFVPGRNLLFMTIAAAVAYRRGLRVLVGGMCETDFSGYPDCRDDTMKALQVALNLGMDTRIVLETPLMWLDKAQTWQLAEQLGGPALVELIRVETHTCYVGERAELHDWGFGCGECPACKLRKRGYEAYLKGERVTEAPL

SEQ ID NO: 36888 - protein, 244 aa, Burkholderia territorii
  misc_feature (1)..(244): tr|A0A106M5H7|A0A106M5H7_9BURK 7-cyano-7-deazaguanine s ynthase OS=Burkholderia territorii OX=1503055 GN=queC P E=3 SV=1
MIRTDAKDGALVLFSGGQDSATCVAWALERYQTVETLGFDYGQRHRVELECREGVRDALKRRFPAWAGRLGDDHMIDLSVLGAISDTAMTRTIEIETAANGLPNTFVPGRNLLFMTIAAAIAYRRGLRVLVGGMCETDFSGYPDCRDDTMKALQVALNLGMDTRIVLETPLMWLDKAQTWQLAEQLGGEALVELIRVETHTCYVGERAELHDWGFGCGECPACKLRKRGYEAYLKGERVTEAPL

SEQ ID NO: 36889 - protein, 244 aa, Burkholderia territorii; identical to SEQ ID NO: 36850
  misc_feature (1)..(244): tr|A0A108LPB8|A0A108LPB8_9BURK 7-cyano-7-deazaguanine s ynthase OS=Burkholderia territorii OX=1503055 GN=queC P E=3 SV=1

SEQ ID NO: 36890 - protein, 206 aa, Burkholderia thailandensis
  misc_feature (1)..(206): tr|A0A5F1C401|A0A5F1C401_BURTH 7-cyano-7-deazaguanine s ynthase OS=Burkholderia thailandensis OX=57975 GN=C6946 _14290 PE=3 SV=1
MKKALLLSSGGLDSTTVGYKLAATGVDVVPIFFDYGQHCVEVEWGRVNEVLPADMQRPERFDISDIFRGSPSRLIREADLWTEAVKDDDLYIPYRTMLFFAAAAARAQTVGILDVYTGFINSNHAKEIDCTAAFMNSLDGLTASIGPVRFHSPFRYSSKADVARAAAELGVPIGRTYSCQASAHFPCGACPNCVERLNALKEAKLV

SEQ ID NO: 36891 - protein, 244 aa, Burkholderia thailandensis
  misc_feature (1)..(244): sp|Q2T2A4|QUEC_BURTA 7-cyano-7-deazaguanine synthase OS =Burkholderia thailandensis (strain ATCC 700388 / DSM 1 3276 / CIP 106301 / E264) OX=271848 GN=queC PE=3 SV=1
MIRTDAKDGALVLFSGGQDSATCVAWALERYQTVETLGFDYGQRHRVELECREGVRDALKRRFPQWSHKLGDDHMIDLSVLGAISDTAMTRAIEIETASNGLPNTFVPGRNLLFMTIGAAIAYRRGLRALVGGMCETDFSGYPDCRDDTMKALQVALNLGMDTRFVLETPLMWLDKADTWRLAEQLGGKPLVELIRVETHTCYVGERSELHDWGFGCGECPACKLRKRGFEAYLRGESVTQAPV

SEQ ID NO: 36892 - protein, 404 aa, Burkholderia ubonensis
  misc_feature (1)..(404): tr|A0A103RPG8|A0A103RPG8_9BURK Uncharacterized protein OS=Burkholderia ubonensis OX=101571 GN=WJ33_20770 PE=4 SV=1
MTVDTIKIYRGCDKCGMPLHYDAIMSGDETATIPASGLCGHCSGLKPGRKAEYEKEPDYEWLLDAMIDVVKGERRLLRKGASLVSSLPLVNRSGLGVAAGILDSIPAPETRSTYDAMVLYSGGKDSTYMLINLAEKGLKVCAWMLDPGYQSPQTIDNAKRITARLGVELVIDKADKTFADSLFRSGFEIDENSDIELKKGAMTYGSACWPCFSVIAVSASRFANSHRIPLCFIGTQKGQNRLNLEGSGVLSSKQLPKLNELVRKFVDPFKKAIPDQARMLQPDPDSVDFPTVLVPFYELVQKPDKEAQIRYLEERGWVMPKNTGACSSNCMINELGRAVMRSKFGFDLYQVIDSNERRLGHRADEAAYGAPDPKMVKLGAVMLGLSDQELKHLGVQANGEDQNA

SEQ ID NO: 36893 - protein, 244 aa, Burkholderia ubonensis
  misc_feature (1)..(244): tr|A0A119UP37|A0A119UP37_9BURK 7-cyano-7-deazaguanine s ynthase OS=Burkholderia ubonensis OX=101571 GN=queC PE= 3 SV=1
MIRTDAKDGALVLFSGGQDSATCVAWALERYQTVETLGFDYGQRHRVELECREGVRDALKREFPAWAGRLGDDHMIDLSVLGAISDTAMTRAIEIETSANGLPNTFVPGRNLLFMTIAAAIAYRRGLRVLVGGMCETDFSGYPDCRDDTMKALQVALNLGMDTRIVLETPLMWLDKAQTWQLAEQLGGQALVELIRVETHTCYVGERAELHDWGFGCGECPACKLRKRGYEAYLKGERVTEAPL

SEQ ID NO: 36894 - protein, 244 aa, Burkholderia vietnamiensis
  misc_feature (1)..(244): tr|A0A103MSU4|A0A103MSU4_BURVI 7-cyano-7-deazaguanine s ynthase OS=Burkholderia vietnamiensis OX=60552 GN=queC PE=3 SV=1
MIRTDAKDGALVLFSGGQDSATCVAWALERYQTVETLGFDYGQRHRVELECREGVRDALKHRFPAWAGRLGDDHMIDLSVLGAISDTAMTRTIEIETAANGLPNTFVPGRNLLFMTIAAAIAYRRGLRVLVGGMCETDFSGYPDCRDDTMKALQVALNLGMDTRVVLETPLMWLDKAQTWQLAEQLGGAALVELIRVETHTCYVGERAELHDWGFGCGECPACKLRKRGYEAYLKGERVTEAPL

SEQ ID NO: 36895 - protein, 244 aa, Burkholderia vietnamiensis; identical to SEQ ID NO: 36894
  misc_feature (1)..(244): sp|A4JIU1|QUEC_BURVG 7-cyano-7-deazaguanine synthase OS =Burkholderia vietnamiensis (strain G4 / LMG 22486) OX= 269482 GN=queC PE=3 SV=1

SEQ ID NO: 36896 - protein, 224 aa, Burkholderiaceae bacterium
  misc_feature (1)..(224): tr|A0A0F0DSN9|A0A0F0DSN9_9BURK 7-cyano-7-deazaguanine s ynthase OS=Burkholderiaceae bacterium 26 OX=1619951 GN= queC PE=3 SV=1
MKKRAIVLLSGGLDSATVLAMANADGFETYALSMRYGQRHSSELEAAKKVAATLGAVRHEIVDLDLRKFGGSALTDDALDVPTDGAQSGIPITYVPARNTIMLSLALGWAEAVGARDLFFGANAVDYSGYPDCRPEYVAAYETLANLATKAGVEGERIRVNAPIINMTKAEIIQAGVRLGVDYGLTVSCYQADDDGRACGVCDSCRIRKAGFDAAGVPDPTRYA

SEQ ID NO: 36897 - protein, 236 aa, Burkholderiaceae bacterium
  misc_feature (1)..(236): tr|A0A4U8V9W7|A0A4U8V9W7_9BURK 7-cyano-7-deazaguanine s ynthase OS=Burkholderiaceae bacterium PBA OX=795666 GN= queC PE=3 SV=1
MTSRAIVLLSGGLDSATVLAMARAQGFETYALSMRYGQRHSSELDAARRVARALGAQRHEIIDLDLRPFGGSALTDDTLDVPVDGNSTGIPITYVPARNTIMLSVALGWAEAVGAYDLFFGANAVDYSGYPDCRPEFVAAYETLANIATKAGVEGQRIRVQAPIIAMSKAEIIRTGIGLGVDYGMTVSCYLADAEGRACGVCDSCRLRRAGFEAAGVADPTRYQTDQTDPAAGAKQ

SEQ ID NO: 36898 - protein, 236 aa, Burkholderiales bacterium
  misc_feature (1)..(236): tr|A0A1F4GQ31|A0A1F4GQ31_9BURK 7-cyano-7-deazaguanine s ynthase OS=Burkholderiales bacterium GWA2_64_37 OX=1797 549 GN=queC PE=3 SV=1
MRPGHALVLFSGGQDSTTCLAWALENFAHVETIGFDYGQRHHIELQARQTVLSSLRAQFPHWAAKLGDDHRLDLAVLGHISDTALTSDTEIQMTAAGLPNTFVPGRNLLFFQLAAAVGYRRGLHTLVGGMCETDFSGYPDCRDDTLKALQVAVSLGMGQRFTFDTPLMWLDKAETWELARSLGGQALVDLIVNDSHTCYHGVRDTLHAWGYGCGTCPACALRRSGYERWKGGSASV

SEQ ID NO: 36899 - protein, 236 aa, Burkholderiales bacterium; identical to SEQ ID NO: 36700
  misc_feature (1)..(236): tr|A0A1Q3XXL3|A0A1Q3XXL3_9BURK 7-cyano-7-deazaguanine s ynthase OS=Burkholderiales bacterium 67-32 OX=1895729 G N=queC PE=3 SV=1

SEQ ID NO: 36900 - protein, 231 aa, Buttiauxella agrestis
  misc_feature (1)..(231): tr|A0A381CB37|A0A381CB37_9ENTR 7-cyano-7-deazaguanine s ynthase OS=Buttiauxella agrestis OX=82977 GN=queC PE=3 SV=1
MKRAVVVFSGGQDSTTCLIQALQQYDEVHCVTFDYGQRHRAEIDVARELALKLGARAHKVLDVTLLNELAVSSLTRDNIPVPDYDPQESGIPSTFVPGRNILFLTLTAIYAYQVEAEAVITGVCETDFSGYPDCRDEFVKALNHAVSLGMARDIRFETPLMWLDKAETWALADYWQQLELVRNDTLTCYNGIQGDGCGECAACHLRANGLNHYLADKPAVMAAMKKKTGLK

SEQ ID NO: 36901 - protein, 231 aa, Buttiauxella agrestis; identical to SEQ ID NO: 36900
  misc_feature (1)..(231): tr|A0A085GI42|A0A085GI42_9ENTR 7-cyano-7-deazaguanine s ynthase OS=Buttiauxella agrestis ATCC 33320 OX=1006004 GN=queC PE=3 SV=1

SEQ ID NO: 36902 - protein, 231 aa, Buttiauxella brennerae
  misc_feature (1)..(231): tr|A0A1B7IV44|A0A1B7IV44_9ENTR 7-cyano-7-deazaguanine s ynthase OS=Buttiauxella brennerae ATCC 51605 OX=1354251 GN=queC PE=3 SV=1
MKRAVVVFSGGQDSTTCLIQALQQYDEVHCVTFDYGQRHRAEIDVARELALKLGARAHKVLDVTLLNELAVSSLTRDSIPVPGYNPEEKGIPSTFVPGRNILFLTLTAIYAYQVEAEAVITGVCETDFSGYPDCRDEFVKALNHAVSLGMARDIRFETPLMWLDKAETWALADYWQQLGLVRNETLTCYNGIQGDGCGECAACNLRANGLNHYLADKPAVMAAMKKKTGLK

SEQ ID NO: 36903 - protein, 231 aa, Buttiauxella gaviniae
  misc_feature (1)..(231): tr|A0A1B7HUF7|A0A1B7HUF7_9ENTR 7-cyano-7-deazaguanine s ynthase OS=Buttiauxella gaviniae ATCC 51604 OX=1354253 GN=queC PE=3 SV=1
MKRAVVVFSGGQDSTTCLIQALHQYDEVHCVTFDYGQRHRAEIDVARELALKLGARAHKVLDVTLLNELAVSSLTRDSIPVPGYDPEEKGIPSTFVPGRNILFLTLTAIYAYQVEAEAIITGVCETDFSGYPDCRDEFVKALNHAVSLGMARDIRFETPLMWLDKAETWALADYWQQLDLVRSGTLTCYNGIKGDGCGECAACNLRSNGLNHFLADKPGVMAAMKKKTGLK

SEQ ID NO: 36904 - protein, 231 aa, Buttiauxella izardii
  misc_feature (1)..(231): tr|A0A3A5JL98|A0A3A5JL98_9ENTR 7-cyano-7-deazaguanine s ynthase OS=Buttiauxella izardii OX=82991 GN=queC PE=3 S V=1
MKRAVVVFSGGQDSTTCLIQALQQYDEVHCVTFDYGQRHRAEIDVARELSLKLGARAHKVLDVTLLNELAVSSLTRDSIPVPGYDPEEKGIPSTFVPGRNILFLTLTAIYAYQVEAEAVITGVCETDFSGYPDCRDEFVKALNHAVSLGMGRDVRFETPLMWLDKAETWALADYWQQLDLVRNDTLTCYNGIQGDGCGECAACNLRANGLNHYLADKPTVMAAMKKKTGLK

SEQ ID NO: 36905 - protein, 231 aa, Buttiauxella noackiae
  misc_feature (1)..(231): tr|A0A1B7I1M7|A0A1B7I1M7_9ENTR 7-cyano-7-deazaguanine s ynthase OS=Buttiauxella noackiae ATCC 51607 OX=1354255 GN=queC PE=3 SV=1
MKRAVVVFSGGQDSTTCLIQALQQYDEVHCVTFDYGQRHRAEIDVARELALKLGARAHKVLDVTLLNELAVSSLTRDSIPVPGYSPEEKGIPSTFVPGRNILFLTLTAIYAYQVEAEAVITGVCETDFSGYPDCRDEFVKALNHAVSLGMARDIRFETPLMWLDKAETWALADYWQQLDLVRSETLTCYNGIKGDGCGECAACNLRANGINHYLADKPGVMAAMKKKTSLK

SEQ ID NO: 36906 - protein, 231 aa, Buttiauxella sp.
  misc_feature (1)..(231): tr|A0A4R8F2B9|A0A4R8F2B9_9ENTR 7-cyano-7-deazaguanine s ynthase OS=Buttiauxella sp. BIGb0552 OX=2485120 GN=queC PE=3 SV=1
MKRAVVVFSGGQDSTTCLIQALQQYDEVHCVTFDYGQRHRAEIDVARELALKLGARAHKVLDVTLLNELAVSSLTRDSIPVPGYDPEEKGIPSTFVPGRNILFLTLTAIYAYQVEAEAIITGVCETDFSGYPDCRDEFVKALNHAVSLGMARDIRFETPLMWLDKAETWALADYWQQLDLVRSETLTCYNGIKGDGCGECAACNLRSNGLNHFLADKPGVMAAMKKKTGLK

SEQ ID NO: 36907 - protein, 231 aa, Buttiauxella sp.
  misc_feature (1)..(231): tr|A0A4P5QF20|A0A4P5QF20_9ENTR 7-cyano-7-deazaguanine s ynthase OS=Buttiauxella sp. A111 OX=2563088 GN=queC PE= 3 SV=1
MKRAVVVFSGGQDSTTCLIQALKQYDEVHCVTFDYGQRHRAEIDVARELALKLGARAHKVLDVTLLNELAVSSLTRDNIPVPHYDPSENGIPSTFVPGRNILFLTLTAIYAYQVEAEAVITGVCETDFSGYPDCRDEFVKALNHAVSLGMGRDVRFETPLMWLDKAETWALADYWLQLDLVRNDTLTCYNGIQGDGCGECAACNLRSNGLNHYLADKPAVMAAMKKKTGLK

SEQ ID NO: 36908 - protein, 231 aa, Buttiauxella warmboldiae
  misc_feature (1)..(231): tr|A0A3N5DSI9|A0A3N5DSI9_9ENTR 7-cyano-7-deazaguanine s ynthase OS=Buttiauxella warmboldiae OX=82993 GN=queC PE =3 SV=1
MKRAVVVFSGGQDSTTCLIQALQQYDEVHCVTFDYGQRHRAEIDVARELALKLGARAHKVLDVTLLNELAVSSLTRDSIPVPGYDPEEKGVPSTFVPGRNILFLTLSAIYAYQVEAEAVITGVCETDFSGYPDCRDEFVKALNHAVSLGMARDIRFETPLMWLDKAETWALADYWQQLDRVRKETLTCYNGIQGDGCGECAACNLRANGLNHYLADKAAVMATMKKKTGLK

SEQ ID NO: 36909 - protein, 229 aa, Butyricicoccus porcorum
  misc_feature (1)..(229): tr|A0A252F6Z4|A0A252F6Z4_9CLOT 7-cyano-7-deazaguanine s ynthase OS=Butyricicoccus porcorum OX=1945634 GN=queC P E=3 SV=1
MKALVLSSGGVDSTTCLGLAIEKYGKENIVALSITYGQLHTKEVEAAKKIADYYGVEFLTLDLAKIFQYDTKCSLLQGSQNEIPEESYANQLQKTDGKPVSTYVPFRNGLFLSSAASIALSKDCSVIYYGAHSDDAAGNAYPDCSSAFHNAMRDAIYIGSGNQLTIEAPFVHSTKADVVREGLRLGVPYELTWSCYEGGDKPCGKCGTCRDRAAAFAANGVADPALQEG

SEQ ID NO: 36910 - protein, 274 aa, Butyricicoccus pullicaecorum
  misc_feature (1)..(274): tr|R8W6K1|R8W6K1_9CLOT TIGR00268 family protein OS=Buty ricicoccus pullicaecorum 1.2 OX=1203606 GN=HMPREF1526_0 1828 PE=4 SV=1
MKEAWAQSNREQMPFVFYERVIFMTLQAFFTQYPRAAVAFSGGVDSAFVLWAAKKYGCDVRAYYVHSAFQPAFELEDAKKLAEQLDIPMTVIEVDILSVPKAVENGADRCYHCKHALFTTLWERVRADGYTVLLDGTNASDDASDRPGMRALKELSVLSPLRLCGVTKAQVREQSRQADLFTWDKPAYACLATRVPTGTPITQDKLTKIERAEQALAELGFTDFRVRLAGNTARLEMTAAQLAQAAARYEQIIAALGADFDAVVLDLTPRRASR

SEQ ID NO: 36911 - protein, 251 aa, Butyricicoccus pullicaecorum
  misc_feature (1)..(251): tr|A0A1Y4LA24|A0A1Y4LA24_9CLOT TIGR00268 family protein OS=Butyricicoccus pullicaecorum OX=501571 GN=B5F15_138 90 PE=4 SV=1
MTLQAFFTQYPRAAVAFSGGVDSAFVLWAAKKYGCDVRAYYVHSAFQPAFELEDAKKLAEQLDIPMTVIEVDILSVPKAVENGADRCYHCKHALFTTLWERVRADGYTVLLDGTNASDDASDRPGMRALKELSVLSPLRLCGVTKAQVREQSRQADLFTWDKPAYACLATRVPTGTPITQDKLTKIERAEQALAELGFTDFRVRLAGNTARLEMTAAQLAQAAARYEQIIAALGADFDAVVLDLTPRRASR

SEQ ID NO: 36912 - protein, 228 aa, Butyricicoccus sp.
  misc_feature (1)..(228): tr|A0A417HNT7|A0A417HNT7_9CLOT 7-cyano-7-deazaguanine s ynthase OS=Butyricicoccus sp. AM28-25 OX=2292294 GN=que C PE=3 SV=1
MSEKAMVLCSGGVDSTTCLALAIQKHGKENVCALSIYYGQKHVKEIQAAKAVLEYYGIEGTSLDLTPVFAYSDCSLLSHSTEDIPEESYAEQLAQRGGKPVTTYVPFRNGLFLSTAASVALSKNCSVIYYGAHHDDAAGNAYPDCSEEFVNAMNHSIVLGSGGDVRIEAPFVRWNKAQIVAEGLRLQVPYQLTWSCYEGGDKPCGKCGTCLDRIRAFEANGVTDPAMR

SEQ ID NO: 36913 - protein, 228 aa, Butyricicoccus sp.
  misc_feature (1)..(228): tr|A0A396MIS0|A0A396MIS0_9CLOT 7-cyano-7-deazaguanine s ynthase OS=Butyricicoccus sp. AF10-3 OX=2292196 GN=queC PE=3 SV=1
MSEKAMVLCSGGVDSTTCLALAIEKHGKENVCALSIYYGQKHVKEIQAAKAVLEYYGIEGTSLDLTPVFAYSDCSLLSHSTEDIPEESYAEQLAQRGGKPVTTYVPFRNGLFLSAAASVALSKNCSVIYYGAHHDDAAGNAYPDCSEEFVNAMNHSIVLGSGGDVRIEAPFVRWNKAQIVAEGLRLQVPYQLTWSCYEGGDKPCGKCGTCLDRIRAFEANGVTDPAMR

SEQ ID NO: 36914 - protein, 223 aa, Butyricimonas faecalis
  misc_feature (1)..(223): tr|A0A3S9VQ83|A0A3S9VQ83_9BACT 7-cyano-7-deazaguanine s ynthase OS=Butyricimonas faecalis OX=2093856 GN=queC PE =3 SV=1
MKKALVLLSGGLDSTTALYVAKEQGFDELYAITFEYGQKHDKEIKAAKAVAKAAGVKEHKFVKIMLNQWDGCSLTDEKMDIHDGDINRTTIPDTYVPARNMVFLSVAASYADALDITDIFIGVSEVDYSGYVDCREEFIRSMEQTINLGTVLGAEKKQKITLHAPFMHMTKADEVRLGDRLGVDYSLTWTCYRGNEKPCGTCDSCLLRAKAFEEAGIKDPLVN

SEQ ID NO: 36915 - protein, 224 aa, Butyricimonas sp.
  misc_feature (1)..(224): tr|A0A3D2DYQ3|A0A3D2DYQ3_9BACT 7-cyano-7-deazaguanine s ynthase OS=Butyricimonas sp. OX=1969738 GN=queC PE=3 SV =1
MMKKALVLLSGGLDSTTALYVAREQGFDELYAITFEYGQKHDKEIKAAKAVAKAAGVKEHKFVKIMLNQWDGCSLTDEKMDIHDGDINRTTIPDTYVPARNMVFLSVAASYADALDITDIFIGVSEVDYSGYVDCREEFIRSMEQTINLGTVLGAEKKQKITLHAPFMHMTKADEVRLGNRLGVDYSLTWTCYRGGKKPCGTCDSCLLRAKAFEEAGIKDPLSY

SEQ ID NO: 36916 - protein, 225 aa, Butyricimonas sp.
  misc_feature (1)..(225): tr|A0A1Y3VYD8|A0A1Y3VYD8_9BACT 7-cyano-7-deazaguanine s ynthase OS=Butyricimonas sp. An62 OX=1965649 GN=queC PE =3 SV=1
MKKALVLLSGGLDSTTALYVAQEQGFDELYAITFEYGQKHDKEIKAAKAVAKAAGVKEHKFVKIMLNQWDGCSLTDEKMDIHDGDINRTTIPDTYVPARNMVFLSVAASYADALDITDIFIGVSEVDYSGYVDCREEFIRSMEQTINLGTVLGAEKKQKITLHAPFMHMTKADEVHLGNRLGVDYSLTWTCYRGDEKPCGTCDSCLLRAKAFEEAGIKDPLFNGK

SEQ ID NO: 36917 - protein, 223 aa, Butyricimonas synergistica
  misc_feature (1)..(223): tr|A0A1U7LAU9|A0A1U7LAU9_9BACT 7-cyano-7-deazaguanine s ynthase OS=Butyricimonas synergistica OX=544644 GN=queC PE=3 SV=1
MKKALVLLSGGLDSTTALYVAKEQGFNELYAITFEYGQKHDKEIKAAKAVAKAAGVKEHKFVKIMLNQWDGCSLTDEKMDIHDGDINRTTIPDTYVPARNMVFLSVAASYADALDITDIFIGVSEVDYSGYVDCREEFIRSMEQTINLGTVLGAEKKQKITLHAPFMHMTKADEVRLGNRLGVDYSLTWTCYRGDEKPCGTCDSCLLRAKAFEEAGIKDPLSN

SEQ ID NO: 36918 - protein, 225 aa, Butyricimonas virosa
  misc_feature (1)..(225): tr|A0A412X6C5|A0A412X6C5_9BACT 7-cyano-7-deazaguanine s ynthase OS=Butyricimonas virosa OX=544645 GN=queC PE=3 SV=1
MKKALVLLSGGLDSTTALYVAQEQGFDELYAITFEYGQKHDKEIKAAKAVAKAAGVKEHKFVKIMLNQWDGSSLTDEKMDIHDGDINRTTIPDTYVPARNMVFLSVAASYADALDITDIFIGVSEVDYSGYVDCREEFIRSMEQTINLGTVLGAEKKQKITLHAPFMHMTKADEVRLGNRLGVDYSLTWTCYRGDKKPCGTCDSCLLRAKAFEEAGLKDPLFNGK

SEQ ID NO: 36919 - protein, 224 aa, Butyricimonas virosa; identical to SEQ ID NO: 36915
  misc_feature (1)..(224): tr|A0A415QRV6|A0A415QRV6_9BACT 7-cyano-7-deazaguanine s ynthase OS=Butyricimonas virosa OX=544645 GN=queC PE=3 SV=1

SEQ ID NO: 36920 - protein, 227 aa, Butyrivibrio crossotus
  misc_feature (1)..(227): tr|R5LHC1|R5LHC1_9FIRM 7-cyano-7-deazaguanine synthase OS=Butyrivibrio crossotus CAG:259 OX=1263062 GN=queC PE =3 SV=1
MRALVLSSGGVDSTTCLGMAVDKYGKENVVSLSVFYGQKHTKELEAATKVAKYYGVEHMAIDLSLIFKDSDCSLLTHSTEEIPHESYAKQLEKTDGKPVSTYVPFRNGLFLATAASIALSKKCDVIYYGAHADDAAGNAYPDCSEVFYNAMNTAVYEGSGRQLKIEAPLVTWNKATVVKKGLELKVPYELTWSCYEGGDKPCMKCGTCIDRMKAFEANNVKDPVLGE

SEQ ID NO: 36921 - protein, 227 aa, Butyrivibrio crossotus
  misc_feature (1)..(227): tr|D4RWH3|D4RWH3_9FIRM 7-cyano-7-deazaguanine synthase OS=Butyrivibrio crossotus DSM 2876 OX=511680 GN=queC PE =3 SV=1
MRALVLSSGGVDSTTCLGMAVDKYGKENVVSLSVFYGQKHTKELEAATKVAKYYGVEHMAIDLSLIFKDSDCSLLSHSTEKIPHESYAEQLEKTDGKPVSTYVPFRNGLFLATAASIALSKKCDVIYYGAHADDAAGNAYPDCSEVFYNAMNTAVYEGSGRQLKIEAPLVTWNKATVVKKGLELKVPYELTWSCYEGGDKPCMKCGTCIDRMKAFEANNVKDPVLGE

SEQ ID NO: 36922 - protein, 228 aa, Butyrivibrio fibrisolvens
  misc_feature (1)..(228): tr|D4IW44|D4IW44_BUTFI 7-cyano-7-deazaguanine synthase OS=Butyrivibrio fibrisolvens 16/4 OX=657324 GN=queC PE= 3 SV=1
MKALVLVSGGVDSTTCLGMAVKEYGSENVVGLSIFYGQRHDKEIKAADAVCEHYNVEHITLDLSTMFQFSDCTLLQHSDGEIPEESYAEQLAKTDGKPVSTYVPFRNGLFLSSASAIALSKGCSKIYYGAHSDDAAGNAYPDCSEAFNNAMNTAIYEGSGKQLQIEAPFINLTKAQVVKKGLEIGVPYELTWSCYEGHEKACGKCGTCIDRKAAFELNGTTDPIAYEN

SEQ ID NO: 36923 - protein, 227 aa, Butyrivibrio sp.
  misc_feature (1)..(227): tr|A0A3C0J6S6|A0A3C0J6S6_9FIRM 7-cyano-7-deazaguanine s ynthase OS=Butyrivibrio sp. OX=28121 GN=queC PE=3 SV=1
MRALVLSSGGVDSTTCLGMAVDKYGKENVVSLSVFYGQKHTKELEAATKVAKYYGVEHMAIDLSLIFKDSDCSLLSHSTEEIPHESYAKQLEKTDGKPVSTYVPFRNGLFLATAASIALSKKCDVIYYGAHADDAAGNAYPDCSEVFYNAMNTAVYEGSGRQLKIEAPLVTWNKATVVKKGLELKVPYELTWSCYEGGDKPCMKCGTCIDRMKAFEANNVKDPVLGE

SEQ ID NO: 36924 - protein, 227 aa, Butyrivibrio sp.; identical to SEQ ID NO: 36920
  misc_feature (1)..(227): tr|A0A350RPY4|A0A350RPY4_9FIRM 7-cyano-7-deazaguanine s ynthase OS=Butyrivibrio sp. OX=28121 GN=queC PE=3 SV=1

SEQ ID NO: 36925 - protein, 232 aa, Bythopirellula goksoyri
  misc_feature (1)..(232): tr|A0A5B9QHZ2|A0A5B9QHZ2_9PLAN 7-cyano-7-deazaguanine s ynthase OS=Bythopirellula goksoyri OX=1400387 GN=queC P E=3 SV=1
MTDSPKHAVVLLSGGLDSATTAAIALSQGFQVHALSIDYGQRHRFELTSARRVADSLKIQDHKLVSIDLASLGGSALTADIEVPQGRSGEEMSVGIPVTYVPARNTVMLSLALGFAEVLGAADIFVGVNAVDYSGYPDCRPEFIVAFEQLANLATKAGVEGATKFSIHAPLIQMTKAEIIRQGMELSVDYGLTHTCYSPNEAGLACGKCDACQLRKQGFADAGLEDPIEYQV

SEQ ID NO: 36926 - protein, 244 aa, Caballeronia arationis
  misc_feature (1)..(244): tr|A0A158CGV8|A0A158CGV8_9BURK 7-cyano-7-deazaguanine s ynthase OS=Caballeronia arationis OX=1777142 GN=queC PE =3 SV=1
MTRTDAKDSALVLFSGGQDSATCLAWALERYRTVETLGFDYGQRHRVELECRDGFRAAIAREFPQWVDRLGDDHMIDLSVLGAISETAMTREIEIEATTNGLPNTFVPGRNLMFMTIAAAIAYRRGLKVLVGGMCETDFSGYPDCRDDTMKALQVALNLGMETRYALETPLMWLDKADTWRLAETLGGEKLVELVRVETHTCYVGERAELHEWGFGCGQCPACKLRKRGFEAYRAGEQVTTEPV

SEQ ID NO: 36927 - protein, 244 aa, Caballeronia arvi
  misc_feature (1)..(244): tr|A0A158HFG5|A0A158HFG5_9BURK 7-cyano-7-deazaguanine s ynthase OS=Caballeronia arvi OX=1777135 GN=queC PE=3 SV =1
MTRIDAKDSALVLFSGGQDSATCLAWALERYTTVETLGFDYGQRHRVELECRDGFRAAIAREFPQWAERLGEDHMIDLSVLGAISDTAMTREIEIQATASGLPNTFVPGRNLLFMTIAAAVAYRRGLKVLVGGMCETDFSGYPDCRDDTMKALQVALNLGMETRYALETPLMWLDKADTWRLAETLGGDALVELIRIETHTCYVGERAELHDWGFGCGQCPACKLRKRGYEAYRAGEQVDVAPV

SEQ ID NO: 36928 - protein, 244 aa, Caballeronia calidae
  misc_feature (1)..(244): tr|A0A157Z6W2|A0A157Z6W2_9BURK 7-cyano-7-deazaguanine s ynthase OS=Caballeronia calidae OX=1777139 GN=queC PE=3 SV=1
MTRIDAKDSALVMFSGGQDSATCLAWALERYKTVETLGFDYGQRHRVELECRDGFRAAITRAFPQWAERLGEDHTIDLSVLGAISDTAMTREIEIQSTASGLPNTFVPGRNLLFMTIAAAVAYRRGLKVLVGGMCETDFSGYPDCRDDTMKALQVALNLGMETRYALETPLMWLDKADTWRLAETLGGEALVELIRVETHTCYVGERAELHDWGFGCGQCPACKLRKRGYEAYRAGEQVTTAPV

SEQ ID NO: 36929 - protein, 244 aa, Caballeronia catudaia
  misc_feature (1)..(244): tr|A0A157Z4M2|A0A157Z4M2_9BURK 7-cyano-7-deazaguanine s ynthase OS=Caballeronia catudaia OX=1777136 GN=queC PE= 3 SV=1
MTRIDAKDSALVLFSGGQDSATCLAWALERYRTVETLGFDYGQRHRVELECRDGFRAAIAREFPHWAERLGEDHMIDLSVLSAISDTAMTREIEIQATASGLPNTFVPGRNLLFVTIAAAVAYRRGLKVLVGGMCETDFSGYPDCRDDTMKALQVALNLGMETRYALETPLMWLDKADTWRLAETLGGDALVELIRVETHTCYVGERAELHDWGFGCSQCPACKLRKRGYEAYRAGEQVDVAPV

SEQ ID NO: 36930 - protein, 244 aa, Caballeronia choica
  misc_feature (1)..(244): tr|A0A158FH06|A0A158FH06_9BURK 7-cyano-7-deazaguanine s ynthase OS=Caballeronia choica OX=326476 GN=queC PE=3 S V=1
MTRIDAKDSALVLFSGGQDSATCLAWALERYRTVETLGFDYGQRHRVELECREGFRAAVTREFPQWAERLGEDHMIDLSLLGAISDTAMTREIEIEATASGLPNTFVPGRNLMFMTIAAAIAYRRGLKVLVGGMCETDFSGYPDCRDDTMKALQVALNLGMQTRYVLETPLMWLDKADTWRLAEQLGGEPLVELIRIETHTCYVGERAELHDWGFGCGQCPACKLRKRGFEAYRAGEQVTTEPV

SEQ ID NO: 36931 - protein, 244 aa, Caballeronia cordobensis
  misc_feature (1)..(244): tr|A0A158F1U2|A0A158F1U2_9BURK 7-cyano-7-deazaguanine s ynthase OS=Caballeronia cordobensis OX=1353886 GN=queC PE=3 SV=1
MTRIDAKDSALVLFSGGQDSATCLAWALERYRTVETLGFDYGQRHRVELECRDGFRAAIAREFPRWAERLGEDHMIDLSVLGAISDTAMTREIEIQATASGLPNTFVPGRNLLFMTIAAALAYRRGLKVLVGGMCETDFSGYPDCRDDTMKALQVALNLGMETRYALETPLMWLDKADTWRLAETLGGEALVELVRVETHTCYVGERAELHDWGFGCGQCPACKLRKRGFEAYRAGEQVDVAPV

SEQ ID NO: 36932 - protein, 244 aa, Caballeronia fortuita
  misc_feature (1)..(244): tr|A0A157Z6M0|A0A157Z6M0_9BURK 7-cyano-7-deazaguanine s ynthase OS=Caballeronia fortuita OX=1777138 GN=queC PE= 3 SV=1
MTRIDAKDSALVLFSGGQDSATCLAWALERYKTVETLGFDYGQRHRVELECRDGFRNAIVREFPQWAGRLGEDHMIDLSVLGAISDTAMTREIEIQATANGLPNTFVPGRNLLFMTIAAAVAYRRGLKVLVGGMCETDFSGYPDCRDDTMKALQVALNLGMETRYALETPLMWLDKADTWRLAETLGGDALVELVRIETHTCYVGERAELHDWGFGCGQCPACKLRKRGYEAYRAGEQVDTAPV

SEQ ID NO: 36933 - protein, 244 aa, Caballeronia glathei
  misc_feature (1)..(244): tr|A0A069PSR0|A0A069PSR0_9BURK 7-cyano-7-deazaguanine s ynthase OS=Caballeronia glathei OX=60547 GN=queC PE=3 S V=1
MTRTDAKDSALVLFSGGQDSATCLAWALERYRTVETLGFDYGQRHRVELECRDGFRAAVSRAFPQWAGRLGEDHMIDLSVLGAISDTAMTREIEIEATANGLPNTFVPGRNLMFMTIAAAIAYRRGLKVLVGGMCETDFSGYPDCRDDTMKALQVTLNLGMQTRYSLETPLMWLDKADTWRLAEQLGGDTLVELIRVETHTCYVGERAELHEWGFGCGQCPACKLRKRGFEAYRAGEQVTTEPV

SEQ ID NO: 36934 - protein, 234 aa, Caballeronia glebae
  misc_feature (1)..(234): tr|A0A158CZU7|A0A158CZU7_9BURK 7-cyano-7-deazaguanine s ynthase OS=Caballeronia glebae OX=1777143 GN=queC PE=3 SV=1
MKTRAMVLFSGGQDSTTCLAWALDRYEHVETVGFDYGQRHSVELECRPKVLSRLREQFPDWGKKLGDDHMLDLSILGQISDTALTQGKAIEMEKSGLPNTFVPGRNLLFFMLAAAVAYRRGLQVLVGGMCETDYSGYPDCRDSTLKALQVAIALGMDQPLVIETPLMWIDKAQTWEMASQLGGIGLVDLIRTETHTCYVGDHTTQHDWGYGCGKCPACELRQKGYQSYLATEAP

SEQ ID NO: 36935 - protein, 244 aa, Caballeronia glebae
  misc_feature (1)..(244): tr|A0A157ZQJ1|A0A157ZQJ1_9BURK 7-cyano-7-deazaguanine s ynthase OS=Caballeronia glebae OX=1777143 GN=queC PE=3 SV=1
MTRIDAKDSALVLFSGGQDSATCLAWALERYKTVETLGFDYGQRHRVELECREGFRAAIVREFPQWAERLGEDHTVDLSVLGAISDTAMTREIEIEATANGLPNTFVPGRNLLFMTIAAAVAYRRGLKVLVGGMCETDFSGYPDCRDDTMKALQVALNLGMETRYALETPLMWLDKADTWRLAETLGGEALVELVRVETHTCYVGERAELHDWGFGCGQCPACKLRKRGYEAYRAGEQVDTAPV

SEQ ID NO: 36936 - protein, 244 aa, Caballeronia humi
  misc_feature (1)..(244): tr|A0A158GED5|A0A158GED5_9BURK 7-cyano-7-deazaguanine s ynthase OS=Caballeronia humi OX=326474 GN=queC PE=3 SV= 1
MTRIDAKDSALVLFSGGQDSATCLAWALERYTTVETLGFDYGQRHRVELECRGGFRAAVVREFPQWAGRLGEDHMIDLSVLGAISDTAMTREIEIKATASGLPNTFVPGRNLMFMTIAAAVAYRRGLKVLVGGMCETDFSGYPDCRDDTMKALQVALNLGMETRYALETPLMWLDKADTWRLAEQLGGETLVELIRVETHTCYVGERAELHEWGFGCGQCPACKLRKRGFEAYRAGEQVTTEPV

SEQ ID NO: 36937 - protein, 244 aa, Caballeronia hypogeia
  misc_feature (1)..(244): tr|A0A157Z7T4|A0A157Z7T4_9BURK 7-cyano-7-deazaguanine s ynthase OS=Caballeronia hypogeia OX=1777140 GN=queC PE= 3 SV=1
MTRIDAKDSALVLFSGGQDSATCLAWALERYRTVETLGFDYGQRHRVELECRDGFRAAVSREFPHWADRLGEDHMIDLSVLGAISDTAMTREIEIQATASGLPNTFVPGRNLLFMTIAAAVAYRRGLKVLVGGMCETDFSGYPDCRDDTMKALQVALNLGMETRYALETPLMWLDKADTWRLAETLGGEALVELIRVETHTCYVGERAELHEWGFGCGQCPACKLRKRGYEAYRAGEQVDTAPV

SEQ ID NO: 36938 - protein, 244 aa, Caballeronia jiangsuensis
  misc_feature (1)..(244): tr|A0A038GLX0|A0A038GLX0_9BURK 7-cyano-7-deazaguanine s ynthase OS=Caballeronia jiangsuensis OX=1458357 GN=queC PE=3 SV=1
MTRIDAKDSALVLFSGGQDSATCLAWALERYKTVETLGFDYGQRHRVELECRDGFRAAIAREFPQWTERLGEDHMIDLSVLGAISDTAMTREIEIQANASGLPNTFVPGRNLLFVTIAAAVAYRRGLKVIVGGMCETDFSGYPDCRDDTMKALQVALNLGMETRYALETPLMWLDKADTWRLAETLGGESLVELIRVETHTCYVGERAELHDWGFGCGQCPACKLRKRGYEAYRAGEQVTIAPV

SEQ ID NO: 36939 - protein, 260 aa, Caballeronia megalochromosomata
  misc_feature (1)..(260): tr|A0A149RNE9|A0A149RNE9_9BURK 7-cyano-7-deazaguanine s ynthase OS=Caballeronia megalochromosomata OX=1399969 G N=queC PE=3 SV=1
MRRATPISNTEYGVFTVTRIDAKDSALVLFSGGQDSATCLAWALERYKTVETLGFDYGQRHRVELECRDGFRAAIVREFPQWAERLGEDHMIDLSVLGAISDTAMTREIEIQASASGLPNTFVPGRNLLFMTIAAAVAYRRGLKVLVGGMCETDFSGYPDCRDDTMKALQVALNLGMETRYALETPLMWLDKSDTWRLAETLGGESLVELIRVETHTCYVGERAELNDWGFGCGQCPACKLRKRGYEAYRAGEQVTIAPV

SEQ ID NO: 36940 - protein, 244 aa, Caballeronia mineralivorans
  misc_feature (1)..(244): tr|A0A0J1CQT4|A0A0J1CQT4_9BURK 7-cyano-7-deazaguanine s ynthase OS=Caballeronia mineralivorans PML1(12) OX=9086 27 GN=queC PE=3 SV=1
MTRTDAKDSALVLFSGGQDSATCLAWALDRYTSVETLGFDYGQRHRVELECREGFRTSLKQQFPQWAERLGEDHMIDLSVLGAISDTAMTREIEIEASASGLPNTFVPGRNLMFMTIAAAIAYRRGLTVLVGGMCETDFSGYPDCRDDTMKSLQITLNLGMDSRFLLETPLMWLDKADTWRLAEQLGGEALVELVRVETHTCYVGERAELHEWGFGCGQCPACKLRKRGYEAYKSGEQVTTEPV

SEQ ID NO: 36941 - protein, 206 aa, Caballeronia pedi
  misc_feature (1)..(206): tr|A0A157ZUB2|A0A157ZUB2_9BURK 7-cyano-7-deazaguanine s ynthase OS=Caballeronia pedi OX=1777141 GN=queC PE=3 SV =1
MKKVLLLASGGLDSTTVGYQLASSGIAVVPIFFDYGQHCVEMEWNRVNEVLPSDMIRPERFNISDIFKGSHSRLIREADLWTEEVKDDDLYIPYRTMLFFAAAAARAQTVGILDVYTGFINSNHAKEIDCTAAFMNDLDGLTSNIGPVRFHSPFRYSSKADVARAAVELGVPLGRTYSCQAASQFPCGACPNCVERLKALREAKLV

SEQ ID NO: 36942 - protein, 244 aa, Caballeronia pedi
  misc_feature (1)..(244): tr|A0A158A2R4|A0A158A2R4_9BURK 7-cyano-7-deazaguanine s ynthase OS=Caballeronia pedi OX=1777141 GN=queC PE=3 SV =1
MTRIDAKDSALVLFSGGQDSATCLAWALERYKTVETLGFDYGQRHRVELECRDGFRAAVAREFPQWAERLGEDHMIDLSVLGAISDTAMTREIEIQATANGLPNTFVPGRNLLFVTIAAAVAYRRGLKVLVGGMCETDFSGYPDCRDDTMKALQVALNLGMETRYAVETPLMWLDKADTWRLAETLGGEALVELIRIETHTCYVGERAELHDWGFGCGQCPACKLRKRGYEAYRAGEQVTTAPV

SEQ ID NO: 36943 - protein, 244 aa, Caballeronia peredens
  misc_feature (1)..(244): tr|A0A158G0G3|A0A158G0G3_9BURK 7-cyano-7-deazaguanine s ynthase OS=Caballeronia peredens OX=1777132 GN=queC PE= 3 SV=1
MTRIDAKDSALVLFSGGQDSATCLAWALERFRTVETLGFDYGQRHRVELECRDGFRAAVVREFPQWAARLGEDHMIDLSVLGAISDTAMTREIEIQATASGLPNTFVPGRNLLFMTIAAALAYRRGLKVLVGGMCETDFSGYPDCRDDTMKALQVALNLGMETRYALETPLMWLDKADTWRLAETLGGETLVELIRVETHTCYVGERAELNEWGFGCGQCPACKLRKRGYEAYRAGEQVTTAPV

SEQ ID NO: 36944 - protein, 244 aa, Caballeronia ptereochthonis
  misc_feature (1)..(244): tr|A0A158CTR3|A0A158CTR3_9BURK 7-cyano-7-deazaguanine s ynthase OS=Caballeronia ptereochthonis OX=1777144 GN=qu eC PE=3 SV=1
MTRIDAKDSALVLFSGGQDSATCLAWALERYKTVETLGFDYGQRHRVELECRDGFRAAIASAFPQWAERLGEDHMIDLSILGAISDTAMTREIEIQNTASGLPNTFVPGRNLLFMTIAAAVAYRRGLKVLVGGMCETDFSGYPDCRDDTMKALQVALNLGMETRYALETPLMWLDKADTWRLAETLGGEALVELIRVETHTCYVGERAELHDWGFGCGQCPACKLRKRGYEAYRAGEQVTTAPV

SEQ ID NO: 36945 - protein, 425 aa, Caballeronia sordidicola
  misc_feature (1)..(425): tr|A0A158EPR1|A0A158EPR1_9BURK 7-cyano-7-deazaguanine s ynthase OS=Caballeronia sordidicola OX=196367 GN=queC P E=4 SV=1
MKITCALSDFDFSGIASDLDVVLYGNSGNPMRGSVGAALKQAIVREKVAPAARAWDLLSLALAVVSSDLAGHRDRSPDGWTREFDLTVSVADAPFWNDNAATLQQLLAYLSTDRWTLRFVEGGIFPQPERQPEHPSEDCIVLLSGGLDSYIGAIDLVEQGRRPLAVSQMVRGDGEKQVAFAAEIGGGLRHFQVNHNADVPDAENPPSQRARSIIFLAYGVLMATTLARYHAGDEVTLYVCENGFIALNPPLTGGRLGSLSTRTTHPIVFSLLQQVLDAAGLRVRIVNPYRFKTKGEMLEECLGQPLLAAHAYQTTSCGRFKQFGYKHCGRCVPCLVRRAAFHAWNGGDTTHYVYDNLALDDDEHAGFDDVRSALIGIAERREVGTNRWLGSTLSSSLVTDKPSLAAVVERGLAEIESLMLALGVR

SEQ ID NO: 36946 - protein, 244 aa, Caballeronia sordidicola
  misc_feature (1)..(244): tr|A0A242MX21|A0A242MX21_9BURK 7-cyano-7-deazaguanine s ynthase OS=Caballeronia sordidicola OX=196367 GN=queC P E=3 SV=1
MTRTDAKDSALVLFSGGQDSATCLAWALDRFTTVETLGFDYGQRHRVELECREGFRASLKKQFPKWADRLGEDHMIDLSVLGAISDTAMTREIEIEATANGLPNTFVPGRNLMFMTIAAAIAYRRGLKVLVGGMCETDFSGYPDCRDDTMKALQVALNLGMDSRFLLETPLMWLDKADTWRLAEVLGGESLVELVRVETHTCYVGERAELHAWGFGCGQCPACKLRKRGFEAYQSGEQVTTEPV

SEQ ID NO: 36947 - protein, 244 aa, Caballeronia telluris
  misc_feature (1)..(244): tr|A0A158JAI6|A0A158JAI6_9BURK 7-cyano-7-deazaguanine s ynthase OS=Caballeronia telluris OX=326475 GN=queC PE=3 SV=1
MTRTDAKDSALVLFSGGQDSATCLAWALERYKTVETLGFDYGQRHRVELECRDGFRAAVMREFPQWADRLGDDHMIDLSVLGAISETAMTREIEIEATANGLPNTFVPGRNLMFMTIAAAVAYRRGLKVLVGGMCETDFSGYPDCRDDTMKALQVALNLGMETRYALETPLMWLDKADTWRLAETLGGEKLVELVRVETHTCYVGERAELHEWGFGCGQCPACKLRKRGFEAYRAGEQVTTEPV

SEQ ID NO: 36948 - protein, 244 aa, Caballeronia temeraria
  misc_feature (1)..(244): tr|A0A157ZI40|A0A157ZI40_9BURK 7-cyano-7-deazaguanine s ynthase OS=Caballeronia temeraria OX=1777137 GN=queC PE =3 SV=1
MTRIDAKDSALVLFSGGQDSATCLAWALERYKTVETLGFDYGQRHRVELECRDGFRAAIVREFPQWAERLGEDHMIDLSVLGAISDTAMTREIEIQATANGLPNTFVPGRNLLFMTIAAAVAYRRGLKVLVGGMCETDFSGYPDCRDDTMKALQVALNLGMETRYALETPLMWLDKADTWRLAETLGGEALVELVRIETHTCYVGERAELHDWGFGCGQCPACKLRKRGYEAYRAGEQVDTAPV

SEQ ID NO: 36949 - protein, 244 aa, Caballeronia terrestris
  misc_feature (1)..(244): tr|A0A158JEL9|A0A158JEL9_9BURK 7-cyano-7-deazaguanine s ynthase OS=Caballeronia terrestris OX=1226301 GN=queC P E=3 SV=1
MTRIDAKDSALVLFSGGQDSATCLAWALERYTTVETLGFDYGQRHRVELECRGGFRAAVAQAFPHWAGRLGEDHMIDLSVLGAISDTAMTREIEIKATASGLPNTFVPGRNLMFMTIAAAVAYRRGLKVLVGGMCETDFSGYPDCRDDTMKALQVALNLGMETRYALETPLMWLDKADTWRLAEHLGGETLVELIRVETHTCYVGERAELHEWGFGCGQCPACKLRKRGFEAYRAGEQVTTEPV

SEQ ID NO: 36950 - protein, 244 aa, Caballeronia turbans
  misc_feature (1)..(244): tr|A0A158FHI6|A0A158FHI6_9BURK 7-cyano-7-deazaguanine s ynthase OS=Caballeronia turbans OX=1777134 GN=queC PE=3 SV=1
MTRIDAKDSALVLFSGGQDSATCLAWALDRYKTVETLGFDYGQRHRVELECRDGFRAAIAREFPQWTERLGEDHMIDLSVLGAISDTAMTREIEIQANASGLPNTFVPGRNLLFMTIAAAVAYRRGLKVLVGGMCETDFSGYPDCRDDTMKALQVALNLGMETRYALETPLMWLDKADTWRLAKTLGGEPLVELIRVETHTCYVGERAELHDWGFGCGQCPACKLRKRGYEAYRAGEQVTTAPV

SEQ ID NO: 36951 - protein, 425 aa, Caballeronia udeis
  misc_feature (1)..(425): tr|A0A158IYD1|A0A158IYD1_9BURK 7-cyano-7-deazaguanine s ynthase OS=Caballeronia udeis OX=1232866 GN=queC PE=4 S V=1
MRVMCLPAELIPEQLVDDTDYFSLYANTGRQNVGRISSGWVSSLARSGFAPPSAVWDFVTISLAVAAADIACSRQGSADGWTRMIELEVALHEPERWIAQKPSLERTFRFLTGDFWTLNFRDGGVAPPSTTAPRQTDADCVALLSGGLDSLVGGIELAATGRTPLFVSQMAKGDSDTQRLFARHLGGGERHFQWNHRITVPHVTERSTRGRSIVFLAFAILASTTLPGWQTGGTTALVIPENGFISLNIALNAGRFGSYSTKTTHPTFLEGIQRVVDEVGLRVRLVRPYQLVTKGELLVNCSNGLLLHELAGHSTSCGRFGYYNYTHCGRCVPCLVRRASFLRAGITDPTSRYIFPDLATAGRERGPNDVGSVATAYVNYSEKGVDRLIGGALSFAPPGERDSYSAVFARGMDELGELLRVHNVL

SEQ ID NO: 36952 - protein, 244 aa, Caballeronia udeis
  misc_feature (1)..(244): tr|A0A3M0V654|A0A3M0V654_9BURK 7-cyano-7-deazaguanine s ynthase OS=Caballeronia udeis OX=1232866 GN=queC PE=3 S V=1
MTRTDAKDSALVLFSGGQDSATCLAWALDRYTSVETLGFDYGQRHRVELECREGFRTSLKQQFPHWAERLGEDHMIDLSVLGAISDTAMTREIEIEASANGLPNTFVPGRNLMFMTIAAAIAYRRGLKVLVGGMCETDFSGYPDCRDDTMKSLQITLNLGMDSRFLLETPLMWLDKADTWRLAEQLGGEALVELVRVETHTCYVGERAELHDWGFGCGQCPACKLRKRGYEAYQSGEQVTTEPV

SEQ ID NO: 36953 - protein, 228 aa, Caldalkalibacillus thermarum
  misc_feature (1)..(228): tr|F5L556|F5L556_CALTT 7-cyano-7-deazaguanine synthase OS=Caldalkalibacillus thermarum (strain TA2.A1) OX=9860 75 GN=queC PE=3 SV=1
MSKKAVIVLSGGLDSTTCMGIAHDQGYALYPLTFHYGQRHSREVEQAKKIAQYYQAADHRIINIRFLRDIGGSALTDDAIDVPDQGEDGSIPVTYVPARNLIFLSLAAAYAEVVGAEKIMIGVSAVDYSGYPDCRPEFIESLSRTIQLGTKAGVEGKAISIDAPLVHLSKAETIAWGMKLGVPYHLTTSCYKGGEVACGQCDSCRLRIKGFKEAGYRDPLPYAISIDW

SEQ ID NO: 36954 - protein, 246 aa, Caldanaerobius fijiensis
  misc_feature (1)..(246): tr|A0A1M4ZNZ0|A0A1M4ZNZ0_9THEO 7-cyano-7-deazaguanine s ynthase OS=Caldanaerobius fijiensis DSM 17918 OX=112125 6 GN=queC PE=3 SV=1
MSDFSFNCINTYGILGFEVFRVKKAVVLLSGGLDSTTCMSVAYRDGYELYPLSFDYGQRHSRELQSAIKVAEYYGVKSHKIIRMDNVGGSALTDYSIDVPDYKGDSTEIPVTYVPARNIIFLSYAVGYAEVVGAEAIYIGVSSVDYSGYPDCRPEFIEAFQRVIDVGTKAGVEGRPIKIITPLINLSKAETIKLAYQNGAPLHLTTTCYKGGEKACGVCDSCRLRLKGFKEAGLKDPLEYEIEIDE

SEQ ID NO: 36955 - protein, 216 aa, Calderihabitans maritimus
  misc_feature (1)..(216): tr|A0A1Z5HXU5|A0A1Z5HXU5_9THEO 7-cyano-7-deazaguanine s ynthase OS=Calderihabitans maritimus OX=1246530 GN=queC PE=3 SV=1
MSAVVLLSGGLDSAVSMAMALEEMKVKKALTFDYGQRAALREIESARALCRHYGVSHQVIELKWLAALGGSALVDRSRPVPEVAPEDLEERADETAVQVWVPNRNGLFINIGACFAEALDCSLVVAGFNREEAQSFPDNSAAFVEAANRCLRFSTLNGVTVKSYTQDMSKREIVQMGRKLNLPFEYIWSCYYGGEKMCGRCESCQRLMRALGEKDR

SEQ ID NO: 36956 - protein, 221 aa, Caldicellulosiruptor bescii
  misc_feature (1)..(221): sp|B9MMB0|QUEC_CALBD 7-cyano-7-deazaguanine synthase OS =Caldicellulosiruptor bescii (strain ATCC BAA-1888 / DS M 6725 / Z-1320) OX=521460 GN=queC PE=3 SV=1
MRAVVVLSGGMDSTTLLYDVKSQGYEVFAISFLYGQKHSKELEFAKKTCSLLSIPYKIVDISFFAELAPSALTTPDWNVPEGYYTDSTMKQTVVPNRNMVLLSISAAYAISLGAKKLFYGAHAGDHPIYPDCRKEFVEAMKNALYLADYIGLELEAPYVDMKKEDILRRGLELGVNYSLTWSCYKGGQKACGRCGTCTERIEAFKKVGVKDPIEYEIEIDW

SEQ ID NO: 36957 - protein, 228 aa, Caldicellulosiruptor changbaiensis
  misc_feature (1)..(228): tr|A0A3T0D201|A0A3T0D201_9FIRM 7-cyano-7-deazaguanine s ynthase OS=Caldicellulosiruptor changbaiensis OX=122201 6 GN=queC PE=3 SV=1
MRAVVVLSGGMDSTTLLYDVKNQGYETYAISFLYGQKHSKELEFAKKTCELLKVPHKIVDISFFADLAPSALTKSGWSVPEGYYTDESMKQTVVPNRNMVFLSLATSYAISLKAQKLFYGAHAGDHPIYPDCRKEFVEAMKRSILLCDYQIVELEAPYVDLKKEDILKIGLKLGVDYSLTWSCYKGGEKACGRCGTCTERIEAFKKIGVKDPIEYEIEIDWDQKTREN

SEQ ID NO: 36958 - protein, 234 aa, Caldicellulosiruptor hydrothermalis
  misc_feature (1)..(234): tr|E4Q985|E4Q985_CALH1 7-cyano-7-deazaguanine synthase OS=Caldicellulosiruptor hydrothermalis (strain DSM 1890 1 / VKM B-2411 / 108) OX=632292 GN=queC PE=3 SV=1
MMLLLQRSEKLEKMRAVVVLSGGMDSTTLLYDVKSQGYEVFAISFLYGQKHSKELEFAKKTCSLLSIPHKIVDISFFAELAPSALTTPDWDVPEGYYTDSTMKQTVVPNRNMVLLSISAAYAISLGAKKLFYGAHAGDHPIYPDCRKEFVEVMKNALYLADYIGLELEAPYVDMKKEDILRRGLELGVNYSLTWSCYKGGQKACGRCGTCTERIEAFKKVGVKDPIEYEIEIDW

SEQ ID NO: 36959 - protein, 217 aa, Caldicellulosiruptor kristjanssonii
  misc_feature (1)..(217): tr|E4S6H9|E4S6H9_CALKI 7-cyano-7-deazaguanine synthase OS=Caldicellulosiruptor kristjanssonii (strain ATCC 700 853 / DSM 12137 / I77R1B) OX=632335 GN=queC PE=3 SV=1
MVLSGGVDSTTLLYDVKSQGYEVFAISFLYGQKHSKELEFAKKTCKLLSVPHKIVDISFFAELAPSALTTPDWNVPEGYYTDSTMKQTVVPNRNMVLLSISAAYAISLGAKKLFYGAHAGDHPIYPDCRKEFVEAMKNALYLADYIGLELEAPYVDMKKEDILRRGLELGVDYSLTWSCYKGGQKACGRCGTCTERIEAFKKVGMKDPIEYEIEIDC

SEQ ID NO: 36960 - protein, 221 aa, Caldicellulosiruptor kronotskyensis
  misc_feature (1)..(221): tr|E4SHH7|E4SHH7_CALK2 7-cyano-7-deazaguanine synthase OS=Caldicellulosiruptor kronotskyensis (strain DSM 1890 2 / VKM B-2412 / 2002) OX=632348 GN=queC PE=3 SV=1
MKAVVVLSGGMDSTTLLYDVKSQGYEVFAISFLYGQKHSKELEFAKKTCSLLSIPHKIVDISFFAELAPSALTALDWNVPEGYYTDSTMKQTVVPNRNMVLLSISAAYAISLGAKKLFYGAHAGDHPIYPDCRKEFVEAMKNALYLADYIGLELDAPYVDMKKEDILKRGLELGVDYSLTWSCYKGGQKACGRCGTCTERIEAFKKVGVKDPIEYEIEIDW

SEQ ID NO: 36961 - protein, 217 aa, Caldicellulosiruptor lactoaceticus
  misc_feature (1)..(217): tr|G2PWR7|G2PWR7_9FIRM 7-cyano-7-deazaguanine synthase OS=Caldicellulosiruptor lactoaceticus 6A OX=632516 GN=q ueC PE=3 SV=1
MVLSGGVDSTTLLYDVKSQGYEVFAISFLYGQKHSKELEFAKKTCKLLSVPHKIVDISFFAELAPSALTTPDWNVPEGYYTDSTMKQTVVPNRNMVLLSISAAYAISLGAKKLFYGAHAGDHPIYPDCRKEFVEAMKNALYLADYIGLELEAPYVDMKKEDILRRGLELGVDYSLTWSCYKGGQKACGRCGTCTERIEAFKKVGVKDPIEYEIDIEC

SEQ ID NO: 36962 - protein, 217 aa, Caldicellulosiruptor obsidiansis
  misc_feature (1)..(217): tr|D9THH6|D9THH6_CALOO 7-cyano-7-deazaguanine synthase OS=Caldicellulosiruptor obsidiansis (strain ATCC BAA-20 73 / strain OB47) OX=608506 GN=queC PE=3 SV=1
MVLSGGMDSTTLLYDVKNQGYEVFAISFLYGQKHSKELEFAKKTCSLLLVPHKIVDISFFAELAPSALTMPDWNVPEGYYTDSTMKQTVVPNRNMVLLSISAAYAISLGAKKLFYGAHAGDHPIYPDCRKEFVEAMKKALYLADYIGLELEAPYVDMKKEDILKRGLELGVDYSLTWSCYKGGQKACGRCGTCTERIEAFKKAGVKDPIEYEIEIDW

SEQ ID NO: 36963 - protein, 217 aa, Caldicellulosiruptor owensensis
  misc_feature (1)..(217): tr|E4Q2A9|E4Q2A9_CALOW 7-cyano-7-deazaguanine synthase OS=Caldicellulosiruptor owensensis (strain ATCC 700167 / DSM 13100 / OL) OX=632518 GN=queC PE=3 SV=1
MILSGGMDSTTLLYDVKNQGYEVFAISFLYGQKHSKELEFAKKTCSLLSIPHRIVDISFFAELAPSALTMPDWDVPEGYYTDSTMKQTVVPNRNMVLLSISAAYAISLGAKKLFYGAHAGDHPIYPDCRKEFVEAMKKALYLADYIGLELEAPYVDMKKEDILRRGLELGVDYSLTWSCYKGGQKACGRCGTCTERIEAFKKVGVKDPVEYEIEIDW

SEQ ID NO: 36964 - protein, 225 aa, Caldicellulosiruptor saccharolyticus
  misc_feature (1)..(225): sp|A4XFR8|QUEC_CALS8 7-cyano-7-deazaguanine synthase OS =Caldicellulosiruptor saccharolyticus (strain ATCC 4349 4 / DSM 8903 / Tp8T 6331) OX=351627 GN=queC PE=3 SV=1
MRAVVVLSGGMDSTTLLYDVKNQGYETYTISFLYGQKHSKELEFAKKTCELLKVPHKIVDISFFADLAPSALTKSSWSVPEGYYTDESMKQTVVPNRNMVFLSLATSYAISLKAQKLFYGAHAGDHPIYPDCRKEFVEAMKRSILLCDYQIVELEAPYVDLKKEDILKIGLKLGVDYSLTWSCYKGGEKACGRCGTCTERIEAFRKIGVKDPIEYEIEIDWDQKT

SEQ ID NO: 36965 - protein, 222 aa, Caldimicrobium thiodismutans
  misc_feature (1)..(222): tr|A0A2N7PL59|A0A2N7PL59_9BACT 7-cyano-7-deazaguanine s ynthase OS=Caldimicrobium thiodismutans OX=1653476 GN=q ueC PE=3 SV=1
MKKELAVVLLSSGMDSAVCASVAKEQYRLAFLHVQYGQKSAAKELKHFQKLCEFFRPEKILIAEAPFLKKIGGSSLTVEDLPIPEDEEGGIPSTYVPFRNGIFLSIAASWAEVISAKKIFIGVNQVDFSGYPDCRASFIEAFNQAIKEGTKPETQIEIEAPLLNLSKKEIVLLGVKLGTPFELTWSCYKDTEVACGRCASCKLRLKAFREAGVEDPIPYQRK

SEQ ID NO: 36966 - protein, 221 aa, Caldimicrobium thiodismutans
  misc_feature (1)..(221): tr|A0A0U5BX26|A0A0U5BX26_9BACT 7-cyano-7-deazaguanine s ynthase OS=Caldimicrobium thiodismutans OX=1653476 GN=q ueC PE=3 SV=1
MQKELAVVLLSAGMDSAVCASVASLNFRLALLHVQYGQRTALKELECFYKLCAYFQPEKNFVASAMFLKEIGASSLTDESKPIPEKEELSIPSTYVPFRNGIFLSIATAWAEAIGATRIFIGVNQIDFSGYPDCRESFLKAFNQAIQEGTKPETHIIIEAPLLHLSKKEIIQLGIQLKTPFELTWSCYQNTEVACGRCSSCKLRLKAFEEANLKDPIPYQL

SEQ ID NO: 36967 - protein, 221 aa, Calditerrivibrio nitroreducens
  misc_feature (1)..(221): tr|A0A2J6WK12|A0A2J6WK12_9BACT 7-cyano-7-deazaguanine s ynthase OS=Calditerrivibrio nitroreducens OX=477976 GN= queC PE=3 SV=1
MKRGIVLVSGGLDSCVTAAIAKNMGYSLYFLHINYGQKTEKKELESFYKLADFFKVVGKLIVDISYLKVIGGSSLTVDSMEIERGDLFRKDIPNTYVPFRNGNILSIAVSWAEVIRADRIFIGVVEEDSSGYPDCRKQFYDAFNQILKVGLAYTDLLIETPLIDKTKGEIVRIGAKLGAPFELTWSCYGENELACGVCDSCLLRLKGFKEAGMVDPIPYRK

SEQ ID NO: 36968 - protein, 221 aa, Calditerrivibrio nitroreducens
  misc_feature (1)..(221): tr|E4TIZ3|E4TIZ3_CALNY 7-cyano-7-deazaguanine synthase OS=Calditerrivibrio nitroreducens (strain DSM 19672 / N BRC 101217 / Yu37-1) OX=768670 GN=queC PE=3 SV=1
MKKGIVLVSGGLDSCVTAAIAKNMGYSLYFLHINYGQKTEKKELESFNKLADFFKVVGKLIVDISYLKVIGGSSLTVDSIEIERGDPFRKDIPNTYVPFRNGNILSIAVSWAEVIRADRIFIGVVEEDSSGYPDCRKQFYDAFNQILKVGLAYTDLLIETPLIDKTKGEIVRIGAKLGAPFELTWSCYGENEVACGVCDSCLLRLKGFKEAGMVDPIPYKK

SEQ ID NO: 36969 - protein, 227 aa, Caldithrix abyssi
  misc_feature (1)..(227): tr|H1XNE8|H1XNE8_9BACT 7-cyano-7-deazaguanine synthase OS=Caldithrix abyssi DSM 13497 OX=880073 GN=queC PE=3 S V=1
MKDKAVVLVSGGLDSCVTAAIAAEKYEPAFLHLNYGQRTEKRELKAFNDIADYYSVTQRLVVDVSYLKQIGGSSLTDERIEVSKADLQYQGVPTSYVPFRNANILAIATSWAEVIGATRIFIGAVEEDSSGYPDCREEFYAAFNKVIELGTRPETHIVIETPIIHLKKWQIVKKGLELSAPLDKTWSCYQSEDEACGVCDSCALRLRGFQMAGVDDPIPYRTRPNYL

SEQ ID NO: 36970 - protein, 228 aa, Caldithrix sp.
  misc_feature (1)..(228): tr|A0A523HNQ9|A0A523HNQ9_9BACT 7-cyano-7-deazaguanine s ynthase OS=Caldithrix sp. OX=1962856 GN=queC PE=3 SV=1
MKRELVVVLASGGMDSAVTTAIANQTSRLALLHLNYGQRTAERELQAFKELAEFYQVEKTLVINVDHLSQIGGSSLTDTDIAIAQADLESTEIPTSYVPFRNANLLAIATSWAEVISATKIFLGAVEEDSSGYPDCRREFYDAFEKVIDAGTKPSTQIEIVTPIITLKKYEIVLKGRELGVPFELTWSCYQHEDTACGVCDSCGFRLRGFEKAGLQDPIEYAERPVYQ

SEQ ID NO: 36971 - protein, 228 aa, Caldithrix sp.
  misc_feature (1)..(228): tr|A0A523IR86|A0A523IR86_9BACT 7-cyano-7-deazaguanine s ynthase OS=Caldithrix sp. OX=1962856 GN=queC PE=3 SV=1
MKRELVVVLASGGMDSAVTTAIANQTSRLAFLHLNYGQRTAERELQAFKELAEFYQVEKKLVINVDHLSQIGGSSLTDTDIAIAQADLESTEIPTSYVPFRNANLLAIATSWAEVISATKIFLGAVEEDSSGYPDCRREFYDAFQKVIDAGTKPSTQIEIVTPIITLKKYEIVLKGRELGVPFELTWSCYQHEDTACGVCDSCGFRLRGFEKAGLQDPIEYAERPVYQ

SEQ ID NO: 36972 - protein, 227 aa, Calditrichaeota bacterium
  misc_feature (1)..(227): tr|A0A3N9MVH7|A0A3N9MVH7_9BACT 7-cyano-7-deazaguanine s ynthase OS=Calditrichaeota bacterium OX=2212469 GN=queC PE=3 SV=1
MAKEKAVVLVSGGMDSCVTAAVAIEDYHAFFLHLNYGQRTEKRELKAFIDIADFYRISERLVVDVSYFKQIGGSSLTDTSIAVTKADPENRNIPASYVPFRNGNILSIASSWAEQVKATKIFIGAVEEDSSGYPDCRESFFKAFQQAVNLGTKPETQIEIITPVIHMKKKEIVLKGIELKAPLHLTWSCYQNEDKACGVCDSCVLRLRGFKSAGLKDPLEYAENIDF

SEQ ID NO: 36973 - protein, 231 aa, Calditrichaeota bacterium
  misc_feature (1)..(231): tr|A0A3M2FLZ5|A0A3M2FLZ5_9BACT 7-cyano-7-deazaguanine s ynthase OS=Calditrichaeota bacterium OX=2212469 GN=queC PE=3 SV=1
MKTKAVVLVSGGMDSCVTAAIAAEKHTLAFLHLNYGQRTEKREAQAFHAIADHYQVKERLEVDARFFNTIGGSSLTDPNIPVKQADLEFEGIPDSYVPFRNANILAIATSYAEVIGAAHIYIGAVEEDSSGYPDCREAFYEAYNKVIDIGTRPETRIRIETPLIHMKKAEIIQKGMALEAPLHLSWSCYQDSEIACGVCDSCALRLRGFAAAGLEDPIPYRIRPDYDSSGG

SEQ ID NO: 36974 - protein, 226 aa, Calditrichales bacterium
  misc_feature (1)..(226): tr|A0A524L5P2|A0A524L5P2_9BACT 7-cyano-7-deazaguanine s ynthase OS=Calditrichales bacterium OX=2528038 GN=queC PE=3 SV=1
MKRELAVVAVSGGMDSCVTSAIANDSFNLAFLHLNYGQKTEKREFRAFEEIAAFYNVTKRLVVDMHHFADIGGSSLTDPSIPVSPGDLKATQVPSSYVPFRNANILAIATSWAEVIGAQKIFIGAVQEDSSGYPDCRDSFFKAFNRVIAEGTHPDTHIVIETPLIHLSKKQIIEKGIALGAPLQLSWSCYRNEERACGTCDSCLLRLRGFKQAGIDDPIPYLTRQD

SEQ ID NO: 36975 - protein, 230 aa, Caloramator australicus
  misc_feature (1)..(230): tr|I7LHK9|I7LHK9_9CLOT 7-cyano-7-deazaguanine synthase OS=Caloramator australicus RC3 OX=857293 GN=queC PE=3 S V=1
MTKALVLASGGLDSTVLLSKVVKEYGCENVTALNIFYGQKHKKEAEFAKYQAEKYGVNYITADLSSVFKFSKDCPLLEGSDNEIPEKSYAEQLKDMGGQGTVSTYVPFRNGLFLSYAAAIAIQFGASKIFYGAHSDDAAGSAYPDCSGSFIENMARAIYEGTGGEVSLEAPFWNLTKKDIVKIGLDLGVDFAHTWSCYKGKEEPCRRCATCIDRERAFELNGIEDPLIRR

SEQ ID NO: 36976 - protein, 229 aa, Caloramator fervidus
  misc_feature (1)..(229): tr|A0A1H5WTM6|A0A1H5WTM6_9CLOT 7-cyano-7-deazaguanine s ynthase OS=Caloramator fervidus OX=29344 GN=queC PE=3 S V=1
MKALVLTSGGLDSTVLLAKIVKEYGSQNVTALNIYYGQKHSKEAEFAKYQAEKYGVNYITADLSEVFKFSKDCPLLKGSDKEIPKKSYAEQLKEMGGHGVVSTYVPFRNGLFLSYAAAVALQIGAQKIFYGAHADDAAGSAYPDCSEKFIESMAKAIFEGTGNKVNLEAPFWNLTKKDIVKIGLDLDVDFSHTWSCYEGKEAPCRKCATCIDRERAFELNNTIDPLVRR

SEQ ID NO: 36977 - protein, 230 aa, Caloramator mitchellensis
  misc_feature (1)..(230): tr|A0A0R3JRZ4|A0A0R3JRZ4_9CLOT 7-cyano-7-deazaguanine s ynthase OS=Caloramator mitchellensis OX=908809 GN=queC PE=3 SV=1
MEKALVLASGGLDSTVLLAKVVKEFGNENVTALNIFYGQKHKKEAEFARYQAEKYGVNYLTADLSSVFKFSNDCPLLEGSENEIPEKSYAEQLKEMGGQGVVSTYVPFRNGLFLSYAAAIAIQVGASKIFYGAHSDDAAGNAYPDCSGSFIDSMAKAIYEGTGGQVRLEAPFWNLTKKDIVKTGLDLGVDFAHTWSCYKGKDEPCRTCATCIDREKAFELNGEVDPLIRR

SEQ ID NO: 36978 - protein, 225 aa, Caloramator proteoclasticus
  misc_feature (1)..(225): tr|A0A1M4TRA0|A0A1M4TRA0_9CLOT 7-cyano-7-deazaguanine s ynthase OS=Caloramator proteoclasticus DSM 10124 OX=112 1262 GN=queC PE=3 SV=1
MKKAVVLLSGGLDSTTALYLAKSQGFETYAISFDYGQRHDKELECAKRVAEAAGVKEHIIVKTNMDAWGGSALTDKNIDVPEGDINRSDIPITYVPARNMIFLAFAASYAEKIGAQDIFIGVSEVDYSGYVDCRQEFLDAMEQAINKGTVCGVEGRRIKINAPFINMTKAEEIKLGMELGVDYSLTWSCYKGEEKACGVCDSCLLRLKAFKEAGFEDPIEYKEER

SEQ ID NO: 36979 - protein, 230 aa, Caloramator quimbayensis
  misc_feature (1)..(230): tr|A0A1T4YEI6|A0A1T4YEI6_9CLOT 7-cyano-7-deazaguanine s ynthase OS=Caloramator quimbayensis OX=1147123 GN=SAMN0 5443428_1429 PE=3 SV=1
MEKALVLVSGGLDSTVLLAKIVKELKEENVTALNIFYGQKHAKEAEFAKFQAEKYNVKYITADLSEVFKFSKDCPLLEGSRNEIPEKSYAEQLKDMGGCGTVSTYVPFRNGLFLSYAAAVGIQVGAFKIYYGAHSDDAAGNAYPDCSYNFIQSMAAAIYEGTGGKIKLEAPFWNFTKKDIVRVGLDLGVDFSHTWSCYKGEDEPCRSCATCIDREKAFELNDAIDPLLRR

SEQ ID NO: 36980 - protein, 266 aa, Caloramator sp.
  misc_feature (1)..(266): tr|A0A5B7TMD9|A0A5B7TMD9_9CLOT ATP-dependent sacrificia l sulfur transferase LarE OS=Caloramator sp. E03 OX=257 6307 GN=larE PE=4 SV=1
MSWENKYLSLTQYLNKLEKIAIAFSGGMDSSLLLKAATDSNLKKVVAITINTPYIPSWEIDEAKQLANELKIRHRVLNLAFIDEIKFNPENRCYLCKKSLFKSMIDEAKKESIEYILDGTNTDDLKDYRPGIMALKELNIKSPLLELGFTKKDIREILKNLNLSTWDKKPNACLLSRIPYGEEINLDKIKRIEESEKYILNLGFDAVRVRSHGDMARIEVPKNQRKKFFDEKLLDEVANYLKNLGFKYVSIDIEGYRTGSLNEAIK

SEQ ID NO: 36981 - protein, 230 aa, Caloramator sp.
  misc_feature (1)..(230): tr|A0A5B7TGZ8|A0A5B7TGZ8_9CLOT 7-cyano-7-deazaguanine s ynthase OS=Caloramator sp. E03 OX=2576307 GN=queC PE=3 SV=1
MDKALVLVSGGLDSTVLLAKVVKELKGENVTALNIFYGQKHAKEAKFAKLQAEKYNVNYITADLSSVFKFSKDCPLLEGSKNEIPEKSYAEQLKDMGGYGTVSTYVPFRNGLFLSYAAAVGIQLGASRIYYGAHSDDAAGNAYPDCSYNFIQSMASAIYEGTGGKIKLEAPFWSFTKKDIVREGLDLGVDFSHTWSCYKGQDEPCRSCATCIDREKAFELNDTIDPLLRR

SEQ ID NO: 36982 - protein, 220 aa, Caloranaerobacter azorensis
  misc_feature (1)..(220): tr|A0A096BJV7|A0A096BJV7_9CLOT 7-cyano-7-deazaguanine s ynthase OS=Caloranaerobacter azorensis H53214 OX=115641 7 GN=queC PE=3 SV=1
MKKAVILLSGGLDSTTCMGIAQNEGYELYPISFDYKQRHRKELEAAKKIAEYYNVKEHKIISLDNVGGSALTDENIDVPEYKGDGEIPVTYVPARNILFLSYALGYAEVIGAEAIFIGVSSVDYSGYPDCRPEFIEAFQKVVDVGTAAGVKGKSIKIIAPLINLSKAETIKLGTKYGVPYHLTTSCYNGKEKACGVCDSCVLRLKGFAEAGIEDPIEYEK

SEQ ID NO: 36983 - protein, 220 aa, Caloranaerobacter azorensis
  misc_feature (1)..(220): tr|A0A1M5RTY3|A0A1M5RTY3_9CLOT 7-cyano-7-deazaguanine s ynthase OS=Caloranaerobacter azorensis DSM 13643 OX=112 1264 GN=queC PE=3 SV=1
MKKAVILLSGGLDSTTCMGIAQNEGYELYPISFDYKQRHRKELEAAKKIAEYYNVKEHRIISLDNVGGSALTDKNIDVPEYKGDGEIPVTYVPARNILFLSYALGYAEVIGAEAIFIGVSSVDYSGYPDCRPEFIEAFQKVVDVGTAAGVKGKSIKIIAPLINLSKAETIKLGTKYGVPYHLTTSCYNGKEKACGVCDSCVLRLKGFAEAGIEDPIEYEK

SEQ ID NO: 36984 - protein, 219 aa, Caloranaerobacter sp.
  misc_feature (1)..(219): tr|A0A0N8NMH4|A0A0N8NMH4_9CLOT 7-cyano-7-deazaguanine s ynthase OS=Caloranaerobacter sp. TR13 OX=1302151 GN=que C PE=3 SV=1
MKKAVILLSGGLDSTTCMGIAQKEGYELYPISFDYRQRHRRELEAAKKIAEYYNVKEHKIISLDNVGGSALTDKNIDVPEYKGDGEIPVTYVPARNILFLSYALGYAEVIGAEAIFIGVSSVDYSGYPDCRPEFIKAFQNVVDVGTAAGVKGKSIKIVAPLINLSKAETIKIGTKYGVPYHLTTSCYNGKEKACGVCDSCVLRLKGFEEAGIEDPIEYM

SEQ ID NO: 36985 - protein, 224 aa, Calothrix brevissima
  misc_feature (1)..(224): tr|A0A1Z4JVA7|A0A1Z4JVA7_9CYAN 7-cyano-7-deazaguanine s ynthase OS=Calothrix brevissima NIES-22 OX=1973478 GN=q ueC PE=3 SV=1
MKAVILLSGGLDSSTILYQAKADGYECHALSFDYRQRHQRELQSALLVAQKAGVATHQIVNFDLRQWGGSALTDDDIDLPQERSLTEMSQNIPVTYVPARNTIFLSFALAYAETITAERVYIGVNALDYSGYPDCRPDYIQAMQEVFRLGTKQGREGEPITIVAPLINLKKTEIIQLGNQLGVPWELTWSCYAGADVACGVCDSCRLRLAAFGELGLSDPVAYA

SEQ ID NO: 36986 - protein, 214 aa, Calothrix desertica
  misc_feature (1)..(214): tr|A0A433VIJ1|A0A433VIJ1_9CYAN 7-cyano-7-deazaguanine s ynthase OS=Calothrix desertica PCC 7102 OX=232991 GN=qu eC PE=3 SV=1
MKNSLILYSGGMDSTVLLYHKREEIALAVSFNYGSKHNDREFYYAALNTKKLGIEHVKLDLSDIIGKHFSSHLLKTGSEIPDGHYQEPIMKQTVVPFRNGIMLSIAVGLAESKGLKQIYLANHFGDHAIYPDCTSAFIEPFKEAAKAGTYEKIEIVSPYVSITKRDIALIGKDLDVPFKYTWSCYKGKEHHCGKCGTCVERKEALEGFDETVYT

SEQ ID NO: 36987 - protein, 59 aa, Calothrix desertica
  misc_feature (1)..(59): tr|A0A433UUP5|A0A433UUP5_9CYAN Uncharacterized protein OS=Calothrix desertica PCC 7102 OX=232991 GN=DSM106972_ 083190 PE=4 SV=1
MKDSLILYSGGMDSTVLLYDKREEIALAVSFNYGSKHNERELYFASLNTQKLGIEQFNA

SEQ ID NO: 36988 - protein, 231 aa, Calothrix elsteri
  misc_feature (1)..(231): tr|A0A2A2TAE5|A0A2A2TAE5_9CYAN 7-cyano-7-deazaguanine s ynthase OS=Calothrix elsteri CCALA 953 OX=987040 GN=que C PE=3 SV=1
MKAVILLSGGLDSSTVLYQALADGYDCYVMSFDYQQRHKRELESAFAVAKKAGVTQHQLVNFDLRQWGGSALTDNKLDLPVQRSLTEMSQDIPITYVPARNTIFLSFALAYAETIAAERVYIGINALDYSGYPDCRPDYINAMQSVFRLGTKQGREGQPISIIAPLIHLKKTEIIQLGNKLGVPWELTWSCYAGNEAACGICDSCRLRLAAFAELGFKDPINYTVNGLKFD

SEQ ID NO: 36989 - protein, 227 aa, Calothrix parasitica
  misc_feature (1)..(227): tr|A0A1Z4LML3|A0A1Z4LML3_9CYAN 7-cyano-7-deazaguanine s ynthase OS=Calothrix parasitica NIES-267 OX=1973488 GN= queC PE=3 SV=1
MKAVILLSGGLDSSTTLYQALADGYECYPISFDYQQRHRKELNSAHLIAEKAGVSQHQVIKFDLTQWGGSALTDNNIDLPQERSLKEMSQDIPITYVPARNTIFLSFACAYAETMAAERVYIGVNALDYSGYPDCRPDYIQGMQEVFRLGTKQGREGNPIKIATPLIDLKKTEIIQLGNKLGVPWELTWSCYSNGDLPCGVCDSCRLRLAAFDELGLTDPVGYEVRG

SEQ ID NO: 36990 - protein, 227 aa, Calothrix sp.
  misc_feature (1)..(227): tr|A0A0T7C056|A0A0T7C056_9CYAN 7-cyano-7-deazaguanine s ynthase OS=Calothrix sp. 336/3 OX=1337936 GN=queC PE=3 SV=1
MKAVILLSGGLDSTCVLYQAMADGCDCYAISFDYQQRHRRELHSALTIAKEAGITQHQVISFDLRLWGGSALTDSAIDLPSERSLAEMSENIPVTYVPARNTIFLSFALAYGEAIAAERVYIGVNALDYSGYPDCRPDYIQGMQEVFRLGTKQGREGNPISIVTPLINLKKTEIIQLGNQLGVPWELTWSCYAGGESACGVCDSCRLRLAAFAELGLVDPIDYEHRG

SEQ ID NO: 36991 - protein, 225 aa, Calothrix sp.
  misc_feature (1)..(225): tr|A0A1Z4G7Q1|A0A1Z4G7Q1_9CYAN 7-cyano-7-deazaguanine s ynthase OS=Calothrix sp. NIES-2098 OX=1954171 GN=queC P E=3 SV=1
MKAVILLSGGLDSSTILYQAKAEGYECHALSFDYRQRHQRELQSALLVAQKAGVAKHQVVNFDLRQWGGSALTDDRIDLPEERSLDEMSQNIPVTYVPARNTIFLSFALAYSEAIAAQRVYIGVNALDYSGYPDCRPDYIQAMQEVFRLGTKQGREGEPITIAAPLINLKKTEIIQLGNQLGVPWELTWSCYAGADVACGVCDSCRLRLAAFAELGLKDPILYAQ

SEQ ID NO: 36992 - protein, 236 aa, Camelimonas lactis
  misc_feature (1)..(236): tr|A0A4R2GVN8|A0A4R2GVN8_9RHIZ 7-cyano-7-deazaguanine s ynthase OS=Camelimonas lactis OX=659006 GN=queC PE=3 SV =1
MLNNDRALVLLSGGQDSSTCLAWALARFAEVETIGFDYGQRHAVELTCRDAIRAGMATPSGALTGRLGDDHMLKLEALGAISDTAMTRDIAIVASENGLPNTFVPGRNLLFVTFAAALAYRRGCRHIVLGVCETDYSGYPDCRDDAIKAMQVALNIGMETRFVLHTPLMWRDKAATFALAEDLGGAPLLDLIVEHSHTCYVGDRSQRHPWGYGCGECPACQLRADGWRRFMSARDA

SEQ ID NO: 36993 - protein, 289 aa, Camelimonas lactis
  misc_feature (1)..(289): tr|A0A4R2GGH7|A0A4R2GGH7_9RHIZ Queuosine biosynthesis p rotein QueC (Fragment) OS=Camelimonas lactis OX=659006 GN=EV666_1431 PE=4 SV=1
RLPEAWNRCPRCRGIHAHDRVESMPIIRGIRKTVRGDADKQVDFAAKIGGGLGHLQLNHNAHTPGVQEASQRARSLVFITFGVIAATALKAYREVAEVPLFVCENGFIAINPPLTGGRLGSLSTRTAHPEFLARLQKVLDAAGLRVKITNPYASKTKGEMLKDCADQKLLGAEAARSTSCGRFQRFNYRQCGRCVPCQVRRAAFLAWDPTQDSTDYVYESIGKDDADYSGFDDVRSVAIALAAIKADGIEAWLGHALASPFIIDRPALVGMLERGLEELRALHQAYGVK

SEQ ID NO: 36994 - protein, 221 aa, Caminibacter mediatlanticus
  misc_feature (1)..(221): tr|A0A4P9DX00|A0A4P9DX00_9PROT 7-cyano-7-deazaguanine s ynthase OS=Caminibacter mediatlanticus TB-2 OX=391592 G N=queC PE=3 SV=1
MKKAVVILSGGMDSTTATFIAKKEGYELIPLHFNYGQRTEKRELKAFNDICDYLELKNRYVIDIPFFKQIGASALVDENIEVPTDGIKPGIPITYVPFRNGIFLSIATAVAEKEGAEAIYIGVVEEDSSGYPDCREEFIKSIEDAINKGTKPQTQIKIKTPLIHLKKEDIVKKAVEVGVPLELTWSCYKEEDKACGVCDSCRLRLKGFKKAGIKDKILYKQ

SEQ ID NO: 36995 - protein, 222 aa, Caminicella sporogenes
  misc_feature (1)..(222): tr|A0A1M6R8D3|A0A1M6R8D3_9CLOT 7-cyano-7-deazaguanine s ynthase OS=Caminicella sporogenes DSM 14501 OX=1121266 GN=queC PE=3 SV=1
MKKAVVLLSGGLDSTTCMAVAKSEGYELYPISFDYGQRHNRELECAKNVAKYFGVKQHKIIKMENVGGSALTDKNIDVPDYKGDNEIPVTYVPARNILFLSYALGYAEVIGAEAIFIGVSAVDYSGYPDCRPEFIKAFQKVVDEGTAAGVKGKSIEIKAPLIYLSKAETIKLGTKLGAPYELTTSCYKGGEKACGVCDSCVLRLKGFEEAGIKDKIEYERSL

SEQ ID NO: 36996 - protein, 221 aa, Campylobacter avium
  misc_feature (1)..(221): tr|A0A222MVN5|A0A222MVN5_9PROT 7-cyano-7-deazaguanine s ynthase OS=Campylobacter avium LMG 24591 OX=522484 GN=q ueC PE=3 SV=1
MKKALCIISGGMDSTLCAYLARKNGYEIVALHFNYGQRTEQREELCFKQICDDLGVVSRYVFDTSFIKCIGANSLTDENLQIPKDELNKYDTPNTYVPFRNGIFLSIAAAVAEKEECEAIFIGVLQEDNSGYADCSQAFITKAEDFINEGRATKIKLSIQTPLINLSKKDVVLLAHKEGVPLHLTYSCYERNDKACGHCDSCLLRLRGFKEANLKDEIEYV

SEQ ID NO: 36997 - protein, 224 aa, Campylobacter blaseri
  misc_feature (1)..(224): tr|A0A2P8R015|A0A2P8R015_9PROT 7-cyano-7-deazaguanine s ynthase OS=Campylobacter blaseri OX=2042961 GN=queC PE= 3 SV=1
MKKALCIISGGMDSTLCAYIAKNEGYEIVALHFDYLQRTMEREKESFLKICDDLNVYKKEILDVSFIAQIGANALTDKSIEIPKNNLSDKEIPITYVPFRNGIFLSIAAALAEKEGCEAIFIGVVEEDSSGYPDCSEEFIKSFEKSINLGRATKVKTKVKMPLVHLSKAEIVKEAMKLNVPLKYTWSCYEASDKACGECDSCKLRLKGFKLAGYKDEIPYKIEV

SEQ ID NO: 36998 - protein, 226 aa, Campylobacter coli
  misc_feature (1)..(226): tr|W8KKD4|W8KKD4_CAMCO 7-cyano-7-deazaguanine synthase OS=Campylobacter coli RM4661 OX=1183379 GN=queC PE=3 SV =1
MSKKALCIISGGMDSTLCAYLAKKEGYEIIALHFDYEQRTQEKEKECFKQICKALKVEKSYILDVSFIKDIGGNALTDKSIDIPKNELCTSDTPPITYVPFRNGIFLSIAGSLAEKENCESIFIGVVEEDGSGYPDCTDEFIQKAQEFINEGTSKNFKVCIKTPLVRLNKAKIVELALKENVPLELTWSCYESEDEACGECDSCLLRLRGFERAGFKDKIKYKLKS

SEQ ID NO: 36999 - protein, 226 aa, Campylobacter coli; identical to SEQ ID NO: 36998
  misc_feature (1)..(226): tr|A0A3X8VMP7|A0A3X8VMP7_CAMCO 7-cyano-7-deazaguanine s ynthase OS=Campylobacter coli OX=195 GN=queC PE=3 SV=1

SEQ ID NO: 37000 - protein, 232 aa, Campylobacter concisus
  misc_feature (1)..(232): tr|U2F511|U2F511_9PROT 7-cyano-7-deazaguanine synthase OS=Campylobacter concisus UNSW2 OX=1242965 GN=queC PE=3 SV=1
MYNFSKFKGQNMKKAVCIMSGGMDSTLCAVMAKRAGYDVVALHFDYNQRTMKREKRAFDEICERLGVVKKINLDVSFIAQIGGNSLTDKSLQIRKDGVSNDVPNTYVPFRNGVFISIAAALAEKEGAQAIYIGVVEEDSSGYPDCKESFIKSINEAINLGTSADFSCEIITPLVNLSKADIVAKSLELNSPIELTWSCYESEDEACGLCDSCRLRLNGFKKANAVDKIPYKK

SEQ ID NO: 37001 - protein, 221 aa, Campylobacter concisus
  misc_feature (1)..(221): sp|A7ZCA8|QUEC_CAMC1 7-cyano-7-deazaguanine synthase OS =Campylobacter concisus (strain 13826) OX=360104 GN=que C PE=3 SV=1
MKKAVCIMSGGMDSTLCAVMAKRAGYDVVALHFDYNQRTMKREKRAFDEICERLGVVKKINLDVSFIAQIGGNALTDTSMQIRKDGVSNDVPNTYVPFRNGVFISIAAALAEKEGAQAIYIGVVEEDSSGYPDCKESFIKSINEAINLGTSADFSCEIITPLVNLSKADIVSKSLELNSPIELTWSCYESEDEACGLCDSCRLRLNGFKKANAVDKIPYKK

SEQ ID NO: 37002 - protein, 222 aa, Campylobacter cuniculorum
  misc_feature (1)..(222): tr|A0A1W6BYK3|A0A1W6BYK3_9PROT 7-cyano-7-deazaguanine s ynthase OS=Campylobacter cuniculorum DSM 23162 = LMG 24 588 OX=1121267 GN=queC PE=3 SV=1
MKRALCIMSGGMDSTLCAYLAKKQGFKIIALHFDYRQRTQLKEKECFEKICKDLGVYKSYILNTDLIENIGANALTDTKIPIPKNELGQNEFPITYVPFRNGIFLSIAGALAEKEKCQSIFIGVVEEDGSNYPDCTKKFIKKAQKFINQGTAIKHKISIQTPLIKFKKKDIVSLALKEKVPLELTWSCYENNDLACGECDSCLLRLKGFKQAGFKDKIAYKI

SEQ ID NO: 37003 - protein, 223 aa, Campylobacter curvus
  misc_feature (1)..(223): sp|A7GXH1|QUEC_CAMC5 7-cyano-7-deazaguanine synthase OS =Campylobacter curvus (strain 525.92) OX=360105 GN=queC PE=3 SV=1
MKKAVCIMSGGMDSTLCAVMAKREGYEIIALHFDYEQRTMRREKMAFEQICDYLGIKKRLNLDVSFIADIGGNALTDKNLAVSKSGLGDEIPNTYVPFRNGIFISIAAALAEKEGAQAIYIGVVEEDSSGYPDCKGEFIERMNAAINVGTAPETKIKIVTPLVNLSKADIVAKSLEFGSPLELTWSCYEREDEACGLCDSCRLRLRGFERAGVKDKIKYANLS

SEQ ID NO: 37004 - protein, 223 aa, Campylobacter fetus
  misc_feature (1)..(223): tr|A0A2S0JAA2|A0A2S0JAA2_CAMFE 7-cyano-7-deazaguanine s ynthase OS=Campylobacter fetus subsp. testudinum OX=150 7806 GN=queC PE=3 SV=1
MVNLKKAVCVISGGMDSALAAYKAKNLGYEIVALHFDYNQRTMDKERECFNLICDDLDVEKRLILDVGFIAQIGGNALTDKTLNIPKDGISENIPITYVPFRNGIFLSIAAALAQKEGCEAIYIGVVEEDSSGYPDCSEQFISSINKAINLGTADDSIVIKTPLVHLSKGDIVKEASRLKVPLELTWSCYENSDFACGVCDSCRLRLKGFKEAKLSDKIPYKS

SEQ ID NO: 37005 - protein, 223 aa, Campylobacter fetus
  misc_feature (1)..(223): sp|A0RM81|QUEC_CAMFF 7-cyano-7-deazaguanine synthase OS =Campylobacter fetus subsp. fetus (strain 82-40) OX=360 106 GN=queC PE=3 SV=1
MVNLKKAVCVISGGMDSALAAYKAKNSGYEIVALHFDYNQRTMNKERECFNLICDDLDVEKRFILDVGFIAQIGGNALTDKTLNIPKDGISENIPITYVPFRNGIFLSIAAALAQKEGCEAIYIGVVEEDSSGYPDCTEQFINSINKAINLGTADNNIVIKTPLVHLSKGDIVKEASSLKVPLELTWSCYENSEFACGTCDSCRLRLKGFKEAKLSDKIPYKS

SEQ ID NO: 37006 - protein, 225 aa, Campylobacter geochelonis
  misc_feature (1)..(225): tr|A0A128ES02|A0A128ES02_9PROT 7-cyano-7-deazaguanine s ynthase OS=Campylobacter geochelonis OX=1780362 GN=queC PE=3 SV=1
MKKAVCVISGGMDSTLCAYIAKNEGYEIVALHFDYNQRTMEKERESFYKICDKLGVKTRLVLDVSFISQIGANALTDKTLEVPKDGLGAEVPITYVPFRNGIFLSIAAALAEKEGCEAIFIGVVEEDSSGYPDCSESFIKSMQESINLGRATKVKSQIKMPLVHLSKAQIVEKALNLGVALELTWSCYENSDEACGVCDSCRLRLNGFKQAGFKDKIPYKNCNKN

SEQ ID NO: 37007 - protein, 391 aa, Campylobacter gracilis
  misc_feature (1)..(391): tr|C8PJP9|C8PJP9_9PROT 7-cyano-7-deazaguanine synthase OS=Campylobacter gracilis RM3268 OX=553220 GN=CAMGR0001 _1449 PE=3 SV=1
MRALCVISGGMDSATCAYIARREGYEIVALHFDYDQRTMGKERECFGKICDDLGVAKRLILDARFIAQIGGSALTDGTLPIRKGAAELCGAANTTGAEIDSAANSKSAELGELNFIETNSIAEVNGQNSIAANSTNAETGGQNFTASNFMASSADATLGADSARDSRLQSGEILIQDAEILLGGDEFSPQGSKILACDDKISSQGSKILVQEGEISSQSGAQPQQGDKISSKRAEGEIPSQSQSDKISPSSGESAFSDLPSTYVPFRNGVFLSIAAALAEKERCDAIFIGVVQEDSSGYPDCGASFIAAFERALELGTSRDFHPRIKTPLVHLSKAQIVSLALEIGVPLELTWSCYEREDAACGLCDSCLLRLKGFAGAGAKDKIPYAIEA

SEQ ID NO: 37008 - protein, 231 aa, Campylobacter helveticus
  misc_feature (1)..(231): tr|A0A4V7ID64|A0A4V7ID64_9PROT 7-cyano-7-deazaguanine s ynthase OS=Campylobacter helveticus OX=28898 GN=queC PE =3 SV=1
MKKALCVISGGMDSTLCAYLAKSEGYEIIALHFDYQQRTETKERECFVKICENLGVLKRYILNANFLKDIGGNALVDESLAVPKNALHQNALPNTYVPFRNGIFLSIAASLAEKEGCEALYIGVVQEDSSGYPDCSESFIKKAENFINEGTSKDFTLSIKTPLVHLGKAEIVSLALKENVPLELTWSCYESEDSACGACDSCLLRLKGFEKAGVKDKIRYQNLSPDDCGTH

SEQ ID NO: 37009 - protein, 225 aa, Campylobacter hepaticus
  misc_feature (1)..(225): tr|A0A424Z0K2|A0A424Z0K2_9PROT 7-cyano-7-deazaguanine s ynthase OS=Campylobacter hepaticus OX=1813019 GN=queC P E=3 SV=1
MNKKALCIISGGMDSTVCAYLAKKEGYEIIALHFDYEQRTQVKERECFRQICKALKVEKSYILDVSFIKNIGGNALTDKSIHIPKNQLCLSNATPPITYVPFRNGIFLSIAGSLAEKENCESIFIGVVEEDGSGYPDCTSDFIKKAQAFINEGTSNKFKVCLKAPLLHYNKSQIVHIALEEKIPLELTWSCYENENEACGECDSCLLRLQGFKKAGFKDKIKYKS

SEQ ID NO: 37010 - protein, 220 aa, Campylobacter hominis
  misc_feature (1)..(220): sp|A7I1D0|QUEC_CAMHC 7-cyano-7-deazaguanine synthase OS =Campylobacter hominis (strain ATCC BAA-381 / LMG 19568 / NCTC 13146 / CH001A) OX=360107 GN=queC PE=3 SV=1
MKAVCVISGGMDSSTAAFIAKEQGYEILALHFDYNQRTMKKERECFNLICDDLGVKSREILDVSFIAQIGANSLTDKNLTIQKTGVKSGEIPNTYVPFRNGIFLSVAAAFAEKEGADALFIGVVEEDSSGYPDCSENFIKKIESAINAGTSPNFKLEIKIPLVHLSKTQIVKKALEIGVPLEHTWSCYEREDKACGFCDSCRLRLKGFKGADTKDTIPYI

SEQ ID NO: 37011 - protein, 227 aa, Campylobacter hyointestinalis
  misc_feature (1)..(227): tr|A0A330G0X2|A0A330G0X2_CAMHY 7-cyano-7-deazaguanine s ynthase OS=Campylobacter hyointestinalis subsp. lawsoni i OX=91353 GN=queC PE=3 SV=1
MKKNVKNKKAVCVISGGMDSALSAYIAKNEGYDIIALHFDYQQKTMNKEKDCFHKICECLGVSKKVILDTSFIANIGGNALTDLDVKVPKDGVKSDLPITYVFFRNGIFLSIAAALAQKEDCEAIFIGVVEEDSSGYPDCSEEFIKAMNKAINLGTSDNSIKIRTPLVHCTKENIVKKALELKVPLEFTWSCYDSEDEACGKCDSCRLRLKGFELANLEDKIPYKKA

SEQ ID NO: 37012 - protein, 223 aa, Campylobacter hyointestinalis
  misc_feature (1)..(223): tr|A0A381CL49|A0A381CL49_CAMHY 7-cyano-7-deazaguanine s ynthase OS=Campylobacter hyointestinalis OX=198 GN=queC PE=3 SV=1
MENKKAVCVISGGMDSALCAYMAKNEGYDIIALHFDYKQKTMNKEKDCFHKICECLGVSKRVILDTSFIANIGGNALTDPDVKVPKDGVKNDLPITYVFFRNGIFLSIAAALAQKENCEAIFIGVVEEDGSGYPDCSEEFICMMNSAINLGTGDNNIKIRMPLVHCTKENIVKKALELKVPLEFTWSCYDSEDEACGKCDSCRLRLKGFELANLEDKIPYKKA

SEQ ID NO: 37013 - protein, 223 aa, Campylobacter iguaniorum
  misc_feature (1)..(223): tr|A0A076F9M0|A0A076F9M0_9PROT 7-cyano-7-deazaguanine s ynthase OS=Campylobacter iguaniorum OX=1244531 GN=queC PE=3 SV=1
MSKKAVCVISGGMDSTLCAYKARELGYEIIALHFDYNQRTMQKERECFNQICDELNVAKKLILDVSFIADIGGNALTDTSLEVPKTGLSDELPITYVPFRNGIFLSIAGALAQKEQCEAVFIGVVEEDSSGYPDCSEEFITVMNKAINLGTSDESIKLITPLVHLSKADIVKESVRLNVPLNLTWSCYENSDLACGVCDSCRLRLNGFKQARISDKIAYKQDI

SEQ ID NO: 37014 - protein, 221 aa, Campylobacter insulaenigrae
  misc_feature (1)..(221): tr|A0A0A8H0W9|A0A0A8H0W9_9PROT 7-cyano-7-deazaguanine s ynthase OS=Campylobacter insulaenigrae NCTC 12927 OX=10 31564 GN=queC PE=3 SV=1
MKKALCIISGGMDSTLCAYLAKKEGYEIIALHFDYNQRTMLKERECFEKICKELKIKNKYILNVSFISDIGGNSLTDPTLDIPKNSLHKNNIPNTYVPFRNGIFLSIAGAIAEKEKCESIFIGVVQEDSSGYPDCSEKFIQNATNFINSGTNPDFKTQLKTPLIHLNKAQIVSLAIEENVALQYTWSCYEREDKACGKCDSCLLRLKGFEQIKRKDMIDYI

SEQ ID NO: 37015 - protein, 224 aa, Campylobacter jejuni
  misc_feature (1)..(224): sp|P0C634|QUEC_CAMJE 7-cyano-7-deazaguanine synthase OS =Campylobacter jejuni subsp. jejuni serotype O:2 (strai n ATCC 700819 / NCTC 11168) OX=192222 GN=queC PE=3 SV=1
MSKKALCIISGGMDSTLCAYLAKKEGYEIIALHFDYEQRTQEKEKECFKQICKALKVEKSYILDVSFIKDIGGNALTDKSIDIPKNELCTSDTPPITYVPFRNGIFLSIAGSLAEKENCESIFIGVVEEDGSGYPDCTDEFIQKAQEFINEGTSKNFKVCIKTPLVRLNKAKIVELALKENVPLELTWSCYESEDEACGECDSCLLRLRGFEKAGFKDKIKYKS

SEQ ID NO: 37016 - protein, 224 aa, Campylobacter jejuni; identical to SEQ ID NO: 37015
  misc_feature (1)..(224): sp|Q5HXE2|QUEC_CAMJR 7-cyano-7-deazaguanine synthase OS =Campylobacter jejuni (strain RM1221) OX=195099 GN=queC PE=3 SV=1

SEQ ID NO: 37017 - protein, 225 aa, Campylobacter lanienae
  misc_feature (1)..(225): tr|A0A1X9SNA0|A0A1X9SNA0_9PROT 7-cyano-7-deazaguanine s ynthase OS=Campylobacter lanienae NCTC 13004 OX=1031753 GN=queC PE=3 SV=1
MRRALCIISGGMDSAVAASIAKSEGYEIVGLHFDYHQRTMLKERECFDKICDDLGVVDRIVINADFIASVGGNSLTDKSIEIPKNSLNDKELPNTYVAFRNGIFISIGASVAQVRNCEAIYMGLVEADSSGYPDCRLEFLKAMNRAVNLGTGCEFVFKAPLIGLSKSQIVSKAYELGVNLANTWSCYESGEAACGECDSCLLRLKGFRDSGKIDPIEYKKIKFKD

SEQ ID NO: 37018 - protein, 225 aa, Campylobacter lanienae
  misc_feature (1)..(225): tr|A0A562Y7E5|A0A562Y7E5_9PROT 7-cyano-7-deazaguanine s ynthase OS=Campylobacter lanienae OX=75658 GN=queC PE=3 SV=1
MRRALCIISGGMDSAVAASIAKSEGYEIVGLHFDYHQRTMLKERECFDKICDDLGVIDRIVINADFIASVGGNSLTDKSIEIPKNSLNDKELPNTYVAFRNGIFISIGASVAQVRNCEAIYMGLVEADSSGYPDCRLEFLKAMNRAVNLGTGCEFVFKAPLIGLSKSQIVSKAYELGVNLANTWSCYESGDAACGECDSCLLRLKGFRDSGKIDPVEYKKIKFKD

SEQ ID NO: 37019 - protein, 221 aa, Campylobacter lari
  misc_feature (1)..(221): tr|A0A0A8H663|A0A0A8H663_CAMLA 7-cyano-7-deazaguanine s ynthase OS=Campylobacter lari subsp. concheus LMG 11760 OX=1031536 GN=queC PE=3 SV=1
MKKALCIISGGMDSTLCAYLAKKEGYEIIALHFDYNQRTMLKERECFNKICEKLNIKTKYILDVSFIANIGGNSLTDLNLEIPKEKLHEKEVPNTYVPFRNGIFLSIAGAIAEKEKCESIFIGVVQEDSSGYPDCSANFIQKTSEFINEGTTKTCNVVIKTPLVHLSKRQIVELALKEKVALECTWSCYEREDKACGKCDSCLLRLKGFKEANVKDFIEYI

SEQ ID NO: 37020 - protein, 221 aa, Campylobacter lari
  misc_feature (1)..(221): tr|A0A0A8HVD6|A0A0A8HVD6_CAMLA 7-cyano-7-deazaguanine s ynthase OS=Campylobacter lari NCTC 11845 OX=1388749 GN= queC PE=3 SV=1
MKKALCIISGGMDSTLCAYLAKKEGYEIIALHFDYNQRTMFKERECFNKICEKLNIKTKYILDVSFIANIGGNSLTDLNLEIPKEKLHEKEVPNTYVPFRNGIFLSIAGAIAEKEKCESIFIGVVQEDSSGYPDCSANFIQKASEFINEGTTKTYNVKIKTPLIHLSKRQIVNLALKEKVALEHTWSCYEREDKACGKCDSCLLRLKGFKEANINDFIEYI

SEQ ID NO: 37021 - protein, 221 aa, Campylobacter ornithocola
  misc_feature (1)..(221): tr|A0A1C2FU67|A0A1C2FU67_9PROT 7-cyano-7-deazaguanine s ynthase OS=Campylobacter ornithocola OX=1848766 GN=queC PE=3 SV=1
MKKALCIISGGMDSTLCAYLAKKEGYEIIALHFDYNQRTMLKERECFNKICEKLSIKTKYILDVSFIANIGGNSLTDLNLEIPKEKLHEKEIPNTYVPFRNGIFLSIAGAIAEKEKCESIFIGVVQEDSSGYPDCSEKFIQKASEFINEGTTKTYNVKIKTPLIHLSKGQIVNLSLKEKVALEHTWSCYEREDKACGKCDSCLLRLKGFKEANINDFIEYI

SEQ ID NO: 37022 - protein, 221 aa, Campylobacter peloridis
  misc_feature (1)..(221): tr|A0A5C7DVS8|A0A5C7DVS8_9PROT 7-cyano-7-deazaguanine s ynthase OS=Campylobacter peloridis OX=488546 GN=queC PE =3 SV=1
MKKALCIISGGMDSTLCAYLAKKEGYEIIALHFDYNQRTMLKERECFNKICEKLNIKTKYILDVSFIANIGGNSLTDLNLEIPKEKLHEKEVPNTYVPFRNGIFLSIAGAIAEKEKCESIFIGVVQEDSSGYPDCSAKFIQKASEFINEGTTKTCNVTIKTPLVHLSKGQIVELALKEKVALEYTWSCYEREDKACGKCDSCLLRLKGFQNTKTKDFIDYI

SEQ ID NO: 37023 - protein, 221 aa, Campylobacter peloridis
  misc_feature (1)..(221): tr|A0A0A8GS57|A0A0A8GS57_9PROT 7-cyano-7-deazaguanine s ynthase OS=Campylobacter peloridis LMG 23910 OX=1388753 GN=queC PE=3 SV=1
MKKALCIISGGMDSTLCAYLAKKEGYEIIALHFDYNQRTMQKEKECFNKICEKLNIKTKYILDVSFIANIGGSSLTDLNLEIPKEKLHEKEVPNTYVPFRNGIFLSIAGAIAEKEKCESIFIGVVQDDSSGYPDCSHNFIQKAKEFINEGTNKSFKVDIKTPLVHLNKGEIVTLALKEKVALEYTWSCYEREDKACGKCDSCLLRLKGFQNAKAKDLIDYI

SEQ ID NO: 37024 - protein, 221 aa, Campylobacter pinnipediorum
  misc_feature (1)..(221): tr|A0A1S6TLS5|A0A1S6TLS5_9PROT 7-cyano-7-deazaguanine s ynthase OS=Campylobacter pinnipediorum subsp. pinnipedi orum OX=1660067 GN=queC PE=3 SV=1
MKKAVCIMSGGMDSTLCAVLAKKQGYDIVALHFDYNQRTMSREKRAFNEICDKIGVVKKVELDVSFIADIGANALTDLSMDIRKDGVADDVPNTYVPFRNGIFISIAAALAEKEGAEALFIGVVEEDSSGYPDCSDEFIKSINNAINKGTKDSTNIKIHMPLVHLSKSDIVKTSLQNNSPLELTWSCYENEDDACGLCDSCRLRLNGFELAGAKDPIKYIS

SEQ ID NO: 37025 - protein, 228 aa, Campylobacter pinnipediorum
  misc_feature (1)..(228): tr|A0A1S6U5C5|A0A1S6U5C5_9PROT 7-cyano-7-deazaguanine s ynthase OS=Campylobacter pinnipediorum subsp. caledonic us OX=1874362 GN=queC PE=3 SV=1
MKKAVCIMSGGMDSTLCAVLAKKQGYDIVALHFDYNQRTMSREKRAFKEICDKIGVVKKVELDVSFISDIGANALTDLSMDIRKDGVADDVPNTYVPFRNGIFISIAAALAEKEGAEALFIGVVEEDSSGYPDCSDEFIKSINDAINKGTKDSTNIKIHMPLVHLSKADIVKSSLQNNSPLELTWSCYENEDEACGLCDSCRLRLNGFELAGAKDPIRYKNLNSKIKL

SEQ ID NO: 37026 - protein, 224 aa, Campylobacter rectus
  misc_feature (1)..(224): tr|A0A3P1X7C1|A0A3P1X7C1_CAMRE 7-cyano-7-deazaguanine s ynthase OS=Campylobacter rectus OX=203 GN=queC PE=3 SV= 1
MVKKAVCIMSGGMDSTLCAVLAKRAGYEIIALHFDYGQRTMKREKLAFEQICERIGALKKVNLDASFIANIGGNALTDESLAIRKDGAKPDTPSTYVPFRNGIFISIAAALAEREGAQALYIGIVEEDGSGYPDCTADFIAKIESAVNAGTSKDFSLRIETPLVNLSKADIVQKSLEAGSPLELTWSCYEREDEACGECDSCRLRLRGFELAGEKDRIKYANLK

SEQ ID NO: 37027 - protein, 223 aa, Campylobacter rectus
  misc_feature (1)..(223): tr|B9D1X7|B9D1X7_CAMRE 7-cyano-7-deazaguanine synthase OS=Campylobacter rectus RM3267 OX=553218 GN=queC PE=3 S V=1
MKKAVCIMSGGMDSTLCAVLAKRAGYEIVALHFDYGQRTMEREKLAFEQICERIGALKKVNLDAHFIASIGGNALTDENLAIRKDGAKPDTPSTYVPFRNGIFISIAAALAEKEGAQALYIGIVEEDGSGYPDCTADFIAKIESAVNAGTSKDFSLRIETPLVNLSKAGIVRKSLEAGSPLELTWSCYELEDEACGECDSCRLRLRGFELAGEKDRIKYANLK

SEQ ID NO: 37028 - protein, 241 aa, Campylobacter showae
  misc_feature (1)..(241): tr|M3GW01|M3GW01_9PROT 7-cyano-7-deazaguanine synthase (Fragment) OS=Campylobacter showae CC57C OX=1073353 GN= H740_10762 PE=3 SV=1
NPTKYKPKRRANKKRIKMVKKAVCIMSGGMDSTLCAVLAKRAGYEIIALHFDYGQRTMKREKIAFEQICERIGALKKVNLDAHFIADIGGNALTDESLAIRKDGAKADTPSTYVPFRNGIFISIAAALAEKEGAQALYIGIVEEDGSGYPDCTADFIAKIESAVNAGTSKDFSLRIVTPLVNLSKADIVRKSLEAGSPLELTWSCYEREDEACGECDSCRLRLRGFELAGEKDRIKYVNLK

SEQ ID NO: 37029 - protein, 223 aa, Campylobacter showae
  misc_feature (1)..(223): tr|C6RG62|C6RG62_9PROT 7-cyano-7-deazaguanine synthase OS=Campylobacter showae RM3277 OX=553219 GN=queC PE=3 S V=1
MKKAVCIMSGGMDSTLCAVLAKRAGYEIIALHFDYGQRTMKREKLAFEQISERIGALKKVNLDASFIASIGGNALTDESLAIRKDGAKPDTPTTYVPFRNGIFISIAAALAEKEGAQALYIGIVEEDGSGYPDCTADFIGKIESAVNAGTSKDFSLRIVTPLVNLSKADIVRKSIEAGSPLELTWSCYEREDEACGECDSCRLRLRGFELAGEKDRIKYVNLK

SEQ ID NO: 37030 - protein, 226 aa, Campylobacter sp.
  misc_feature (1)..(226): tr|A0A4Y8BS77|A0A4Y8BS77_9PROT 7-cyano-7-deazaguanine s ynthase OS=Campylobacter sp. US33a OX=2498120 GN=queC P E=3 SV=1
MSKKALCIISGGMDSTLCAYLAKKQGYEIIALHFDYNQRTQEKEKECFKQICKALKVEKSYILDVSFIANIGGNALTDKNINIPKNELNKSDTPPITYVPFRNGIFLSIAGSLAEKENCESIFIGVVEEDSSGYPDCTQSFIQKAQEFINEGTSKDFKTQIKTPLVHLKKAEIVALALSENVPLELTWSCYESQDLACGECDSCLLRLRGFEEAGFKDKIAYKNAH

SEQ ID NO: 37031 - protein, 225 aa, Campylobacter sp.
  misc_feature (1)..(225): tr|A0A1X9T0J3|A0A1X9T0J3_9PROT 7-cyano-7-deazaguanine s ynthase OS=Campylobacter sp. RM8964 OX=1660074 GN=queC PE=3 SV=1
MRKALCIISGGMDSAVAASIAKSEGYEIVALHFDYGQRTMKKERECFDKIASSLNALKKFVIDTSFIADVGGNALTDKNIKIPKNALQDKEPPATYVAFRNGIFLSIATGIAQVQGCEAIYIGLVEADGSGYPDCSSEFLEAMNKAVNLGTGCDIKFKAPLIGLSKGQIVATAYKLGVNLANTWSCYENEDLACGECDSCLLRLKGFKENNLNDPIEYKKIKFKD

SEQ ID NO: 37032 - protein, 220 aa, Campylobacter sputorum
  misc_feature (1)..(220): tr|A0A381DL46|A0A381DL46_9PROT 7-cyano-7-deazaguanine s ynthase OS=Campylobacter sputorum biovar sputorum OX=32 024 GN=queC PE=3 SV=1
MKKALCIISGGMDSTLCAYMAKNEGYEIVALHFDYNQRTMNKERECFNKICNDLNIKKREILDVSFISQIGANALTDTNLEIPKTGISDDIPITYVPFRNGVFLSIAAALAQKENCDAIFIGVVEEDSSGYPDCSEEFIKSMQLSINLGRGTKDTKIVTPLVHLSKADIVKKAISLNVPLELTWSCYESEDKACGKCDSCRLRLNGFKKAGFKDKIPYKE

SEQ ID NO: 37033 - protein, 221 aa, Campylobacter subantarcticus
  misc_feature (1)..(221): tr|A0A0A8HAC6|A0A0A8HAC6_9PROT 7-cyano-7-deazaguanine s ynthase OS=Campylobacter subantarcticus LMG 24374 OX=13 88751 GN=queC PE=3 SV=1
MRKALCVISGGMDSTLCAYLAKKEGYEIIALHLDYNQRTMNKERECFNKICKELNIQTKYILDVSFIANIGGNSLTDYTLEIPKEKLHEVEVPNTYVPFRNGIFLSIAGAIAEKEKCESIFIGVVQEDSSGYPDCSEKFIQKASKFINEGTTNSCKIQIKTPLVHLNKSQIVDLALKEKVALEYTWSCYEREDKACGKCDSCLLRLKGFQEANVKDFIEYV

SEQ ID NO: 37034 - protein, 221 aa, Campylobacter ureolyticus
  misc_feature (1)..(221): tr|A0A381E974|A0A381E974_9PROT 7-cyano-7-deazaguanine s ynthase OS=Campylobacter ureolyticus OX=827 GN=queC PE= 3 SV=1
MKKALCIISGGMDSVTSAYIAKNEGYEIVALHFDYNQRTMNKEKECFNKICDELKVVKKEILNVSFISQIGANALTDSSLEIPKDGLSDEVPITYVPFRNGIFLSIAAALAEREKCEAIFIGVVEEDSSGYPDCSQEFIKSMEKSINLGRETGIKTKILTPLVHLSKAQIVQKAFSLKVPLQYTWSCYEREDLACGVCDSCRLRLKGFKEAGKKDLIKYAN

SEQ ID NO: 37035 - protein, 221 aa, Campylobacter ureolyticus
  misc_feature (1)..(221): tr|S3YK38|S3YK38_9PROT 7-cyano-7-deazaguanine synthase OS=Campylobacter ureolyticus ACS-301-V-Sch3b OX=883165 GN=queC PE=3 SV=1
MKKALCIISGGMDSVTSAYIAKNEGYEIVALHFDYNQRTMNKEKECFNKICDELKVVKKEILDVSFISQIGANALTDRSLEIPKDGLSNEVPITYVPFRNGIFLSIAAALAEREKCEAIFIGVVEEDSSGYPDCSQEFIKSMEKSINLGRETSIKTKILTPLVHLSKAQIVQKAFSLKVPLQYTWSCYEREDLACGVCDSCRLRLKGFKEAGKKDLIKYAN

SEQ ID NO: 37036 - protein, 221 aa, Campylobacter volucris
  misc_feature (1)..(221): tr|A0A5C7DSP4|A0A5C7DSP4_9PROT 7-cyano-7-deazaguanine s ynthase OS=Campylobacter volucris OX=1031542 GN=queC PE =3 SV=1
MKKALCIISGGMDSTLCAYLAKKEKYEIIALHFDYNQRTMHKERECFEKICKELDVKNKYILDVSFIADIGNNSLTDFNLDIPKNELYKNELPNTYVPFRNGIFLSIAGAIAEKENCESIFIGVVQEDSSGYPDCSQNFIQDANKFINSGTSKNFKTQIKTPLIHLNKAQIVTLAIKENVALKYTWSCYEKEDKACGKCDSCLLRLKGFNEIGIKDTIEYE

SEQ ID NO: 37037 - protein, 221 aa, Campylobacter volucris
  misc_feature (1)..(221): tr|A0A5C8L2F4|A0A5C8L2F4_9PROT 7-cyano-7-deazaguanine s ynthase OS=Campylobacter volucris OX=1031542 GN=queC PE =3 SV=1
MKKALCIISGGMDSTLCAYLAKKEKYDIIALHFDYNQRTMRKERECFEKICKELDVKNKYILDVSFIADIGNNSLTDFNLTIPKNELHKNELPNTYVPFRNGIFLSIAGAIAEKENCESIFIGVVQEDSSGYPDCSQNFIQDANKFINSGTSKNFKTQIKTPLIKLSKAQIVALAIQENVALKYTWSCYEKEDKACGKCDSCLLRLKGFNEIGIKDEIEYE

SEQ ID NO: 37038 - protein, 227 aa, Campylobacteraceae bacterium
  misc_feature (1)..(227): tr|A0A1V4R8C4|A0A1V4R8C4_9PROT 7-cyano-7-deazaguanine s ynthase OS=Campylobacteraceae bacterium 4484_166 OX=195 6165 GN=queC PE=3 SV=1
MNKVAIVVLSGGLDSTTCAYIAKNKGFDIVALHFNYGQKTLNKELETFRAICDVLDIETKKRYEIDLPFFTKIGCSALTDKDIDVPIDGLDDNIPITYVPFRNGIFLSIATALAIKYNSFDIFIGVVSEDGSGYPDCTKEFIKNQQNCINEGANTKHHITIQTPLIDKTKEQIVHIAKDLSVAISKTWSCYKDEFEACGVCDSCRLRLHGFKKAGFKDEIKYKATDI

SEQ ID NO: 37039 - protein, 212 aa, Campylobacteraceae bacterium
  misc_feature (1)..(212): tr|A0A1Y1RE16|A0A1Y1RE16_9PROT 7-cyano-7-deazaguanine s ynthase OS=Campylobacteraceae bacterium 4484_4 OX=19707 75 GN=queC PE=3 SV=1
MDSALSAYIAKKEEHYEIIAVHYNYGQKTEKKELEAFKKIAESLGSLKEYILDLHFIKEIGGSALTDEEISVPKEGITPGIPVTYVPFRNGIFLSVAAAIAEKEGAEAIFIGVVEEDSSGYPDCREEFIEKLEAAIDAGTKPQTHIRLRTPLVHLKKEQIVKEAYRIGVPLNETWSCYEREDAACGECDSCRLRLKGFEIAGIEDEIPYLKR

SEQ ID NO: 37040 - protein, 222 aa, Campylobacterales bacterium
  misc_feature (1)..(222): tr|A0A258X5K1|A0A258X5K1_9PROT 7-cyano-7-deazaguanine s ynthase OS=Campylobacterales bacterium 16-40-21 OX=1970 501 GN=queC PE=3 SV=1
MNKKALCIMSGGMDSTLVAYTMRAQGYEIIALHFNYGQRTVAKELEAFRAITDALGTQERYEIDLDFFKTIGASALTDHSIDVPTEGIEPGIPITYVPFRNGIFLSIATAIAEKEGCEVMAIGVVEEDSSGYPDCRDAFIRSFEQSANLGTKETTHIRIEMPLVHLQKSQIVQEAYKLNVPLELTWSCYQSDDTACGVCDSCRLRLRGFELAGQKDPIAYAL

SEQ ID NO: 37041 - protein, 230 aa, Scalindua sp.
  misc_feature (1)..(230): tr|A0A286TUF4|A0A286TUF4_9BACT 7-cyano-7-deazaguanine s ynthase OS=Candiadtus Scalindua japonica OX=1284222 GN= queC PE=3 SV=1
MKSIDMSAKNLAVVLLSGGLDSCVTMAIAREEYNIALLHVGYAQRTQTREYNCFRSIARYYKIPETRTLALELDFLRKIGGSCLTDPNIPVDKDTIHEKIPTSYVPFRNTHLLSIAVSWAEVINANKVYIGAVQQDSPDYPDCRAEYYDAYNKLVEVGTKPSTNIKVITPLLNMSKTEIVKKGLELQAPLQLTWSCYERNDKACGHCQSCLLRLKAFEEAGVKDKIHYAL

SEQ ID NO: 37042 - protein, 241 aa, Zixibacteria bacterium
  misc_feature (1)..(241): tr|A0A1F4YPL3|A0A1F4YPL3_9BACT 7-cyano-7-deazaguanine s ynthase OS=candidate division Zixibacteria bacterium RB G_16_53_22 OX=1802787 GN=queC PE=3 SV=1
MEMAKALVVLSGGQDSTTCLFWARTKFDEVHAITFDYGQRHRAEVEAAKRIARMAKVASHEVVKVPDILLGTSPLVNSAQSVEEYADAQSLPGGIEKTFVPMRNTLFLTIAANRAVVLGCSDIITGVGQEDFGGYPDCREAFLFMLQKTFQESLRGVAEVNLVAPLLYLIKKETVELACELGVECLDALAYTHTCYKGEYPPCGHCHACLLRQKGFDEAGIADPLIVRSGPVPIVGGHCVR

SEQ ID NO: 37043 - protein, 200 aa, Unknown
  misc_feature (1)..(200): tr|A0A1F4U6M4|A0A1F4U6M4_9BACT 7-cyano-7-deazaguanine s ynthase OS=candidate division WOR-1 bacterium RIFOXYC2_ FULL_46_14 OX=1802587 GN=queC PE=3 SV=1
MKAILLLSGGLDSTTTLYYAIGKGYQCHALIFDYGQKHRKEIRYAVAAAKRVSVAYRVVQIKLPWKGSSLLDPRHKKKAKGIPPTYVPARNTIFLSFALSYAEAIGAEAIFYGANAIDYSGYPDCRPEFVRAFQNLIKAGARDCGIKVSAPLIKKTKAQIVQLAKKLGVPIDKTWSCYEGSAKPCGVCDSCKLREKGLKG

SEQ ID NO: 37044 - protein, 618 aa, Abyssubacteria bacterium
  misc_feature (1)..(618): tr|A0A3A4PFH2|A0A3A4PFH2_9BACT Uncharacterized protein OS=Candidatus Abyssubacteria bacterium SURF_5 OX=209336 0 GN=C4520_00505 PE=4 SV=1
MTARAGRHIILGNGAEGPENVVNPFVLNYLDGRGPVNVRIGLQRLVRSVYHLPPRILDLLEIAGYVFAADRSISRGRNDLVEYHSWSRSIEFHIRVRDCEFWSQHLVTERLREVLKFMTGDAEFSFHFQPGHSTEPTSLFDLPECRIEPKAGEPNVCLFSGGIDSLCGALDLLAHEDKEVILVSHQSQPGTVRTQKSLVDALDRLYPRRVAHFKFECTLKGARADEETQRSRSFLYTSVAYAIAWAYGQKRINVFENGVTSINLRRREDLANARASRTTHPQTMARMATLLSLIDGQPFEIALPYLFSTKTDVIRKLASVAEDLLASSVSCSRTVKKRDTTHCGHCFQCIDRRIASYAAEAETIDHRGLYMTDIVSDHIDDREARNIMIDYIRQAKSFSEDSADKFYEEYLSDLAECLDYLPLDCLDQEKVCRIWDLFRKHGNQVRDGLNRIRALHEDVFESLPEHSLLHLISLREYLKPEVERLVATICKTLQSPIAEMFARHRPVDEPDLNEKLGAFLRSHEPKIRSEHPNVSFACARVIPDHGSIEVDLLIEAKYIRGNTSPSKATEGIAADLTKYPDQAYILFIVYDPEHKILDDNAFCKDIRAKRPSRVLIIR

SEQ ID NO: 37045 - protein, 225 aa, Abyssubacteria bacterium
  misc_feature (1)..(225): tr|A0A419EQR2|A0A419EQR2_9BACT 7-cyano-7-deazaguanine s ynthase OS=Candidatus Abyssubacteria bacterium SURF_17 OX=2093361 GN=queC PE=3 SV=1
MKRELAIALVSGGMDSCVAAALAAQEHRLALLHVSYGQRTWRRELEAFRGIAAHYGVEQTLVADIGYLSTIGGSSLTDSEMSVQPADLNRSGIPSSYVPFRNTHFLAIAVSWGEVIGAGRIFIGAVEPDSSGYPDCREVYYKVFNELIRVGTRPETHIEVVAPLIRMKKSEIVKLGLKLGAPLQLTWSCYRNDNVPCGDCDSCALRAKGFEEAGAIDPIVKHVIS

SEQ ID NO: 37046 - protein, 182 aa, Accumulibacter sp.
  misc_feature (1)..(182): tr|A0A011NTE1|A0A011NTE1_9PROT 7-cyano-7-deazaguanine s ynthase OS=Candidatus Accumulibacter sp. SK-12 OX=14540 01 GN=queC PE=3 SV=1
MALAASEHRVVRLRLADFGGSALTDTSVALPVNGLRPGIPATYVPARNTVMLSLALAWAEVLRSQDVFIGVNAVDYSGYPDCRPEYIAAFERMANLATKAAVEGSALRIHAPLIDLGKAEIIRRGLELGIDYSLTVSCYQADAAGRACGVCDSCRLRRAGFAAAGVADPTPYASRQPPEGHR

SEQ ID NO: 37047 - protein, 232 aa, Accumulibacter aalborgensis
  misc_feature (1)..(232): tr|A0A1A8XWC7|A0A1A8XWC7_9PROT 7-cyano-7-deazaguanine s ynthase OS=Candidatus Accumulibacter aalborgensis OX=18 60102 GN=queC PE=3 SV=1
MNMQTSSPGQAAVVLLSGGLDSATTLAIARASGFACYCLSLDYGQRHRAELQAAAAVAEAIGASEHRVLRLSLDDFGGSALTDDAIAIPVDGVQPGIPVTYVPARNTVMLSLALAWAEVLGSRDIFIGVNAVDYSGYPDCRPEYIDAFEGMANLATRAAVEGSTLRIHAPLIDLGKAEIIERGVTLGVDYGLTVSCYQADETGRACGVCDSCRLRRAGFTAAGLADPTRYTA

SEQ ID NO: 37048 - protein, 260 aa, Acididesulfobacter guangdongensis
  misc_feature (1)..(260): tr|A0A519BEW8|A0A519BEW8_9DELT 7-cyano-7-deazaguanine s ynthase OS=Candidatus Acididesulfobacter guangdongensis OX=2597225 GN=queC PE=3 SV=1
MNNSKKAVILFSGGLDSSTVLKIALDEGYEVIPVSFFYNQRHKTEIDHAKKIAEYFNIKNHIIINLDFSSIKGSALVDFDISVPKNQIKIAAASDPLYTTDNSESSELAAQKDNTPKAQKNNIPITYVPARNTIFLSYAIAVGEVNNAGDIFIGVNWIDYSGYPDCRPEYIQSFEKMANIATKASVTGQLKFKIHTPLINMGKKDIIKKAHDINVPLEMTHSCYDPIGGLACGVCDSCILRKNGFIEAGIEDPTIYAKLF

SEQ ID NO: 37049 - protein, 260 aa, Acididesulfobacter diazotrophicus
  misc_feature (1)..(260): tr|A0A519BL88|A0A519BL88_9DELT 7-cyano-7-deazaguanine s ynthase OS=Candidatus Acididesulfobacter diazotrophicus OX=2597226 GN=queC PE=3 SV=1
MNSENLNNLESLEIKSNAKNAIVLFSGGLDSSTVLKIALDEGYNVIPVSFFYNQRHQTEIDHAKKIIEYFKIKNHIIINLDFSQIKGSSLVDLKIDVPKNQIKLINSCNNNNDVNDNANDNKNNSIPITYVPARNTIFLSYAIAVGEVNNAGDIFIGVNWIDYSGYPDCRPEYILAFEQMANIATKVSVLGELEFKIHTPLISMGKKDIIKKAYEIGVPLELTHSCYDPINGLACGVCDSCILRKNGFIEAGIKDSTVYA

SEQ ID NO: 37050 - protein, 239 aa, Acidulodesulfobacterium ferriphilum
  misc_feature (1)..(239): tr|A0A519BBP7|A0A519BBP7_9DELT 7-cyano-7-deazaguanine s ynthase OS=Candidatus Acidulodesulfobacterium ferriphil um OX=2597223 GN=queC PE=3 SV=1
MHNANDKRAVVLFSGGLDSATVLKIAIDEGFEVIPLTFFYNQRHKTEIEHAKKIVKFFNLKNHAIVNLDFGQIKGSALVDLSMDVPKNRINKSEPKKAGGKNDIPITYVPARNTIFLSYALAVAEVNMAGDIFIGANYIDYSGYPDCRPGYLRAFEKMANLATKASVTGEINFKINAPLLKLTKKDIIIRAFEIGAPLELTHSCYDPIEGLACGVCDSCILRRRGFEEAEIKDPTKYYK

SEQ ID NO: 37051 - protein, 232 aa, Aegiribacteria bacterium
  misc_feature (1)..(232): tr|A0A1V4MY19|A0A1V4MY19_9BACT 7-cyano-7-deazaguanine s ynthase OS=Candidatus Aegiribacteria bacterium MLS_C OX =1775674 GN=queC PE=3 SV=1
MTPPEGAVVLLSGGLDSATVLHIAVDMGFEVHALTFGYGQRHSPELRAAALVAERAGVKDHITVFLDPRLFQGSALTGYGEVPDGSALREEGAIPSTYVPARNTVFLSLALARAESIGSRDVFIGVNSLDYSGYPDCRPEFIEAFRRMAGLATRDALEGRPVRIHAPLLEMTKARIIERGLELGVDYSLTLSCYRPDGHGRPCGTCDSCMLRLRGFREAGTEDPAVYSTEGE

SEQ ID NO: 37052 - protein, 268 aa, Aerophobetes bacterium
  misc_feature (1)..(268): tr|A0A523YS48|A0A523YS48_9BACT ATP-dependent sacrificia l sulfur transferase LarE OS=Candidatus Aerophobetes ba cterium OX=2030807 GN=larE PE=4 SV=1
MEEKLASLKRILSNMGSVLIAFSGGVDSTFLLKVAHDVLGKKIVAATASSETYPASELEAAKKIARKLGVKHLVIQTEELSKQDFVKNSPQRCYFCKRELFSRLNKIARGQGLNYVADASNYDDLADFRPGRQAGQELGIKSPLKEARLTKAEIRSLSHKMNLPTWNKPSLACLASRIPYGTRITREKLKRIDEGERFLKGLGIRQLRIRDHDGIARIEVAQEEMSLFWQENMVRLIIDKLKRLGYTYVTLDLEGYRPGSMNEVLEKR

SEQ ID NO: 37053 - protein, 222 aa, Aerophobetes bacterium
  misc_feature (1)..(222): tr|A0A1V5K6J4|A0A1V5K6J4_9BACT 7-cyano-7-deazaguanine s ynthase OS=Candidatus Aerophobetes bacterium ADurb.Bin4 90 OX=1852830 GN=queC PE=3 SV=1
MKTNSKCVVLLSGGQDSTTALFWAKKKFKTVMAVSFNYGQRHKIELKSAAKIAKLARVKHTIITVKEYEAIQNSALLDKTSSVNKHDKINKKLPASFVPGRNILFLTAAAAYGYVNKAENIVIGVSQADYSGYPDCRGEFIRSMEKSLSLGMEYPVKIHTPLLNKNKIQTVLLAKKLGVLDMMKYTHTCYEGDNKPCSKCPACRLRAKGFKEAGIADPVLRR

SEQ ID NO: 37054 - protein, 381 aa, Amesbacteria bacterium
  misc_feature (1)..(381): tr|A0A0G1V3H6|A0A0G1V3H6_9BACT 7-cyano-7-deazaguanine s ynthase OS=Candidatus Amesbacteria bacterium GW2011_GWA 1_48_9 OX=1618355 GN=UY33_C0003G0018 PE=3 SV=1
MDKKLGAINGREITSSLIGLTDPQLYNIDSVVKTSLLTTLAGYLESDSITVYGNAFADSKFLQTFLSYILNDKRAAPRDFNLLLNFVSNGSVFHPNQDSNSYDCLVSFSGGIDSTAGLMYSLDAKRKVLPVWIGFGQKNENRELAVVNELCKKLNVQPWIIKLDLARYVDAGWSRWKSGIIPARNLLFASIAAEIASRSNSPSVDILLCAHKEEITPVNTDKSQRFYDSTTLLFNSAYKKNIRVTTPFYSYTKPEIVSYWSRYWTDRYGISPGETTSCYLGNNCGSCKACFNRAVAFTCSGYKNDHFLQDPFIDQSNTIWGGYITRFDSLESERQLDILYSLNSHIDIAPPRIAKFVEYHYPHFRNAIKKRQKQIRNVLIS

SEQ ID NO: 37055 - protein, 381 aa, Amesbacteria bacterium; identical to SEQ ID NO: 37054
  misc_feature (1)..(381): tr|A0A1F5A1P7|A0A1F5A1P7_9BACT 7-cyano-7-deazaguanine s ynthase OS=Candidatus Amesbacteria bacterium RIFOXYD1_F ULL_47_9 OX=1797267 GN=A2576_00675 PE=3 SV=1

SEQ ID NO: 37056 - protein, 231 aa, Aminicenantes bacterium
  misc_feature (1)..(231): tr|A0A1F5ATQ6|A0A1F5ATQ6_9BACT 7-cyano-7-deazaguanine s ynthase OS=Candidatus Aminicenantes bacterium RBG_13_59 _9 OX=1797268 GN=queC PE=3 SV=1
MNITIVLLSGGIDSTTALHWAIARGGRVEALTFDYGQRHRLEVGAARRTCRRLSVPWHVLKVDLGQVGGSCLTDPTLPLPEYKNLAGFPDGPPVTYVPFRNGIFLALAAAWAEAHGGREIVCGFNVIDSPNYPDTRKSFVRAMQRAVNQGTGAAWSGRRIRILAPFLDMKKSEIIKTGLRLGADYSSSISCYGGKETPCGRCSACLLRKRAWEEMGSRDHLIIRLEREGRI

SEQ ID NO: 37057 - protein, 251 aa, Aminicenantes bacterium
  misc_feature (1)..(251): tr|A0A1F5AYM0|A0A1F5AYM0_9BACT 7-cyano-7-deazaguanine s ynthase (Fragment) OS=Candidatus Aminicenantes bacteriu m RBG_13_59_9 OX=1797268 GN=A2Y69_11710 PE=3 SV=1
MSNRPAALKKAGFSSNIKLVMHQSRKALVLFSGGIDSTTALYWAQGRYAEVSALSFDYGQRHRVELALARCLARRLRLPHRVLKFDLRQVGGSALTDLSVSVPRIVHQEDIGPGVPPTYVPFRNGIFLALAAAWAEAKGINDMVCGFNTIDSPNYPDTRASFVRAMQRAVDLGTGAGSRGHRLRIVAPFIRMKKSEIIRLGLSLGADYSFSISCYSGGEVPCRRCSSCLLRKRAWEEAGTKDHLFTRLRKE

SEQ ID NO: 37058 - protein, 224 aa, Amulumruptor caecigallinarius
  misc_feature (1)..(224): tr|A0A4V1LAL5|A0A4V1LAL5_9BACT 7-cyano-7-deazaguanine s ynthase OS=Candidatus Amulumruptor caecigallinarius OX= 2109911 GN=queC PE=3 SV=1
MSDTAKDTILVLSGGMDSTTMLYEFRQRIALAVTFDYGSNHNAREIECAAYNCRKLGVPHLVIPLGFIGRYFESSLLSGGDAVPTGHYDGENLRSTVVPFRNGIMLAVAAGLAESRGLAKVMIANHAGDHEIYPDCRPGFVKAMGEAISEGTFAPVVLDAPYTGLTKADIALRGLRLGLDYDHTYSCYKGGEKPCGECATCVEREEALAQAHKMLRACLKINVK

SEQ ID NO: 37059 - protein, 230 aa, Aquarickettsia rohweri
  misc_feature (1)..(230): tr|A0A3R9ZBY5|A0A3R9ZBY5_9RICK 7-cyano-7-deazaguanine s ynthase OS=Candidatus Aquarickettsia rohweri OX=2602574 GN=queC PE=3 SV=1
MKNAVVLLSGGLDSSTTLALAKERGYATYCMSFDYGQKQLIELKSARKVKNSIAPEAGHKIVKIDLKTFGNSAITDNIDVPKNRSEKEILSKIPITYVPARNTIFLSYALAYAEVLQANDIFIGANILDYSGYPDCRPAYIEAFNIMANLATSRAVGGEKIKIHTPLIQLNKAQIIEEGLRLGIDYSMTLSCYNPDENGYSCGECDACILRLQAFKELGKDAPIKYISHK

SEQ ID NO: 37060 - protein, 234 aa, Atelocyanobacterium thalassa
  misc_feature (1)..(234): tr|A0A086CGM2|A0A086CGM2_9CHRO 7-cyano-7-deazaguanine s ynthase OS=Candidatus Atelocyanobacterium thalassa isol ate SIO64986 OX=1527444 GN=queC PE=3 SV=1
MSDKSLAVVLLSGGLDSATSAAIAASQGYELIALSFSYGQLHQKELKSARIIAKELDINSHHIVNVDISQWGGSSLTDKSLAIPLSGVNPYQIPSTYVPGRNTVFIALALSLAEAKGAKAIYLGINMIDYSGYPDCRSEYLKTYQDLAKLSSKAGIEGNAPQLIAPLIKKNKVDIIKEAVRLGVPIEKTWSCYQGGHEACGLCDSCRIRDQALIEAGYPFLVTTKGKEIYNLNR

SEQ ID NO: 37061 - protein, 301 aa, Atribacteria bacterium
  misc_feature (1)..(301): tr|A0A359LIK6|A0A359LIK6_9BACT ATP-dependent sacrificia l sulfur transferase LarE OS=Candidatus Atribacteria ba cterium OX=2053509 GN=larE PE=4 SV=1
MDKINYNKNLGLRFIESGEKSIKRKAQRNNLKDKLDNLYNILSEMGSILLAYSGGVDSTFLLKVAREELGDKVIAVTIKSEIHPLSEITVAKKMAQQFKVKHLINNIEILSKKEFTSNPKERCYICKKELFNRISELAKELNLNFVVDGSNYDDLSDYRPGMKAIRELKIRSPLQEALLTKDDIRFLSKEMNLPTWDKPSNSCLATRVPYGEEITLEKLKRIEEAEDFIHNLGIEQVRVRHYSNLAKIEVREKDMLFLMKKDWREKIIIKLKQLGFIYITLDLQGYRSGSMNESFMEKGKN

SEQ ID NO: 37062 - protein, 274 aa, Atribacteria bacterium
  misc_feature (1)..(274): tr|A0A523RHS9|A0A523RHS9_9BACT ATP-dependent sacrificia l sulfur transferase LarE OS=Candidatus Atribacteria ba cterium OX=2053509 GN=larE PE=4 SV=1
MNIKKEKLNNLRKILSETGSVLIAYSGGVDSTFLLKIAREELGDKIIAVTVKSEIHHLSEVTDAKKMAQKFKVKHLFIDIDILSNKEFVNNPKERCYICKKEIFSRISEIAKELNLNFVADGSNYDDLSDYRPGMKAVRELRIRSPLQEALLTKDDIRLLSKEMDLPTWDKPSNSCLATRIPYGDKITLEKLKRIEKAEGFFHDLGIEQVRVRCHNKLAKIEVGEKDLLFLMEEDLRKKIISKLKQLGFIYVTLDLQGYRSGSMNEELNEKAED

SEQ ID NO: 37063 - protein, 228 aa, Aureabacteria bacterium
  misc_feature (1)..(228): tr|A0A3A4QU83|A0A3A4QU83_9BACT 7-cyano-7-deazaguanine s ynthase OS=Candidatus Aureabacteria bacterium SURF_26 O X=2093366 GN=queC PE=3 SV=1
MTVKKAVVLLSGGIDSYTVAAIARKDGFILYALSFDYNQRHKYEIQAARRIAESLSVKQHIVSQLGFLRDIGGSALTSSIPVPENRSDMSDIPVTYVPARNILFLSYAVAWAEVLGACDIFIGVNAIDYSGYPDCRPEFIAAYQQAVNVGTKAGVNGQFFCIRTPLIGMTKREIILAGRAVGCDYSLSISCYQADSHGLACGACDSCLIRMKGFQDAGVPDPTQYRIR

SEQ ID NO: 37064 - protein, 218 aa, Azambacteria bacterium
  misc_feature (1)..(218): tr|A0A350QJJ0|A0A350QJJ0_9BACT 7-cyano-7-deazaguanine s ynthase OS=Candidatus Azambacteria bacterium OX=2053511 GN=queC PE=3 SV=1
MSQKVVVIYSGGMDSFTVLQKAVAAGHDVYALSFNYGQRHVKELICAANVCKELNIKHKIVDISAINQLIAGSSLTSDIDVPEGHYAADNMKSTIVPNRNMILLSLAVGYADSIGARAVHYGAHSGDHFIYPDCRPEFVQKMNDVCQIANYQPVDIVSPYLYQTKIEILADGLAMGLDYSKTWTCYNGRDKACGKCGSCQERLEAFKLNNASDPLPYE

SEQ ID NO: 37065 - protein, 222 aa, [Bacteroides] periocalifornicus
  misc_feature (1)..(222): tr|A0A0Q4B0G7|A0A0Q4B0G7_9BACT 7-cyano-7-deazaguanine s ynthase OS=Candidatus [Bacteroides] periocalifornicus O X=1702214 GN=queC PE=3 SV=1
MGKKAVVLLSGGLDSTVALHVAKRDYDELYALSFTYGQLHSKELACAQWQGEHAGVKEHRIVELKLDAWGDCSLTHAAEPIEPGNVQRTSTPNTYVPARNMVFLSVAASYAEAVGASTIFIGVSEVDYSGYVDCREEFIVQMEAAINAGTERKLTHGDPIRIMAPFIHMRKADEVLLGAKLGVDFSHTWTCYQGDEKPCGVCDSCLLRAKAFAEAGVPDPLG

SEQ ID NO: 37066 - protein, 230 aa, Baumannia cicadellinicola
  misc_feature (1)..(230): tr|A0A088MY01|A0A088MY01_9GAMM 7-cyano-7-deazaguanine s ynthase OS=Candidatus Baumannia cicadellinicola OX=1864 90 GN=queC PE=3 SV=1
MKQTVVVFSGGQDSTTCLIQALTQYDKVHCLTFDYGQRHRAEINIARRLAIALGVYVHKVINASVLNMLAVSSLTRNHMLVPVSPEDKHLSSTFVPGRNIFFLTLAAIYAYQIEAEVIITGVCETDFSGYPDCRNNFIRALNQAINLGMARDIRFITPLMWLNKAETWALADYYKKLDLVRNETLTCYNGLKGEGCRRCSSCHLRSRGLETYQQQPQLIMSSLKAKTGLR

SEQ ID NO: 37067 - protein, 116 aa, Beckwithbacteria bacterium
  misc_feature (1)..(116): tr|A0A2H0B6X4|A0A2H0B6X4_9BACT 7-cyano-7-deazaguanine s ynthase (Fragment) OS=Candidatus Beckwithbacteria bacte rium CG23_combo_of_CG06-09_8_20_14_all_34_8 OX=1974497 GN=COX08_01335 PE=3 SV=1
MALKGLKKSKILNWLANALECYTNLKVIRISLPWKGSSLIDKSYSLPQISSEKDIGGSIPSTYVPGRNLIFLAFAFSYAESVNASLILIGANSVDFSGYPDCRPQFYRLLNRLAQI

SEQ ID NO: 37068 - protein, 217 aa, Beckwithbacteria bacterium
  misc_feature (1)..(217): tr|A0A1J5BAH6|A0A1J5BAH6_9BACT 7-cyano-7-deazaguanine s ynthase OS=Candidatus Beckwithbacteria bacterium CG2_30 _44_31 OX=1805035 GN=AUK18_01000 PE=3 SV=1
MKAINRKIAVCTVSGGLDSAVAFAILADKDYKLHFIFFDWGQKTLEKERKCAKALAKHYNVDLKIVEIPFLKSLPDVSLTAKETLTTEINEYVPNRNAILESQAVAYAESLKAGIICVGSTGGDHICPDNSPKFIKAMQALINQGTMLKPPIQIIAPLMDTDKIGAVKLGIKLKVPFELTWSCHNNTDKACGKCSNCLARLEAFKVNNISDPTKYQK

SEQ ID NO: 37069 - protein, 284 aa, Berkelbacteria bacterium
  misc_feature (1)..(284): tr|A0A2H0W622|A0A2H0W622_9BACT 7-cyano-7-deazaguanine s ynthase OS=Candidatus Berkelbacteria bacterium CG10_big _fil_rev_8_21_14_0_10_43_13 OX=1974514 GN=COT78_03180 P E=3 SV=1
MKRAVLKKKSKELILHSLTKKTKENIAIIKSIENFFIQMRGYVFKMPKPGTPVVVSLSGGADSVITTAILLEEYGLEVFPFFISRGQKAEKPELKSVKYFSKYFSKHYPNLYHKPVIMSVPNPASEIKHLLKESLIEGTGYPMRNSIIIEYGAQYAFGLGSEGVHVRNIFCSFVACDGDFGAQTSMTGLRSLMQHICIDMGDMTWQVTALPLEKEMGFYLDKDDLLRWAKSVDLPVENTRSCFGSQEKHCGVCYACKHRKISFEDARLEDKTKYLDTRASKDLP

SEQ ID NO: 37070 - protein, 583 aa, Berkiella aquae
  misc_feature (1)..(583): tr|A0A0Q9YYP1|A0A0Q9YYP1_9COXI 7-cyano-7-deazaguanine s ynthase OS=Candidatus Berkiella aquae OX=295108 GN=queC PE=4 SV=1
MKYHIIGDRTKHKLEINGQSIHLPFSNRSKLHTDLLMPAKHSPEGKIPPIVQDLIDVATMIYHADKLCKRGEREQWIRNFSLEIQLRCPKQFDKIKSKLIECLSILSSDNFKFSFLPGKFKQQPIFSPDKDINDWGTLTDISLLSGGQDSLVGASRLLANGRNPLFVHVFTRDKAPAGELKDRLKKHHKRNNIAYFNQVISSLATTQKEDNENFQVEPSQRLRSFYFLSIASALAYSHSVKNIYINENGIMAIHLPLDTARSSSFSTKTAHPAFLKLFEEIISELFEQQMHILNPFVLETKAEVIERSKKLKIEKLMGLTVSCAHSATIENSIKKNKHKRNILNPSAHNNHCGYCFPCILRKISMWAAGLELKDVRYCYDPFIAFVDAEADDYDFIYEAMSAILGLLRMTTKIESSTDEELLIEYPQLLDSASNLENVSAHALIKFHRKFAQEVNSFIVKKVPYLKFLLDHNASHTLSMRVNALLTEANLDDLIAVNQKRSVTDAFYENFFKMIERWRIHLQIALFEKTFSEASIKKMMKEIFQEVIPRNQPKITKNDLSPLREGIWKRLKSRDCPPFWEANK

SEQ ID NO: 37071 - protein, 223 aa, Brocadia sp.
  misc_feature (1)..(223): tr|A0A399WLS7|A0A399WLS7_9BACT 7-cyano-7-deazaguanine s ynthase OS=Candidatus Brocadia sp. OX=2172549 GN=queC P E=3 SV=1
MKDLAIVLVSGGMDSCVTAAIAHAQYQLALLHVNYGQRTESRELKAFHDIASYYNIPKDRILIANIDYLRKIGGSSLTDPRMNVQDAQSDIKEIPTSYVPFRNTHLLAIAVSWGEVIGARKVFIGAVEQDSPGYPDCRPIYYEAFNKLIRVGTRPTTCIEVETPLIHKGKSEIVKTGISLGAPLHLSWSCYKNTDKACGQCHSCFLRLKAFKEAGVKDPIPYV

SEQ ID NO: 37072 - protein, 237 aa, Brocadia sapporoensis
  misc_feature (1)..(237): tr|A0A1V6M0A1|A0A1V6M0A1_9BACT 7-cyano-7-deazaguanine s ynthase OS=Candidatus Brocadia sapporoensis OX=392547 G N=queC PE=3 SV=1
MKDLAIVLVSGGMDSCVTAAIAHTQYELALLHVNYGQRTESRELKAFHDIASFYNVPKEKILISNIDYLSKIGGSSLTDRSMSVPDAQANTEEIPTSYVPFRNTHLLAIAVSWGEVIGARKIFIGAVEQDSPGYPDCKPAYYEAINNLIKVGTKPTTSLEVETPLIHMKKSEIIKIGISLEAPLNLSWSCYQNTEKACGLCHSCFLRLKAFQEAGVKDPIPYDKPKPVIDNEGDSYG

SEQ ID NO: 37073 - protein, 224 aa, Brocadiaceae bacterium
  misc_feature (1)..(224): tr|A0A5C6D4C7|A0A5C6D4C7_9BACT 7-cyano-7-deazaguanine s ynthase OS=Candidatus Brocadiaceae bacterium S225 OX=25 28033 GN=queC PE=3 SV=1
MIDKNLAVVLLSGGLDSCVTMAIAREKHNVALLHVGYAQRTQTREYNCFRSIARYYKVPETRTLALELDFLRKIGGSSLTDLNIPVDKGNTSRDIPTSYVPFRNTHLLSIAVSWAEVIKAESIYIGAVQQDSPDYPDCRAEYYEAFNRLVEVGTKPSTNIKVITPLLNMSKSEIVKKGIELAAPLQLTWSCYERNDKSCGYCQSCRIRLKAFEEAGFKDKIHYV

SEQ ID NO: 37074 - protein, 237 aa, Brocadiaceae bacterium
  misc_feature (1)..(237): tr|A0A5C6EYM1|A0A5C6EYM1_9BACT 7-cyano-7-deazaguanine s ynthase OS=Candidatus Brocadiaceae bacterium B188 OX=25 28032 GN=queC PE=3 SV=1
MKDLAIVLVSGGMDSCVTAAIAHTQYELALLHVNYGQRTESRELKAFHDIASFYNVPKERILISNIDYLSKIGGSSLTDRSMSVPDAQVNTEEIPTSYVPFRNTHLLAIAVSWGEVIGARKIFIGAVEQDSPGYPDCKPAYYEAINNLIKVGTKPATSLEVETPLIHMKKSEIIKIGISLEAPLNLSWSCYQNTEKACGLCHSCFLRLKAFQEAGVKDPIPYDKPKPVIDNEGDSYG

SEQ ID NO: 37075 - protein, 288 aa, Buchananbacteria bacterium
  misc_feature (1)..(288): tr|A0A1G1XUS5|A0A1G1XUS5_9BACT 7-cyano-7-deazaguanine s ynthase OS=Candidatus Buchananbacteria bacterium RIFCSP HIGHO2_01_FULL_39_8 OX=1797533 GN=A2731_02955 PE=3 SV=1
MVELIGVKHNKYRIENKENEDVKLLKILDDIFIEKRGYVVKLPPAGSSVVCCMSGGGDSVANIFILLNEFKYNVYPFFINRGQSAYGWEKNAVEHYDDIFSARFPWRYHRTLEIKVDTPAKEYKDDLREVKKVMADKEFSNHISYPARNSIIFLTGMEYAYSLRKNGAIANTLFSSHLASDSSFHCSQTWQRIMNLEMCHILHDWSFQFISLPIETAFGNYFDKDIFIKYCQENNFDLTQTRTCVKNTKTQCGTCPCCWDRRRSFLEAGIEDKTEYSAPYPEKPGAYY

SEQ ID NO: 37076 - protein, 510 aa, Buchananbacteria bacterium
  misc_feature (1)..(510): tr|A0A2H0VZT1|A0A2H0VZT1_9BACT GMP synthase [glutamine- hydrolyzing] OS=Candidatus Buchananbacteria bacterium C G10_big_fil_rev_8_21_14_0_10_42_9 OX=1974526 GN=guaA PE =3 SV=1
MIVILNFGGQYIHLIARRVREMGVYSEIVPHNISAQKLKSLKPEGIILSGGPASVYAKNAPQPNKAIFKLGIPMLGICYGHQLIARYNGAHVDPSALGRFGKIQMTVNNKSGLLKSLKGKEQVWFSNYDVVTAVPKTFKVTAKTTSCPVAVMESQSKKQYGLQFHPEVIHTPSGKKILENFVFGICHAKKSWETKYLPETLGKSVKKTVGQNNVLLAVSGGVDSTVVAALLHQALGSQLYCVHVDHGLMRKDEVSEIKRMFKHLKVKNFKVVDASNLFLQRLKNVSDPEQKRKIIGHTFIEVFEKEAKRLKRSAHISFLAQGTIYPDRIESGSTSKQAAKIKSHHNLTLPKRMQLKILEPIKDLYKDEVRALGLQLGLPKEFIYRHPFPGPGLAVRILGPVDKAKVKILQEADAIFIDELKKQKEYHKIAQAFAALFPVKAVGVMGDSRSYEYVISLRAVSTTDFMTADWYRMNGNLLSDVSNRIVNEVRGVNRVVYDITQKPPGTVEYE

SEQ ID NO: 37077 - protein, 244 aa, Burkholderia pumila
  misc_feature (1)..(244): tr|A0A0J7JHE7|A0A0J7JHE7_9BURK 7-cyano-7-deazaguanine s ynthase OS=Candidatus Burkholderia pumila OX=1090375 GN =queC PE=3 SV=1
MTRLDAKDSALALFSGGQDSATCLAWALERYQTVETLGFDYGQRHRVELECREGFRAAVAREFPHWTERLGEDHMIDLSVLGAISDTAMTREIEIEATANGLPNTFVPGRNLLFMTIAAAVAYRRGLKVLVGGMCETDFSGYPDCRDDTMKALQVALNLGMETRYALETPLMWLDKADTWRLAETLGGDTLVDMIRVETHTCYVGERAELHEWGFGCGQCPACKLRKRGYEAYRAGEQVDVAPV

SEQ ID NO: 37078 - protein, 445 aa, Burkholderia verschuerenii
  misc_feature (1)..(445): tr|A0A0L0MG01|A0A0L0MG01_9BURK Uncharacterized protein OS=Candidatus Burkholderia verschuerenii OX=242163 GN=B VER_04092 PE=4 SV=1
MGELPAMIEIDVRPEAADLPPPNDRRIPVQLYGASAAKDMGAIGGSVIDRVSRIAAPLDHAAFDFLSLSLSLAVAAADTFADRSEAADGWAREINLVVALADPERWRPAQSLLEKALRFLSGDQWSLRFVEGGRPLPAPRTRVSNKLVLADCRSACLFWGGLDSAIGMLDLRAEGERSVLISHAYTHDAGRQAEILNRAGGATPRLALHANPTKRLDHNNDVRMRTRSFNFFAMGALVAATLSKNYLQGKAVPLYVPENGLIAINSPLTNRRIGALSTRTTHPHYMLLIQQVFDAVGLPVRLHNPYATLTKGEMIAECADQGALRSFVSRTVSCGKWKRSGIQCGRCVPCLIRRASLYHAGWEDQTEYKASSKNLREVLKAGNDSDDLMAMILAARRMDSRDVSSWIAKTGPLPKDAAEQKALADVVSRGMAEVAQYLRSEQLPA

SEQ ID NO: 37079 - protein, 226 aa, Cloacimonas sp.
  misc_feature (1)..(226): tr|A0A1W9QP15|A0A1W9QP15_9BACT 7-cyano-7-deazaguanine s ynthase OS=Candidatus Cloacimonas sp. 4484_275 OX=19707 70 GN=queC PE=3 SV=1
MKAIVLVSGGMDSLVTAAIAASENEEIYFLHLNYGQKTEKKELELFRKIVDYFQPKDTLIADVSYLKQIGGSSLTDENIDVKNYDGSEGIPNSYVPFRNAHLLTIATSWAEVIGADRIYIGAVEEDSSGYPDCRENFYRNFQKAIDSGTKDETKIKIVTPVIHKTKAEIIQIGKKLNVPFELSWSCYKNNEVACGVCDSCVLRINAFKKAGEIDPIPYEIKIDWKN

SEQ ID NO: 37080 - protein, 121 aa, Cloacimonas sp.
  misc_feature (1)..(121): tr|A0A3D3EZB3|A0A3D3EZB3_9BACT 7-cyano-7-deazaguanine s ynthase (Fragment) OS=Candidatus Cloacimonas sp. OX=205 3534 GN=DHW79_07455 PE=3 SV=1
MTRAIVLLSGGMDSLVTAAIAARECDELYLLHFSYGQRTESKEKWCFRQIASHYKSREARVVDYRWLAEIGGSALTDKDMSLSEDNGVPNTYVPFRNATMLCAAIAWAEVIEADSIYIGAV

SEQ ID NO: 37081 - protein, 224 aa, Cloacimonetes bacterium
  misc_feature (1)..(224): tr|A0A2N2KYF0|A0A2N2KYF0_9BACT 7-cyano-7-deazaguanine s ynthase OS=Candidatus Cloacimonetes bacterium HGW-Cloac imonetes-2 OX=2013734 GN=queC PE=3 SV=1
MRRAVVLVSGGMDSLVAAAIAVKECEEVNFLHIDYGQTTMSKEAECFEAMCVHYMPKRSKTIKMMWLSEIGGSALTDESMQIEDHSELNEIPNTYVPFRNANLIGAAVSWAEVINASRVYIGAVEEDSSGYPDCREDFFRALQLAIGKGTKTPNPIMISTPVLHMSKAQIVKKGLELGAPFQHSWSCYRDNQIACGTCDSCYLRLKAFREAGIHDPIPYKNQGI

SEQ ID NO: 37082 - protein, 226 aa, Cloacimonetes bacterium
  misc_feature (1)..(226): tr|A0A523XJ82|A0A523XJ82_9BACT 7-cyano-7-deazaguanine s ynthase OS=Candidatus Cloacimonetes bacterium OX=203080 8 GN=queC PE=3 SV=1
MNKGIAVVLVSGGMDSAVVCAIAKNKYNLALLHINYGQRTEERELKAFNSLADFYTSKKRLVVDFDHLKKIGGTSLIGQDIEIPGGLSKEGAPSTYVPFRNAQFLCVAVSWAEVIGATTVISGATEEDAAGYPDCRKEFYAIFSRLVEAGTKKETKIEIVTPLISLKKKDIIRLGVELGVPFELTWSCYRNNEKACGRCDSCLRRLRAFKEAGVEDRIEYELQTQD

SEQ ID NO: 37083 - protein, 251 aa, Coatesbacteria bacterium
  misc_feature (1)..(251): tr|A0A1W9S0T4|A0A1W9S0T4_9BACT 7-cyano-7-deazaguanine s ynthase OS=Candidatus Coatesbacteria bacterium 4484_99 OX=1970774 GN=B6D57_04040 PE=3 SV=1
MRILPTRYQIYREGRRRSVLSRSGRRMRTVQNTDHRCVALLSGGLDSALATLLAVEEYEQVLALTFDYGQKPARMEIEASGEIARYLSIERQVIKLDIYRDFAEMAHLPLISGVTSDEDISYWMPNRNGVMIEVASAIAEGVGASYVVVGFNTDEAQSFPDNTTEYLDALNHALEYSTQGRVKVISPTVNMTKSEILDMLHQSGFPIKHIYPCYTGEELLCGECPSCRKFISALKKVGIYDRFSWRFADAT

SEQ ID NO: 37084 - protein, 222 aa, Coatesbacteria bacterium
  misc_feature (1)..(222): tr|A0A1F5FF46|A0A1F5FF46_9BACT 7-cyano-7-deazaguanine s ynthase OS=Candidatus Coatesbacteria bacterium RBG_13_6 6_14 OX=1817816 GN=A2Y64_03775 PE=3 SV=1
MSGKSLVLLSGGLDSYGAAAELWAGGLLGAALWVDYGQRAAGGERVAAESQAGGLGVHLHTATTDIYRGLPRVGALIAGELEDDAGVERLWVPARNAVLFSLGAAVAESLGIATVAMGLNADEAVDFPDNSPSFLAAADRFLFLATAGRVQAVSPTVQRSKADIVARLLDLGLPLDRIYSCYRPPDARGRMCGRCPSCRRLKEALAANSGARGVDIPDGFAP

SEQ ID NO: 37085 - protein, 285 aa, Collierbacteria bacterium
  misc_feature (1)..(285): tr|A0A0G1JYK1|A0A0G1JYK1_9BACT 7-cyano-7-deazaguanine s ynthase OS=Candidatus Collierbacteria bacterium GW2011_ GWC2_44_18 OX=1618392 GN=UW41_C0014G0026 PE=3 SV=1
MKLPIKSEETILEEISNHPKENPLAINILEKALKEFRGYVFKMPDPGTPVVSGMSGGADTTTTIAILLEEFGLEVYPFFVNRGQRSYQQEKQSVEYFSNIFKLKYPKLFHDPIEIKVPIPANEIKKDLTEKLRHDVGHPMRNSILTEYGVQYAFSLANHDKHVRNIFCSVVSSDGNYLYHSTLTAMRSLMFHIAVDMGDPSWQVTSLPVEKEMGFYFDKDTLVKWASKHDLPLEKTRTCVELSEKHCGVCDCCYDRKRSFEVAGVKDKTEYIDIRPSSQIRANNN

SEQ ID NO: 37086 - protein, 258 aa, Collierbacteria bacterium
  misc_feature (1)..(258): tr|A0A3D5S9K6|A0A3D5S9K6_9BACT 7-cyano-7-deazaguanine s ynthase OS=Candidatus Collierbacteria bacterium OX=2053 540 GN=DHT69_02900 PE=3 SV=1
MTPSEKVLKDNRGYVSQYPKNKKVVMIVSGGLDSIATSARLMEEFDLEIFPLHIHRGQTNTNAENNAVNFFTDYFQNRYGKNKFHTPQMISVNVPPVEFKKDLLPYTKVKGHPMRDPIMHLLGVEYAVAVSQASDEPVKTIYCAIVPEDYFPHSSLDGLRANTVNTCINMGDWDWQISSPNIDPFLSTPFGKKEEIAWCMERQISIGKTISCNEASEKTNHLACGLCKSCFRRHTAFTNLGFEDPTEYYEKPHFEQFI

SEQ ID NO: 37087 - protein, 228 aa, Competibacteraceae bacterium
  misc_feature (1)..(228): tr|A0A433I307|A0A433I307_9GAMM 7-cyano-7-deazaguanine s ynthase OS=Candidatus Competibacteraceae bacterium OX=2 053538 GN=queC PE=3 SV=1
MMSTALVVLSGGQDSTTCLYWALARFGAGQVSAVTFDYGQRHRIELDCAARVAAHAAVPHTVLPIDTFAALGGNALTDTGVAVQAGVDAHTQLPNTFVPGRNLIFLTFAAALAYQRDIHHLVTGVAQTDYSGYPDCRQTTLQALEQALRLGMEYELTLHTPLMFKSKAETVLIARDLGALPALADTHTCYQGQQPPCGTCPACLLRAKGFAEAGIADPLAERFRATQR

SEQ ID NO: 37088 - protein, 227 aa, Competibacteraceae bacterium
  misc_feature (1)..(227): tr|A0A433ILA1|A0A433ILA1_9GAMM 7-cyano-7-deazaguanine s ynthase OS=Candidatus Competibacteraceae bacterium OX=2 053538 GN=queC PE=3 SV=1
MTRALVVLSGGQDSTTCLYWALHRFGAGQVEALSFDYGQRHRIELDCARTIAARAAVPYAVLPINTFAALGGNALTDPGIAVQGAAENSTALPNTFVPGRNLIFLTFAAAYAYPRGIRHLVTGVAQTDYSGYPDCRQGTISALEQAISLGMDCDFTLHTPLMHKSKADTVRMARELGALEALADSHTCYHGQRPPCGSCPACVLRARGFAEAGIADPLLERFRADPP

SEQ ID NO: 37089 - protein, 229 aa, Contendobacter odensis
  misc_feature (1)..(229): tr|A0A2G6PFL3|A0A2G6PFL3_9GAMM 7-cyano-7-deazaguanine s ynthase OS=Candidatus Contendobacter odensis OX=1400860 GN=queC PE=3 SV=1
MNIIVVCSGGLDSVVLAHKVAREHQLIQLVSFNYGQRHKKELEYAKSCAAHLNTRHSVIDISSIGAMLCGSALTDDVKVPDGHYAEESMKITVVPNRNAIMLAITFGIACICKANAVATAVHGGDHFIYPDCRPEFIKAFEVMQRHSLEGLAAIRLYTPFMALSKSEIVTEGAKLGINFSDTWSCYKGGAYHCGRCATCIERLGAFAQASVDDPTVYEDREYWKTVSHV

SEQ ID NO: 37090 - protein, 634 aa, Cryosericum hinesii
  misc_feature (1)..(634): tr|A0A398DID9|A0A398DID9_9BACT Asparagine synthetase B family protein OS=Candidatus Cryosericum hinesii OX=229 0915 GN=SMC3_08080 PE=4 SV=1
MFLLMPATSVYFEWLSAQRIYSPFRLTRHGHTGEILRSSLGGACVPCRDWGGELNMAPLFVNTPSDGRPRCVELMASPSVVLLCSTRWEVQNGVAVRGQGVADGKRIGALELAKLVESVPPRAVGSLMGKLAGSFAVLDAREPGVVRLVSDMVSSMPVYYTLDGSRLTVSDDSVALAQETGCLSEIDSQASLAMLLAGFTLGTSTICRRVHCLQAAECVVLTCKGSYWASTQDDLFSWEWRPDGGHTDDYWFSAWSEVLNDEFEDIITELDGRTAVIPLSGGHDSTLILLMLKRLGYEKVVAFSYGRRGNQDSTVSERVAAALRVPWFFVEYGTETWRQFLSSRDYNNYATWAGGLRSIAHVGDFVAVRELASGGRIDAGSVLIPGHTMDLVSGGHIPLQWQERLMTGSGSVTADDIAQITFERHMGLWNRRFAIATLHQTGLQVAEANDLFEQLQEELCPAGGVVDVVEACSVVDAFDWRNRQGKFIANSVRVYDWFGFDWLLPYWDRRIIDFWLRVPPELRLNRRLQKNVTFQIGADLGIDLHQLGLPSVASLARNMSGLRLRQIGRVVPGVRLILDVERKRRCIARDPLGAFEGWPDARERRLLWQNSPSPTINSLASLHASRLLQNGGKA

SEQ ID NO: 37091 - protein, 227 aa, Dactylopiibacterium carminicum
  misc_feature (1)..(227): tr|A0A272EWD7|A0A272EWD7_9RHOO 7-cyano-7-deazaguanine s ynthase OS=Candidatus Dactylopiibacterium carminicum OX =857335 GN=queC PE=3 SV=1
MSAPRAVVLLSGGLDSTTCLAIARDQGFETYALSVAYGQRHAAELQAAQRVVAALGAREHRVAHVDLGQFGGSALTDASIAVPVDGLQTGIPVTYVPARNTVMLSVALGWAEVLGANDIFVGVNAVDYSGYPDCRPAFIQAFETMANLATKVGVEGNRLRIHAPLIDLTKAQIVQLGNSLGVDYGLTVSCYQADDDGRACGKCDACRLRSAGFDAAGLVDPTRYIKA

SEQ ID NO: 37092 - protein, 347 aa, Dadabacteria bacterium
  misc_feature (1)..(347): tr|A0A3M0ZHA9|A0A3M0ZHA9_9BACT Uncharacterized protein OS=Candidatus Dadabacteria bacterium OX=2080303 GN=D681 5_06125 PE=4 SV=1
MNYCRLCTLPDTYPGVAFEDGVCALCLRESDSEQAELRQQEQLARAREQMLAAYKDARGQSWFDCIVCYSGGKDSTYVLRQIVEEHRLRPLAITIDNGFISPVALENIDRVVAHLGIEHHRIRVDRTFLSDLVSASLFEDLSYGNEYKRMSAVCSSCIALVNATALRYAVQYEAPLIIAGFTAGQVPAAVYSNDRTMLADGRTQRLTRLEASIGPAARAYFSVDEERLRAMSPYPVHVNPLMCESYREEHVLESIRSLGWRMPQDTGKCSSNCGLNCLGINAHVRRYGFNPYAREISELVRRGAISYARGMEMMRDTDYSEGVRACLRELGISEQAFEAAYEQDRKA

SEQ ID NO: 37093 - protein, 179 aa, Dadabacteria bacterium
  misc_feature (1)..(179): tr|A0A523I574|A0A523I574_9BACT 7-cyano-7-deazaguanine s ynthase (Fragment) OS=Candidatus Dadabacteria bacterium OX=2080303 GN=queC PE=3 SV=1
MSLKAVIIASGGIDSSTLLYKMVNEGFEVYALTFIYGQRHLKEINSANRISESLNIAHKVVNISAMKELLLGSALTDSNVEVPEVPETAEHFETLKVTIVPNRNAIFLSIAIGYAVSIGANHVFFGAHFSDRGVYPDCRKEFVEAFQNSERLATDNDKLVIDAPFVDIEKSEIIKLGVE

SEQ ID NO: 37094 - protein, 230 aa, Daviesbacteria bacterium
  misc_feature (1)..(230): tr|A0A1F5MGH4|A0A1F5MGH4_9BACT 7-cyano-7-deazaguanine s ynthase OS=Candidatus Daviesbacteria bacterium RIFCSPLO WO2_02_FULL_36_7 OX=1797792 GN=A3I48_03175 PE=3 SV=1
MSTEIKTKLNKELLRGLQRQPSGKAVLLYSAGIDSTAAGLLLKQDGYQVWPLFIKYGQSAEAAEEYLVRTAPKTLGFEPTRTIETDLLKQLTRSRLLGQQSIGDSDAWVPGRNTLFMVLAGIYAKQIDADGISIGYMLDDNFVFGDNDFFHHQAIEGVLSRSFLQPTRVLLPTMASHKKDLIRLLYEKGALDLTVSCWNANMAGERIISCSICANCIERNKYINKVRGKK

SEQ ID NO: 37095 - protein, 239 aa, Daviesbacteria bacterium
  misc_feature (1)..(239): tr|A0A0G0ZD93|A0A0G0ZD93_9BACT 7-cyano-7-deazaguanine s ynthase OS=Candidatus Daviesbacteria bacterium GW2011_G WB1_41_5 OX=1618429 GN=queC PE=3 SV=1
MRKAVVVYSGGMDSSTLLAYVVSQVYKVYAISFNYGQRHKKELDYAKKFAKQFANVVEHKIIDIGVINELVQGSSLTTPAIAVPDGHYALETMKKTVVPNRNAIMLSLACGYAVSLCADRLFVGVHSGDHFIYPDCRPEFIEAIDKAFRLGNQGFASEDFRIVAPFMYSTKADIAKLGKQLGVDYSKTWSCYKGGDIHCGRCGTCFERREAFVLAGVSDPTKYKDNRQLDVIQKETETK

SEQ ID NO: 37096 - protein, 213 aa, Deianiraea vastatrix
  misc_feature (1)..(213): tr|A0A5B8XEG9|A0A5B8XEG9_9RICK 7-cyano-7-deazaguanine s ynthase OS=Candidatus Deianiraea vastatrix OX=2163644 G N=queC PE=3 SV=1
MKKCVLLLSGGLDSVTTLALVNSQKYDVYAISFLYGQKHSIELEYAKHNAEVFKVKHKIFDMRSAFSDFNSSLLGVGEISKTGVIDDGIPNTYVPARNIIFLSIALGYAESINAKEIFIGANAIDYSGYPDCRPEFIESFQKMANIGTTFSNGELKIQTPLIAMKKSEIIKLGLSLGVDYSKTISCYSPENGKECGKCDSCIIRKKGFEEAEN

SEQ ID NO: 37097 - protein, 224 aa, Delongbacteria bacterium
  misc_feature (1)..(224): tr|A0A348NWU5|A0A348NWU5_9BACT 7-cyano-7-deazaguanine s ynthase OS=Candidatus Delongbacteria bacterium OX=20445 94 GN=queC PE=3 SV=1
MKKAVVLLSGGLDSTTCLAIAKNQGFEIHALSFDYGQKHACELKYARFNARKFKAEEHRIVKLDRKFFLNSALTDKNIEVKKGSYSEKEIPLTYVPARNTVFLSYALAYVETIKAEHIFIGVNSIDYSGYPDCRPEFISAYEKMANLALKEVVEKKMKIIIETPLMFLTKSEIIIIGKKLGIDYSKTISCYDPVDGKACGHCDSCLLRKRGFEGSGYKDETVYV

SEQ ID NO: 37098 - protein, 227 aa, Delongbacteria bacterium
  misc_feature (1)..(227): tr|A0A2G6P4F1|A0A2G6P4F1_9BACT 7-cyano-7-deazaguanine s ynthase OS=Candidatus Delongbacteria bacterium OX=20445 94 GN=queC PE=3 SV=1
MKEKAIVLLSGGLDSTTCLSIALNEGYEVYTLSFDYGQKHNYELDLAKLNSKNMGAVKHIVCKLDPAFFRNSALTNPSLEVPKNNDSDEIPITYVPARNTVFLSYALALAESINCFNIYIGVNSLDYSGYPDCRPEFIESFEKMANLGTAFGEKQNRKVNIKVPLISLTKGEIINIGKSLDVDYSKTITCYDPIDNKACGKCDSCKLRIKGFKESNYDDETIYFENQ

SEQ ID NO: 37099 - protein, 228 aa, Dependentiae bacterium; identical to SEQ ID NO: 36062
  misc_feature (1)..(228): tr|A0A1V5UBB7|A0A1V5UBB7_9BACT 7-cyano-7-deazaguanine s ynthase OS=Candidatus Dependentiae bacterium ADurb.Bin2 46 OX=1852839 GN=queC PE=3 SV=1

SEQ ID NO: 37100 - protein, 231 aa, Desantisbacteria bacterium
  misc_feature (1)..(231): tr|A0A1J5EKU5|A0A1J5EKU5_9BACT 7-cyano-7-deazaguanine s ynthase OS=Candidatus Desantisbacteria bacterium CG2_30 _40_21 OX=1817895 GN=queC PE=3 SV=1
MKTSICLLSGGLDSIVAMTIAVQQTTVLLGVTFDYGQRAKKQEIDAASRVCEYLRIPHRKITIDWLGQTGSAILQHGRDVPAFSFEKSDPIQTAKAVWVPNRNGVFINIAASLAEEMGADVVVVGFNREEAETFPDNSLKFVQAINQSLLFSTLSKVQVLSFTQDMNKKEIVVLGKQLAAPFHLLWSCYLGGDKMCGRCESCQRCIRAFKSAGVFEVIRERFEDEYAPSLS

SEQ ID NO: 37101 - protein, 231 aa, Desantisbacteria bacterium; identical to SEQ ID NO: 37100
  misc_feature (1)..(231): tr|A0A2M7JBY2|A0A2M7JBY2_9BACT 7-cyano-7-deazaguanine s ynthase OS=Candidatus Desantisbacteria bacterium CG_4_8 _14_3_um_filter_40_12 OX=1974545 GN=queC PE=3 SV=1

SEQ ID NO: 37102 - protein, 223 aa, Desulfofervidus auxilii
  misc_feature (1)..(223): tr|A0A127AN00|A0A127AN00_9DELT 7-cyano-7-deazaguanine s ynthase OS=Candidatus Desulfofervidus auxilii OX=162198 9 GN=queC PE=3 SV=1
MKTLAIVLVSGGLDSCVTAAIANQSYQLAFLHVNYGQRTEKRELKAFMDIADYYKVKHRLVTSLSFLKEIGGSSLTNFKMPIPQGLPKSKDIPSTYVPFRNTHFIAIAVSWGEVIKAEKIFIGAMEEDSSGYPDCREEYFSIYNQLITLGTRPETKIEIVTPIIHLKKAQVVKKGVELGAPLHLTWSCYQREDIACGRCESCQLRLKAFARAGIKDPIPYLNQ

SEQ ID NO: 37103 - protein, 330 aa, Desulfofervidus auxilii
  misc_feature (1)..(330): tr|A0A127AN75|A0A127AN75_9DELT FAD synthetase OS=Candid atus Desulfofervidus auxilii OX=1621989 GN=HS1_000379 P E=4 SV=1
MKICKNCVLPETFPNIRFNEDGICNYCLEFKSKKNWQEEKQKYLNRFKTIVKEHKGKQPIDCLVAYSGGKDSTYTLYILKEQFNLRLLALTFDNGFISPKALKNMKKVTEVLDIDHIIIKPRFELLKKIFVASAKKTLYSKKALERASSICTSCIAFVKSLSLKTAIEKHIPFVAFGWSPGQAPLLSSVLKTNPLLIKSTQKVIEDALRKIVKDEIKPYFLESHHFKKPELFPYLTHPLAFLEYNEEAILEKIKQFGWERPDDTDPNSTNCLLNAFANKLHKEQFHFHPYALEIAGLVRTGIMSREEGLKRLNQPENLEIIKWVKKRLGL

SEQ ID NO: 37104 - protein, 215 aa, Desulforudis sp.
  misc_feature (1)..(215): tr|A0A3A6N5T4|A0A3A6N5T4_9FIRM 7-cyano-7-deazaguanine s ynthase OS=Candidatus Desulforudis sp. OX=2093368 GN=qu eC PE=3 SV=1
MKGIVLLSGGLDSSVCLAFAVREMEVALCLTADYGQIAAAREIEAARNLSAHYEVPHQVVDLPFIKEVSNTALFGETPLPKLPENALDDREVTKESARAVWVPNRNGVLINVAACFAEARDCQCVVAGFNREEGATFPDNSPGFVDAVNALLSYSTLNQVRLVSYTLHLDKTEIVDLGKRLGLPWNLIWSCYCGGDEPCGVCESCLRLRRALDNG

SEQ ID NO: 37105 - protein, 220 aa, Desulforudis audaxviator
  misc_feature (1)..(220): tr|A0A3S8S572|A0A3S8S572_9FIRM 7-cyano-7-deazaguanine s ynthase OS=Candidatus Desulforudis audaxviator OX=47182 7 GN=queC PE=3 SV=1
MKGIVLLSGGLDSAVCLAFGVRSLEVALCLTADYGQLAAGREIAAAAALSAHYGIRHQVVELPFLREIDCSALTGRLGLPEPEEMELDDPVRSAETARQVWVPNRNGLLVNVAACYAEALGCERIIAGFNREEAQHFPDNSPQFLDAVNHSLAYSTLSGIRVISYTQQLDKAEIVALGQRLGLPWSLVWSCYRGGDEACGVCESCRRLERAKRSAGGVRV

SEQ ID NO: 37106 - protein, 230 aa, Desulfosporosinus infrequens
  misc_feature (1)..(230): tr|A0A2U3LU07|A0A2U3LU07_9FIRM 7-cyano-7-deazaguanine s ynthase OS=Candidatus Desulfosporosinus infrequens OX=2 043169 GN=queC PE=3 SV=1
MAGIVLLSGGLDSTLALALYLETDIINLALTFDYGQRANQNEVSAAQRIAKYYNIPHKVINLPFLEEQTHSALVNRSKNLPFVGLEELDNLEQTQQSAQQVWVPNRNGLFMNIAAVFAENLGEPTSLITGFNLEEAATFPDNSVEFIDAVNQSLSYSTQEKVTVVSPTSILTKTEIVKEGLRLNVPFKYIWSCYESTERICGQCESCQRLKRALLGNNAQELVDQLFGAP

SEQ ID NO: 37107 - protein, 235 aa, Dojkabacteria bacterium
  misc_feature (1)..(235): tr|A0A3M0YZE9|A0A3M0YZE9_9BACT 7-cyano-7-deazaguanine s ynthase OS=Candidatus Dojkabacteria bacterium OX=209967 0 GN=D6810_00655 PE=3 SV=1
MVPKGELNMVKEVEIQKKLRIINRRSVVCTVSGGLDSAVASALMAKADFELHFIFFDWGQKTYKKELRCAQALARHFDATMKIVEVPLLKSLPGISLTQKETLTTAINEYVPNRNAILESQAVAYAEYLKAGAVCIGSTGGDHICPDNSPKFVDIMQLLVNEGTLLKPSIQIIAPLIHTDKVGVVKLGIKLGVPFEFTWSCHNNIDVACGHCSNCESRLEAFKLNGKKDPIRYAK

SEQ ID NO: 37108 - protein, 225 aa, Edwardsbacteria bacterium
  misc_feature (1)..(225): tr|A0A1F5RDM1|A0A1F5RDM1_9BACT 7-cyano-7-deazaguanine s ynthase OS=Candidatus Edwardsbacteria bacterium GWF2_54 _11 OX=1817851 GN=queC PE=3 SV=1
MGLNKKAVILLSGGLDSATVLFWAIKKGYHPQALIFDYGQRHSREVASARALCKKTGVPFRVISIKLPWQGSSLLDKKTTLPRAGSVKNIGLKIPSTYVPGRNTLFLSYGLSFAEATGAGAVMIGANALDYSGYPDCRPDFIEAMSKVFKLGTKAGRQGRPIKIVAPLLKLTKSQIIKLGINLGVPYELTWSCYRGGKRPCGTCDSCLLRNKGFDEAGVEDPALN

SEQ ID NO: 37109 - protein, 225 aa, Edwardsbacteria bacterium; identical to SEQ ID NO: 37108
  misc_feature (1)..(225): tr|A0A3B9EAX0|A0A3B9EAX0_9BACT 7-cyano-7-deazaguanine s ynthase OS=Candidatus Edwardsbacteria bacterium OX=2053 551 GN=queC PE=3 SV=1

SEQ ID NO: 37110 - protein, 231 aa, Eisenbacteria bacterium
  misc_feature (1)..(231): tr|A0A1F5RMW6|A0A1F5RMW6_9BACT 7-cyano-7-deazaguanine s ynthase OS=Candidatus Eisenbacteria bacterium RBG_16_71 _46 OX=1817856 GN=queC PE=3 SV=1
MARAVVLLSGGLDSATCLAWARAQGFECVTLAVDYGQRHRVELAAAARVSRALGAREHRVVAVDLRAIGGSALTADIDVPRDRSDEAMRAGVPPTYVPARNTVFLALALSLAETLGATDLVAGMNAIDYSGYPDCRPEFVAAFETLAGLATRAGDEGARFRIHTPLMRLDKAGIIRLGASLGVDFGATHSCYDPAAGGAACGRCDACRLRIKGFREAGVADPTRYATLHRT

SEQ ID NO: 37111 - protein, 128 aa, Eisenbacteria bacterium
  misc_feature (1)..(128): tr|A0A538SK19|A0A538SK19_9BACT 7-cyano-7-deazaguanine s ynthase (Fragment) OS=Candidatus Eisenbacteria bacteriu m OX=2212470 GN=E6K73_05000 PE=3 SV=1
FLAIALGYAETLGARHLVAGMNAIDYSGYPDCRPEFLRAFESLARVGTRPGAEGLTLRIHAPLLELDKAGIIRLGLSLGVDYSLTHSCYDPAPAGEACGRCDACLLRLRGFREAGLSDPGRYATAHRP

SEQ ID NO: 37112 - protein, 270 aa, Electronema sp.
  misc_feature (1)..(270): tr|A0A521FZB7|A0A521FZB7_9DELT 7-cyano-7-deazaguanine s ynthase OS=Candidatus Electronema sp. GS OX=2005002 GN= queC PE=3 SV=1
MQSSGEYFHKERYDALIQLSMIGDKCVSDNIKPDCAENFSMKKAVVLLSGGLDSSTVLAIARSRGFQCHCLSFRYGQKQDIELERAAVIAKAMRAEQHLILRLDLGLIGGSALTSAIEVPKDRKAEEISAGIPVTYVPARNIIFLSQAVAWAEVLGAADIFLGINAVDYSGYPDCRPDFLRAFELAVNLGTKAGSTGSPFRLHAPLIELSKKEIIEVGMRLGVDYSLTHSCYDPVQGLACGHCDACILRLKGFAEAGMKDPVNYLQQAVK

SEQ ID NO: 37113 - protein, 249 aa, Electrothrix aarhusiensis
  misc_feature (1)..(249): tr|A0A3S3R0Y7|A0A3S3R0Y7_9DELT 7-cyano-7-deazaguanine s ynthase OS=Candidatus Electrothrix aarhusiensis OX=1859 131 GN=queC PE=3 SV=1
MPRRTAGREERNKGEQGMNTKRKKAVILLSGGLDSTTVLAIARSRGFQCYCLSFRYGQKQDIELQRAAAIAQNMEAAEHLVLRLDLGAIGGSALTSNIAVPKDREVAEMEQEIPVTYVPARNIIFLSHALAWAEVIGATDIFLGINAVDYSGYPDCRPDFLKAFERAANLGTKEGSTGSPFTLHAPLIELSKKEIIEVGNQLGVDYSKTHSCYDPVDDLACGHCDACILRLRGFAEAGLKDPAPYVVQG

SEQ ID NO: 37114 - protein, 94 aa, Electrothrix marina
  misc_feature (1)..(94): tr|A0A444JDC4|A0A444JDC4_9DELT 7-cyano-7-deazaguanine s ynthase (Fragment) OS=Candidatus Electrothrix marina OX =1859130 GN=VU01_12176 PE=3 SV=1
CRPEFLKAFERAANLGTKEGSTGSPFTLHAPLIELSKKEIIEVGNQLGVDYSKTHSCYDPADDLACGHCDACILRLRGFAEAGLEDPAPYVAST

SEQ ID NO: 37115 - protein, 227 aa, Endobugula sertula
  misc_feature (1)..(227): tr|A0A1D2QLZ1|A0A1D2QLZ1_9GAMM 7-cyano-7-deazaguanine s ynthase OS=Candidatus Endobugula sertula OX=62101 GN=qu eC PE=3 SV=1
MALEKKKAVVLVSGGLDSTTVLAIAISQGYECHTLSFDYGQRHRAELVAADQVSQSMGAIEHKVMALDLKTIGGSALTDDTIDIPEEARDGIPVTYVPARNTIFLSIALGWAEVLGANDIFIGVNAVDYSGYPDCRPDYITAYEKMAKLATKASIEGDTLRIQTPLIDLSKAEIIQQGNALGVDYSQTMSCYQMYDQGLACGKCDSCRLRQQGFIEAGVTDPTKYMV

SEQ ID NO: 37116 - protein, 234 aa, Endolissoclinum sp.
  misc_feature (1)..(234): tr|A0A1Z9XYA5|A0A1Z9XYA5_9PROT 7-cyano-7-deazaguanine s ynthase OS=Candidatus Endolissoclinum sp. TMED26 OX=198 6636 GN=queC PE=3 SV=1
MTERAIVLFSGGQDSATCLAWALDHFDHVETMAFDYGQNHRVELDVRLRFLEKLRAAFPAWASKLGDDHLIDMNLLAAISDTALTQDRAIEMTAAGLPNTFVPGRNLMFFTTAAAVAYRRDARHLVGGMCETDYSGYPDCRDDTLKALQVALTLGLDRRTTLHTPLMWINKAQTWSMAATLGGQTLINLIIEDSHTCYRGDRQNRHDWGYGCGDCPACELRKTGWDSYQDKVTT

SEQ ID NO: 37117 - protein, 106 aa, Endolissoclinum sp.
  misc_feature (1)..(106): tr|A0A1Z8VAV5|A0A1Z8VAV5_9PROT 7-cyano-7-deazaguanine s ynthase OS=Candidatus Endolissoclinum sp. TMED55 OX=198 6641 GN=CBC15_10420 PE=3 SV=1
MHVGDHFIYPDCRPEFVDAFREMQLLALDGVSRVDLYAPFVGSSKADIVSIGSELDVPFHETWSCYKGLEKHCGRCGTCVERLEAFHLAGIEDPTSYNDTEFWKTA

SEQ ID NO: 37118 - protein, 214 aa, Endomicrobium trichonymphae
  misc_feature (1)..(214): tr|A0A1E5IFU2|A0A1E5IFU2_9BACT 7-cyano-7-deazaguanine s ynthase OS=Candidatus Endomicrobium trichonymphae OX=14 08204 GN=queC PE=3 SV=1
MKKRAVILFSSGLDSTTVLYYALFKGYKCTCLIFDYGQKHGKEILSAVKIAKSVKTEYSIIKINLPWSGDSLTGKNKEIPVHKHLPKTVPSTYVPGRNTIFLSYALSCAQSVNARSIFIGVNSVDFSNYPDCTPEFIKAYNNVLKALKTKIVVQSPLLNLNKAQIIKLGIKLNVPYKDTWTCYNGYEKPCMECDSCKLRAKGFKEAEINDPALA

SEQ ID NO: 37119 - protein, 228 aa, Enterovibrio escacola
  misc_feature (1)..(228): tr|A0A2A5T2K8|A0A2A5T2K8_9GAMM 7-cyano-7-deazaguanine s ynthase OS=Candidatus Enterovibrio escacola OX=1927127 GN=queC PE=3 SV=1
MGKAIVVFSGGQDSTTCLIQALSSFDEVHCITFDYNQRHLHEVDVARDIAKQLGATSHKVMDVGLLNELATSSLTRKNIPVSHKLKKNELPNSFVPGRNILFFTLASIYAYQLEANTVITGVCETDFSGYPDCRNDFINAMNRALVLGMDHPLEICTPLMWLNKAETWALADKFNKLEYVRDNTLTCYNDIIGKGCANCPACDLRQKGLNKYLQDKDVVMTELNNKSK

SEQ ID NO: 37120 - protein, 222 aa, Enterovibrio luxaltus
  misc_feature (1)..(222): tr|A0A291BBJ9|A0A291BBJ9_9GAMM 7-cyano-7-deazaguanine s ynthase OS=Candidatus Enterovibrio luxaltus OX=1927128 GN=queC PE=3 SV=1
MKKAVIAFSGGQDSTTCLVQALPEFDEVHCMTFDYGQRHKQEIKVAEAVVKELGATSHKIMNVSLLNELTSSSLTCDNIPVSHELQENGLPNSFVPGRNILFLTLTCIYAYQLGAETVITGLCEIDFSGYPDCRNDFVQAINKALVLGMDHQLEIRTPLMWLNKAETWALADKLNKFEYIRDNTLTCYHGVIGSGCGDCSACKLRQKGLNSYINKKCNNIMQ

SEQ ID NO: 37121 - protein, 264 aa, Entotheonella gemina
  misc_feature (1)..(264): tr|W4LT97|W4LT97_9BACT 7-cyano-7-deazaguanine synthase OS=Candidatus Entotheonella gemina OX=1429439 GN=ETSY2_ 37665 PE=3 SV=1
MDAGDKTAVICLSGGMDSTSLLMHLLVRGYNVFGLSFDYGQKHRLELERLAQNLIYLRHNGLEVTHETVDISILGRLYHSALTDTAWQIPEGHYEEDTMKATVVPNRNAIFSAIAYGYALSIANRLQTEAALALGVHSGDHAIYPDCRPEFYEAIFHAFRIGNWDAERVSLYLPYLHSDKYDILKDAQGAIRELNLDFATIFRNTNTSYEPDEQGRASGKTGADVERILAFDKLGVPDPIAYVAPWEVVVEQARALELEAKTQE

SEQ ID NO: 37122 - protein, 264 aa, Entotheonella factor
  misc_feature (1)..(264): tr|W4L663|W4L663_9BACT 7-cyano-7-deazaguanine synthase OS=Candidatus Entotheonella factor OX=1429438 GN=ETSY1_ 39580 PE=3 SV=1
MDAGDKTAVICLSGGMDSTSLLMHLLVRGYHVFGLSFDYGQKHRLELERLAQNLTYLRQNGFEVAHETVDISILGRLYHSALTDTAWQIPEGHYEEETMKATVVPNRNAIFSAIAYGYALSIANRLQTEVALALGVHSGDHAIYPDCRPEFYEAIYHAFQIGNWDAERVSLYLPYLHDDKYGILKDAQGAIRDLNLDFATIFRNTNTSYEPDEQGRASGKTGADVERILAFHKLGVPDPIDYIAPWEVVVEQAQALETEAKAQG

SEQ ID NO: 37123 - protein, 233 aa, Erwinia haradaeae
  misc_feature (1)..(233): tr|A0A451DAM2|A0A451DAM2_9GAMM 7-cyano-7-deazaguanine s ynthase OS=Candidatus Erwinia haradaeae OX=1922217 GN=q ueC PE=3 SV=1
MMQATVVVFSGGQDSTICLIQAIQEYEFVHCITFDYGQRHSYEIDIARDIVKKLGVHSHKIINLSMLNDLSASCLTRENIAVPASGALSDIRIPITFVPGRNILFLTLASIYAYQLQAKTVITGVCETDFSGYPDCRKEFIIAMNQAISLGMETTLILKTPLMRLTKAEIWALADMFGMLEFVIEETMTCYNGIKSYGCRSCNACHLRNRGLREYLSNKSIVQKTLYTKQNIL

SEQ ID NO: 37124 - protein, 232 aa, Erwinia dacicola
  misc_feature (1)..(232): tr|A0A1E7YYJ9|A0A1E7YYJ9_9GAMM 7-cyano-7-deazaguanine s ynthase OS=Candidatus Erwinia dacicola OX=252393 GN=que C PE=3 SV=1
MDSKKAVVVFSGGQDSTTCLVKALAEYDEVHCITFNYGQKHVSEIEIAQHIAKTLDITSHSIIDMSVLNALAVSSLTKSNIDVPKYTDQRNQEYPSTFVPGRNIVFLTLAAIYANQIQAQDVITGVCETDFSGYPDCRDKFVKALNNAVTLGLGSTVNFITPLMWLTKAETWALADDLGKLDFIISETLTCYNGEKSFGCGKCDACHLRNKGLNEYLTNKDEVRKRLHKKMA

SEQ ID NO: 37125 - protein, 386 aa, Falkowbacteria bacterium
  misc_feature (1)..(386): tr|A0A2H0V145|A0A2H0V145_9BACT 7-cyano-7-deazaguanine s ynthase OS=Candidatus Falkowbacteria bacterium CG10_big _fil_rev_8_21_14_0_10_43_10 OX=1974567 GN=COT99_04265 P E=3 SV=1
MDIGAIGKNEKKINFIADSGLVKMKQIYLLNNYSKLAILSILAGYEKCDYIYVNDRFSKKVEIKSLNNFISYTLNHNIAPKKFDIKISYNKNFNGAKNTLPLNKYDGILSFSGGIDSTAGLLYALSKKQKVLPMWINFRQRNNYAERKSALKILRKLKIKPVIISIDLSKFILKGWKDWSFIVPGRNFLFLSFANSLLQNSERQRGHIYLCAHKDEMGHKKNRDKSKYFFQRSSIFFSRDGTKKITAETPFANYSKAELLSLWKKKWEKKFGISPHETTTCYYENGCGRCEACLKRVIYLLAAGYTVDQKIKVNPMTDPSGLIINKWIPGIINGKMSRTNKLDFLIAVEKSLDIVPEKIRKFYSNLSGKTISNIKKRKKEIEYVKI

SEQ ID NO: 37126 - protein, 234 aa, Fermentibacteria bacterium
  misc_feature (1)..(234): tr|A0A496UJI5|A0A496UJI5_9BACT 7-cyano-7-deazaguanine s ynthase OS=Candidatus Fermentibacteria bacterium OX=204 4591 GN=queC PE=3 SV=1
MDRKAVVLLSGGLDSATTLYIAGEEGFSTHAVSFRYGQQHTQELKSASEVARAAGAADHLIIPLDARLFKGSALTGPSAVPENRSPDEMASMIPPTYVPARNTVFLAMSLSYAEVIGARDIFIGVNAVDYSGYPDCRPEFIAAFGRLAELATKEAIEGRPARIHAPLLNMTKAQIIRRGLELGVDYSLTHSCYNPDTEGRSCGRCDACILRLSGFAENGMNDPVAYQPEMNNGL

SEQ ID NO: 37127 - protein, 222 aa, Fermentibacteria bacterium
  misc_feature (1)..(222): tr|A0A2G6LV68|A0A2G6LV68_9BACT 7-cyano-7-deazaguanine s ynthase OS=Candidatus Fermentibacteria bacterium OX=204 4591 GN=queC PE=3 SV=1
MKAVVLLSGGLDSATVLAMASKDEYSVTALSFRYGQKHSIELDKAAATAAAWNVRDHVVLQLDPEPFRASSLTGEGEVQNGNIQRTEIPSTYVPARNTVFLSLALALAESREADAVFIGVNALDYSGYPDCRPAFIKAFRNLAAVATKSAVQGNPVRIEAPLLHMTKAEIIRAGLDLGVDYSLTLSCYRPDSQGRSCGTCDSCLLRLKGFRENGETDPATYV

SEQ ID NO: 37128 - protein, 233 aa, Filomicrobium marinum
  misc_feature (1)..(233): tr|A0A0D6JI46|A0A0D6JI46_9RHIZ 7-cyano-7-deazaguanine s ynthase OS=Candidatus Filomicrobium marinum OX=1608628 GN=queC PE=3 SV=1
MLDSALVLFSGGQDSTVCLASALDRFERVETVGFAYGQRHALELDARLRVRARISELNSRWGERLGDDHFLELPEFGKISDTALTRDREIEMTVAGLPSTFVPGRNLLFFTYAAAVAYRRGIEVLVGGMCETDYSGYPDCRAETLDALEKAISLGMGRTFKIDTPLMFIDKAATWVMTEELGGAPLVDLIINETHTCYLGIRGRLHEWGYGCGHCPACQLRQKGWEKWQAAKS

SEQ ID NO: 37129 - protein, 215 aa, Firestonebacteria bacterium
  misc_feature (1)..(215): tr|A0A1F5UUE8|A0A1F5UUE8_9BACT 7-cyano-7-deazaguanine s ynthase OS=Candidatus Firestonebacteria bacterium RIFOX YC2_FULL_39_67 OX=1817861 GN=queC PE=3 SV=1
MANKKAVILLSGGLDSTTTLYYAKAKGFKCFCLLFDYGQRHKKELKAAVKLAKMNKCIYIVVKIALPWSKSALTDRKVKVPVKNKQIGKDIPVTYVPARNTIFLGFAASYAESIGAKKIFIGANALDYSGYPDCRPNYIKAYEKAVNLGTKSGVSGNKLKIETPLINLTKAEIIKLGIKLKVPYELTWSCYNGGKKPCGVCDSCLLREKGFRKIK

SEQ ID NO: 37130 - protein, 216 aa, Firestonebacteria bacterium
  misc_feature (1)..(216): tr|A0A1F5UM06|A0A1F5UM06_9BACT 7-cyano-7-deazaguanine s ynthase OS=Candidatus Firestonebacteria bacterium GWA2_ 43_8 OX=1817858 GN=queC PE=3 SV=1
MANEKSVILLSGGLDSTTTLYYAKAKGYKCFCLLFDYGQRHKKELKAAVKLAKLSKCPYTVVKIALPWSKSALTDKKVKIPVKGKQIGKEIPVTYVPARNTIFLSFAASYAESIGAKRIFIGANALDYSGYPDCRPNYIKAYEKAVNLGTKSGVSGNKLKIETPLIALTKAQIIKLGTKLKVPYGLTWSCYKGGKKPCEVCDSCILRNKGFKEAVK

SEQ ID NO: 37131 - protein, 230 aa, Fischerbacteria bacterium
  misc_feature (1)..(230): tr|A0A1F5VR68|A0A1F5VR68_9BACT 7-cyano-7-deazaguanine s ynthase OS=Candidatus Fischerbacteria bacterium RBG_13_ 37_8 OX=1817863 GN=queC PE=3 SV=1
MEEKKAIILLSGGIDSATCLALAIEQHYEPFCLSVLYKQRHAVELEAAKRIAAFFNVKEHKILTLDLSAIGGSALTSSLEVPKDRIIEHSEEIPKTYVPARNTIFLALALAWAEVMEAGDIFIGTNAVDFSGYPDCRPGFIKKFEELANIATKAAVENKIHFRIHAPLVHLTKSAIITLAIKKGVNLSLTHSCYDPTVKGIACGRCDSCLLRLKGFKEAGLEDPAVYFEY

SEQ ID NO: 37132 - protein, 245 aa, Fokinia solitaria
  misc_feature (1)..(245): tr|A0A2U8BSL7|A0A2U8BSL7_9RICK 7-cyano-7-deazaguanine s ynthase OS=Candidatus Fokinia solitaria OX=1802984 GN=q ueC PE=3 SV=1
MNRGKAVVLLSGGLDSVTVAHYVKNELQFDICAITFLYGQMNAAEIEFAKFNAHKLDVFEHIFVTLDISHISYSSLIDSALPLPLDREVSDIERQNVPSTYVPARNMIFLSHAACYAETIKSYDIFIGVNSVDYSGYPDCRSGFITAFQNAINQGCNLYANGKKPLRVHAPLARYSKADIVKLGLKNGVDYSMTLSCYRPLVKESIEPRQLSVTNCGRCDACRLRDIGMTANNLQGGSRTVMIAL

SEQ ID NO: 37133 - protein, 222 aa, Frackibacter sp.
  misc_feature (1)..(222): tr|A0A1H7ZWB6|A0A1H7ZWB6_9FIRM 7-cyano-7-deazaguanine s ynthase OS=Candidatus Frackibacter sp. WG12 OX=2017977 GN=queC PE=3 SV=1
MTKRAIVLSSGGLDSTTCLSIALDEGYEVYPLTFLYGQKHSKEVEQAKLVRSELGIPEDNHLFARIDNIGHSALTSDEIEIPDGEGEGIPDTYVPARNILFLSYAVSLAEGIDAEVVYIGVSSIDYSGYPDCRPEFINAYQQVINVGTKAGVEGNPIEIKTPLIDKTKAETIEIGLKLDAPYYLTTTCYRGDEKACGSCPACEIRLKAFAKVGVEDPIEYEI

SEQ ID NO: 37134 - protein, 222 aa, Frackibacter sp.
  misc_feature (1)..(222): tr|A0A139CGT2|A0A139CGT2_9FIRM 7-cyano-7-deazaguanine s ynthase OS=Candidatus Frackibacter sp. T328-2 OX=178594 9 GN=queC PE=3 SV=1
MTKRAIVLSSGGLDSTTCLSIALDEGYEVYPLTFLYGQKHSKEVEQAKLVRSELGIPEDNHLFARIDNIGHSALTSDEIEIPDGEGEGIPDTYVPARNILFLSYAVSLAEGIDAEVVYIGVSSIDYSGYPDCRPEFINAYQQVINVGTKAGVEGNPIEIKTPLIDKTKAETIEIGLKLDAPYYLTTTCYRGDEKACGSCPACEIRLKAFAKVGVEDPIEYKI

SEQ ID NO: 37135 - protein, 245 aa, Fukatsuia symbiotica
  misc_feature (1)..(245): tr|A0A2U8I941|A0A2U8I941_9GAMM 7-cyano-7-deazaguanine s ynthase OS=Candidatus Fukatsuia symbiotica OX=1878942 G N=queC PE=3 SV=1
MKRAVVVFSGGQDSTTCLIQAKREKKYDEIYCITFDYGQCHREEIEVAKKLARQFEVQGHKILDTTLLNELTTSSLMQDSISTPIHNRLNEKDGEENSEGGKPSLPSTFVPGRNILFLTLAAIYAYQVQANAVISGVCQTDFSGYPDCRDEFVKSLNGAIKLGINRDISFITPLMWLDKAETWALADYYQQLDTVRNSTLTCYNGTKSDGCGTCAACHLRSRGLNRYLADREKVMASLKKKTGLS

SEQ ID NO: 37136 - protein, 224 aa, Gallionella acididurans
  misc_feature (1)..(224): tr|A0A139BXP6|A0A139BXP6_9PROT 7-cyano-7-deazaguanine s ynthase OS=Candidatus Gallionella acididurans OX=179649 1 GN=queC PE=3 SV=1
MKKAVVLLSGGMDSATVLAMAAAQGFDCHALSVDYGQRHHAELAAAQRVAQELGAREHRVVNIDLTGFGGSSLTDKKIAVSQQPTEGIPLTYVPARNTIMLALALAWAEVLQARDIFIGVNAVDYSGYPDCRPAYIEAFERMANLATKAAVEGHPLAVHAPLQHMSKAEIIRQGLALGVDFSHTVSCYQADESGRACGVCDACRLRHTGFVAAGIGDTTRYRVL

SEQ ID NO: 37137 - protein, 222 aa, Gastranaerophilales bacterium
  misc_feature (1)..(222): tr|A0A292RIG0|A0A292RIG0_9BACT 7-cyano-7-deazaguanine s ynthase OS=Candidatus Gastranaerophilales bacterium HUM _9 OX=1916320 GN=queC PE=3 SV=1
MNKSIVLLSGGLDSLVSLGLAKEEYNIELALTFDYGQKSLEKEVAASNEIAKYYGLKHEIIELEFLKNITHTSVVGDDEVPTDIYGTEESAKAVWVPNRNGLFLNIAASYADSYDYSHIIIGANKEEGQTFSDNTQEFIDGINESFKYSTMVGVKVVAPLINYDKNDIVKFALDNSIPLDMVMSCYNGDTGNKKHCGKCESCKHLLYALEYNKAYDLIERLF

SEQ ID NO: 37138 - protein, 224 aa, Gastranaerophilales bacterium
  misc_feature (1)..(224): tr|A0A292RVU2|A0A292RVU2_9BACT 7-cyano-7-deazaguanine s ynthase OS=Candidatus Gastranaerophilales bacterium HUM _11 OX=1916216 GN=queC PE=3 SV=1
MKKAVILLSGGLDSLVALGFPQSEYRIELALTFDYGQKSVQNEIDASQKICKYYNVEHKVIKLEWLKEITKTALVSAEEIPVANLGTKESAAAVWIPNRNGLFLNIAASFADSFGFDYILYGANKDEGTTFPDNTEEFRREISKVFKTSTLKKPCVLAPLINYTKNDIVRIAIENAMPLELVRSCYGGGEKHCGMCESCRHLKQALIANHGEKYIEILFGNYEN

SEQ ID NO: 37139 - protein, 250 aa, Glomeribacter gigasporarum
  misc_feature (1)..(250): tr|G2JAM2|G2JAM2_9BURK 7-cyano-7-deazaguanine synthase OS=Candidatus Glomeribacter gigasporarum BEG34 OX=10703 19 GN=queC PE=3 SV=1
MSEALHTKIIRTADHKRALVLFSGGQDSATCVVWALARCDYVETLGFDYGQRHRVELECREGFRAALTHQFPQWADKLGSDHMIDLSVLGAVSHTAMTREIQIKIQENGLPNTFVPGRNLMFMTIAAAIAYRRGLKVLVGGMCETDFSGYPDCRDDTIKALQVALNLGMDRRFLVETPLMWLDKAATWRLAESLGGAALVELIRVKTHTCYLGERAELHPWGFGCGACPACALRANGYDAFLKGKRAIET

SEQ ID NO: 37140 - protein, 223 aa, Goldbacteria bacterium
  misc_feature (1)..(223): tr|A0A2N1W5S2|A0A2N1W5S2_9BACT 7-cyano-7-deazaguanine s ynthase OS=Candidatus Goldbacteria bacterium HGW-Goldba cteria-1 OX=2013807 GN=queC PE=3 SV=1
MKKINSRCVVLLSGGQDSTTALFWAMKKFKNVMAVSFDYGQRHKIELKSAAKIAKLAGVKHTVIVVKEYEAIQNSALLDKTSSINKHDKINKKLPASFVPGRNILFLTAAAAYAYVNKAENIVIGVSQADYSGYPDCRGEFIRSMEKSLSLGMEYPVKIHTPLLNKNKMQTVLLAKELKVLDMMKYTHTCYEGNNKPCNKCPACRLRAKGFKEAGIADPLKHN

SEQ ID NO: 37141 - protein, 308 aa, Gottesmanbacteria bacterium
  misc_feature (1)..(308): tr|A0A1F5ZLP8|A0A1F5ZLP8_9BACT 7-cyano-7-deazaguanine s ynthase OS=Candidatus Gottesmanbacteria bacterium RIFCS PHIGHO2_02_FULL_39_11 OX=1798382 GN=A3D77_05320 PE=3 SV =1
MTSNIIAKYMHPKKNIGKQSLEDLHLLKKIESIFKEKRGYIFRMPKPGSKVISLLSGGLDTTIVTSLLLDKYKLEVYPVHFLRPYPAANPQSVLRSASYFCNLFKRKYKTLCHDLIILPLQFPAKNIERSILNEGQVIINNKTGQRRGIPFQPSSFIHEIINYSYTLKTEEQRGIKTIFAATLASNVNWYAYESLTSYRALMLAVCIMLNDFSWQITSFPIEKEMGWYMDKHDLIQMGSYLNLPLEKTFTCQKDYRYQCGKCIVCLLRRVAFKKANLPDKTVYETNRTDVIGKIKRKNSLLKDILRKM

SEQ ID NO: 37142 - protein, 185 aa, Gottesmanbacteria bacterium
  misc_feature (1)..(185): tr|A0A2H0NIY2|A0A2H0NIY2_9BACT 7-cyano-7-deazaguanine s ynthase (Fragment) OS=Candidatus Gottesmanbacteria bact erium CG11_big_fil_rev_8_21_14_0_20_37_11 OX=1974575 GN =COV53_04470 PE=3 SV=1
LHFIFFDWGQKTLEKERKCAKALAKHYNVDLKIVEIPFLKSLPDVSLTAKETLTTEINEYVPNRNAILESQAVAYAESLKAGIICVGSTGGDHICPDNSPKFIKAMQALINQGTMLKPPIQIIAPLMDTDKIGAVKLGIKLKVPFELTWSCHNNTDKACGKCSNCLARLEAFKVNNISDPTKYQK

SEQ ID NO: 37143 - protein, 231 aa, Gullanella endobia
  misc_feature (1)..(231): tr|A0A143WSI9|A0A143WSI9_9ENTR 7-cyano-7-deazaguanine s ynthase OS=Candidatus Gullanella endobia OX=1070130 GN= queC PE=3 SV=1
MKRAVVVFSGGQDSTTCLIQALSQYDEVYCITFDYGQRHREEINFARKLAIQFGVCAHKIIDARLLNTLTLSSLTHDNIHVPDYENRKNCFPSTFVPGRNILFLTLSAIYAYQIKASVVITGVCETDFSGYPDCRNDFIKALNIAVNLGMANELNFVTPLMWLDKAEIWALADYYHQLDRVCYCTLTCYNGIKGDGCGQCTACHLRSKGLANYWAKPHAVMVSMRTKIGLY

SEQ ID NO: 37144 - protein, 230 aa, Hamiltonella defensa
  misc_feature (1)..(230): tr|A0A249E1S1|A0A249E1S1_9ENTR 7-cyano-7-deazaguanine s ynthase OS=Candidatus Hamiltonella defensa (Bemisia tab aci) OX=672795 GN=queC PE=3 SV=1
MKRAVLVFSGGQDSTTCLIQALHQYDEVHCITFDYGQRHRSEIAIAQALAKKLKTTSHKILDLQLLNELAVSSLTRENIPLPKKQHSEGSLPNTFVPGRNIVFLTFSAIYAYQLDADVVITGVCETDFSGYPDCRDEFVKSLNHAVTLGMQKNITFVTPLMWLNKAETWALADYYQQMPLIRNQTLTCYNGIQGDGCSECLSCELRLKGLKYYLAHKEEVTENLKLKSQL

SEQ ID NO: 37145 - protein, 236 aa, Hamiltonella defensa
  misc_feature (1)..(236): tr|A0A2D3TE07|A0A2D3TE07_9ENTR 7-cyano-7-deazaguanine s ynthase OS=Candidatus Hamiltonella defensa OX=138072 GN =queC PE=3 SV=1
MRKNNPIKRAVLVFSGGQDSTTCLIQALHQYDEVHCITFDYGQRHRSEIAIAQALAKKLQATSYKILDLQLLNELTVSSLTRENIPLPKKQNSEGSLPNTFVPGRNIVFLTFSAIYAYQLDADVVITGVCETDFSGYPDCRDEFVKSLNHAVTLGMQKNITFVTPLMWLNKAETWALADYYQQMPLIRNKTLTCYNGIQGDGCGECLSCELRLKGLKYYLAHKEEVTENLKLKSQL

SEQ ID NO: 37146 - protein, 386 aa, Hydrogenedentes bacterium
  misc_feature (1)..(386): tr|A0A1V5Z0L8|A0A1V5Z0L8_9BACT Uncharacterized protein OS=Candidatus Hydrogenedentes bacterium ADurb.Bin170 OX =1852848 GN=BWY07_00722 PE=4 SV=1
MTTSASEVKEPVRCNRCIMDETVGGIRFDKDGVCNYCHMHDSMDKLFPIGKAGEKILKDIAVSIRKSGKGKPYDCVVGFSGGRDTSYCLHYAKEVLGLKPLAVHFDNGWTSEKARSNMENICAKLGVDLHIVTMDWDDSRELTNANIRACVPYVDLTNDIGIAYTLYSTAAKNDIKYILLSHSFREEGVAPLLWNYMDARYTRAIIKRFAKTKINHFKNADIHHFLYWLFIKRIKVVNVTNYYNDMGRQIENTLIERYGWQEPDGHHMDNELFILIYNYAWRKFGIDWRVVDVAAQVRTGILTREEGLAIMASPPYFDNEEFVSQSLEKQQMSREEFEAIIAAPNKYFLDYPNYYSWVKLFKWPFKLLCRMHILPIHAYEKYFEAI

SEQ ID NO: 37147 - protein, 223 aa, Hydrogenedentes bacterium
  misc_feature (1)..(223): tr|A0A1V6EKC4|A0A1V6EKC4_9BACT 7-cyano-7-deazaguanine s ynthase OS=Candidatus Hydrogenedentes bacterium ADurb.B in101 OX=1852847 GN=queC PE=3 SV=1
MQKAVVLVSGGIDSTVLLFSLPRQDYALHALAFRYGQRHQRELECAQRQCDTAGVQNVKCVSMPFLGELLQEGSTLMETGGPVPDLDDIPQALRDQPPTYVPHRNMLFLSIAAAYAESIGAARVFYGAQAQDEYGYWDCTPVFLERINALLSLNRRRAVTVEAPLLRNSKADNVKLGLALGVDFSMTWSCYRGEMLACGRCPTCVERLNAFKQAGLPDPLPYQ

SEQ ID NO: 37148 - protein, 223 aa, Jettenia caeni
  misc_feature (1)..(223): tr|I3INJ3|I3INJ3_9BACT 7-cyano-7-deazaguanine synthase OS=Candidatus Jettenia caeni OX=247490 GN=queC PE=3 SV= 1
MKDLAIVLVSGGMDSCVTSAIADTQYELAFLHVNYGQRTEARELKAFREIALYYRIPDERILISDIDYLRKIGGSSLTDHRMNIQEAQLHNKEIPTSYVPFRNTIFLTIAVSWGEVIGARKIFIGAVEQDSPGYPDCKPVYYEIFNKLIKAGTKPTTFLEVETPLIGKSKSEIVTKGLSLMAPLHLSWSCYKNTDKACGLCHSCFLRLKAFKEAHAVDPIPYV

SEQ ID NO: 37149 - protein, 223 aa, Jettenia ecosi
  misc_feature (1)..(223): tr|A0A533QA21|A0A533QA21_9BACT 7-cyano-7-deazaguanine s ynthase OS=Candidatus Jettenia ecosi OX=2494326 GN=queC PE=3 SV=1
MKDLAIVLVSGGMDSCVTSAIANTQYELAFLHVNYGQRTETRELEAFREIALYYRIPDERILISDIDYLRKIGGSSLTDPGMNIQEAQLYNKEIPNSYVPFRNTIFLTIAVSWGEVIGARKIFIGAVEQDSPGYPDCKPVYYEIFNKLIKTGTKPTTFLEVETPLIGKSKSEIVTMGLSLMAPLHLSWSCYKNTDKACGLCHSCFLRLKAFKEVHAVDQIPYV

SEQ ID NO: 37150 - protein, 250 aa, Kaiserbacteria bacterium
  misc_feature (1)..(250): tr|A0A1F6DYR3|A0A1F6DYR3_9BACT 7-cyano-7-deazaguanine s ynthase OS=Candidatus Kaiserbacteria bacterium RIFCSPHI GHO2_02_FULL_55_20 OX=1798497 GN=A3D71_02790 PE=3 SV=1
MKKIVVCLLSGGVDSTVAAVLKAKEPTTLVALLSVYYGQGAEQSEKRQSAVVADWLYHHFDSVIEHFYLRIDGTIRWTRRQRSARFKDPTGEEILLRGFVGWRHPEGGWSQAGYPSTRDEVFALMAAAGVEARLHDIPDTTEGEIVLATTGEDLFNFEDIEASTYTVHLNEVLARKMMPRRGKPMRIVLPLIEMTKAEVIRTGVEIGAPLELTWSCYFGEPGRPCGQCDQCKWRREAFQAAGVQDPASTV

SEQ ID NO: 37151 - protein, 237 aa, Kapabacteria sp.
  misc_feature (1)..(237): tr|A0A1M3KYN8|A0A1M3KYN8_9BACT 7-cyano-7-deazaguanine s ynthase OS='Candidatus Kapabacteria' thiocyanatum OX=18 95771 GN=queC PE=3 SV=1
MKSTLAVVLLSGGMDSCVTCARAIEDGYDVAALHVNYGQRTQERELRSFHAICDHYGIVRRLVVDISHLAAIGGSSLTDDLISVDDTTLAKNGAGAGDDADAVPSSYVPFRNANILAIATSWAEVLSARAIYIGAVEEDSSGYPDCRDVFFRAFEQVIETGTKPGFSISIETPVIHFTKRRIVEEGIRLGAPLEHTWSCYRDNDIACGTCDSCALRLRGFQQAGVTDPIDYLVRPAY

SEQ ID NO: 37152 - protein, 497 aa, Kapabacteria sp.
  misc_feature (1)..(497): tr|A0A1M3KX01|A0A1M3KX01_9BACT Uncharacterized protein OS='Candidatus Kapabacteria' thiocyanatum OX=1895771 GN =BGO89_09440 PE=4 SV=1
MQHFDITLDQHAPFIEGGGIVVGIMFDPRTKRRIQPDEAVRMVNERKSLDVDGHYAGIAVVDGRIVELVDPYELRRLYRMTLPDGRIRYMTRLPGSSPQGSLDLRVLANAWMPVMGFTHSSMVEGIERCLPSPDPLHSTSRTSTERRNDLTPSLDGFPDSVLALSGGFDSRTLLAWSIREGVDISTTSYGSMDMPDCSTASDVASRAGVRHTFFDVATVVDRMSIDDMQSIARHTALASEGTYHFAHAMVLPSIASILPPGGILIDGGFGGFLRGGLANGLRYQGRAALHSGDARRILPYLMARSNDVFVDDVARRMTDMVTEDLQRALDEQGPCTKGSEREWIDNFFASWYLHGYVASPQGVYDHYLDSTIPFLHRSVVDWVFSRPASFRDHGRWFRSVISASAPRTTSVPFVGKRSLYPWFCAGRPLMNALHSKISRTRFVQSDTISDVVYGKMKEPVDDLLHSSWVGQLGIWDIGNLRSAADKLAVYGYLQLIT

SEQ ID NO: 37153 - protein, 245 aa, Kentron sp.
  misc_feature (1)..(245): tr|A0A451BY04|A0A451BY04_9GAMM 7-cyano-7-deazaguanine s ynthase OS=Candidatus Kentron sp. G OX=2126341 GN=queC PE=3 SV=1
MTTTHPQTTNPRRAVVLLSGGLDSATCLAIAKSQGFVCHALSFDYGQRHLAELAAAERIAHTLGAERHKTVRIDLTDICRCALTDRTSMIPRQPDSEIPSTYVPARNTIFLAIALGWAETVEARHIFIGVNAIDYSGYPDCRPEFITAFAQAANLGTKAGIEGRGFTIHTPLMEMGKADIIRAGSALGVDFARTVSCYQANDAGEACGLCDACRLRRAGFEAAGVTDPTRYTFNGRILNLRANEH

SEQ ID NO: 37154 - protein, 282 aa, Kentron sp.
  misc_feature (1)..(282): tr|A0A451A821|A0A451A821_9GAMM 7-cyano-7-deazaguanine s ynthase (Queuosine biosynthesis) OS=Candidatus Kentron sp. UNK OX=2126344 GN=BECKUNK1418G_GA0071005_102228 PE= 4 SV=1
MCLLSGGADSLVGAIDAVAEGKTPVLVGRKAGDTKRQKTFARSLGKPLSLLQLHQAKPAGRLESSQRARSILFLAYGLIAAMHLSEKDDGNHKTLLVPENGFISLNVPLTSLRVGSLSTRTTHPWFIQKIQAIFDTCGFPLQIENPYQLKTKGEMFDECQNPELLRKLAAHSMSCSRSKRLHQHCGRCVPCLIRRAAFVRAGIHDETPYLFSNLSTNDSDHLQFDDVQAARYAIHSVSTKGVEQWAGSAISTAQLGEVEPYLGVAERGIRELEALFQGMGIR

SEQ ID NO: 37155 - protein, 248 aa, Kinetoplastibacterium galatii
  misc_feature (1)..(248): tr|M1LXM5|M1LXM5_9PROT 7-cyano-7-deazaguanine synthase OS=Candidatus Kinetoplastibacterium galatii TCC219 OX=1 208921 GN=queC PE=3 SV=1
MNVRFIDKMTNNSGKRREKALVLFSGGQDSTTCLFWALNNYEIVETLGFQYGQRHSIEMDCRLSILNIINFQKKTYCNGKLGNDHIIDLGFMSQLTENALTRKLDIKFSDRVPNTFVPGRNLLFLNTAAIVCYNMNIGTIIGGMSEVDFSGYPDCRDDTIKSQQVTLSLGLDRPINIETPLMWKNKSEIWQMAMDIGGNDLIKIIREYTHTCYIGCRDNLYDWGYGCGTCPACILRKTGWDTWINVKS

SEQ ID NO: 37156 - protein, 234 aa, Kinetoplastibacterium desouzaii
  misc_feature (1)..(234): tr|M1LR48|M1LR48_9PROT 7-cyano-7-deazaguanine synthase OS=Candidatus Kinetoplastibacterium desouzaii TCC079E O X=1208919 GN=queC PE=3 SV=1
MINHNNKALVLFSGGQDSTTCLAWALETYEKVETISFYYGQRHDIELTSRLSVLNSIRSSFPKWDKKLGADHLIEVDFIKNFFNTALTNDLVIENTNDMPNTFVPGRNLLFFTIAAAFGYKSDFNVIVGGMSETDFSGYPDCRDSTIKSQQVTLTLGLEKNIILETPLMWKNKSQVWDFAKNIGGDALIEIIVKYTHTCYIGNHYDFHSWGYGCGDCPACVLRKNGWENWINVE

SEQ ID NO: 37157 - protein, 233 aa, Kryptonium thompsoni
  misc_feature (1)..(233): tr|A0A0P1LC01|A0A0P1LC01_9BACT 7-cyano-7-deazaguanine s ynthase OS=Candidatus Kryptonium thompsoni OX=1633631 G N=queC PE=3 SV=1
MTEKEIAVVLVSGGLDSCVTAAIANSLGYELAFLHLNYGQRTEQRELKAFHDIADFYGVKKRLVINIEHLKLIGGSSLTDENIPVEEADLNRKAIPTSYVPFRNANMLSIAVSWAEVIGATKIFIGAVEEDSSGYPDCRKEFYKAFNEVIKLGTKAGVEGRPIEIVTPVIEMKKVDIVKKGIELKAPLHLTWSCYQREDVACGVCDSCAFRLRGFQLAGVDDPIPYEVKPVYI

SEQ ID NO: 37158 - protein, 229 aa, Lambdaproteobacteria bacterium
  misc_feature (1)..(229): tr|A0A1F6GQ28|A0A1F6GQ28_9PROT 7-cyano-7-deazaguanine s ynthase OS=Candidatus Lambdaproteobacteria bacterium RI FOXYD2_FULL_56_26 OX=1817773 GN=queC PE=3 SV=1
MIDSKALVIFSGGQDSTTCLGWAKNRYREVVAISFYYGQKHQIELEQAKKIASALSVPLELVDIHFYQQMVYSALTGDPMAMNAPHRDNAALPASFVPNRNALFILLAHSYAQQVKAHTMVAGLCQTDYSGYPDCREPFAKSLILALNQGSDQQIELLTPLMYLTKAETFALAEQEGVLPLVLAESHTCYQGSSTPNPWGRGCGLCPACLLRAKGYQEYLSTLERSTHG

SEQ ID NO: 37159 - protein, 226 aa, Lambdaproteobacteria bacterium
  misc_feature (1)..(226): tr|A0A1F6GFS7|A0A1F6GFS7_9PROT 7-cyano-7-deazaguanine s ynthase OS=Candidatus Lambdaproteobacteria bacterium RI FOXYD2_FULL_50_16 OX=1817772 GN=queC PE=3 SV=1
MEDKKALVIFSGGQDSTTCLAWAKQRYKEVAAISFIYGQVHEIEIVQATLIAETLGVPLDVWDISFYQEMVTSALTGNLPDMNAQHRDNNLLPASFVPNRNALFILLAHSFAQQIKAQVLVTGICQTDYSGYPDCRDEFAKAFIAALNSGADQHIELKTPLMYKTKAETFQMAEEAGILDLVVRESHSCYNGDPNLNKWGRGCGHCPACKIRERGFAEFLALKQGK

SEQ ID NO: 37160 - protein, 225 aa, Latescibacteria bacterium
  misc_feature (1)..(225): tr|A0A3N5WLS7|A0A3N5WLS7_9BACT 7-cyano-7-deazaguanine s ynthase OS=Candidatus Latescibacteria bacterium OX=2053 570 GN=queC PE=3 SV=1
MRSVVLVSGGMDSLVTAALAADAGGTAFLHVSYGQRTEARERTAFRRIADHFDIRHRLEAAMPAVRAIGGSALTDPAIPIRTDGVDRAGIPASYVPFRNAQLLALAVSWAEVLGARSVWIGAVEEDSSGYPDCREAFFHAFGESVRLGTARPGAIRIEAPLLHKTKAEIVRLGLRLGVPFELSWSCYVSEEEACGTCDSCRLRLGAFRENGVVDPIRYAPPASRP

SEQ ID NO: 37161 - protein, 221 aa, Latescibacteria bacterium
  misc_feature (1)..(221): tr|A0A3D4H125|A0A3D4H125_9BACT 7-cyano-7-deazaguanine s ynthase OS=Candidatus Latescibacteria bacterium OX=2053 570 GN=queC PE=3 SV=1
MPETRGSFLLLSGGMDSTTLLWWMQAQGVDEIHTVAVDYGQRHRAELDCGARLSAEGGAQSHRVLQLDLTQLGGNPLTDADFAVPSANEDNQIGTVVPFRNMLFVTLSAALAETQGILDIYLSPVRDDHESYRDCRREFYDLLEKTLRLGATRHAEFRVHTPFVEMWKKEVVRVGIELGVPYARTHTCYEGIRPACGKCDACVERLAAFAANCTVDPLPYK

SEQ ID NO: 37162 - protein, 231 aa, Levybacteria bacterium
  misc_feature (1)..(231): tr|A0A2M8FC84|A0A2M8FC84_9BACT 7-cyano-7-deazaguanine s ynthase OS=Candidatus Levybacteria bacterium CG_4_9_14_ 0_2_um_filter_35_21 OX=1974627 GN=CO028_02965 PE=3 SV=1
MNEKEPVKTKSNEDFLEGLQRKETGRVVLMYSGGVDCTAAGLLLREQGLDVFPLFVDYGQSSSEAERVLVENVPVRLGFRPAHIVETDIMKQLTKSKLLGQEALSDDDAWVPGRNTLFMVIAGIYAKQIDGDGIAIGYMLDDNFVFGDNDYFHHKGIEQVLSHSFLQPMQVFLPTRSMTKRELIQKLTNAGFIDLTVSCWNAKVEKNKIISCHECANCLEREKGINELKKE

SEQ ID NO: 37163 - protein, 238 aa, Liberibacter solanacearum
  misc_feature (1)..(238): tr|A0A095BEM2|A0A095BEM2_9RHIZ 7-cyano-7-deazaguanine s ynthase OS=Candidatus Liberibacter solanacearum OX=5562 87 GN=queC PE=3 SV=1
MNNNREKTSSALLLFSGGQDSSTCLSWALDKFDKVETLSFDYGQRNKVELECRLRLREKIVQLTPKWKDSLGTDHILPLATLGDISHSSLTKNIEIKIQENNLPNTFVPGRNIIFLVFAAALAYRRGITNIIAGMCEMDYSGYPDCRNETIRAIEMTLNLGMESNFTIHTPLMHLKKHETWKLVKDIGGQNLVDLILEESHTCYLGTRDKRYEWGYGCNSCPSCNLRQKGWVEFKEKY

SEQ ID NO: 37164 - protein, 241 aa, Liberibacter europaeus
  misc_feature (1)..(241): tr|A0A2T4VWB3|A0A2T4VWB3_9RHIZ 7-cyano-7-deazaguanine s ynthase OS=Candidatus Liberibacter europaeus OX=744859 GN=queC PE=3 SV=1
MIDNIENKSSAILLFSGGQDSSTCLAWALNKFNRVETIGFDYGQRNKVELECRLRIRQKIIQLIPEWERSLGEDFILPITTIGEISNSSIIKNIEMKMNDNGLPNTFVPGRNIIFLVVAAALAYSRGIKNIVAGMCETDYSGYPDCRNNTIRAVELALNLGMEGDFTLHTPLMWLKKQQTWQMIQNIGGQNLIDLIVEESHTCYLGVRDKLHEWGYGCNSCKACQLRKKGWMEYKNTKNTS

SEQ ID NO: 37165 - protein, 225 aa, Lindowbacteria bacterium
  misc_feature (1)..(225): tr|A0A1F6LKU6|A0A1F6LKU6_9BACT 7-cyano-7-deazaguanine s ynthase OS=Candidatus Lindowbacteria bacterium RIFCSPLO WO2_12_FULL_62_27 OX=1817870 GN=A3G34_05895 PE=3 SV=1
MPALNRRPDMAVLASGGMDSACLLEWAARRARGAVRPLYVSFGLRWEPGEWKALRRWVRTLKRPNLLPPVMLRAPAGDLYGDHWSLSGRGVPGSRSRDSAVYLPGRNLLMLSKTAVYCAQAGIRTLAIGTLSANPFADATPKFFSDFSRIASRALGRRIRIVAPFRRLTKRRLIRRFAHLPLSLCFSCLRPSAGCRPCGRCNKCVEWRRALSAAGWRVRKTFRPC

SEQ ID NO: 37166 - protein, 534 aa, Lloydbacteria bacterium
  misc_feature (1)..(534): tr|A0A1G2DJ69|A0A1G2DJ69_9BACT Uncharacterized protein OS=Candidatus Lloydbacteria bacterium RIFCSPHIGHO2_02_F ULL_54_17 OX=1798664 GN=A3C93_03755 PE=4 SV=1
MSSVVFVTGRNQCGAVALFSSICYVNLPMKTAKWNYKGVVIFGPPASGKTTLARELRLRERGVFCLEGSKVLRSFGTVLSREEARALYGRLVKSHGKTFIGKALERVALKKGGFVIASGLRGYENAVYLKERGYFVVCLEASQSALLRRLCIRGDGRSLQKEIKDEERIYHTKHIKKVAHVVFHTEKERVVAMAKKILDEVRYRECRICVNGNRNPVIRLSGEGYCDICAQFRKYFRKSILKDELRAFTSQVGKGHRGFDIMVGISGGKDSSAMLRQLQKRGFRILAFSFDTGYYPKHVFSRAARVARQLGVQYKRIDIRPYIRPIDRRSFALTAALYDEKPSPKLSEKFRRLYKEGRKHYSVKCSHALPFVRTCQLCRRVVIRAYYAEALKHGVRTVVLGINEWAHLSKHGRAPEFRATRVLKPFHNKPAVSIVHSPFLFRRTEKETKKILKKMGWELPPGEKLIETNANSCLFARAAETKALHMLGFHPDATRLSREVTAGFITKKRAEKALSVTHQSRYSVRHILAKANIL

SEQ ID NO: 37167 - protein, 224 aa, Macondimonas diazotrophica
  misc_feature (1)..(224): tr|A0A4Z0F9G4|A0A4Z0F9G4_9GAMM 7-cyano-7-deazaguanine s ynthase OS=Candidatus Macondimonas diazotrophica OX=230 5248 GN=queC PE=3 SV=1
MTRSAIVLLSGGLDSATTLALAKQQGFDCAALSFAYGQRHDAELAAAARVAAHAGVSVHRTVTLDLAAFGGSALTDSSIAVPTAPSSGIPITYVPARNTVFLAHALAWAEVLPARDLFIGVNAVDYSGYPDCRPAFIEAFERLANLATRAGVEGSPFRVHAPLIHWSKAEIIQRGVALGVDFSMTVSCYQADTSGAACGLCDACRLRASGFAEAGIDDPTRYWT

SEQ ID NO: 37168 - protein, 243 aa, Magasanikbacteria bacterium
  misc_feature (1)..(243): tr|A0A1F6NZ87|A0A1F6NZ87_9BACT 7-cyano-7-deazaguanine s ynthase OS=Candidatus Magasanikbacteria bacterium RIFOX YD2_FULL_36_9 OX=1798707 GN=queC PE=3 SV=1
MHNSVLKNNTNQSGIEKKAVVLLSGGLDSATTAILAKSNGFEIHAISFAYGQRHSVELEAAKRVVDFLGIKHHIVVPIDLRIFGGSALTSNIEVPKDRTTDEMIAKEIPITYVPARNTIFLSFALAYAEILGSADIFIGVNALDYSGYPDCRLEFINAFEKMANLATKAGVEGLHIKIHTPLINLTKAEIITRGMEFKFDYGLTISCYDPSENGLACGHCDSCILRQKGFKEGGFSDPTKYYN

SEQ ID NO: 37169 - protein, 219 aa, Magnetobacterium bavaricum
  misc_feature (1)..(219): tr|A0A0F3GKJ3|A0A0F3GKJ3_9BACT 7-cyano-7-deazaguanine s ynthase OS=Candidatus Magnetobacterium bavaricum OX=292 90 GN=queC PE=3 SV=1
MVLLSGGIDSSTTLAIAHAEGFELNALTIDYGQRHKVEIESAGAIAHRFGVKRHLVLSLDMAGIGGSALTTTNIDVPKDRLASVGGDLTTDIPVTYVPARNTVFLSLALAWAETLQADTIFIGANAVDYSGYPDCRPEFIRAFEEMANLATKAAVQGGVRFKVRTPLITMSKVEIIRRGRALGLDYSMTWSCYDPTPTGKPCLRCDSCIIREKALRKHD

SEQ ID NO: 37170 - protein, 223 aa, Magnetobacterium bavaricum
  misc_feature (1)..(223): tr|A0A0F3GZG8|A0A0F3GZG8_9BACT 7-cyano-7-deazaguanine s ynthase OS=Candidatus Magnetobacterium bavaricum OX=292 90 GN=queC PE=3 SV=1
MSNCVVLLSGGIDSSTTLAIAHAEGFDLNALTIDYGQRHKIEIGCARAIAHRFDVKRHLVLSLDMTGIGGSALTTDNIDIPRDRLTGVGRGLTTDIPVTYVPARNTIFLSLALAWAETLEADTIFIGANAVDYSGYPDCRPEFIRAFEEMANLATRAAVQGGVRFKVRTPLISISKVEIIQRGLALGLDYSMTWSCYDPTPAGKPCLRCDSCIIRENALREHY

SEQ ID NO: 37171 - protein, 236 aa, Magnetoglobus multicellularis
  misc_feature (1)..(236): tr|A0A1V1PDQ8|A0A1V1PDQ8_9DELT 7-cyano-7-deazaguanine s ynthase OS=Candidatus Magnetoglobus multicellularis str . Araruama OX=890399 GN=queC PE=3 SV=1
MINQYNDKKAIVVYSGGQDSTTCLIWALTNFKKVKAISFDYGQKHQNELDVASKIAFSLKVEHQIVNLKMLRYLTTSALFSNSSQGVNDAHLIHDHLPASFVPNRNALFLTLAHAHAQQIGHSHIVTGVCQTDYSGYPDCRDNFIKSINVSLNIGSESNIEILTPLMYLDKKEIWQLADNLGAIDTILQTHTCYNNSQKSNNWGRGCGTCPACKLRSKGFQQYTAQIGIGEKGCRT

SEQ ID NO: 37172 - protein, 222 aa, Magnetoglobus multicellularis
  misc_feature (1)..(222): tr|A0A1V1P5D2|A0A1V1P5D2_9DELT 7-cyano-7-deazaguanine s ynthase OS=Candidatus Magnetoglobus multicellularis str . Araruama OX=890399 GN=queC PE=3 SV=1
MINAIIILSGGMDSVTLLHYLIKRQKISPAIITFMYGQKHHKEIACAKEHARILDCQDHLIVDLTFLKPLFARSSLVSNQIQIPNMDDIKGNPQPSTYVPNRNMIFLSLAAAYAETLGVPDIYYGAQKHDAYGYWDTTTQFVTQLNALFGQNREIPIQIKAPFVDYSKTAILQLGQSLDVDYAKTWSCYKGDSLACGYCPTCYERLKAFADCDLRDPLPYNK

SEQ ID NO: 37173 - protein, 235 aa, Magnetomorum sp.
  misc_feature (1)..(235): tr|A0A0N0D3K9|A0A0N0D3K9_9DELT 7-cyano-7-deazaguanine s ynthase OS=Candidatus Magnetomorum sp. HK-1 OX=1509431 GN=queC PE=3 SV=1
MYKQKAVLLSSGGLDSTTALAIAKHEGFDVYSMSFNYGQRHSFELKAAEKVAETLDVAQHLVINVNMRQIGGSALTDEMDVPKDRSADAMTKDIPVTYVPARNTIFLSYALAWAEVLGAFDIIIGVNAVDYSGYPDCRPEFIDAFEKMANLATKAGIEAQHKIRINAPLIHLTKAQIILKGTELGVDYGITHSCYDPSPDGLACSKCDSCILRRKGFLEAGVEDPTKYAQNMFNH

SEQ ID NO: 37174 - protein, 150 aa, Magnetoovum chiemensis
  misc_feature (1)..(150): tr|A0A0F2IT26|A0A0F2IT26_9BACT 7-cyano-7-deazaguanine s ynthase OS=Candidatus Magnetoovum chiemensis OX=1609970 GN=MCHI_003916 PE=3 SV=1
MPKENKDILIQSVIPVTYVPARNTIFLSFALSWAEVLQAPDIFIGANAIDYSGYPDCRPEYIKAFENMANLATKISVDKELTFKINAPLINMSKADIIKKGIELGLDYSLTWSCYDPINDTTPCGRCDSCLLRQRGFEQAGISDHLRKNL

SEQ ID NO: 37175 - protein, 216 aa, Margulisbacteria bacterium
  misc_feature (1)..(216): tr|A0A1F6QEM0|A0A1F6QEM0_9BACT 7-cyano-7-deazaguanine s ynthase OS=Candidatus Margulisbacteria bacterium GWE2_3 9_32 OX=1817872 GN=A2X41_03655 PE=3 SV=1
MKALVLLSAGLDSLVNMAQALDNGYELEALTFDYGQKAAQKELEHAANICTFYSIPHRVIELPWLAEVTTTSLVASRNEVPVFNEERINDTDYINSTAKAVWVPNRNGTFINIAASVSEAKGIDEIIVGFNKEEAATFPDNTKEYLEKVNDALAYSTLSKVKVISFTTDFDKIAIVNLGKRLAVPFKYCWPCYHNGAQLCGRCESCVRYFRALSAY

SEQ ID NO: 37176 - protein, 228 aa, Margulisbacteria bacterium
  misc_feature (1)..(228): tr|A0A1F6QVN0|A0A1F6QVN0_9BACT 7-cyano-7-deazaguanine s ynthase OS=Candidatus Margulisbacteria bacterium GWF2_3 5_9 OX=1817873 GN=queC PE=3 SV=1
MQINDKSALVILSGGQDSTTALFWAKQQFMSVETISFDYGQRHKIELDCAKKIASIAEVPNKRVSLSSLSQLSDNAMVNETNIELNKETSLPTTFVPGRNLLFVTMAAAFAYEKRIPNLILGVSQVDYSGYPDCREETMKSLEKTISLGMEFPFKIHTPLIHKTKRETVLLAKELGIVDVLKFTHTCYKGQNPPCGDCPACELRAKGFAEVGINDPLIKSPFERGGTK

SEQ ID NO: 37177 - protein, 218 aa, Marinamargulisbacteria bacterium
  misc_feature (1)..(218): tr|A0A328RJE5|A0A328RJE5_9BACT 7-cyano-7-deazaguanine s ynthase OS=Candidatus Marinamargulisbacteria bacterium SCGC AG-414-C22 OX=2184344 GN=queC PE=3 SV=1
MSIKALVLFSGGQDSTTCLAQACNDFPGRVAAVAFDYGQRHRVELEQAQIIAKLADVPLTVVPLPFISDLTSNALTRPDMDIATPTDSLPNTFVDGRNLFFLSVAAVIAKQQDCSILYTGVCETDYSGYPDCRQSFITSCTETLNLAMDYTFEIRTPLMYLTKAETVLLMKNLNCLDWYAHTHTCYNGQRPACGTCPACELRLKGFADAGLTDPLEYQ

SEQ ID NO: 37178 - protein, 222 aa, Marinamargulisbacteria bacterium
  misc_feature (1)..(222): tr|A0A328RSZ5|A0A328RSZ5_9BACT 7-cyano-7-deazaguanine s ynthase OS=Candidatus Marinamargulisbacteria bacterium SCGC AAA071-K20 OX=2184347 GN=queC PE=3 SV=1
MKYKSGLVLLSGGQDSTTCLAIAQNECETVYSVSFDYGQRHRIELQQAQKIASLANVDFHIIDATFINKLNNNALTDSSIEISQVDNEIPNTFVPGRNLFFLAMAAVYARERECNIIYTGVCETDYSGYPDCRSDFIKSAEQTINLAMESHFEIKTPLMTLSKAATVRLMYSFNKMDWYSHSHTCYEGKRPACGVCPACILRLKGFKDAGFEDPLSYEYVLK

SEQ ID NO: 37179 - protein, 235 aa, Marinimicrobia bacterium
  misc_feature (1)..(235): tr|A0A4Y8IBW1|A0A4Y8IBW1_9BACT 7-cyano-7-deazaguanine s ynthase OS=Candidatus Marinimicrobia bacterium MT.SAG.3 OX=2552982 GN=E3V55_00150 PE=3 SV=1
MVIESVNREAWTVIGSTAELRILFSGGIESAVLMGEAIEAGLVPIPVYVATGTRWENTELKSANIYLETLELGLSDKIIIRKYTPGDVEKHWAYNKGSYPLAEEDIQTLEISGRNETLLREAVRFGEDDQKLILVIGTTADNPFKDGDQQFYSEMETTLSAQRRARVTILTPLKGLTKSDVIKRGKRFPLGLTLSCVAPLNGKACGECIKCASRTAAFLTAEVIDKYEMEELNES

SEQ ID NO: 37180 - protein, 230 aa, Marinimicrobia bacterium
  misc_feature (1)..(230): tr|A0A4Y8I144|A0A4Y8I144_9BACT 7-cyano-7-deazaguanine s ynthase OS=Candidatus Marinimicrobia bacterium MT.SAG.3 OX=2552982 GN=queC PE=3 SV=1
MENRDNSLAVVAVSGGLDSAVATAIAAERHELALMHINYGNKTQKRELEAFHAIADFYKIDNRFVADIDHLRKIGSSSLTDRNIEVADYDPDAQGIPQTYVPFRNANILSIAVSWGEAIGANLIYVGMMEEDSAGYPDCTEEFINAFNTMVKIGTRPETNIELIAPLIHMSKREVIKKGMELGAPLDLTWSCYRSEEESCGECESCVLRLNGYKELGIEDPIKYVEMEVK

SEQ ID NO: 37181 - protein, 229 aa, Melainabacteria bacterium
  misc_feature (1)..(229): tr|A0A1F6RG22|A0A1F6RG22_9BACT 7-cyano-7-deazaguanine s ynthase OS=Candidatus Melainabacteria bacterium RIFOXYA 2_FULL_32_9 OX=1801611 GN=queC PE=3 SV=1
MNKSIILLSGGLDSVISLACAKEEYNISLALTFNYGQRAKNQEIAAAADIAKYYNIEYKVINLPWLAEITSTSLVNISEKLPALKINELDTLDLTEESAKKVWVPNRNGVFINIAASFADSYNYTHIIFGANSEEATTFPDNSQEFISRINESLQYSTMVKPELVAPLINYNKKEIVKIGIEKKIPFNLIRSCYTDNQKHCGECESCLRLKRALTEIADKETCKLVFGD

SEQ ID NO: 37182 - protein, 223 aa, Melainabacteria bacterium
  misc_feature (1)..(223): tr|A0A327JBT7|A0A327JBT7_9BACT 7-cyano-7-deazaguanine s ynthase OS=Candidatus Melainabacteria bacterium OX=2052 166 GN=queC PE=3 SV=1
MSKRNSIILLSGGLDSLVSLGLKKDSVALAITFDYGQKSAKEEIEASRKICEYYNVEHKVIKLDWLKEITNTTLVSGDVPTISIDKLDDESTKDSVWVPNRNALFINIAGAFADSVGYEYIIIGANKEEAAAFPDNTEEFIKRVNKVFEYSTRVKPQVISPLIIFNKNDIVKSAVENNIPLKLARSCYNGNSKHCGECESCQRLKRALKSNGLNSLVKEMFLK

SEQ ID NO: 37183 - protein, 242 aa, Methylomirabilis limnetica
  misc_feature (1)..(242): tr|A0A2T4TYR9|A0A2T4TYR9_9BACT 7-cyano-7-deazaguanine s ynthase OS=Candidatus Methylomirabilis limnetica OX=203 3718 GN=queC PE=3 SV=1
MSACNVQAGKRAVVLLSGGLDSATAAAMAKAEGYALHALTFRYGQRHAREVESAKKIAAALGVVRHLILKLDLRQIGGSALTADIPVPKGRGLEEIEAGIPVTYVPARNTIFLSHALAWAEVIGSKDIVLGVNAIDYSGYPDCRPEYIAAFEQMANLATQAGVEGGSRLTIHTPLIHFTKAEIVRRGAALGVDFALTWSCYDPTPDGRPCRACDSCILREKGFAEAGLLDPGPTASKLPFER

SEQ ID NO: 37184 - protein, 233 aa, Methylomirabilis oxyfera
  misc_feature (1)..(233): tr|D5MMR4|D5MMR4_9BACT 7-cyano-7-deazaguanine synthase OS=Candidatus Methylomirabilis oxyfera OX=671143 GN=que C PE=3 SV=1
MVLLSGGIDSATAAALAKAKGYQLHALTFRYGQRHAREVESATRIAAALGASQHLILDLDLRRIGGSALTAEIPVPKGREMDEIGSGIPVTYVPARNTIFLSYALAWAEVIGSEDIVLGVNAIDYSGYPDCRPEYIAAFERMANLATRAGAEGRSTLTIYTPLIHLSKAEIIRRGAALGIDFRLTWSCYDPTQDGRPCRACDSCILREKGFAEAGIADPGLGEAKDEDKPAHL

SEQ ID NO: 37185 - protein, 222 aa, Methylopumilus planktonicus
  misc_feature (1)..(222): tr|A0A0D6EWW5|A0A0D6EWW5_9PROT 7-cyano-7-deazaguanine s ynthase OS=Candidatus Methylopumilus planktonicus OX=15 81557 GN=queC PE=3 SV=1
MSKAVVLLSGGLDSATTLAIAKSEGYECYALSVNYHQRHIAELDAAKKIALLFKVKDHKTVEMDLSWMLTSALTNPDLKMPTELTSHIPITYVPARNTLMLTLALGWAEVIGAHDIFIGVNAVDYSGYPDCRPEYIAQFQKMANLGTKSGVEGQNIHLHTPLIHLSKEAIILQGMKLGVDYGLTVSCYQADQDGYACGVCDSCRLRQNGFKAAGVDDPTSYQ

SEQ ID NO: 37186 - protein, 223 aa, Methylopumilus rimovensis
  misc_feature (1)..(223): tr|A0A5B8DID6|A0A5B8DID6_9PROT 7-cyano-7-deazaguanine s ynthase OS=Candidatus Methylopumilus rimovensis OX=2588 535 GN=queC PE=3 SV=1
MVSKAVVLLSGGLDSATTLAIAKNEGYECYALSINYRQRHIAELEAAKKIAQQFKVKDHRTVEMDLSWMLTSALTNPDLKVPTELSSHIPITYVPARNTLMLSLALGWAEVIGAHDIFIGVNAVDYSGYPDCRLEYIEQFQKMANLATKSAVEGQNIQLHTPLIHLSKEAIILQGMKLGVDYGFTVSCYQADKDGQACGVCDSCRLRQHGFKAAGMDDPTSYQ

SEQ ID NO: 37187 - protein, 244 aa, Methyloumidiphilus alinensis
  misc_feature (1)..(244): tr|A0A2W4RGN2|A0A2W4RGN2_9GAMM 7-cyano-7-deazaguanine s ynthase OS=Candidatus Methyloumidiphilus alinensis OX=2 202197 GN=queC PE=3 SV=1
MKKAVILLSGGLDSATLLALAKQQGYICHALSFNYGQRHGAELNAARHIAEHARVVEHKVVHIGLDAFGGSALTDTSLDVPSQPTTGIPITYVPARNTVFLAFALGWAEVLGAWDIFIGVNAVDYSGYPDCRPEFIGAFEKLARLATKAGVEGQSFKVHTPLIDMGKGEIIRLGLDLGVDYAHTVSCYSADDAGRACGVCDSCRLRKAGFEGAGVDDPTRYQKFTDVTHGCWNPRRHVRSIGNL

SEQ ID NO: 37188 - protein, 239 aa, Microgenomates bacterium
  misc_feature (1)..(239): tr|A0A3A4ZKN9|A0A3A4ZKN9_9BACT 7-cyano-7-deazaguanine s ynthase OS=Candidatus Microgenomates bacterium OX=20933 73 GN=C4564_01900 PE=3 SV=1
MTTSILLYSGGLDSFITAMLNPEVSLLYVDTRASYNAKEKYFLRRLMPDRPVIIDNRLDLSGLEREDKIVPSRNLLLIAIASYYGNDVWLSATAGDNSRDKDGTFAELASNLFSYMLSGGHYPNAEKVQVRLPYKWWSKGQLVDKYLAAGHPPEFLSKTVSCYHPVLEHCGRCKACIRKWIALAGNAVDKTHWSFPPWEAEIWPDIVAKILAPEGVWRCKAEDSETLEVLATFRPDLLR

SEQ ID NO: 37189 - protein, 240 aa, Micropelagos thuwalensis
  misc_feature (1)..(240): tr|U2WCR8|U2WCR8_9PROT 7-cyano-7-deazaguanine synthase OS=Candidatus Micropelagos thuwalensis OX=1397666 GN=mh pF PE=3 SV=1
MTDSRTALVLFSGGQDSTVCLAHALATYSHVETVGFDYGQTHRVELDCRLDVLAQIRAAFPDWAEKLGDDHVLALPALADIGGTALTGDGEIRVLDNGLPSTFVPGRNLLFLTYAAAIAYRRGLSVLVGGMCETDYSGYPDCRRDTLDHLAKAISAGMDAPIEIETPLMYLDKAATWAMTETLGGDMLIDLIREATHSCYRGDRTTRHEWGYGCNDCPACELRSKGYAQWVAQKKVSHDL

SEQ ID NO: 37190 - protein, 265 aa, Micropelagos thuwalensis
  misc_feature (1)..(265): tr|U2WCQ2|U2WCQ2_9PROT Acyl-[acyl-carrier-protein]--UDP -N-acetylglucosamine O-acyltransferase OS=Candidatus Mi cropelagos thuwalensis OX=1397666 GN=queC PE=3 SV=1
MSNIHPTAEVDKGAEIGNGVEIGPFCVIGPNVKIGDNTVLHSHVSISGHTTIGMGNEVFPYASLGHIPQDLKFKNEKSFLEIGDGNRIRENVTINLGTEGGGGITRVGNNSLFMVGVHIAHDCILGDNIVMANYAALGGHVEIANNVIFGGFSAIHQFSKAGKYSFIGAGAMVVGNVIPFSTVMGDRACLVGLNLVGLKRANFKREDIHSLRNAYKLLFSSSDVDLLEQRVQQAEEEFGGSPLVNDLLSFIKSIDKRGICLPPQN

SEQ ID NO: 37191 - protein, 232 aa, Muproteobacteria bacterium
  misc_feature (1)..(232): tr|A0A1F6TJD6|A0A1F6TJD6_9PROT 7-cyano-7-deazaguanine s ynthase OS=Candidatus Muproteobacteria bacterium RIFCSP HIGHO2_01_FULL_65_16 OX=1817764 GN=queC PE=3 SV=1
MSVNDSRKAVVLVSGGLDSATVLAHARAEGCACYCLTFDYGQRHRVELEAARRVAASLGAADHRVVRLDLSWMGGSALTDLSIPVPEKPSEGIPVTYVPARNTVFLSIALGWAEVQGAQDIFIGANAVDYSGYPDCRPEYMEAFERLANLATRAAVEGRRVRVRTPLMQMRKADIIREGVRLGVDYSLTSSCYQPDAAGRACGACDSCRLRAAGFRAAGVPDPASYARPPAV

SEQ ID NO: 37192 - protein, 229 aa, Muproteobacteria bacterium
  misc_feature (1)..(229): tr|A0A1F6TWU2|A0A1F6TWU2_9PROT 7-cyano-7-deazaguanine s ynthase OS=Candidatus Muproteobacteria bacterium RIFCSP LOWO2_01_FULL_60_18 OX=1817768 GN=queC PE=3 SV=1
MPADADAGRKAVVLVSGGLDSATVLALARAAGARCYALTLDYGQRHRVELEAARRVAQQLGAADQRVVKLDIGWIGGSALTDTRIAVPHESSPGIPVTYVPARNSVFLSIALGWAEVLGASAIYIGANAVDYSGYPDCRPEFIRAFESLANLATRAGVEGKAFHVHAPLMNMRKHEIIRTGARLGVDYALTLSCYDPDAAGRACGRCDACRLRAQGFAEAGVADPTRYR

SEQ ID NO: 37193 - protein, 292 aa, Nealsonbacteria bacterium
  misc_feature (1)..(292): tr|A0A1G2EPC8|A0A1G2EPC8_9BACT 7-cyano-7-deazaguanine s ynthase OS=Candidatus Nealsonbacteria bacterium RIFOXYB 1_FULL_40_15 OX=1801677 GN=A2365_00785 PE=3 SV=1
MQLMGNQSKKFHVWEKENEDKSIVNVIGQILKYKRGYIVRMPEKGGPVVCCMSGGADAVSNIFIMLNDFGYEVFPFFINRGQSAYQWERASIKHYDQLFKERFPKLYHETKEIKVNTPAREYKKDLREVKKKCYETEASAHVSYPARNSIIFLTGMEYALSLKNKGKDVTTLFVAHVASDTSYHCSLTWQRILNLEICHTFHDYQLQLISLPIEIEFGNYFDKDVYLKYCYKNGLDLTKTRTCIRKDEIQCGTCPCCWDRRRSFLEAGIKDETRYQKPYPEKSGRYYDSTLK

SEQ ID NO: 37194 - protein, 512 aa, Nealsonbacteria bacterium
  misc_feature (1)..(512): tr|A0A1G2EFZ4|A0A1G2EFZ4_9BACT GMP synthase [glutamine- hydrolyzing] OS=Candidatus Nealsonbacteria bacterium RI FCSPLOWO2_01_FULL_43_32 OX=1801672 GN=guaA PE=3 SV=1
MSMIIILNFGGQYTHLIARRIRELGCYAEILPFDISSSKIKELKPNGLILSGSPFSVYDENAPLPKSEIFSLNIPILGICYGQQIIAKILGGEVEKGKLREFGREILTVLDKKNLFKGLNKKEAVWFSHGDLVTKLPKGFKVIGKSRTSKIASFANSDNKIFGIQFHPEVIHTNKGLKIIENFIYGICNEKKSWKISNIKNNLIVELKKTLGNEAVLIGVSGGVDSLVAASLLKAAIGDKLYCIFVDNGLMRKNEAEEIEKIFVKTKFKNFIVADAKEKFLSALKKVTDPEKKRKIIGRTFIRVFERKAKELEKQAKFKFLAQGTIYPDRIESAQPSKNAAKIKSHHNVTLPKKLKFQIVEPLRELYKDEVRRLGKKLGLPKSIIGRHPFPGPGLAVRILGEITKDRLDILREADSIFISELKKAGLYDKIWQAFAALLPLKTVGVMGDARTYEYIISLRAVNSKDGMTADWAKIPNEVLENISSKIVNEVRGVNRVVYDISQKPPATIEYE

SEQ ID NO: 37195 - protein, 220 aa, Nitrosoglobus terrae
  misc_feature (1)..(220): tr|A0A1Q2SK04|A0A1Q2SK04_9GAMM 7-cyano-7-deazaguanine s ynthase OS=Candidatus Nitrosoglobus terrae OX=1630141 G N=queC PE=3 SV=1
MILVSGGLDSATTLAIAKDLGFACYAISFDYSQRNRVELQAAAEISSLLGVIEHKVIRVDWGGIGGSALTDSNIPIPEKIAVGAIPVTYVPARNTLFLAFALGWAEILKAQDIFIGVNTIDYSGYPDCCPEFIKAFEYLANLATCASMKGQVFHIQAPLLYLSKAEIIRKGINLGIDYSRTVSCYQADEAKRACGVCDSCRFRKQGFLEANIADPTIYYR

SEQ ID NO: 37196 - protein, 232 aa, Nitrospira inopinata
  misc_feature (1)..(232): tr|A0A0S4KY62|A0A0S4KY62_9BACT 7-cyano-7-deazaguanine s ynthase OS=Candidatus Nitrospira inopinata OX=1715989 G N=queC PE=3 SV=1
MSDSTAQRAVVLASGGLDSTVAAAVAGRDGYDLDLLTIAYGQRHAIEVERAGRIATALKARRHLVINLDLRAIGGSALTGDVPVPKNRPEAERSREVPVTYVPARNLIFLSLAAAYAETIDAPVVYFGANVLDYSGYPDCRPEFIKAFESAVRAGTKAGTEGRSFEVRAPLLTLTKAQIVTLGLSLNVPFHLTHSCYDPAGAVACGQCDSCLIRRKGFAEAGVADPIPYMVP

SEQ ID NO: 37197 - protein, 232 aa, Nitrospira nitrificans
  misc_feature (1)..(232): tr|A0A0S4LC36|A0A0S4LC36_9BACT 7-cyano-7-deazaguanine s ynthase OS=Candidatus Nitrospira nitrificans OX=1742973 GN=queC PE=3 SV=1
MNGQISERAVVLASGGLDSTVTAALARREGYALYLLTIAYQQRHAVEIERSRQVATALEAHQHVVIDVDLRAIGGSALTGNQSVPKRRTVSERNRDVPVTYVPGRNLIFLSLAAAHAEVLGASIIYFGANVIDYSGYPDCRPEFIKTVEAAIQAGTKAGMQGKGIEIRTPLLRMSKAEIIRLGLTLNVPFHLTHSCYDPIGLMACGQCDSCLIRKRGFAEAGVVDPIQYAVC

SEQ ID NO: 37198 - protein, 225 aa, Nitrotoga sp.
  misc_feature (1)..(225): tr|A0A3E1D734|A0A3E1D734_9PROT 7-cyano-7-deazaguanine s ynthase OS=Candidatus Nitrotoga sp. MKT OX=2184311 GN=q ueC PE=3 SV=1
MKNAVVLLSGGLDSATVMAMAKQQGYLCHALSVDYGQRHYAELAAAERVAQALGAIEQRVIRVDLTGFGGSALTDARIAVPEQRTTGIPLTYVPARNTIMLSLALAWAEVLQVQDIFIGVNAVDFSGYPDCRPEYIAAFENMANLATKTAVEGNYLTLHAPLLRLSKADIVKLGTELGVDYSLTVSCYQADSDGRACAVCDSCQLRRAGFKTAGIVDPTRYRIAG

SEQ ID NO: 37199 - protein, 225 aa, Nitrotoga sp.
  misc_feature (1)..(225): tr|A0A3E1DDD8|A0A3E1DDD8_9PROT 7-cyano-7-deazaguanine s ynthase OS=Candidatus Nitrotoga sp. SPKER OX=2184312 GN =queC PE=3 SV=1
MKKAVVLLSGGLDSATVMAMAKRQGYICYTLSVDYGQRHYAELAAAERVAQALGAIEQRVVSVDLTGFGGSALTDKRIAVPEQATSGIPLTYVPARNTIMLSLALAWAEVLQVQDIFIGVNAVDFSGYPDCRPEYIAAFESMANLATKAAVEGKYLTLHAPLLRLSKADIVKLGMELGVDYSLTVSCYQADSDGRACALCDSCQLRRAGFKTAGIVDPTRYHIAG

SEQ ID NO: 37200 - protein, 225 aa, Nomurabacteria bacterium
  misc_feature (1)..(225): tr|A0A0G0ZE03|A0A0G0ZE03_9BACT 7-cyano-7-deazaguanine s ynthase OS=Candidatus Nomurabacteria bacterium GW2011_G WC2_42_20 OX=1618756 GN=UV12_C0015G0008 PE=3 SV=1
MNGLAVVLKKRVLVLLSGGIDSAVCATKLCTDGNDVYALSIRYPNSANAEEIDNAIFHAKRLHIKHVVVDFNFIEQLTVGVDANMSFNVGGAINNCISRGKVPMPMSVELLHVVALMFARMREIRHIYWSIHKDDIVGDSEKKIFEYLRALEGPATLGRYSSCKFELPFIGFSKKEVIEIGESLDVNFDHTHSCSSSSRVACGVCRQCVLRADAFESLHPKKLAG

SEQ ID NO: 37201 - protein, 218 aa, Nomurabacteria bacterium
  misc_feature (1)..(218): tr|A0A1F6YI68|A0A1F6YI68_9BACT 7-cyano-7-deazaguanine s ynthase OS=Candidatus Nomurabacteria bacterium RIFOXYA1 _FULL_35_17 OX=1801798 GN=A2192_02660 PE=3 SV=1
MKNKKAICLISGGLDSAVASAITINEGYEPIFLFLRYGQKTLEKEEWCLDKLTKYWKVKQVYKVDLPWIKEFGGSALLDKNIPLDEINFRLEYVPFRNSIFLAVATALAEVEKADIIVVGSTGGDHICPDNRPEFIKAFQKIISMGTMLKKDIKIFHPLTKTDKTGAVKIGEKLKVPFELTWSCHNKIDFACGHCSNCLSRIEAFNLNVFRDPIEYEK

SEQ ID NO: 37202 - protein, 460 aa, Omnitrophica bacterium; identical to SEQ ID NO: 28914
  misc_feature (1)..(460): tr|A0A1J4VN28|A0A1J4VN28_9BACT Multifunctional fusion p rotein OS=Candidatus Omnitrophica bacterium CG1_02_49_1 0 OX=1805289 GN=queE PE=3 SV=1

SEQ ID NO: 37203 - protein, 226 aa, Omnitrophica bacterium
  misc_feature (1)..(226): tr|A0A2H0Y5S5|A0A2H0Y5S5_9BACT 7-cyano-7-deazaguanine s ynthase OS=Candidatus Omnitrophica bacterium CG08_land_ 8_20_14_0_20_41_16 OX=1974743 GN=queC PE=3 SV=1
MANNIAVVLLSGGLDSATTLYLARKQGYKCFCLIFDYGQRQKKEIEYAKKIARAANCPYKIIKINLPWKGSALLDKKIKIPKLANLRTCELANKIPSTYVPARNIIFLSFALSYAEAIGAKAIFIGAHVQDYSGYPDCRPQFYRAFKKVVLTGTKAGVEKKRIRIGTPLIHKTKAQIIKLGERLGVSFGLTWSCYRGGRVPCGECDSCYYRAKGFKEAGIKDPLKK

SEQ ID NO: 37204 - protein, 202 aa, Omnitrophus magneticus
  misc_feature (1)..(202): tr|A0A0F0CVZ4|A0A0F0CVZ4_9BACT 7-cyano-7-deazaguanine s ynthase OS=Candidatus Omnitrophus magneticus OX=1609969 GN=OMAG_000430 PE=3 SV=1
MHKAVVLLSGGMDSAVTLYIAKQKYQCHVLIFDYGQQARKEIISAKNLAKQSSSDFYVIKITLPWKGSALLDKNIKIPENGDYLGKGIPSTYVPARNIIFLSFGVSFAEAIGANAIFIGAHELDFSNYPDCRGEFFDSFQKVINKGTKSGVNKSPVKIITPILNKTKKEIVKTDIKHSFYIFFILIIFIPTFLLILILNIFF

SEQ ID NO: 37205 - protein, 80 aa, Omnitrophus magneticus
  misc_feature (1)..(80): tr|A0A0F0CQL5|A0A0F0CQL5_9BACT 7-cyano-7-deazaguanine s ynthase OS=Candidatus Omnitrophus magneticus OX=1609969 GN=OMAG_002320 PE=3 SV=1
MLLTAMAAPHPKVWNLASVITPILNKTKKEIVKTGTKLGVPFQYTWSCYKGGKKPCGTCESCAFRAKGFQSADIVDPIGV

SEQ ID NO: 37206 - protein, 269 aa, Ozemobacter sibiricus
  misc_feature (1)..(269): tr|A0A367ZMK4|A0A367ZMK4_9BACT 7-cyano-7-deazaguanine s ynthase OS=Candidatus Ozemobacter sibiricus OX=2268124 GN=queC PE=3 SV=1
MTSPRSPSGSARAATTSPLGRTTSTRRKPASSAQRPLAVIVASGGMDSTVCISIAVDEGFEPALFHLDYGQRTERRERRAFRALARHFGARHTLVVKAAHFRQIGGSALTDHRIAVPTGRAAARATARATAGHGLPVTYVPFRNANILAMAVSWAEVIGATRVYIGAVEEDSSGYPDCRETFIRAFDRAIKAGTGAGHALSLKAPLLHLSKKEIVRWGMSLGTPFHLTWSCYQREDLACGECDSCRLRLRGFRQAGFMDPLPYARNEQG

SEQ ID NO: 37207 - protein, 316 aa, Pacebacteria bacterium
  misc_feature (1)..(316): tr|A0A2H0SXM7|A0A2H0SXM7_9BACT 7-cyano-7-deazaguanine s ynthase OS=Candidatus Pacebacteria bacterium CG10_big_f il_rev_8_21_14_0_10_40_26 OX=1974767 GN=COU64_04285 PE= 3 SV=1
MLNKISKKKFNLLLKNKKNEDLDFLKFSEDFLIKKRGFIFKQPKKGDKVILLLSGGIDSVVAWAVLMKVYGYQVYPVIIDRGSNKRAKRELSAVRYFEKYFSKKYPEQYIRPFHLSVNTVAKEIIDTLDKNNITPEDIVLNYKENKFLAEDNSNVVIARAKGVSPYLMPFYGVVYSDYLKFIKGLDIHTILVGVNFSDGIVVSSQTFTALRSTLLSMCVATDNYKWNFSSVFLERETGVYMDKLEIIKLGNKLGIPLKRTWSCYNDGIMQCGDSCATCIDRKRSFYLAGIKDETYYRPYLFRLIKDKVKSWVFFFK

SEQ ID NO: 37208 - protein, 316 aa, Pacebacteria bacterium
  misc_feature (1)..(316): tr|A0A3D1CTW1|A0A3D1CTW1_9BACT 7-cyano-7-deazaguanine s ynthase OS=Candidatus Pacebacteria bacterium OX=2053589 GN=DEP87_03925 PE=3 SV=1
MIFSATSKKNFEKKILSREHEDFGVIKHIETELKRKRGWVFQLPKPEQPVVLLLSGGLDSIVAWHLLMKKYGLMVYPLVINKGMKRTHLEMRSVKYYSKLYQKLFPDLYQAPFHINLPLTEISIGQAVFTEKVHPLVILENLTDSAALKLSLSLGSSILTPFVAKLYAQFLYSTQHLTIKTIFCAVTKGDGENSLVPEQTFTALRTMMWSLCVLTRDYEWQYASVALEKELGNFLSKADLIAWADQHQIPLEHTWTCYHPSIDQTHCGECITCSDRIKSFEKVGVIDRTIYYDQKASLYRRLIDKFKLFIRYYFNL

SEQ ID NO: 37209 - protein, 257 aa, Pandoraea novymonadis
  misc_feature (1)..(257): tr|A0A2P6UYN1|A0A2P6UYN1_9BURK 7-cyano-7-deazaguanine s ynthase OS=Candidatus Pandoraea novymonadis OX=1808959 GN=queC PE=3 SV=1
MTSATDTALVLFSGGQDSTTCLAWALSCYSYVETIGFDYGQRHKAELRCRIDVLAKIRECFPAWASKLGEDHLIDFSVLGKITDSALTQKVAITMEAGNLPNTFVPGRNLLFMTIGAAIAYRRGLGVLVGGMCEIDFSGYPDCRDDTMKALQVVLNLGMDSHFIIKTPLMWIDKAETWQLANDLGGDRLVKLICEDTHTCYLNIRDELHPWGYGCGKCPACQLRRRGFDAWCDRKTVTQFISESQDGEKGKANGICC

SEQ ID NO: 37210 - protein, 241 aa, Pantoea carbekii
  misc_feature (1)..(241): tr|U3U8E4|U3U8E4_9GAMM 7-cyano-7-deazaguanine synthase OS=Candidatus Pantoea carbekii OX=1235990 GN=queC PE=3 SV=1
MINIRKKTKQAVVLFSGGQDSTTCLIQACQFYNKVYCITFDYNQRHRQEIKVAMRLAKHLGIQEHKILDITILNELTISSLTRFNIPIPNYKFNTTCLPSTFVPGRNILFLTISAIYAYTIGAESVIAGISENDFLNYPDCRKEFINLFGNAINLGMERNINFEMPLMSLNKAETWALADYFQQLQLIRLETLTCYNGIKGDGCGNCSACYARASGLADYEANRSNIMKEMKKKCFLKNVL

SEQ ID NO: 37211 - protein, 265 aa, Paraburkholderia kirkii
  misc_feature (1)..(265): tr|G4M7T7|G4M7T7_9BURK 7-cyano-7-deazaguanine synthase OS=Candidatus Paraburkholderia kirkii UZHbot1 OX=105552 6 GN=queC PE=3 SV=1
MRRATPITITEYGVFTVTRIDAKDSALVLFSGGQDSATCLAWALERYRRTVETLGFDYGQRHRVELECREGYRAAIAREFPHWAERLGEDHMIDLSVLGAISDTAMTREIEIQATASGLPNTFVPGRNLLFMTVAAAVAYRRGLKVLVGGMCETDFSGYPDCRDDTMKALQVALNLGMKTRYETRYAVETPLMWLDKADTWRLAETLGGEALVELIRVETHTCYVGERAELYDWGFGCGQCPACKLRKRGYEAYRAGEQVTTAPV

SEQ ID NO: 37212 - protein, 234 aa, Paraburkholderia kirkii
  misc_feature (1)..(234): tr|A0A0L0LZZ4|A0A0L0LZZ4_9BURK 7-cyano-7-deazaguanine s ynthase OS=Candidatus Paraburkholderia kirkii OX=198822 GN=queC PE=3 SV=1
MLFSGGQDSATCFAWALERYRTVETLGFDYGQRHRVELECRDGFRAAIASGFPQWAERLGEDHMIDLSVLGAISDTAMIREIEIRTTTTSGLPNTFVPGRNLLFMTIAAVVAYRRGLKVLVGGMCETDFFGYPDCRDDTMKALQVALNLGMETRYALETPLMWLDKADTWRLAETLGGEALVELIRVETHTCYVGERAELHDWGFGCGQCPACKLRKRGYEAYRAGEQVTIAPV

SEQ ID NO: 37213 - protein, 229 aa, Parcubacteria bacterium
  misc_feature (1)..(229): tr|A0A3R6ZQL5|A0A3R6ZQL5_9BACT 7-cyano-7-deazaguanine s ynthase OS=Candidatus Parcubacteria bacterium OX=205330 9 GN=queC PE=3 SV=1
MGMSKPAVILLSGGLDSTTTLAIAKNEGFDVYAMSVRYGQRHSVELESAIKIARHFLVMKHQIVDIDLRAFGGSALTDEIDVPKDRSEEEMQDIPITYVPARNTIFLSYALAWAEVLGCQDIFCGVNAVDYSGYPDCRPEYIDAFEKMANLATKASVEGKKLKIHSPLIHLTKAEIIKKGYDLGVDYSVTLSCYDPSRAGEACGACDSCQLRKKGFEEAGIPDPTRYLP

SEQ ID NO: 37214 - protein, 216 aa, Parcubacteria bacterium
  misc_feature (1)..(216): tr|A0A3M0WV77|A0A3M0WV77_9BACT 7-cyano-7-deazaguanine s ynthase OS=Candidatus Parcubacteria bacterium OX=205330 9 GN=D6827_03715 PE=3 SV=1
MDNKKYIALVSGGMDSTTLLYEYKHLIRAALYIDYASKHKEKEHAFAELHAKKNGIEFIKANLQDVAQYLKSNLIKNQGDIPDGHYTDLIMRKTVVPFRNGIMISIAAGIAESLEAKGVLLANHAGDHAIYPDCRNEFISKMAAAICSGTYAKIELIAPYTNITKRDIALKGMKLHIPYELTWSCYKGKDIHCGTCGTCVERKEALAGFDTTQYQA

SEQ ID NO: 37215 - protein, 279 aa, Pelagibacter sp.
  misc_feature (1)..(279): tr|A0A1Z9HY22|A0A1Z9HY22_9PROT 7-cyano-7-deazaguanine s ynthase OS=Candidatus Pelagibacter sp. TMED166 OX=19868 05 GN=CBD26_02860 PE=3 SV=1
MIQTGKVIAFYQKYTMLSDKCSVLSFSGGMDSTSLLLKLISKNHIVHAISFKYGQKHEVEVELAKNNISYLKNNGFKDKVIHKVFDISNILSNFNSSLIDKNQDVPEGYYESDMMKSTFVPNRNAIFFSLIYGYAISISKNYDDKISISLGAHSGDHAIYPDCRLDFFESLFKSLQLGNWGSDNIELSVPYIDMDKKNILLDAEKSIKYLDLDFDTIFKNTITSYAPTKNGVSSGRTGSDIERILAFDSIKKKDPIKYQDSWENVLKNAKETEQEYLNG

SEQ ID NO: 37216 - protein, 345 aa, Pelagibacter sp.
  misc_feature (1)..(345): tr|A0A1Z8VWK0|A0A1Z8VWK0_9PROT ATPase (Fragment) OS=Can didatus Pelagibacter sp. TMED64 OX=1986830 GN=CBC24_089 90 PE=4 SV=1
MKYCTKCLLPETHETIEFDHEGVCNICRNHEFKKEKIDWDQKRKDFLDIIEEYRGKYAYDCIVPFSGGKDSTYTLYQLAKEFDLKCLVVSFDHGFYRQTLIENNKRVFKALGVDSMVYKPNWLTVRKLMLESLLRKGDFCWHCHSGIFAYPMQVAISLNVPLVIWGEPQAEYTAYYSYEDTLNETEEVDEKRFNRFVNLGITADDMIGMLGDEELDPRDMDPFRYPKLRDLKRINYRSICLGSYIPWDVKKQVALIKDELGWQEDLNAGIPPEYGYEKIECQMQGIRDYLKYIKRGYSRTTHLTTIDIRNDRIKREDALELVEKYDGKRPESLDHFLEMLSLTED

SEQ ID NO: 37217 - protein, 222 aa, Peregrinibacteria bacterium
  misc_feature (1)..(222): tr|A0A1F7ABL8|A0A1F7ABL8_9BACT 7-cyano-7-deazaguanine s ynthase OS=Candidatus Peregrinibacteria bacterium RIFCS PLOWO2_01_FULL_39_12 OX=1801897 GN=queC PE=3 SV=1
MKENSSKAVILLSGGQDSTTCLAWAKKKFDKIFAITFDYGQRHKTELLSAKKIAKLSGTPLKIIKIDVFKHLTKNALTDKFVKIKIQKNKLPTTFVPGRNLIFISIALIYAYQQNIQNIVTGVCQTDFSGYPDCRNEFIKSMEKTFALATEKKFKIHTPLMWLTKSKTVKLMQKLGSLNLLKYTHTCYKGLRPACGTCPACKLRIKGFKEAQIKDPLKYAKH

SEQ ID NO: 37218 - protein, 222 aa, Peregrinibacteria bacterium; identical to SEQ ID NO: 37217
  misc_feature (1)..(222): tr|A0A1F7AE26|A0A1F7AE26_9BACT 7-cyano-7-deazaguanine s ynthase OS=Candidatus Peregrinibacteria bacterium RIFCS PLOWO2_02_FULL_39_10 OX=1801899 GN=queC PE=3 SV=1

SEQ ID NO: 37219 - protein, 208 aa, Peribacteria bacterium
  misc_feature (1)..(208): tr|A0A1F7BNE0|A0A1F7BNE0_9BACT 7-cyano-7-deazaguanine s ynthase OS=Candidatus Peribacteria bacterium RIFCSPHIGH O2_01_FULL_55_13 OX=1801917 GN=queC PE=3 SV=1
MDSVTLLHFLVKHRKCRMEAISFDYGQKHVKEISYAKKQCEALGVQHHLVALPFVGSLFSSALLQGGEEIPDGHYEEGNMKQTVVPNRNMIMIAIATGYGQSTGASFLALGVHAGDHAIYPDCREEFIDALRKAIELSDWNPFTVFAPFQRMTKVEILEIGFQLDPPVDYGKTWTCYKGKEEPCGTCGACRERGEAFEQIGAEDPQGF

SEQ ID NO: 37220 - protein, 248 aa, Phaeomarinobacter ectocarpi
  misc_feature (1)..(248): tr|X5MAR5|X5MAR5_9RHIZ 7-cyano-7-deazaguanine synthase OS=Candidatus Phaeomarinobacter ectocarpi OX=1458461 GN =queC PE=3 SV=1
MPRFKLPMTNASSSLGKTGALVLFSGGQDSTTTLAWALDRYAQVETIGFDYGQRHVIELEQREVVLDKIRAAYPDWAAKLGDDHMLDLTDLGRISETSLTRDAEIAFTEEGLPSTFVPGRNLLFFTYAAAIAFRRGLTVLVGGMCETDYSGYPDCRDTTLKSLQASLNLGMDRAFVIETPLMWIDKAQTWAMAHALGGDTLTHIIRDDTHTCYLGDRQTSHPWGKGCGTCPACELRAAGWDTWKAHIL

SEQ ID NO: 37221 - protein, 237 aa, Photodesmus blepharus
  misc_feature (1)..(237): tr|A0A084CM90|A0A084CM90_9GAMM 7-cyano-7-deazaguanine s ynthase OS=Candidatus Photodesmus blepharus OX=1179155 GN=queC PE=3 SV=1
MKKAIVVFSGGQDSTTCLIAALEEFDEVHTITFNYGQRHKLETEVAQNLAKELNVTSHRLIDVAILNELAVSSLTRNDILMSNKPEKNGLPNSFVPGRNILFLTLAAIYAYQIEVNSIITGLSETDFSGYPDCRNNFVQTLNSALVHGMERNLKIVTPLMWLNKAEIWAMAHKYNTFNFIRNKTLTCYNGIIGNGCEDCYACKLRQTGLLSYLQNSEFVMANYLEKTGSSKRKRFYF

SEQ ID NO: 37222 - protein, 230 aa, Photodesmus katoptron
  misc_feature (1)..(230): tr|S3DGM5|S3DGM5_9GAMM 7-cyano-7-deazaguanine synthase OS=Candidatus Photodesmus katoptron Akat1 OX=1236703 GN =queC PE=3 SV=1
MKKAVVVFSGGQDSTICLVKALDEFDEVHAVTFDYAQRHRKEIKVAINLAQYFKVTTHKLMDLTLLNKLTISALTREELPVSNQLQNNGLPNSFVPGRNILFLTLAGIYAYQISADAVITGLCEADSSGYPDCRSVFLKNMNKTLIQGMDYKVNILAPLMRLNKAEVWAMADKYNVLDLIRYKTLTCYNGIIGIGCGNCLACKLRNIGLNNYLSNPKSIMKSYLKKVNSS

SEQ ID NO: 37223 - protein, 223 aa, Phycorickettsia trachydisci
  misc_feature (1)..(223): tr|A0A2P1P7D4|A0A2P1P7D4_9RICK 7-cyano-7-deazaguanine s ynthase OS=Candidatus Phycorickettsia trachydisci OX=21 15978 GN=queC PE=3 SV=1
MKKAVALISGGADSATTLAIALQQGFEVHAISFDYGQKHRIELEKSKLVAQKAASHKVIKLDPTAFQRSALTNNNLNVPKYDSVDQIPQKVADTYVPARNLLFLSYATSYAESIGASSIFIGVHKEDFANYPDTRPEFIKSFQEVVNCGTDAQIKIYAPLIDLDKDGVIAKGKALGVDYSNTITCYKPDDQGRSCGKCIACLVRLAAFKKNNLVDTIPYRQNP

SEQ ID NO: 37224 - protein, 237 aa, Phycosocius bacilliformis
  misc_feature (1)..(237): tr|A0A2P2E9B8|A0A2P2E9B8_9PROT 7-cyano-7-deazaguanine s ynthase OS=Candidatus Phycosocius bacilliformis OX=1445 552 GN=queC PE=3 SV=1
MLEPTHALVLFSGGQDSTACLAWALSRFARVETIGFDYGQRHRVELTQRLILLDALRGQFPQWADKLGDDHVLDLPVLGQISDTSLTRQTEIALAETGLPTTFVPGRNLIFLTFAAALAYRRGLGVLVGGMCETDFSGYPDCRRATLDAVEQSLSLGMDAPFQVSTPLMYLTKAQTWALAHQLGGQGLVDLTVEHSHTCYHGDRTHRHDWGYGCGTCPACDLRAAGWAAWQAEQAQS

SEQ ID NO: 37225 - protein, 229 aa, Poribacteria bacterium
  misc_feature (1)..(229): tr|A0A496BI55|A0A496BI55_9BACT 7-cyano-7-deazaguanine s ynthase OS=Candidatus Poribacteria bacterium OX=2026781 GN=queC PE=3 SV=1
MSEKAVVLLSGGLDSTTTLAIARDEGYDTYCMSFRYGQRHIVELKCAENVTKALGATRHIVVDIDLRTFGASALTADIEVPKNRSDAEMGNGGIPITYVPARNTIFLSYALAWAEVLGADTIFIGANAIDYSGYPDCRPEYIEAYQAMANLATQAGVEGKTQLTICAPLMNKTKAEIIQIGTALGVDYGLTLSCYDPDAEGRACGGCDSCLLRKKGFKEAGIPDPTFYI

SEQ ID NO: 37226 - protein, 216 aa, Poribacteria bacterium
  misc_feature (1)..(216): tr|A0A2E3I2X6|A0A2E3I2X6_9BACT 7-cyano-7-deazaguanine s ynthase OS=Candidatus Poribacteria bacterium OX=2026781 GN=queC PE=3 SV=1
MFSGGQDSTTCLYWALKQFDHVDTVGFDYGQKHLIELDIAKQICCDLSINYTVINLKDVFSNSSLVDSQQDVSEQHTVNSDLPSTFTAGRNAVFLSVTAGLAYNKNINNIVIGVCQTDYSGYPDCRRDFIDSMEDSLSLALDSKIKIHTPLMYLTKAETWKMAKDLDCLEVIIHQTHTDYNGNRTDFNEWGYGALDNPASQLRAKGYQEAKAKGWI

SEQ ID NO: 37227 - protein, 237 aa, Propionivibrio aalborgensis
  misc_feature (1)..(237): tr|A0A1A8XJH1|A0A1A8XJH1_9RHOO 7-cyano-7-deazaguanine s ynthase OS=Candidatus Propionivibrio aalborgensis OX=18 60101 GN=queC PE=3 SV=1
MSTAFRSSPPRAVVLLSGGLDSATTLAIARDAGFDCHCLSLDYGQRHRIELEAAATVATALCASEHRVLHLGLDEFGGSALTDTRIAIPVDGVQPGIPATYVPARNTIMLSLALAWAEVLGSRDIFVGVNAVDYSGYPDCRPEYIAAFETMANLATKAGVEGRKLTVHAPLIDLSKAEIIRIGSKLGIDYRATVSCYQADEQGMACGVCDSCRLRREGFAAAGVADPTPYMRNPQEA

SEQ ID NO: 37228 - protein, 233 aa, Pseudomonas adelgestsugas
  misc_feature (1)..(233): tr|A0A481QMN2|A0A481QMN2_9PSED 7-cyano-7-deazaguanine s ynthase OS=Candidatus Pseudomonas adelgestsugas OX=1302 376 GN=queC PE=3 SV=1
MNKKAVIVFSGGQDSTTCLIQALDIYDEVHCITFDYRQRNIAEIEVAQNLTKQLGVTVHKIIDIFSLSELASSSLTCNCIPIPTTMYSSVASFPNTFVPGRNILFLTMASIYAYQVNIKTVITGVCETDFSGYPDCRAEFIKALNKALVLGMEYKLRLDTPLMWLTKAETWALADSYQQLDLVQYKTLTCYNGIIGSGCGNCNACNLRTRGLNDYLQNSIDVMHNLKQKLEMS

SEQ ID NO: 37229 - protein, 227 aa, Raymondbacteria bacterium
  misc_feature (1)..(227): tr|A0A1F7F1B1|A0A1F7F1B1_9BACT 7-cyano-7-deazaguanine s ynthase OS=Candidatus Raymondbacteria bacterium RIFOXYD 12_FULL_49_13 OX=1817890 GN=A2519_10625 PE=3 SV=1
MKKKNVLVIVSGGINSCLTAALVAAKYNPLFLHVSYGQKVEKRELKAFKDLASYFKVKKRLVASIKYLKEIGGSSLTDRNINIALANGENKKIPTSYVAFLNTHCIAIAVSWAEVIGVDKIFFGANEGGELSYPDCSKNYFAAMNKVISEGTRPDVKISLETPLISLKKSDIVKQAQDMGLPLHLTWSCYKNNDIACGECDACMRRLKGFKKAKLYDPLEYMVYPKL

SEQ ID NO: 37230 - protein, 124 aa, Regiella insecticola
  misc_feature (1)..(124): tr|G2GXP1|G2GXP1_9ENTR 7-cyano-7-deazaguanine synthase OS=Candidatus Regiella insecticola 5.15 OX=1005043 GN=R in_00005340 PE=3 SV=1
MQQSAVVVFSGGQDSTTCLIQALQQYEKVHCITFDYQQRHREEIEVAKKLVKTLNNERTEKNGIVHKILDVTLLNELTISSLTQNHISIPTYTDANKHANKKDIPNTFVPGRNILFLTLAAIYA

SEQ ID NO: 37231 - protein, 244 aa, Regiella insecticola
  misc_feature (1)..(244): tr|E0WSG7|E0WSG7_9ENTR 7-cyano-7-deazaguanine synthase OS=Candidatus Regiella insecticola LSR1 OX=663321 GN=qu eC PE=3 SV=1
MQQSAVVVFSGGQDSTTCLIQALQQYEKVHCITFDYQQRHREEIEVAKKLVKTLNTARTEKNSIVHKILDVTLLNELTISSLTQNHIPIPPYTDANKHTNKKAIPNTFVPGRNILFLTLAAIYAYKINTTTVITGVCETDFSGYPDCRDDFVKSLNQAINLGIDRSIDFITPLMWLNKAEIWALADHYQQLKLIRSSTLTCYQGNIGDGCKQCAACHLRSQGLIYYQANKQQVMESLQKKINRL

SEQ ID NO: 37232 - protein, 600 aa, Rhodobacter lobularis
  misc_feature (1)..(600): tr|A0A0J9EGD6|A0A0J9EGD6_9RHOB Uncharacterized protein OS=Candidatus Rhodobacter lobularis OX=1675527 GN=AIOL_ 000893 PE=4 SV=1
MPEIRARPAPGGDTRNYGLPFTLDGIEKAVSIRIEGLSRNLVADLPDLSLDLLEIAALVYGCDAAVSRGGPVDTRLGRAWYRDFQIEVPVRCQNLWTRKDVRTALSEVLNFVSGDQFKFTFTAHPGAGGHQEFFKFSPDDGWQADRVMMFSGGLDSFAGALEEMFEHKQQVALVSHFSATKIAPRQKALKAALEGRCGPKSCKHFPVKIQLGKGGNKETTYRTRSFLFAVLGMIVAQSFGRDRVSFYENGVVSLNLPLVANVVSTRATRTTHPKTLNLMTRFFTGVFERTAKIDNPYFWRTKTDVVETIARLGLAEKIRVTNSCADTRNRTEQHPHCGRCSQCIDRRFAVLAAGLEHEDPEEAYAVDLMQGARREVRDREIALSYVRNALDYEVMAPPDLQSCFPEVTDSIGSLGVPPQVGLEQVNALLQRHGKAVAGVMRTKAPKDPAPQSLPALFGDTQREPRLRAGPKVPVAPSPVLQARLILTLQSTSKITINDKIELVGPATVRLLTILAEQHLEAAGAGLDPFDYPCTEAGKLAGLLDVTDESLRRQISRMRGDLRKRFASADPTLSDEFEIIENVPWSGYRLAPDRVDVRRKT

SEQ ID NO: 37233 - protein, 440 aa, Riflebacteria bacterium
  misc_feature (1)..(440): tr|A0A2N1TR71|A0A2N1TR71_9BACT DNA-binding protein OS=C andidatus Riflebacteria bacterium HGW-Riflebacteria-1 O X=2013829 GN=CVV41_18095 PE=4 SV=1
MINFVFNHNHNLLPPASENTIPVQLYKLSGKIRNDVSFVGSPVLNKIKRLRGYVSPQAMDFLSIALAVTAADTFVQRSKSSDGWTREFRIKLPICDPVRWEPLKHKVEKALHFLSGDLWEFTFSPGGHPPPRPYRSRKERTEVIKLRNRDCVCLFSGGLDSAIGVIDLLSRGKSPLLVSHSYRGDKSFQEGIASSLPGQFSRLSASLSPRIALLKQGKTDITMRTRSLSFLALGALGISALNSVQQNGPIDFFVPENGFISLNTPLTPRRIGSLSTRTTHPFFISAIQEIFDEVGIPGIIKNPYQFDTKGEMGKKCLNQDLLKIIVDKTISCSHWKRNNEQCGACVPCLIRRAALHESNITELLNYSSNSLTDVLTQVDKRDDLLAMLIALNRKSSSNISSWITDAGPLPIEQLDDFKALFLRGLSEVKNYLQSEGIKCP

SEQ ID NO: 37234 - protein, 225 aa, Roizmanbacteria bacterium
  misc_feature (1)..(225): tr|A0A2M8KMR0|A0A2M8KMR0_9BACT 7-cyano-7-deazaguanine s ynthase OS=Candidatus Roizmanbacteria bacterium CG10_bi g_fil_rev_8_21_14_0_10_36_26 OX=1974851 GN=COU86_00250 PE=3 SV=1
MAIKGELDMKAINRKIAVCTVSGGLDSAVAFAILADKDYKLHFIFFDWGQKTLEKERKCAKALAKHYNVDLKIVEIPFLKSLPDVSLTAKETLTTEINEYVPNRNAILESQAVAYAESLKAGIICVGSTGGDHICPDNSPKFIKAMQALINQGTMLKPPIQIIAPLMDTDKIGAVKLGIKLKVPFELTWSCHNNTDKACGKCSNCLARLEAFKVNNISDPTKYQK

SEQ ID NO: 37235 - protein, 239 aa, Roizmanbacteria bacterium
  misc_feature (1)..(239): tr|A0A1F7I222|A0A1F7I222_9BACT 7-cyano-7-deazaguanine s ynthase OS=Candidatus Roizmanbacteria bacterium RIFCSPH IGHO2_12_FULL_39_8 OX=1802050 GN=queC PE=3 SV=1
MRKAVVVYSGGMDSSTLLAYVASQVFEVYAISFNYGQRHKKELQYAKKFAKLFTNLVEHKIIDISVINELIQGSSLTTPGIDVPDGHYAFETMKSTVVPNRNAIMLSLACGYAVSLGANCLFVGVHSGDHFIYPDCRPEFIETIDKAFRLGNQGFANEDLRIVAPFMYSTKADIVKLGKQLSIDYSKTWSCYKGGNIHCGRCGTCFERREACILAGVSDPTKYKDNRSLDVIQKEMEKK

SEQ ID NO: 37236 - protein, 229 aa, Rokubacteria bacterium
  misc_feature (1)..(229): tr|A0A0T5ZYY4|A0A0T5ZYY4_9BACT 7-cyano-7-deazaguanine s ynthase OS=Candidatus Rokubacteria bacterium CSP1-6 OX= 1640509 GN=queC PE=3 SV=1
MKRAVVLLSGGLDSATTLAIARSEGYACHALSFQYGQRHSRELESAKKVAAALDAAEHLILTLDLRLIGGSALTADIPVPKGRSAAEIGHGIPITYVPARNTIFLSHALGWAEVLGAEDLFFGANVYDSSGYPDCRPEYIEAFERLANLATKAGVEGKSRFKIHAPLIQMTKAEIIKKGHALGVDFGLTWSCYEPAPDGRACGLCDSCALRLKGFKEAGLTDPLPYAAK

SEQ ID NO: 37237 - protein, 240 aa, Rokubacteria bacterium
  misc_feature (1)..(240): tr|A0A1Q7I5U7|A0A1Q7I5U7_9BACT 7-cyano-7-deazaguanine s ynthase OS=Candidatus Rokubacteria bacterium 13_1_40CM_ 4_67_11 OX=1805361 GN=queC PE=3 SV=1
MRVPRTSERDGGTEHRPAVVLLSGGLDSTTAMAVARAEGFACYALTIDYGQRHRVELTAAAHVAAALGARDHVVLAVDLRRFGGSALTADVALPRGRHPADMTDIPVTYVPARNTVFLSLALAWAETLCAEDIFIGVNVLDSSGYPDCRPEYVHAFEAMANLATKAGVEKRSRFSIHTPLIRLGKAEIVRRACELGVDLSLTWTCYDPGTELRPCGACDACILREKGFAEAGVDDPLRCR

SEQ ID NO: 37238 - protein, 261 aa, Saccharibacteria bacterium
  misc_feature (1)..(261): tr|A0A3C7Z8E5|A0A3C7Z8E5_9BACT 7-cyano-7-deazaguanine s ynthase OS=Candidatus Saccharibacteria bacterium OX=202 6720 GN=DD425_02735 PE=3 SV=1
MNPKFVLPMDDLPTLKRLEDVILTKRETLFQKPKKGEGIVFIVSGGLDSTTALARVLEEFDAEIYPLYIQRGARAEDNELSSLHHYLDIFSKKHANLHELEILTAEVPPAKYKQYIPEKQLSTIGHTLRNSMLQSYAVQYAVSVGYRDNIRIRTVFTSLVPDDDFPHCRLIALRAETILTCIDGDDWSWQVTSPLLEEGLWGWVDKTMSIKYAAENNIDLSHTYTCTDSPTIACGVCPACVERIKAFEDSGYPDPIEYKKS

SEQ ID NO: 37239 - protein, 116 aa, Saccharibacteria bacterium
  misc_feature (1)..(116): tr|A0A3C7Z8G9|A0A3C7Z8G9_9BACT Uncharacterized protein (Fragment) OS=Candidatus Saccharibacteria bacterium OX= 2026720 GN=DD425_02745 PE=4 SV=1
MNNIANSYEQILQDNRGYVSEWPQDKIAVLIISGGLDSITMAAKLLKDGFTLYPLHIERGQTNFIAEHNSIERFAKIFNDQYPGKFKEVVYIKLNIPPKEFKEDLIPYTKEYGHPL

SEQ ID NO: 37240 - protein, 248 aa, Saccharicenans subterraneum
  misc_feature (1)..(248): tr|A0A3E2BNG6|A0A3E2BNG6_9BACT 7-cyano-7-deazaguanine s ynthase OS=Candidatus Saccharicenans subterraneum OX=25 08984 GN=queC PE=3 SV=1
MKRMPRSGHSSAVEISKPRACLVLLSGGIDSTTALHWALRRYGRVQPVIFDYGQRHRVEIEMARKTCARLGLRPRTIKVDLRQVGGSALTDKKLSVPQFKKPEDIKKGLPATYVPFRNGIFISLAAALGESLGIFDIVCGFNVIDSPNYPDTTAAFVRAMNRTINTGTGAIFGQKRFRIIAPFINMKKSEIIRLGLKMGADYSYSITCYAGREVPCLRCSACLLRARAWKEAGQEDHLLARLKKEGKI

SEQ ID NO: 37241 - protein, 286 aa, Saccharicenans subterraneum
  misc_feature (1)..(286): tr|A0A3E2BLC6|A0A3E2BLC6_9BACT ATP-utilizing enzyme of the PP-loop superfamily OS=Candidatus Saccharicenans su bterraneum OX=2508984 GN=OP8BY_0188 PE=4 SV=1
MRPTAGKKRGLSKNLNKKATFAKYQRLVEILKSFDGLLVAFSGGVDSSLLLKAAADSGAKVLAVTVDSPIYHRQEIREARQIASKLGVPFRLIKSDDYLREDFKKNDLLRCYHCKLAIFTRLREIARSEGLSAVVEGSNLDDERDYRPGRKALAELGIGSPLKEAGLGKAEIRFLARSFGLPNWDRPANACLATRIPYGQPVELRWLERIAAGETFLRKMGFSQVRLRHHGELARIEVWPNELALVISQPSREKIVRRLKKLGWKYVAFDLEGYRTGSLNPGGLKT

SEQ ID NO: 37242 - protein, 208 aa, Saganbacteria bacterium
  misc_feature (1)..(208): tr|A0A2H0XZY0|A0A2H0XZY0_9BACT 7-cyano-7-deazaguanine s ynthase OS=Candidatus Saganbacteria bacterium CG08_land _8_20_14_0_20_45_16 OX=2014293 GN=queC PE=3 SV=1
MKKKAIILLSGGLDSTTTLYYAKKHGYECHALIFDYGQRHKKEVRSAVAVALLESVAYHVMRIKLPWKGSSLLDKKTKVPTNRKMKGIPSTYVPARNTIFLSFALSYAEAIEAQVIFIGANAVDFSGYPDCRPKFYQAFHSVIKEGTKAQKIKILTPLIDLSKAEIIKLAIKLKVPLELTWSCYQGGQKPCGICDSCRLRQRGFDSIS

SEQ ID NO: 37243 - protein, 224 aa, Scalindua brodae; identical to SEQ ID NO: 37073
  misc_feature (1)..(224): tr|A0A0B0EHW8|A0A0B0EHW8_9BACT 7-cyano-7-deazaguanine s ynthase OS=Candidatus Scalindua brodae OX=237368 GN=exs B PE=3 SV=1

SEQ ID NO: 37244 - protein, 237 aa, Scalindua sp.
  misc_feature (1)..(237): tr|A0A523CMJ3|A0A523CMJ3_9BACT 7-cyano-7-deazaguanine s ynthase OS=Candidatus Scalindua sp. AMX11 OX=2555784 GN =queC PE=3 SV=1
MRTKTQTPEKKRAIVLLSGGLDSCVTLAVANKEHNVALLHVQYSQRTQPRESMAFHNIANYYHVPEDKILITGLDHFKKIGGSSLTDTKLPIDKGEAETTMPNTYVPFRNTLLLAIAVSWAEVIKAETIFIGAVEQDSPNYPDCRQEYYDVFNQLVDVGTMPSTQIKVVTPLIGMKKFEIVKMGIELNAPLPLTWSCYENNDLACGRCQSCTLRLRAFEDAGYVDKIHYLEKNRRPS

SEQ ID NO: 37245 - protein, 225 aa, Schekmanbacteria bacterium
  misc_feature (1)..(225): tr|A0A1F7RS69|A0A1F7RS69_9BACT 7-cyano-7-deazaguanine s ynthase OS=Candidatus Schekmanbacteria bacterium RBG_16 _38_10 OX=1817879 GN=queC PE=3 SV=1
MKKAVILLSGGLDSSTLMAIAKQEGYELYPITFRYGQKHKKEINSAKKIASVFKAKKHMIFDIDLKKIGGSSLTTEAPVPKQRKLKEISGSIPSTYVPARNTIFLGIALAWAETIGSRAIFIGVNSIDWSGYPDCRPEYIKAFQHLTDLATKTGAEKINKIKILAPLINMTKGEIIKKGLSLGVDYSITHSCYDPIKDGKPCGMCDSCILRKKGFAEAGIKDPLT

SEQ ID NO: 37246 - protein, 266 aa, Schekmanbacteria bacterium
  misc_feature (1)..(266): tr|A0A3M1RPJ4|A0A3M1RPJ4_9BACT ATP-dependent sacrificia l sulfur transferase LarE OS=Candidatus Schekmanbacteri a bacterium OX=2419984 GN=larE PE=4 SV=1
MESAEKKYKNLKRIISEYGNLLVAFSGGVDSTFLLKTAKDVLGENVIAVSALSETYVREELETAKKMAEKIGVKHIIIESKEVDIPQFRENPPDRCYYCKYELFSLLKKIAAENGIRYVADGTNYNDVRNDHRPGMRAAQELGVVSPLYEAKLNKEEIRYLSKNIGLETWNKPEMACLSSRFPYGTDITREKLQTIDEAERFLRGLGFKQLRVRHHGDTARIEIEQESLKRFSDDNMRISVVDKFKSLGFKYVALDLEGYRRGSMN

SEQ ID NO: 37247 - protein, 221 aa, Schmidhempelia bombi
  misc_feature (1)..(221): tr|A0A484GCK4|A0A484GCK4_9GAMM 7-cyano-7-deazaguanine s ynthase OS=Candidatus Schmidhempelia bombi str. Bimp OX =1387197 GN=queC PE=3 SV=1
MQKNKALVIFSGGQDSTTCLLQAIATYGVEHVQAITFAYGQRHAIELEKAAFIAKDLGIKQTVIDTTVLQQTTHNALMDTTLTVQAAGDKQYPNTFVDGRNALFLLLAACHAKQQGIHDIITGVCETDFSGYPDCRDVFIKSMNVTLNLAMDYSFNIITPLMYLTKAETWKLADELGYLDYIQQHTHTCYNGVAGGCRHCPSCQLREKGLQQYLAEQAKKR

SEQ ID NO: 37248 - protein, 325 aa, Shapirobacteria bacterium
  misc_feature (1)..(325): tr|A0A2M8L4L3|A0A2M8L4L3_9BACT 7-cyano-7-deazaguanine s ynthase OS=Candidatus Shapirobacteria bacterium CG10_bi g_fil_rev_8_21_14_0_10_40_9 OX=1974888 GN=COU95_00420 P E=3 SV=1
MRLNKISEKEFLSRLKKRRLEDLETIRVIEDFLLKKRGYVFRMPPPGSPVILLVSGGMDSITSWGISMEEFGLKVYPLSFDKGEKRRKKEEASLNFFSEFYSKRYPDLFVRPFKLSVDLRKISIPIEKATKILHPQIILDNLDSRGNISLNLSLGSFTLLPFYAMLFSRYLLSTQNIKIKTIFCSVTKGDDVPSQTLTALRITMMAMCVASREYDWQFSSAVFEKETRLFFSKADLVSWAEEEGIPLEKTWSCYRDFRYQCGDCIACYMRIKAFRKAGVADRTLYLSPFAPYQQKLRFEVARFLRSIGIDPKILKALYKKIFKGA

SEQ ID NO: 37249 - protein, 218 aa, Shapirobacteria bacterium; identical to SEQ ID NO: 37201
  misc_feature (1)..(218): tr|A0A0G0N3L5|A0A0G0N3L5_9BACT 7-cyano-7-deazaguanine s ynthase OS=Candidatus Shapirobacteria bacterium GW2011_ GWE2_38_30 OX=1618490 GN=US90_C0001G0026 PE=3 SV=1

SEQ ID NO: 37250 - protein, 301 aa, Staskawiczbacteria bacterium
  misc_feature (1)..(301): tr|A0A1G2HZW0|A0A1G2HZW0_9BACT 7-cyano-7-deazaguanine s ynthase OS=Candidatus Staskawiczbacteria bacterium RIFC SPHIGHO2_02_FULL_34_9 OX=1802206 GN=A3D35_01675 PE=3 SV =1
MNKILGNIGKTKFESKENEDSDLLRIYDNILKNKRGYVVKMPKKGESVVVCFSGGQDSVANIGILLKEFGLNVYPFFINRGQSNYKYEKKSVDYFNRFYKKNFPKLYHSYKEIIVMTPGIEYKDMLRKTKRMMDNIPLSHNISYPARGPIVFLTGMEYGYSLKSKGVDIKTLFASNMSSDFSYHCSQTWVRLMNILFCQILNDWSWQFISLPIETEFKNYFDKDVFIKWAFENNIPLYKARTCVKSFEIECGDCPTCWDRRRGYKEAGVKDLTRYKFEMAEKYPTYYDHEKEEKNEKRNRG

SEQ ID NO: 37251 - protein, 253 aa, Sulfobium mesophilum
  misc_feature (1)..(253): tr|A0A2U3QHG2|A0A2U3QHG2_9BACT 7-cyano-7-deazaguanine s ynthase OS=Candidatus Sulfobium mesophilum OX=2016548 G N=queC PE=3 SV=1
MTRNNRAIVLLSGGIDSSTSLAIAQAEGYEVYALSFNYNQRHEVELAFARQIARSMNVGRHLVTAFDLREVGGSALTSDIEVPKEISPAAIPVTYVPARNTIFLSFALAWAEVLEAENIFIGANAVDYSGYPDCRQEYLTAFENMANLATKASVEGKMKFRINAPLISMRKSEIIRRGIDLGLDYGLTWSCYDPEVTATGGRSERPTGAEKADLFSFDPAEVRAMFRPCGRCDSCRFREKGFIEAGLDDPGRR

SEQ ID NO: 37252 - protein, 223 aa, Sulfopaludibacter sp.
  misc_feature (1)..(223): tr|A0A2U3LWM6|A0A2U3LWM6_9BACT 7-cyano-7-deazaguanine s ynthase OS=Candidatus Sulfopaludibacter sp. SbA4 OX=204 3165 GN=queC PE=3 SV=1
MTKAVCLLSGGLDSSTCLALARRDGYSCYALSFDYGQRHAIELEAAARVAASLGVERHLVARIGLDAFGGSALTDNIAVPKARSAEEMGRGIPVTYVPARNTIFLSFALAWAEVLECSDIFIGVNALDYSGYPDCRPEYLEAYQRMANLATKAGVEGRTHVTIHAPLMHLNKAQIVKLAQELGLEFSLTYSCYDPGADGRPCGQCDACLLRRKGFEEAGIEDR

SEQ ID NO: 37253 - protein, 226 aa, Sulfotelmatobacter kueseliae
  misc_feature (1)..(226): tr|A0A2U3L1D9|A0A2U3L1D9_9BACT 7-cyano-7-deazaguanine s ynthase OS=Candidatus Sulfotelmatobacter kueseliae OX=2 042962 GN=queC PE=3 SV=1
MVDRAKSCAVVLLSGGMDSCVCAALAARDHDAAAVHVSYGQRTEHRERQSFLAICERLNIRDKLVVRNEALGAIGGSALTDGTIAVPRAEAVGHGIPVTYVPFRNAHFLAVAVSWAEVLGAKKVYIGAVEPDSSGYPDCRPAYYSAFNAVVKAGTKEGDIEVVTPLIAMRKVEIVRLGLELGAPFDLTWSCYSREDQACGVCDSCVLRLRAFEAAGVRDPISYAAR

SEQ ID NO: 37254 - protein, 233 aa, Sulfotelmatomonas gaucii
  misc_feature (1)..(233): tr|A0A2N9LC22|A0A2N9LC22_9BACT 7-cyano-7-deazaguanine s ynthase OS=Candidatus Sulfotelmatomonas gaucii OX=20431 61 GN=queC PE=3 SV=1
MTTAVKKAVVLLSGGLDSATVLAVAKSEGYELYALSFSYGQRHAWELEAAKRVAASIGVAEHRIAAIDLRAFGGSALTADIAVPKGRATEEMSRGIPITYVPARNTIFLAFALAWAEVSGANDIFLGVNALDYSGYPDCRPEFIVAFEKMANLATKAGVEGRQSLKIHTPLIALSKAEIIRMGLGLGVDYGFTSSCYDPSPVGVPCGQCDSCLLRQKGFEENGIDDPLLKFSS

SEQ ID NO: 37255 - protein, 220 aa, Sulfuricurvum sp.
  misc_feature (1)..(220): tr|K7S487|K7S487_9HELI 7-cyano-7-deazaguanine synthase OS=Candidatus Sulfuricurvum sp. RIFRC-1 OX=1249480 GN=q ueC PE=3 SV=1
MKKALCIMSGGMDSTLVAYIMRSRGYEIVALHFNYGQRTADKELESFRSICNDLEVREKYEIDLDFFKTIGASALTDHSIDVPTGGIEAGVPITYVPFRNGIFLSIAMAIAEKEGCSAIAIGVVEEDSSGYPDCRESFIEAFTKAANLGTKDSTKVTIEMPLVRLQKSQIVQEALALGAPLHLTWSCYQSEERACGVCDSCRLRLRGFERAGAVDPIEYV

SEQ ID NO: 37256 - protein, 536 aa, Sungbacteria bacterium
  misc_feature (1)..(536): tr|A0A1G2LM03|A0A1G2LM03_9BACT Uncharacterized protein OS=Candidatus Sungbacteria bacterium RIFCSPLOWO2_12_FUL L_41_11 OX=1802286 GN=A3G49_00140 PE=4 SV=1
MNRKINKFHGIVVFGAPGSGKTTVAKSFLKIFPEAKYVEASSSVIYPAISIKEELPPRETDFIRAILKLRHKRKFSRDEAQQMFVYLKNKYSSAVIAKTLIYLHRKKFFHKSLIIAGIRGFRNSMYFKKNGYLVVYLKTPDKYLTGRISRRESFSKKDAEKERQIEERLFSTNKVERIAHLTFNTAVTSKKEIAAQIKALIGAAECKKCVNTSSNLSSVIGKYGLCDVCEKYEKNFSGAVLQKELRFLLSLRGSGKEKHDAMVGISGGKDSTATLYTAKQMGFIPLTFSLDTGYYPKHIFQRAKTVAKKLKVDYEKIDARIYMRSVDRICFRKTSDLYNERDSQELKEKFRKWYVEGRRHYSVKCQHKIPFVRTCQLCRRLVVRAYYGEALKRGVKVVILGINEWAGLSQDSESKKFIFSAIRKLQPFKNKPPVYIVHLPFLLQRKIEDTERILRKLGWKIPRGERLIESNANSCLFARAAESKAKRMLGFHPDTTRLAREVTVGFISKEQASSALAKVHNYPHSVRRVLQKAKVL

SEQ ID NO: 37257 - protein, 233 aa, Synechococcus spongiarum
  misc_feature (1)..(233): tr|A0A1T1D1X5|A0A1T1D1X5_9SYNE 7-cyano-7-deazaguanine s ynthase OS=Candidatus Synechococcus spongiarum LMB bulk 15N OX=1943583 GN=queC PE=3 SV=1
MSSNPPVAVALLSGGLDSATAAAMALAEGDRVIGLSMDYGQRHRRELQAASDLATGLGLVEHHQLRVNLAAWGGSALTDLQQHLPRDGVQPHVIPTTYVPGRNTVLIALGLSLAEARGAHRLVLGVNAVDYSGYPDCRGDYLAQYQILADLATKAGRMGQGAKLWAPLLRLDKREIVEQALALDVPIAATWSCYSNEEEPCGRCDSCRIRDRALHDAGVPHLASHWFLTHHDL

SEQ ID NO: 37258 - protein, 225 aa, Synechococcus spongiarum
  misc_feature (1)..(225): tr|A0A170TDE4|A0A170TDE4_9SYNE 7-cyano-7-deazaguanine s ynthase OS=Candidatus Synechococcus spongiarum OX=43104 1 GN=queC PE=3 SV=1
MSSRPPVAVALLSGGLDSATAAAMALAEGDQVIGLSMDYGQRHRRELQAASALATALGLVEHHRLTVNLAAWGGSALTDLQQPLPQDGVQTHVIPTTYVPGRNTVFIALGLSLAEARGAHRLVLGVNAVDYSGYPDCRGDYLAQYQTLADLATKAGRLGQGPKLWAPLLRLNKREIVERALALDVPIAATWSCYGGGEEPCGRCDSCRIRDQALHDAGVPHLASH

SEQ ID NO: 37259 - protein, 227 aa, Syntrophonatronum acetioxidans
  misc_feature (1)..(227): tr|A0A424Y9D7|A0A424Y9D7_9FIRM 7-cyano-7-deazaguanine s ynthase OS=Candidatus Syntrophonatronum acetioxidans OX =1795816 GN=queC PE=3 SV=1
MKKAVVLLSGGLDSTTCMSVAQGEGYLLYALSFDYGQKHRRELGRASQIASYYHCPEHRVIKLDQVGGSSLTREGAEIPVYEEREEIPSTYVPARNILFLSYALGYGETVGAEAIYIGVNAIDYSGYPDCRPEFIEAFQQVIKVGTKSGVEGRPIKIKAPLLNLTKGEIIKLGIKNKAPLHLTTSCYHGGDKACGRCDSCVLRLKGFAEAGVKDPIPYQEGQEEGPG

SEQ ID NO: 37260 - protein, 230 aa, Syntrophosphaera thermopropionivorans
  misc_feature (1)..(230): tr|A0A4R5JNP2|A0A4R5JNP2_9BACT 7-cyano-7-deazaguanine s ynthase OS=Candidatus Syntrophosphaera thermopropionivo rans OX=2593015 GN=queC PE=3 SV=1
MEIKYQKAIILLSGGMDSLVTVAIAKEEVQELYFLHCNYGQLTEKREQKSFGAICQYYKPKESKILHWDWFKEIGGSALTDSSLAVPKQEPSRDIPITYVPFRNANLLCAAVSWAEVIGAEAVYIGAVEEDSSGYPDCREVFFQAFQKVIETGTKNEFPIRILTPVLHLSKKQIVQKGMELAAPFELSWSCYLDNEEACGECESCRLRLKAFAEAGFKDPIVYKIKEEIK

SEQ ID NO: 37261 - protein, 241 aa, Tachikawaea gelatinosa
  misc_feature (1)..(241): tr|A0A090BWM7|A0A090BWM7_9ENTR 7-cyano-7-deazaguanine s ynthase OS=Candidatus Tachikawaea gelatinosa OX=1410383 GN=queC PE=3 SV=1
MKDKKTKKSAVIVFSGGQDSTTCLINALKNYDVIHCITFHYNQKHSQEVKIAIKISKKLNIFFHKIINLSVLDTLTESCLINNNLKIPCHSSTNKKKPPKTFVPGRNILFLTLASIYAYKNKINTVISGVCETDFSGYPDCRNKFIKTLNTAIILGLDKKILFKTPLMFLKKSEIWALSDTLGKLDFIKNKTLSCYNGIKSFGCGNCSACYLRNQGLLDYQNNKEKVINNLLEKKKKYKID

SEQ ID NO: 37262 - protein, 258 aa, Tagabacteria bacterium
  misc_feature (1)..(258): tr|A0A2M8L9E4|A0A2M8L9E4_9BACT 7-cyano-7-deazaguanine s ynthase OS=Candidatus Tagabacteria bacterium CG10_big_f il_rev_8_21_14_0_10_40_13 OX=1975022 GN=COV00_00865 PE= 3 SV=1
MSQQASDPKNIKTAVEFILESEREYVFQIPRSENVIFLMTGGIDSSIGAELCLLKWGVTLFPIYILRGATAQKQELAAVQSVLTYLKSKYGSRVRDLFTINSTVPPREVKGQLSRERVIKHGHPLRNSIMQSLAVQYGAMLNDKGTPVRTVLVASVASDFFPGSREVDLVINTLYTCSNMGEWDWQINSPMLTGNLLGKEKRLRKIDLIKWGIQNRFPFNITRTCTKHSDNACGICEECKERRDTFAQAGITDPIAYS

SEQ ID NO: 37263 - protein, 514 aa, Taylorbacteria bacterium
  misc_feature (1)..(514): tr|A0A1G2M3W7|A0A1G2M3W7_9BACT GMP synthase (glutamine- hydrolyzing) OS=Candidatus Taylorbacteria bacterium RIF CSPHIGHO2_01_FULL_46_22b OX=1802301 GN=A2664_03135 PE=4 SV=1
MKAPQVLIINLGSQYTDLIDRSLRDFGVRSAILPPARANDWLRSNTPKAIILSGSDASVNDPDPPAPPEVILTADIPILGICYGMQWLAKRLGGQVISRTGKGNYGRTEIHLTHDYFDQGLLDGLLANWLVVHASHGDVVTHLPPGFTRIAWPETSTTAGVMAMVSSERKMWGVQFHPEVHETQHGSTILSNFVLRIAGCEKDWNPRNLADEIREETLHVIGDRNAIIGFSGGVDSTTLTALMAPSLGNRLRAVTIDGGQLREGEILQIIETAKSAGVFDRHSMASAPFVRALSDTLDAEEKRKRFRVVYRDAFQTLARGYGASVVMQGSLAPDFIESGATGGANIASHHNVGLTFDGLDQVHPFRGLFKYEVRALGQELGLPADICTRQPFPGPGLFVRIVGAPVTEERLALLRLVDRDVTYILQASGEYQQMSQLVVALLCVNTAGVRGDGRSYKPTIAIRGLVTSDFMTGRGFQIKEETRRKLTRTLLRNPEVGNVGYFEADKPPCRTEFE

SEQ ID NO: 37264 - protein, 222 aa, Tectomicrobia bacterium
  misc_feature (1)..(222): tr|A0A1F7T6D7|A0A1F7T6D7_9BACT 7-cyano-7-deazaguanine s ynthase OS=Candidatus Tectomicrobia bacterium RIFCSPLOW O2_12_FULL_69_37 OX=1802343 GN=queC PE=3 SV=1
MDSAVALALARAEGFACHALSFDYGQRHGEEIEAARRVASALGAAAHATIQIDLRAIGGSALTGGLDVPKDRERIGEGIPVTYVPARNTVFLSFALALAEVRGAEDIFIGVNALDYSGYPDCRPEYIEAFERMARLATKAGVEGRPLTIRAPLIGMRKAGIIRRGLELGVDFGLTHSCYDPPGPGRACGRCDACLLRRRGFAEAGAKDPLVYPDRHGDEKDG

SEQ ID NO: 37265 - protein, 225 aa, Tenderia electrophaga
  misc_feature (1)..(225): tr|A0A0S2TFT1|A0A0S2TFT1_9GAMM 7-cyano-7-deazaguanine s ynthase OS=Candidatus Tenderia electrophaga OX=1748243 GN=queC PE=3 SV=1
MSQAGKALVLVSGGLDSATCLAMAKHQGYECYALSFDYGQRHRAELAAALRVALSQGVREHKVIQLGLSDIGGSALTDSAIDVPTASSEGIPVTYVPARNTVFLSLALAWAEVLRAYDIFIGVNAVDYSGYPDCRPEFIRAFETMANLATKAGVEGGRFHVHTPLIDLSKAEIIQQGTQLGVDYSLTVSCYAADETGSACGECDSCRLRAAGFAAAAIPDPTQYR

SEQ ID NO: 37266 - protein, 235 aa, Terasakiella magnetica
  misc_feature (1)..(235): tr|A0A1C3RM12|A0A1C3RM12_9RHIZ 7-cyano-7-deazaguanine s ynthase OS=Candidatus Terasakiella magnetica OX=1867952 GN=queC PE=3 SV=1
MKSIVICSGGLDSVTLAYKMAHEHDLKRLISFDYGQRHKKETAYAARCAERLGVPLDIVDITAIGALLTGSALTDDVDVPDGHYAEESMKSTVVPNRNAIMLTIAFGAAAAQNCDCVATAVHGGDHFIYPDCRPDFIDSFNKMQAHALDGYADVELYAPFVHIPKDAIVTQGMKLNVPYEDTWSCYKGGEIHCGRCGTCVERREAFHLAGETDPTKYADPDFWIKARENHQAEKV

SEQ ID NO: 37267 - protein, 465 aa, Terasakiella magnetica
  misc_feature (1)..(465): tr|A0A1C3RHJ4|A0A1C3RHJ4_9RHIZ Uncharacterized protein OS=Candidatus Terasakiella magnetica OX=1867952 GN=MTBP R1_30115 PE=4 SV=1
MKLYKHLDALPMPCHHIFVQSPDERTPDGWEGCVVGENLKFSTENLASYFYKNQDDLLFDVFSLAATVEYCDFSQSRSQKTWARKFNISLPVNNPELWQSPEVSDALCQALRILTGDTWNINFRQRIFAPEWPFQSKLDLKKNPQAILAYSDGMDSLSVAGLTEAELGDKLVRVRLGSAKKEEKKQKKPFISVPYSVSYSTQKKDYSGRSRGLKFSILTSAAAYLSNSSLIILPESGQGALGPALVPVAHAYIDYRNHPYFLSYMRKFLSALFQHKFSFQIPRIWNTKGETLFQYIQVSGDNEKWRETTSCWRRNSQTSFDNKKIRQCGICAACLLRRMSVHAAGQLEDQEEYLWNNLNAQEFELGSAKPTEKMHDFKAHQKYAVAAMSHLRDMAELLNNNDELINLKMHASKLARSLEMDKAEVMKNQTQLLEKHTAEWNSFLGSLDKNSFLRKWANRNMTDAA

SEQ ID NO: 37268 - protein, 207 aa, Termititenax aidoneus
  misc_feature (1)..(207): tr|A0A388TES0|A0A388TES0_9BACT 7-cyano-7-deazaguanine s ynthase OS=Candidatus Termititenax aidoneus OX=2218524 GN=queC PE=3 SV=1
MWAAQKYGAENIFTVSFNYGQKHAVELDCAKTAAKLLGAAAHWVLNIPALKQIGDSALLTSADVNESKDGLPASFVPARNIIFLSQAAALAYKLDCANLITGVSEADYSGYPDCRGQTLKLLEQTLNAGLEANLEIVMPLLRKNKAEIWEMARQCGGTDGVELIREHTHTCYNGDHTTRHEWGYGCAKCPACQLRRKGYAEFRAKVK

SEQ ID NO: 37269 - protein, 237 aa, Termititenax persephonae
  misc_feature (1)..(237): tr|A0A388TGT0|A0A388TGT0_9BACT 7-cyano-7-deazaguanine s ynthase OS=Candidatus Termititenax persephonae OX=22185 25 GN=queC PE=3 SV=1
MKKLNKAKALVCLSGGQDSATCLMWAAQEYGADKTYAVSFNYGQKHAVELACAQKIAEILNVAGHCVLDIPALKQIGNSALLADDADLNAVRDGLPASFVPGRNIIFLSQAAALAYKLDCGILIVGVGETDYSGYPDCRESTIKSLETALNHGMETNLEISAPLMHKDKAETWAMAYQCGGQDGVELIREQTHTCYHGDHETKQDWGYGCGQCPACQLRRHGYETFLARTPELQPRP

SEQ ID NO: 37270 - protein, 226 aa, Thermochlorobacter aerophilum
  misc_feature (1)..(226): tr|A0A395LW07|A0A395LW07_9BACT 7-cyano-7-deazaguanine s ynthase OS=Candidatus Thermochlorobacter aerophilum OX= 1868324 GN=queC PE=3 SV=1
MRAVVLLSGGMDSLVTTAIAKHLGYELAALHLNYGQRTEQRELKAFHDICDHYRIERRLVIDARHLSQIGGSSLTDFSIPVSRANLHSRDIPTSYVPFRNANILAMATSWAEVIHANKIFIGAVEEDSSGYPDCRQEFYDAFNLVIRLGTKPTTHIEIVTPVIRMKKWEIVIRGMELEAPFELSWSCYQSNDIACGVCDSCALRLRAFEQAGIRDPIEYVTRPSYV

SEQ ID NO: 37271 - protein, 226 aa, Thermochlorobacteriaceae bacterium
  misc_feature (1)..(226): tr|A0A081SJ04|A0A081SJ04_9BACT 7-cyano-7-deazaguanine s ynthase OS=Candidatus Thermochlorobacteriaceae bacteriu m GBChlB OX=1519464 GN=queC PE=3 SV=1
MRAIVLLSGGMDSLVSTAIAKDLGYDLAALHLNYGQRTEHRELKSFTSICDHYHIDRRLVVDVKHLSIIGGSSLTDKTIEVSKADLNRDVIPTSYVPFRNANILAIAVSWAEVIGANKIFVGAVEEDSSGYPDCRREFYDAFNLTIRLGTKPSTHIEVLTPVIEMKKWEIVIRGMELGAPFELSWSCYQSNDKACGVCDSCALRLRAFEQAGIRDPIEYVNRPSYI

SEQ ID NO: 37272 - protein, 231 aa, Thermokryptus mobilis
  misc_feature (1)..(231): tr|A0A0S4MP02|A0A0S4MP02_9BACT 7-cyano-7-deazaguanine s ynthase OS=Candidatus Thermokryptus mobilis OX=1643428 GN=queC PE=3 SV=1
MREIAVVLVSGGMDSCVTAAIANSLGYELAFLHLNYGQRTEKRELKAFNDIADFYNVKRRLIINVEHLKLIGGSSLTDENIPVEKADLKRVGIPTSYVPFRNANMLSIAVSWAEVLGASKIFIGAVEEDSSGYPDCRKEFYNAFNEVIRLGTKAGVEGHPIQIVTPIIDMKKWEIVKKGIELGAPLHLTWSCYQREDIACGVCDSCALRLRGFQLAGVDDPIPYEKKPIYI

SEQ ID NO: 37273 - protein, 225 aa, Thiodiazotropha endoloripes
  misc_feature (1)..(225): tr|A0A1E2US97|A0A1E2US97_9GAMM 7-cyano-7-deazaguanine s ynthase OS=Candidatus Thiodiazotropha endoloripes OX=18 18881 GN=queC PE=3 SV=1
MNKKAVVLLSGGLDSATVLAIARSQGYECYALSMAYGQRHAAELSAAANIASSLGAADHKVMSIGLDSIGGSALTDTSIEVPEQLADGIPVTYVPARNTVFLSLALGWAEVLDAQEIFIGVNAVDYSGYPDCRPEFIRAFEQLANLATKAGVEGKAFIIHTPLIDLTKGEIIQQGIKLGIDYSLTVSCYQANEQGEACGSCDSCRLRARGFEEAGIADPTRYCKS

SEQ ID NO: 37274 - protein, 231 aa, Thiodictyon syntrophicum
  misc_feature (1)..(231): tr|A0A2K8U277|A0A2K8U277_9GAMM 7-cyano-7-deazaguanine s ynthase OS=Candidatus Thiodictyon syntrophicum OX=11669 50 GN=queC PE=3 SV=1
MKNAVILLSGGLDSTTVLAIAKHEGFAPYALSFRYGQRHLVELESAQRVAAALGVAEHVIADIDLRRFGGSALTADLAVPKGRDPTALGEGIPITYVPARNTVFLSFALAWAEVLGAGDIFIGVNALDYSGYPDCRPEYIAAFERMANLATAAGVQGRQRLKIHAPLIDLTKAQIIRRGLALGVDYGLTSSCYDPGADGRPCGQCDSCQLRAKGFAQAGIADPLAARFGGA

SEQ ID NO: 37275 - protein, 90 aa, Thioglobus sp.
  misc_feature (1)..(90): tr|A0A432U793|A0A432U793_9GAMM 7-cyano-7-deazaguanine s ynthase (Fragment) OS=Candidatus Thioglobus sp. OX=2026 721 GN=DSZ19_00725 PE=3 SV=1
MSRAVVLLSGGLDSTTTLAIAKSKGFECYALSFDYGQKQKSELISATKIAKQFDTVEHRIMHISLSDFGGSALTDENIEVPNFKESDEIP

SEQ ID NO: 37276 - protein, 223 aa, Thioglobus sp.
  misc_feature (1)..(223): tr|A0A2D7QW32|A0A2D7QW32_9GAMM 7-cyano-7-deazaguanine s ynthase OS=Candidatus Thioglobus sp. OX=2026721 GN=queC PE=3 SV=1
  misc_feature (42)..(42): Xaa can be any naturally occurring amino acid
  misc_feature (44)..(44): Xaa can be any naturally occurring amino acid
  misc_feature (47)..(47): Xaa can be any naturally occurring amino acid
  misc_feature (53)..(53): Xaa can be any naturally occurring amino acid
  misc_feature (164)..(164): Xaa can be any naturally occurring amino acid
MSKAVILLSGGLDSTTVLAIAKSQGYDCYALSFDYGQKQRSXLXSSXSIAKKXNVIEHRIMKISLSDIGGSALTDQSIDVPKYSESDEIPITYVPARNTIFLSFALAWAEVVDCQTIFIGVNALDYSGYPDCRPEFIEAFENMANLATKQSVEGDRIQIKTPLXSMTKAEIIKKGLGLGVDYSETTSCYDANTLGEACGECDACVLRKIGFENANVQDPTRYQ

SEQ ID NO: 37277 - protein, 126 aa, Thiomargarita nelsonii
  misc_feature (1)..(126): tr|A0A176RZL6|A0A176RZL6_9GAMM 7-cyano-7-deazaguanine s ynthase (Fragment) OS=Candidatus Thiomargarita nelsonii OX=1003181 GN=THIOM_003122 PE=3 SV=1
MSTQKSVILVSGGLDSATTLALAKSQGYACYALSFDYGQRHRVELQAARQIAESLGVIEHKFIHLNLDNIGGSALTDSQIQVPVSGLSKQIPVTYVPARNSVFLTLALAWAEVLSAYHLFIGVNAV

SEQ ID NO: 37278 - protein, 220 aa, Tokpelaia hoelldoblerii
  misc_feature (1)..(220): tr|A0A1U9JUU2|A0A1U9JUU2_9RHIZ 7-cyano-7-deazaguanine s ynthase OS=Candidatus Tokpelaia hoelldoblerii OX=190257 9 GN=queC PE=3 SV=1
MKVHVICSGGLDSVSLAWRLAHDRQLAGIISFDYGQRHKKELDYAARCAETLNVPFHCINISSIGAELKGSALTDDIDVPEGHYEAETMKLTVVPNRNAIFLTIAFGIAAANKADAVAIAVHGGDHYIYPDCRPDFLAAFAAMENLALEGTVKLLAPYAEKTKADIVMDGAAAGTPFAQTWSCYKGGAHHCGRCSTCIERREAFTAAGVEDPTIYEHHAA

SEQ ID NO: 37279 - protein, 234 aa, Uhrbacteria bacterium
  misc_feature (1)..(234): tr|A0A0G0V986|A0A0G0V986_9BACT 7-cyano-7-deazaguanine s ynthase OS=Candidatus Uhrbacteria bacterium GW2011_GWF2 _41_16 OX=1618997 GN=queC PE=3 SV=1
MATRVIIMSKKAVVLLSGGIDSATTLAIAGTEGYELYALSINYGQRHLLEIECARKIASFYNVKEHKIFNVDLRGIGGSALTSDIEVPKDRDREDITHGIPVTYVPARNTIFLAISLSWAEVIGADTIFFGANILDYSGYPDCRPEFIHAFEIMANLATRAGVEGENRFTIKTPLIAMTKAEIIKKGVELGVDFSMTHSCYDPTKDGIACGRCDSCILRTRGFAEAGLNDPIKY

SEQ ID NO: 37280 - protein, 421 aa, Uhrbacteria bacterium
  misc_feature (1)..(421): tr|A0A2M7XD19|A0A2M7XD19_9BACT Uncharacterized protein OS=Candidatus Uhrbacteria bacterium CG_4_9_14_3_um_filt er_50_9 OX=1975035 GN=CO174_01590 PE=4 SV=1
MAPKHPKLLRSGYIVKGKQFTLTYEVENGLSGDMRITFPFSIAREKDLHPYLAVACTLVVAGMVLPKDVEVDFSVPKLRTFESLLQHLYDIRCYSEGIPFQEARLRSCSAETLTLSHLDWMHNKKHAVHFWSGGVDSTASLLLLKQNGYSVTPVHTNINVNQSLSEKRTTMILEKELHVRALDVSIEFPQLAELGMTYSKKFNAFPDFNAIPFGRDMIHLFIGCYLARKKGAGAITFGHEHELWKNILHVHGRDILRNDAQTEVFSLKLQTVLASIHPDLHLFSPIAPLSKYRIVRDLFEHHEKILLLATYCYFGKRCGNCSNCLLYQMLFGLLYGVHISTQDFESMLKTGNVVEEETFKDIIYFFYYDLIQDQKRKPGYKQKLERKFGSLLNETRTQVERRLMNIHPAQLMPKGFQLNMR

SEQ ID NO: 37281 - protein, 250 aa, Vecturithrix granuli
  misc_feature (1)..(250): tr|A0A081C3Z3|A0A081C3Z3_9BACT 7-cyano-7-deazaguanine s ynthase OS=Candidatus Vecturithrix granuli OX=1499967 G N=U27_06275 PE=3 SV=1
MNTEMIYEDILMKKRGFVSKWPENKCAVMILSGGLDSVITCAWLLEEKQFILFPLHIQRGQTNAKAELNSVKFFEKFFMDKYPEKFFPVECINVHIPPIEFKTELGWYMKEKGYPLRDPILLQYAVQYAYAIHQRYQKYPKTIFCALGPKDPFPHTKLVSLRSTTISVCQNLDDWDWLITSPNIDVFLREQAFDKPDEIRWAIQHNIPIEKTISCYQAQSYNCGQCANCKRRQEAFKIAGIKDPTHYETL

SEQ ID NO: 37282 - protein, 265 aa, Vecturithrix granuli
  misc_feature (1)..(265): tr|A0A081C3Z6|A0A081C3Z6_9BACT 7-cyano-7-deazaguanine s ynthase OS=Candidatus Vecturithrix granuli OX=1499967 G N=U27_06278 PE=3 SV=1
MKNYPLKIQKNFDEDPRIIDEIERILQIRRGFIFQLAKHEPIVFIISGGLDSSLILDKILKELQCTIFPVYVERGAKAEAFEKESVIFFTNYYQEKYPGLLKDLMLCKTDIPPKDVKQFIPAERLMTIGHPMRNAILQSIGVQYGVGLSYANQINIHTIFTATSPDDTFPHSSLLALRCLTLAACIDNGDWEWQVTSPLVETYLWGKISKKDMVLYATENKLPLEKTRTCTSGSSIACGICPECLCRLNAFKMAGIKDPINYVQR

SEQ ID NO: 37283 - protein, 272 aa, Wallbacteria bacterium
  misc_feature (1)..(272): tr|A0A352M6Z7|A0A352M6Z7_9BACT 7-cyano-7-deazaguanine s ynthase OS=Candidatus Wallbacteria bacterium OX=2053640 GN=queC PE=3 SV=1
MAKILKKAIGSSLKKAVATKKTASAKTVKNTGANSKKKAAAEKETAVILLSGGMDSAVSLGVLLEKYEAAALHLNYGQLTENRELECFTRLCDHYGIKRRLIVDVGYLQQIGGSSLTDHKMIVPRANIGSKEVPNTYVPFRNAHILAIATSWAEVIGARKIFIGAVSEDSSGYPDTRPEFYEAFEKVIRTGTKAGGAIRIVTPVIKLSKAEIVRFGNKLKVPFIHTWSCYSGNEKACGVCDSCALRLRGFACAKAKDPIEYAENIFKSEIFV

SEQ ID NO: 37284 - protein, 219 aa, Wallbacteria bacterium
  misc_feature (1)..(219): tr|A0A1F7WNE0|A0A1F7WNE0_9BACT 7-cyano-7-deazaguanine s ynthase OS=Candidatus Wallbacteria bacterium GWC2_49_35 OX=1817813 GN=queC PE=3 SV=1
MDSAVSLGVLLEKYEAAALHLNYGQLTENRELECFTRLCDHYGIKRRLIVDVGYLQQIGGSSLTDHKMIVPRANIGSKEVPNTYVPFRNAHILAIATSWAEVIGARKIFIGAVSEDSSGYPDTRPEFYEAFEKVIRTGTKAGGAIRIVTPVIKLSKAEIVRFGNKLKVPFIHTWSCYSGNEKACGVCDSCALRLRGFACAKAKDPIEYAENIFKSEIFV

SEQ ID NO: 37285 - protein, 600 aa, Wirthbacteria bacterium
  misc_feature (1)..(600): tr|A0A1J5IKB9|A0A1J5IKB9_9BACT GMP synthase (glutamine- hydrolyzing) OS=Candidatus Wirthbacteria bacterium CG2_ 30_54_11 OX=1817892 GN=AUK40_03810 PE=4 SV=1
MADDRIGVLDFGGQYAHLIAKRIRDLGVHSQIFSGDCRLEELQGLKGIILSGGPSSVSAGDAPEFDTRILTSGIPVLGLCYGHQLVAYHLGGEVSKGRTREYGKATVQVSDSVLLHGMDAVETVWMSHFDTVTRVPEGFTAVASTDICPIAAMEDPSRKIFSTQFHPEVTHTPHGMMALENFVAVTGALRTWNVESYIPLLFEKIKTDAKGRKVFMLVSGGVDSTVCFVLLNKALGKDRVYGLHVDHGLMRKDESALVTKALNAVGLDNFAVVDASERFLKALEGVLEPEIKRNIIGNLFLEVQKEEFVRLGLNADEWVLGQGTLYPDTIESGGTKHADKIKTHHNRIPEIMAMIEKGLVVEPVADLYKDEVRKVGVELGLPDELVWRHTFPGPGLAVQELCAATVVYPENKQKLESDIGAMVASAGLRPFILPVRSVGVQGDERTYRSVVALQGEADWKTLEDLATTITNTFPAVNRVVWLVKPAAVDLGSMTVKHGTLTRARLDLHREADALANQILRKHKLERELYEFPVVMIPVSFAGGESIALRPLYSENVMTVDFAKLPRAVVQEMADAIGALPGIDAVFYDVTNKPPATVQWE

SEQ ID NO: 37286 - protein, 261 aa, Woesebacteria bacterium
  misc_feature (1)..(261): tr|A0A0G0L046|A0A0G0L046_9BACT 7-cyano-7-deazaguanine s ynthase OS=Candidatus Woesebacteria bacterium GW2011_GW A1_38_8 OX=1618547 GN=UT06_C0005G0036 PE=3 SV=1
MQTVRLVFFTIYVAFGQKNEKQEIITIKKILGKLKIEPLIVKIDIDKYIDHEWKRWKLGIIPARNYLFAAIAGSVLAKSKSKNPQIWVCAHKEEINPTHTDKSNRFFRSCSKILSDNYRKNISVTTPFKDLTKPEIVSYWHKYWEKKYNISVNETVSCYFGNNCGVCKACINRAVVFVCAGIKIENFQTNPFLDKRKLILNSYIVSFNSLHTERKLDFLYALNKQKNILPKKLKKFLDLNYKKYENKIIKRIDSIRKVDKI

SEQ ID NO: 37287 - protein, 379 aa, Woesebacteria bacterium
  misc_feature (1)..(379): tr|A0A1F8C1S2|A0A1F8C1S2_9BACT 7-cyano-7-deazaguanine s ynthase OS=Candidatus Woesebacteria bacterium RIFCSPLOW O2_01_FULL_44_14 OX=1802525 GN=A2975_04415 PE=3 SV=1
MIIGSIDNKEVDSSNLILDTVDNFQLDEVVSNALLLTLAGYLEKDDITVNGKQYFDKKRLEQFFSYVLNDKRAAPRKYNLQLSFSNKNHEVNSAKKNNYKYIISYSGGIDSTAGLLYALDKGYPIQPVWVGFGQKNEKDELEVINKICKKLKTRPIVININLKRYVDEGWNRWKMGIIPGRNYIFASIAASMVNLSSSDKNTIYICAHKEEINPVNTDKSERFYNTCTKIFTKSYNKDIELTTPFFNATKPEIIYYWIKHWKQKYNISPQETVSCYHGTNCGICKACINRAVAFACCGLQTESYKNDPFKDTEHVIQEGYIDRFNILKLERKLDFLFALNFNKNSLPTNLRNFVDTNYKRYSNKIIDRQKMIREGLNIK

SEQ ID NO: 37288 - protein, 260 aa, Yonathbacteria bacterium
  misc_feature (1)..(260): tr|A0A2M8D685|A0A2M8D685_9BACT Uncharacterized protein OS=Candidatus Yonathbacteria bacterium CG_4_9_14_0_8_um _filter_46_47 OX=1975106 GN=CO088_03680 PE=4 SV=1
MAIFIGHRVSNKVLEKHIRVYLHSYIQAFDASFVRWYSLFMFPSSKIKTALVLYSGGRDSSATALEMARLGYMVKLFTCQWGLSELVGPRGDSAPDIRHAELMGAFPKYIDPDRAIMGNPYLVRKLAIEKTNETHVVYPIALALAVHVDAILYCMKRDIKHIACGYSGYQATRDIYIEQREDFLLLMKEFVGEYGIEYHTPVIKKTKHEVMDILERHGVSSNSLENKSIFGGISFNVEHALSYRNRSLPICKGHIELMRA

SEQ ID NO: 37289 - protein, 227 aa, Yonathbacteria bacterium
  misc_feature (1)..(227): tr|A0A349P0C8|A0A349P0C8_9BACT 7-cyano-7-deazaguanine s ynthase OS=Candidatus Yonathbacteria bacterium OX=20536 50 GN=DCS20_02645 PE=3 SV=1
MNNSHAALKQQVLVLLSGGIDSAVCATKLCAEGKSVHALSLRYPGNTNEREINNATFLAEKLNISHVVLDFKFIEQMFDGVNTSMSFNVGGAINNCVSRGKIPVPMSVELLHLTALMFARIRGIKHVYWAIHQDDLVGTSQEKILEYLSALEKLPALGSYSPCKFETPFIGYSKKDMVDLGISLDIDFEHTHSCSASSNAPCCVCHQCVLRASAFDSLFPLKQAVGA

SEQ ID NO: 37290 - protein, 223 aa, Zambryskibacteria bacterium
  misc_feature (1)..(223): tr|A0A1G2TPA6|A0A1G2TPA6_9BACT Uncharacterized protein OS=Candidatus Zambryskibacteria bacterium RIFCSPHIGHO2_ 12_FULL_38_37 OX=1802751 GN=A3E32_01340 PE=4 SV=1
MQNIFENKSKDVLVLFSGGRDSSSVAALLALAGYKIKLYTYQAGLPELTGPRGDSAPDIRHKELTQAFPEDIDRERIIEGSTYLIRKLAIEKTNIEHVIYPIALALAVHANAVCYCLKNNINTIASGYSGYQAKEDRYIEQSGDFVSLTKEFLEEYDISYLTPVIEKSKLEVMDILERHNISSNSLENKSVFGGISFDKEKAKAFWKSSISLCREFIKNMQTS

SEQ ID NO: 37291 - protein, 223 aa, Zambryskibacteria bacterium; identical to SEQ ID NO: 37290
  misc_feature (1)..(223): tr|A0A1G2URZ3|A0A1G2URZ3_9BACT Uncharacterized protein OS=Candidatus Zambryskibacteria bacterium RIFCSPLOWO2_1 2_39_8 OX=1802774 GN=A2Y49_03070 PE=4 SV=1

SEQ ID NO: 37292 - protein, 236 aa, Candidimonas bauzanensis
  misc_feature (1)..(236): tr|A0A1M5ZIT2|A0A1M5ZIT2_9BURK 7-cyano-7-deazaguanine s ynthase OS=Candidimonas bauzanensis OX=658167 GN=queC P E=3 SV=1
MPRALVLFSGGQDSTACLAWALTRYSAVETVGFDYGQRHAVEMECRQTVLKEFRSQFPDWAPRLGEDHVLDLSLLGQLSDCALTAEKEIAFADNGLPNTFVPGRNLIFLTYAAALAYRRGIDALVGGMCETDYSGYPDCRDNTMQALQLALNLGMEQHFRIETPLMWLDKAATWRLAAEIGGPRLIALTQEHTHTCYMGDRSVRHDWGYGCGTCPACELRARGYREFSAGMEASHD

SEQ ID NO: 37293 - protein, 236 aa, Candidimonas nitroreducens
  misc_feature (1)..(236): tr|A0A225MAG3|A0A225MAG3_9BURK 7-cyano-7-deazaguanine s ynthase OS=Candidimonas nitroreducens OX=683354 GN=queC PE=3 SV=1
MHNQALVLFSGGQDSTTCLTWALQRYARVETIGFDYGQRHAVELECRKTVREALCAARPDWAERLGEDHMLDLGVLGRLSDTALTSDARIEFERNGLPNTFVPGRNLLFFTFAAALAYRRGLSVLVGGMCETDYSGYPDCRDNTLKSLQVSLSLGMDRPLVVETPLMWLDKAATWRLAEQIGGPALVELVKESTHTCYLGERSKRHPWGYGCGTCPACELRAKGYAAYMRPQKDTY

SEQ ID NO: 37294 - protein, 243 aa, Candidimonas sp.
  misc_feature (1)..(243): tr|A0A522QMH2|A0A522QMH2_9BURK 7-cyano-7-deazaguanine s ynthase OS=Candidimonas sp. OX=1912597 GN=queC PE=3 SV= 1
MPTPSPRRALVLFSGGQDSTTCLAWALSRYGRVETIGFDYGQRHSAELACRAPLRRRLAEMKPDWAARLGEDHLLDARVLRELGASAMTDDIAITLQASGLPNTFVPARNLLFFTLAAAQAYRRGLDVLVGGMSQTDYSGYPDCRDNTIKALQVALSLGLDQPLTLETPLMWLDKADTWELARQLGGAALVELVRVETHTCYLNRRDVLHAWGYGCGECPACVLRARGYAQWKARSRPHSDRP

SEQ ID NO: 37295 - protein, 235 aa, Candidimonas sp.
  misc_feature (1)..(235): tr|A0A522JY26|A0A522JY26_9BURK 7-cyano-7-deazaguanine s ynthase OS=Candidimonas sp. OX=1912597 GN=queC PE=3 SV= 1
MHTRALVLFSGGQDSTTCLAWALKHYAHVETVGFDYGQRHSVELECRRTILSKIRADYPAWASRLADDHMIDLQVLGDISDTALTSEASIAFEKNGLPNTFVPGRNLLFFTFAAAIAYRRDLSVLVGGMCETDYSGYPDCRDTTLKSLQASLNLGMDKALVIETPLMWLDKRQTWLMAKQLGGKEFVELICEHTHTCYLGDRSTRHAWGYGCGICPACELRANGFKVYAAGPCPD

SEQ ID NO: 37296 - protein, 248 aa, Caproiciproducens galactitolivorans
  misc_feature (1)..(248): tr|A0A4Z0XXS0|A0A4Z0XXS0_9FIRM Uncharacterized protein OS=Caproiciproducens galactitolivorans OX=642589 GN=CAG A_15240 PE=4 SV=1
MNLKTFFAENPSAALAFSGGTDSSYLLYAAKYYGCDIHAYFIYSAFQPQFELDDAKRLADELGVPFTVAEIDVLKDTQVAANGPLRCYYCKTALFTRLRELAQKDGYSLLIDGSNASDLADDRPGMRALKELGVRSPLRECGLTKPEIRRFSKEAGLFTHDKPAYACLATRIPTGTEITPELLKKAEQAETALFSMGFTNFRVRYFHGAAKLQLPESQFSMALSKKDELTKELSRWFDGVLLDLTPRG

SEQ ID NO: 37297 - protein, 234 aa, Carboxydocella sporoproducens
  misc_feature (1)..(234): tr|A0A1T4MRT9|A0A1T4MRT9_9FIRM 7-cyano-7-deazaguanine s ynthase OS=Carboxydocella sporoproducens DSM 16521 OX=1 121270 GN=queC PE=3 SV=1
MDENGGRAKNMKKAVVLLSGGIDSTVCLALAHRDGYELYPISFDYNQRHKRELDSARQIAEYYHCPRHLIITTNMDAIGGSALTGTMEVPEGDIERKDIPPTYVPARNLIFLSYAVGYAEVVGAERIYIGVNALDYAGYPDCRPEFIQRFQATVDYATKATTRDAQRIEIVTPLINLDKAGIIKLGMELKAPLHLTTTCYRGGEKACGRCDACLLRLQGFSRAGFQDPINYVHL

SEQ ID NO: 37298 - protein, 234 aa, Carboxydocella thermautotrophica; identical to SEQ ID NO: 37297
  misc_feature (1)..(234): tr|A0A2R4N056|A0A2R4N056_9FIRM 7-cyano-7-deazaguanine s ynthase OS=Carboxydocella thermautotrophica OX=178899 G N=queC PE=3 SV=1

SEQ ID NO: 37299 - protein, 215 aa, Carboxydothermus hydrogenoformans
  misc_feature (1)..(215): sp|Q3ADI5|QUEC_CARHZ 7-cyano-7-deazaguanine synthase OS =Carboxydothermus hydrogenoformans (strain ATCC BAA-161 / DSM 6008 / Z-2901) OX=246194 GN=queC PE=3 SV=1
MEKAIVLLSAGLDSTVSLAYGVRNFQVVLGLTFNYGQKASRKEIEHSKKILDYYGIPQEVIELPFLKKITKTSLVAEDQEIPTGIDLESAAAVKTSMEKVWVPNRNGLFINIAAAYAESLGAKYIITGFNAEEAKTFSDNSREFVDAVNHALKYSTLNHVQVVSFTQNLEKSEIYRLGVELGAPLDLIWSCYYGGDEMCGVCESCLRLKRARGGN

SEQ ID NO: 37300 - protein, 215 aa, Carboxydothermus islandicus
  misc_feature (1)..(215): tr|A0A1L8D4M5|A0A1L8D4M5_9THEO 7-cyano-7-deazaguanine s ynthase OS=Carboxydothermus islandicus OX=661089 GN=que C PE=3 SV=1
MEKAIVLLSAGLDSTVSLAYGVRKFQVVLGLTFNYGQKAAQKEIEHSKKILDYYGIPQEVIELSFLKKITRTSLVAEDQEIPTDIDLENDDAVKTSMEKVWVPNRNGLFINIAAAYAESMGAKYIITGFNAEEAKTFSDNSREFVEAVNHALKYSTLNHVQVVSFTQNLEKSEIYRLGVELGAPMDLIWSCYYGGNEMCGVCESCLRLKRARGGT

SEQ ID NO: 37301 - protein, 215 aa, Carboxydothermus pertinax
  misc_feature (1)..(215): tr|A0A1L8CUK0|A0A1L8CUK0_9THEO 7-cyano-7-deazaguanine s ynthase OS=Carboxydothermus pertinax OX=870242 GN=queC PE=3 SV=1
MEKAIVLLSAGLDSTVSLAYGVKTFEVILGLTINYGQKAAKKEIEHSQKILNFYGIPQEIIELPFLQKITKTSLVAECEEIPANVDLESDEATKISMAKVWVPNRNGLFINIAAAYAESLGAKYIITGFNAEEAQTFSDNSREFVEASNLALSYSTLNKVEVVSFTQNLEKAEIYRLGIELKAPLDLVWSCYYGGEEMCGKCESCLRLIRARGGK

SEQ ID NO: 37302 - protein, 221 aa, Carboxylicivirga sp.
  misc_feature (1)..(221): tr|A0A553GN82|A0A553GN82_9BACT 7-cyano-7-deazaguanine s ynthase OS=Carboxylicivirga sp. M1479 OX=2594476 GN=que C PE=3 SV=1
MKKAVVLLSGGLDSAVALYLAKSEGYECHALSFDYGQRHNRELEAAKAIAIKAGVTNHQLVSLKLDKWGGSSLTDNSIQVEDGDVNRDDIPVTYVPARNMVFLSVAASLAEAIGAQDIFIGVSEVDYSGYVDCRQEFIDSMENAINMGTVMGAEKNQPIKIHAPFVNKTKAEEIKIGKKLNVDFGLTWSCYRGGEKPCGTCDSCLLRAKAFAEAGVVDTAL

SEQ ID NO: 37303 - protein, 64 aa, Cardiobacterium valvarum
  misc_feature (1)..(64): tr|A0A381EEI2|A0A381EEI2_9GAMM 7-cyano-7-deazaguanine s ynthase OS=Cardiobacterium valvarum OX=194702 GN=queC P E=4 SV=1
MDENTAITQGDDGLPTTFVDGRNALFLLYAAIYAKGRGIRRIMIGVSEADFSATPIAATFSSNP

SEQ ID NO: 37304 - protein, 139 aa, Cardiobacterium valvarum
  misc_feature (1)..(139): tr|G9ZGZ9|G9ZGZ9_9GAMM 7-cyano-7-deazaguanine synthase OS=Cardiobacterium valvarum F0432 OX=797473 GN=HMPREF90 80_02056 PE=3 SV=1
MDENAAIIQGDDGLPTTFVDGRNALFLLYAAIYAKGHGIRRIMIGVSEADFSGYPDCRDIFIKSMNVSLNLAMAYDFRIETPLMNLKKAEVWALVNQLGRLDYVRKYSHSCYRDVRGGCGACPACELRERGLREYQNLR

SEQ ID NO: 37305 - protein, 217 aa, Caryophanon tenue
  misc_feature (1)..(217): tr|A0A1C0YCY9|A0A1C0YCY9_9BACL 7-cyano-7-deazaguanine s ynthase OS=Caryophanon tenue OX=33978 GN=queC PE=3 SV=1
MKQQKALIVFSGGQDSTTCLFWAMEQFGEVEAVTFDYGQRHTAEIDCAKRIAAQLGIRHHILDMSLLGQLTVNALTRDDIAITDGDEESLPSTFVPGRNLLFLSFAGVLAQQIGAKHLVTGVCETDFSGYPDCRDTFIKSLNVTLELALDAPVVIHTPLMWLTKAQTWALADTLNAFDFIREQTLTCYNGIIADGCGTCPACQLRQNGLTTYLQEVQ

SEQ ID NO: 37306 - protein, 239 aa, Castellaniella defragrans
  misc_feature (1)..(239): tr|W8X2Q0|W8X2Q0_CASDE 7-cyano-7-deazaguanine synthase OS=Castellaniella defragrans 65Phen OX=1437824 GN=queC PE=3 SV=1
MNAARKSRRALVLFSGGQDSTTCLAWALARHGHVETLGFDYGQRHRAELDCRIALRHRLVQLRPEWAPRLGEDHLLNVDVLGQLGASAMTDDIAIALQADGLPNTFVPGRNLLFFTLAAALAYRRGLDVLVGGMSQTDYSGYPDCRDNTLKALQVALSLGIDRPLTLETPLMWLDKADTWELAHRLGGDALAELVRTDTHTCYLNRRDTLHAWGYGCGECPACLLRAQGHREWLARRAG

SEQ ID NO: 37307 - protein, 238 aa, Castellaniella sp.
  misc_feature (1)..(238): tr|A0A522TUZ4|A0A522TUZ4_9BURK 7-cyano-7-deazaguanine s ynthase OS=Castellaniella sp. OX=1955812 GN=queC PE=3 S V=1
MTASRQSRRSALVLFSGGQDSTTCLAWALARYSHVETIGFNYGQRHRVELDCRATLRNRMAELRLDWKPRLSEDHLLDVDVLRQLGTSAMTDDIAITLQADGLPNTFVPGRNLLFFTLAAALAYRRGLDVMVGGMSQTDYSGYPDCRDNTLKALQVALSLGVDRPLTLETPLMWLDKADTWELAQQLGGATLVELVRVETHTCYLNRRDTLHDWGYGCGECPACKLRARGYQEWTARR

SEQ ID NO: 37308 - protein, 243 aa, Catellatospora citrea
  misc_feature (1)..(243): tr|A0A419XJQ4|A0A419XJQ4_9ACTN 7-cyano-7-deazaguanine s ynthase OS=Catellatospora citrea OX=53366 GN=queC PE=3 SV=1
MTTSALGALSVPADSIPRHVVLVLSGGLDSTVLAYRLRADGAQLTALSFDYGQRHRRELEYASRTAHRLGAEHHVIDLASITGLLTGSALTDRDVTVPDGHYTDLSMRATVVPNRNALMLDIAVAVAVARGAGAVAFGAHSGDHPIYPDCRPAFVSAYRRMAQLANAGFAVDGFTVLAPFIGLAKSDIVTIGEQVNVPFGDSWSCYKGGDVHCGTCGTCVERREAFALARVADPTAYLTREVG

SEQ ID NO: 37309 - protein, 219 aa, Catenovulum agarivorans
  misc_feature (1)..(219): tr|W7QU33|W7QU33_9ALTE 7-cyano-7-deazaguanine synthase OS=Catenovulum agarivorans DS-2 OX=1328313 GN=queC PE=3 SV=1
MSEKVVVIYSGGMDSFTVLNLAIQQGFDVYALSFNYGQRHIKELEFAKSVCNKLNVPHKIVDISAINQLLAGSSLTDDIEIPEGHYEEENMKSTVVPNRNMILLSLAVGYAVSIKANKVFYGAHAGDHAIYPDCRPEFVEKMKAVCAIADYQPISIETPFLNDSKIDILAQGLKMGLDYSQTWTCYNGREHACGKCGACTERLEAFKLNNAVDPLIYES

SEQ ID NO: 37310 - protein, 195 aa, Catenovulum agarivorans
  misc_feature (1)..(195): tr|W7QQM7|W7QQM7_9ALTE 7-cyano-7-deazaguanine synthase OS=Catenovulum agarivorans DS-2 OX=1328313 GN=DS2_08837 PE=3 SV=1
MRIVTLVSGGLDSTLVVKLAKDEGVDIYPLFIDYGQIARETELKSCEEALAAVGVHKFEIAELSGFGKLIKSGLTDPTLDIVNDAFTPGRNMLFLLTAAAYAYQNNADAISIGLLHESTSLFPDQSTEFLEKAEELIEVIMGYKIKVLAPLREFMKANVIELAKLKGITKTYSCHTGNLEPCGECIACKEFEMEV

SEQ ID NO: 37311 - protein, 218 aa, Catenovulum maritimum
  misc_feature (1)..(218): tr|A0A0J8GRA2|A0A0J8GRA2_9ALTE 7-cyano-7-deazaguanine s ynthase OS=Catenovulum maritimum OX=1513271 GN=queC PE= 3 SV=1
MSEKAVVIYSGGMDSFTVLNLAINQGYEVLALSFNYGQRHVKELDYAKFVCAELNIPHKIVDISAINSLLAGSSLTDDIEIPEGHYEEDSMKSTVVPNRNMILLSMAVAYAISSEATKVFYGAHSGDHAIYPDCRPEFVEKMKAVCAIADYQATDIVTPFLHQSKIEILAKGLELGLDYSKTWTCYNGREKACGKCGACQERLEAFKLNNQTDPLDYE

SEQ ID NO: 37312 - protein, 224 aa, Catenovulum sp.
  misc_feature (1)..(224): tr|A0A2S0VLB3|A0A2S0VLB3_9ALTE 7-cyano-7-deazaguanine s ynthase OS=Catenovulum sp. CCB-QB4 OX=2172099 GN=queC P E=3 SV=1
MAVSENKEKVVVIYSGGMDSYTVLNKAIEQGYQPFALTFDYGQKHNKEITYARRVCQELNIAHKVIDITAINQLLAGSSLTDDIDIPEGHYEEASMKSTVVPNRNMILLSLAVGYAVSLEATKVFYGAHSGDHAIYPDCRPEFVEKMNAVCQIANYDAVDIVTPYLQNSKIDILSDGLRMNLDYSKTWTCYNGRELACGKCGACQERLEAFELNQVKDPLTYES

SEQ ID NO: 37313 - protein, 247 aa, Caulobacter flavus
  misc_feature (1)..(247): tr|A0A2N5CNL1|A0A2N5CNL1_9CAUL 7-cyano-7-deazaguanine s ynthase OS=Caulobacter flavus OX=1679497 GN=queC PE=3 S V=1
MSASLTPSAPSGAALVLFSGGQDSSVCLAWALERYARVETLGFDYGQRHSVEMEARQAVRHQVAARFPHWAQRLGEDHVLDIKSFGAVAQSALTADRAIEMTERGLPSTFVPGRNLVFLIYAAALADRRGIDALVGGMCETDFSGYPDCRRDTLDAMQSAMNLGMDRDFRVETPLMYLTKAETWALAKQLGGEDLVDLIVVESHTCYQGERGQLHPWGHGCGECPACELREKGYAEWDAAGREALVP

SEQ ID NO: 37314 - protein, 238 aa, Caulobacter henricii
  misc_feature (1)..(238): tr|A0A0P0P1Z2|A0A0P0P1Z2_9CAUL 7-cyano-7-deazaguanine s ynthase OS=Caulobacter henricii OX=69395 GN=queC PE=3 S V=1
MTDAALVLFSGGQDSSVCLAWALERYARVETVGFDYGQRHLIEMEARQAVRHQIAARFPHWGERLGEDHVLDLRGFGAVAQSALTADRAIEMTDRGLPSTFVPGRNLVFLTYAAALADRRGIAALVGGMCETDFSGYPDCRRDTLDAMQNALNLGMDREFRIETPLMALTKAETWALAKALGGEDLVDLIVVESHTCYQGERGELQAWGHGCGDCPACDLRQKGYEAWDAAGRAELEL

SEQ ID NO: 37315 - protein, 244 aa, Caulobacter mirabilis
  misc_feature (1)..(244): tr|A0A2D2AV99|A0A2D2AV99_9CAUL 7-cyano-7-deazaguanine s ynthase OS=Caulobacter mirabilis OX=69666 GN=queC PE=3 SV=1
MPQSALSTDGALVLFSGGQDSTACLAWALARYDRVETVGFDYGQRHIVEMTARQDVRGAVSARFPDWAARLGEDHVLDIRGFGAVAESALTADRAIEMTERGLPSTFVPGRNLVFLTYAAALADRRGLKALVGGMCETDFSGYPDCRRDTLDALETALNLGMDRDFRIETPLMRLTKAQTWALAKGLGGETLVELTVADSHTCYRGERGARHAWGHGCGECPACDLRAAGWSAWVAEGRPALTA

SEQ ID NO: 37316 - protein, 253 aa, Caulobacter radicis
  misc_feature (1)..(253): tr|A0A2T9JD46|A0A2T9JD46_9CAUL 7-cyano-7-deazaguanine s ynthase OS=Caulobacter radicis OX=2172650 GN=queC PE=3 SV=1
MSASSLSSSPSGPSAPSGAALVLFSGGQDSSVCLAWALERYERVETLGFDYGQRHSIEMEARQAVRHQVAARFPQWADRLGEDHVLDIRSFGAVAQSALTADRAIEMTERGLPSTFVPGRNLVFLIYAAALADRRGIDALVGGMCETDFSGYPDCRRDTLDAMQSAMNLGMDRNFRVETPLMFLTKAQTWALAKQLGGEDLVDLIVVESHTCYQGERGELHPWGHGCGECPACELREKGYAEWDAAGREVLVP

SEQ ID NO: 37317 - protein, 253 aa, Caulobacter radicis
  misc_feature (1)..(253): tr|A0A2T9JRM7|A0A2T9JRM7_9CAUL 7-cyano-7-deazaguanine s ynthase OS=Caulobacter radicis OX=2172650 GN=queC PE=3 SV=1
MSASSLSSSPSGPSAPSGAALVLFSGGQDSSVCLAWALERYERVETLGFDYGQRHSIEMEARQAVRHQVAARFPHWADRLGEDHVLDIRSFGAVAQSALTADRAIEMTERGLPSTFVPGRNLVFLIYAAALADRRGIDALVGGMCETDFSGYPDCRRDTLDAMQSAMNLGMDRSFRVETPLMHLTKAQTWALAKQLGGEDLVDLIVVESHTCYQGERGELHPWGHGCGECPACELREKGYAEWDAAGREALVP

SEQ ID NO: 37318 - protein, 263 aa, Caulobacter rhizosphaerae
  misc_feature (1)..(263): tr|A0A561NXF9|A0A561NXF9_9CAUL 7-cyano-7-deazaguanine s ynthase OS=Caulobacter rhizosphaerae OX=2010972 GN=queC PE=3 SV=1
MSTPEVSTASGVSRADAALVLFSGGQDSSVCLAWALERYARVETVGFDYGQRHVIEMQARQSVRRQMADRFPHWAERLGEDHVLDLTGFGAVAQSALTADVAIEMTERGLPSTFVPGRNLVFLIYAAALADRRGLGALVGGMCETDFSGYPDCRRDTLDAMQAALNLGMDRDFVIETPLMRLTKAQTWALAKTLGGEDLVDLIVVESHTCYQGDRGELHAWGHGCGECPACELRQRGYEDWDAAGRAPLPSPPAGEGGGEAVG

SEQ ID NO: 37319 - protein, 243 aa, Caulobacter segnis
  misc_feature (1)..(243): tr|D5VI52|D5VI52_CAUST 7-cyano-7-deazaguanine synthase OS=Caulobacter segnis (strain ATCC 21756 / DSM 7131 / J CM 7823 / NBRC 15250 / LMG 17158 / TK0059) OX=509190 GN =queC PE=3 SV=1
MSPPERTDAALVLFSGGQDSSVCLAWALERYGRVETVGFDYGQRHVVEMEARQAVRREVAARFPHWADRLGEDHVLDIRSFGAVAQSALTADRAIEMTERGLPSTFVPGRNLVFLIYAAALADRRGVDALVGGMCETDFSGYPDCRRDTLDAMQSALNLGMDRNFRVETPLMWLTKAETWALSKALGGEDLVKLIVEESHTCYQGERGVLHAWGHGCGVCPACELREKGYAEWDAAGREALVQ

SEQ ID NO: 37320 - protein, 458 aa, Caulobacter segnis
  misc_feature (1)..(458): tr|D5VJ95|D5VJ95_CAUST Uncharacterized protein OS=Caulo bacter segnis (strain ATCC 21756 / DSM 7131 / JCM 7823 / NBRC 15250 / LMG 17158 / TK0059) OX=509190 GN=Cseg_17 00 PE=4 SV=1
MKPLAFSAAAETAILVDALEEGRSPRDGALTAVIGRNLKLSIAGLKSYFYADWQPVLVDLLVVAAAAEYCDVVAHRPAWGWARAFDVRVAVHDPARWNAPIVREALQDALGFLTGDKWAFSFAARVEPVPQVRQMLDLGHPAKTIIPYSNGLDSLAVAALTSEARPSDLVRVRLGAAFADQKSHNKRRQAFASVPYEVRVAKGRRKESSARSRGFKFAVITGIAAVLAKADKIVVTESGQGALGPVLTVSGQAYPDYRVHPAFTMRVERLFATLLGHSAHYDFPRLWSTKGETIAEAARATPQPWAETRSCWQQSRQVGMGGKQRQCGVCAACMLRRMSLHAAGVVEPADAYVWENLGASDFRSGAAPGFKLVTPALEQYAIAGVLHLDHLAALPDSPLHRRLIRRSAREVADALGETLQDTEMKLLSMLERHRNEWRNFLTQLGPDSFVTKLSSVVP

SEQ ID NO: 37321 - protein, 242 aa, Caulobacter sp.
  misc_feature (1)..(242): tr|A0A3S9VC92|A0A3S9VC92_9CAUL 7-cyano-7-deazaguanine s ynthase OS=Caulobacter sp. FWC26 OX=69665 GN=queC PE=3 SV=1
MSPRERQAALVLFSGGQDSSVCLAWALQRYDRVETVGFDYGQRHAIEMEARQAVRREIAAGFPQWAERLGEDHVLDIRSFGQVAQSALTADRAIEMTERGLPSTFVPGRNLVFLIYAAALADRRGVDALVGGMCETDFSGYPDCRRDTLDAMQSALNLGMDRDFRIETPLMWLTKAQTWGLAKQLGGEDLVRLIVEESHTCYQGERGELHAWGHGCGTCPACELREKGYVEWDAAGREALAQ

SEQ ID NO: 37322 - protein, 242 aa, Caulobacter sp.
  misc_feature (1)..(242): tr|A0A0Q6UQ53|A0A0Q6UQ53_9CAUL 7-cyano-7-deazaguanine s ynthase OS=Caulobacter sp. Root343 OX=1736520 GN=queC P E=3 SV=1
MSPPVTGAALVLFSGGQDSSVCLAWALERYARVETVGFDYGQRHVVEMEARQAVRREIAARFPQWADRLGEDHVLDIRSFGQVAQSALTADRAIEMTERGLPSTFVPGRNLVFLIYAAALADRRGIDALVGGMCETDFSGYPDCRRDTLDAMQNALNLGMDRSFRVETPLMWLTKAQTWALSKSLGGEDLVQLIVEESHTCYQGERGQMHSWGHGCGACPACELREKGYAEWDAAGREALPA

SEQ ID NO: 37323 - protein, 242 aa, Caulobacter vibrioides
  misc_feature (1)..(242): sp|Q9A3P2|QUEC_CAUVC 7-cyano-7-deazaguanine synthase OS =Caulobacter vibrioides (strain ATCC 19089 / CB15) OX=1 90650 GN=queC PE=3 SV=1
MSPRERQAALVLFSGGQDSSVCLAWALERYDRVETVGFDYGQRHAIEMQARQAVRREVAARFPQWAERLGEDHVLDIRSFGAVAQSALTADRAIEMTERGLPSTFVPGRNLVFLTYAAALADRRGIDALVGGMCETDFSGYPDCRRDTLDAMQAALNLGMDRNFRIETPLMWLTKAQTWGLSKQLGGEALVSLIVEESHTCYQGERGQLHAWGHGCGTCPACELREKGYVEWDMAGREALAQ

SEQ ID NO: 37324 - protein, 242 aa, Caulobacter vibrioides
  misc_feature (1)..(242): tr|A0A258D884|A0A258D884_CAUVI 7-cyano-7-deazaguanine s ynthase OS=Caulobacter vibrioides OX=155892 GN=queC PE= 3 SV=1
MSPRERQAALVLFSGGQDSSVCLAWALERYDRVETVGFDYGQRHAIEMQARQAVRREIAARFPDWAGRLGEDHVLDIRSFGAVAQSALTADRAIEMTERGLPSTFVPGRNLVFLTYAAALADRRGIDALVGGMCETDFSGYPDCRRDTLDAMQSALNLGMDRDFRIETPLMWLTKAQTWSLSKQLGGEDLVRLIVEESHTCYQGERGELHAWGHGCGTCPACELREKGYVEWDAAGREALVQ

SEQ ID NO: 37325 - protein, 247 aa, Caulobacter zeae
  misc_feature (1)..(247): tr|A0A2N5D8A8|A0A2N5D8A8_9CAUL 7-cyano-7-deazaguanine s ynthase OS=Caulobacter zeae OX=2055137 GN=queC PE=3 SV= 1
MSASLTPSAPSGAALVLFSGGQDSSVCLAWALERYARVETLGFDYGQRHSIEMEARQAVRHQVAARFPHWADRLGEDHVLDIRSFGAVAQSALTADRAIEMTERGLPSTFVPGRNLVFLIYAAALADRRGTDALVGGMCETDFSGYPDCRRDTLDAMQSAMNLGMDRNFRVETPLMYLTKAQTWALAKQLGGEDLVDLIVVESHTCYQGERGELHPWGHGCGECPACELREKGYAEWDAAGREALVP

SEQ ID NO: 37326 - protein, 35 aa, Caulobacteraceae bacterium
  misc_feature (1)..(35): tr|A0A4Q3TBI8|A0A4Q3TBI8_9CAUL 7-cyano-7-deazaguanine s ynthase (Fragment) OS=Caulobacteraceae bacterium OX=197 8230 GN=EON96_18125 PE=4 SV=1
MSDILQNPTPSALVLFSGGQDSATCLAWALERYAR

SEQ ID NO: 37327 - protein, 230 aa, Caulobacteraceae bacterium
  misc_feature (1)..(230): tr|A0A1B1AGB0|A0A1B1AGB0_9CAUL 7-cyano-7-deazaguanine s ynthase OS=Caulobacteraceae bacterium OTSz_A_272 OX=175 9059 GN=queC PE=3 SV=1
MSAALVLFSAGQDSATCLAWALSKFDRVETIGFAYGQRHAVEMGQRPILRSAIAGIGPEWAARLGGDVVVDLAGYGALAESALTADRAIEMTESGLPSTFVPGRNLVFLSVAAAHAYRRGADTLIGGMCETDFSGYPDCRRDTIDAMQQALSLGLATPVTVATPLMQLTKAQTWGLAHDLGGASLVDAILEHSHTCYEGDRSLRHAWGYGCGVCPACELRANGWREFGAK

SEQ ID NO: 37328 - protein, 243 aa, Caulobacterales bacterium
  misc_feature (1)..(243): tr|A0A258CC00|A0A258CC00_9PROT 7-cyano-7-deazaguanine s ynthase OS=Caulobacterales bacterium 32-67-6 OX=1970502 GN=queC PE=3 SV=1
MTDTNRDQRALVLFSGGQDSSVCLAWALARYGHVETVGFDYGQRHAVEMSARQVVREAMIARFPAWAERLGPDHLIDLTGFGAIAETAMTAERAFEVTDRGLPSTFVPGRNLVFLTYGAALADRRGIGDLVGGMCETDFSGYPDCRRDTIDALEHALNLGMAQNFRIKTPLMSLTKAETWALSKGLGGEALVELICEESHTCYRGERGVRHDWGHGCGDCPACELRARGWTNWVAQGRPELAA

SEQ ID NO: 37329 - protein, 243 aa, Caulobacterales bacterium
  misc_feature (1)..(243): tr|A0A1F8I9T1|A0A1F8I9T1_9PROT 7-cyano-7-deazaguanine s ynthase OS=Caulobacterales bacterium RIFCSPHIGHO2_12_FU LL_68_13 OX=1797586 GN=queC PE=3 SV=1
MSVILEKSPTSALVLFSGGQDSATCLAWALERFERVETVGFDYGQRHRVEMEARQAVRAGMKTALPQWADRLGDDHVVDLTGYGRIAESALTADRKIEMDARGLPTTFVPGRNLIFLVAAAALADRRGLEVLVGGMCETDYSGYPDCRHETMEAMARALSLGLDKPVVVDTPLMWLTKGQTWELADRIGGEALVELIIEDSHTCYLGDRTHRHAWGYGCGECPACELRAAGYEDWVASQGAKA

SEQ ID NO: 37330 - protein, 228 aa, Caviibacterium pharyngocola
  misc_feature (1)..(228): tr|A0A2M8RVZ6|A0A2M8RVZ6_9PAST 7-cyano-7-deazaguanine s ynthase OS=Caviibacterium pharyngocola OX=28159 GN=queC PE=3 SV=1
MNTINPKGDRKAIVIFSGGQDSTTCLIQAIADYGVENVETITFQYGQRHSIELEKAAQIAQDLGVKQTIIDTSVIKTITSNALMDEGAEIKTAQNGLPNTFVDGRNALFLLYTAIYAKGQGIRDIITGVCETDFSGYPDCRDVFIKSMNVTLNLAMDYAFNLRTPLMYLTKAQTWALADELGALDYIRNRTHTCYQGVEGGCGECPSCVLREKGLNEYLQQKSAVKNV

SEQ ID NO: 37331 - protein, 231 aa, Cedecea davisae
  misc_feature (1)..(231): tr|S3J1V4|S3J1V4_9ENTR 7-cyano-7-deazaguanine synthase OS=Cedecea davisae DSM 4568 OX=566551 GN=queC PE=3 SV=1
MKRTVVVFSGGQDSTTCLIQALQQYDEVHCVTFDYGQRHRAEIDVAQKLALKLGARAHKVLDVTLLNELAVSSLTRDSIPVPGYNPHDDGIPSTFVPGRNILFLTLAAIYAYQVEAESVITGVCETDFSGYPDCRDEFVKALNHAVSLGMARDIRFETPLMWLDKAETWALADYWQHLETIRHETLTCYNGIQGDGCGECAACNLRANGLNHYQANKPAVMAAMKQKTGLK

SEQ ID NO: 37332 - protein, 231 aa, Cedecea lapagei
  misc_feature (1)..(231): tr|A0A3S4IFW5|A0A3S4IFW5_9ENTR 7-cyano-7-deazaguanine s ynthase OS=Cedecea lapagei OX=158823 GN=queC PE=3 SV=1
MKRTVVVFSGGQDSTTCLIQALQQYDEVHCVTFDYGQRHRAEIDVAQKLSLKLGARAHKVLDVTLLNELAVSSLTRDSIPVPGYNPEDSGLPSTFVPGRNILFLTLAAIYAYQVEAESVITGVCETDFSGYPDCRDEFVKALNHAVSLGMARDIRFETPLMWLDKAETWALADYWKQLETVRHETLTCYNGIQGDGCGECAACHLRANGLNHYLANKPAVMAAMQQKTGLK

SEQ ID NO: 37333 - protein, 231 aa, Cedecea lapagei
  misc_feature (1)..(231): tr|A0A2N0CM02|A0A2N0CM02_9ENTR 7-cyano-7-deazaguanine s ynthase OS=Cedecea lapagei OX=158823 GN=queC PE=3 SV=1
MKRAVVVFSGGQDSTTCLVQALHQYDEVHCVTFDYGQRHRAEIDVARELALKLGARAHKVLDVTLLNELAVSSLTRDSIPVPDYEPDASGIPNTFVPGRNILFLTLTAIYAYQVKAEAIITGVCETDFSGYPDCRDEFVKALNHAVDLGMAKEIRFETPLMWLDKAETWALADYWGKLDLVRNETLTCYNGIKGDGCGQCAACNLRANGLNHYLADKPAVMALMKKKTGLK

SEQ ID NO: 37334 - protein, 231 aa, Cedecea neteri
  misc_feature (1)..(231): tr|A0A089Q1T1|A0A089Q1T1_9ENTR 7-cyano-7-deazaguanine s ynthase OS=Cedecea neteri OX=158822 GN=queC PE=3 SV=1
MKRTVVVFSGGQDSTTCLIQALQQYDEVHCVTFDYGQRHRAEIDVAQKLSLKLGARAHKVLDVTLLNELAVSSLTRDSIPVPGYNPEDSGLPSTFVPGRNILFLTLAAIYAYQVEAESVITGVCETDFSGYPDCRDEFVKALNHAVSLGMARDIRFETPLMWLDKAETWALADYWQHLETIRHETLTCYNGIQGDGCGECAACNLRANGLNHYLANKSAVMATMQQKTGLK

SEQ ID NO: 37335 - protein, 231 aa, Cedecea neteri
  misc_feature (1)..(231): tr|A0A291E1E7|A0A291E1E7_9ENTR 7-cyano-7-deazaguanine s ynthase OS=Cedecea neteri OX=158822 GN=queC_1 PE=3 SV=1
MKRTVVVFSGGQDSTTCLIQALQQYDEVHCVTFDYGQRHRAEIDVAQKLSLKLGARAHKVLDVTLLNELAVSSLTRDSIPVPGYNPEDKGIPSTFVPGRNILFLTLAAIYAYQVEAESVITGVCETDFSGYPDCRDEFVKALNHAVSLGMARDIRFETPLMWLDKAETWALADYWQSLETVRQETLTCYNGIQGDGCGECAACNLRANGLNHYLANKSAVMAAMKQKTGLK

SEQ ID NO: 37336 - protein, 231 aa, Cedecea sp.
  misc_feature (1)..(231): tr|A0A1X7J3B2|A0A1X7J3B2_9ENTR 7-cyano-7-deazaguanine s ynthase OS=Cedecea sp. NFIX57 OX=1566286 GN=queC PE=3 S V=1
MKRTVVVFSGGQDSTTCLIQALQQYDEVHCVTFDYGQRHRAEIDVAQKLSLKLGARAHKVLDVTLLNELAVSSLTRDSIPVPGYNPEDKGIPSTFVPGRNILFLTLAAIYAYQVEAESVITGVCETDFSGYPDCRDEFVKALNHAVSLGMARDIRFETPLMWLDKAETWALADYWQSLETVRQETLTCYNGIQGDGCGECAACNLRANGLNHYLANKPAVMAAMKQKTGLK

SEQ ID NO: 37337 - protein, 178 aa, Celeribacter indicus
  misc_feature (1)..(178): tr|A0A0B5DZL1|A0A0B5DZL1_9RHOB 7-cyano-7-deazaguanine s ynthase OS=Celeribacter indicus OX=1208324 GN=P73_3769 PE=3 SV=1
MLRPDVLFTIDYGQAPAQGELRAATFIARELGLNHETLSVDCSPLGAGDMAGRPIASHSRVSEAWPFRNQLLVTLAAMKFAGEGLKDILIGTVVSDRVHADGSPEFVERLDMLIKCELPQTSVTAPALNMSTLELVKRSQVPMDILGWSFSCHRSTVACGQCRGCNKTIDLWEALERS

SEQ ID NO: 37338 - protein, 231 aa, Celeribacter indicus
  misc_feature (1)..(231): tr|A0A0B5E4X4|A0A0B5E4X4_9RHOB 7-cyano-7-deazaguanine s ynthase OS=Celeribacter indicus OX=1208324 GN=queC PE=3 SV=1
MRTLVICSGGLDSVTLADLVAQEGHLSRLVSFDYGQRHARELDHAARAAARLGVPHHLIDMRAIGAALTGSALTDDIEVPDGHYAEETMRITVVPNRNAILLAVAYGIAAAEGDTAVATAVHGGDHFIYPDCRPAFTAAFAAMQEAALDGYATVTLLTPFVHRSKADIVAEGARLGTPFADTWSCYRGGARHCGRCGTCVERREAFALAGVPDPTVYEDPEFWTDAVAGRR

SEQ ID NO: 37339 - protein, 438 aa, Celeribacter neptunius
  misc_feature (1)..(438): tr|A0A1I3PG40|A0A1I3PG40_9RHOB 7-cyano-7-deazaguanine s ynthase (Queuosine biosynthesis) OS=Celeribacter neptun ius OX=588602 GN=SAMN04487991_1663 PE=4 SV=1
MTKCILHFQTEEISPTVTIADNSRIVRLYGTCHNIDKAGYIGKTLPDRVERLGAPTSTTAFDFLTISMAVTAADTFFRREDVSDNGWARDFDLHVPVVQPDKWTAARPLLQRILNFLTGDHWQFTFLQNGPPKPNAIGGRLRKKSNLLSVDSVCLYSGGLDSWLGAKNLIANGNNPILVSHSYPQDSQRQNYLYDRLGQPLQRFAFNASPRQSGSSNDTTMRGRSFNFLAMAAVCADAVAELNGLGNVPLYIPENGFIALNAPLTPRRIGSHSTRTAHPNYLSQMQELFSRVGIKAIIENPFWTMTKGEMMVAASLSASDQRYASQTVSCGKWKRKSEQCGRCIPCLIRRASFLKAGIADNTPYTYSIPQNFAEYDGTKKDDLMAVVRAAQPKSKKQRLKNALKSGPLPIDVAERDQWLAVYERGLKELGDFLKSQGI

SEQ ID NO: 37340 - protein, 236 aa, Celeribacter persicus
  misc_feature (1)..(236): tr|A0A2T5HI61|A0A2T5HI61_9RHOB 7-cyano-7-deazaguanine s ynthase OS=Celeribacter persicus OX=1651082 GN=queC PE= 3 SV=1
MKTLVICSGGLDSVSLAHVLAAKGDLSRLVSFDYGQRHAKELDYAARAAQRLNVSHQIIDMRPIGAALTGSALTDDIDVPDGHYAEETMKITVVPNRNAIMLTIAFGVAAAQGDEAVATAVHGGDHFIYPDCRPAFTESFETMQRAALDGYADIRLSTPFVHKTKADIVTAGTAVDTPFADTWSCYKGGTRHCGRCGTCVERREAFHLAGIPDPTDYEDPGFWKAAIAQASRKNDR

SEQ ID NO: 37341 - protein, 219 aa, Celerinatantimonas diazotrophica
  misc_feature (1)..(219): tr|A0A4R1K398|A0A4R1K398_9GAMM 7-cyano-7-deazaguanine s ynthase OS=Celerinatantimonas diazotrophica OX=412034 G N=queC PE=3 SV=1
MKEKVVIIYSGGMDSYTVLNKALQEGYDAYPLTFDYGQRHKKEIDVARRVTQKLGLKHKVIDITAINQLLQGSSLTSDIDIPEGHYAEESMKSTVVPNRNMILLSLAIGYAVSIGAHKVYYGAHSGDHAIYPDCRPEFVNKMNAVSQIANYDPVEIVSPYLHQSKIEILKDGLTMGLDYSQTWTCYNGREKACGRCGACQERLEAFAKNGQVDPLEYED

SEQ ID NO: 37342 - protein, 219 aa, Cellulomonas carbonis
  misc_feature (1)..(219): tr|A0A0A0BV72|A0A0A0BV72_9CELL 7-cyano-7-deazaguanine s ynthase OS=Cellulomonas carbonis T26 OX=947969 GN=N868_ 05475 PE=3 SV=1
METAVLLSGGPDSAVLVHDLVRRGDDVVAIHLELGVAESPAALRCATAVSAALGIELVRLDLTPGGAREVRAGLVPGRAGRAAEPAFGGALSVAATTAATLGAHVLACGVHHGEAVFRGNQRHAFDALAASVSIDVGRHLVITTPYLGMTKAEVLLRGVALGVDVASTWSCTEGSTVHCGRCPACATRRAAFGDAGLVDTTPYARAAAAGGARSDAHAR

SEQ ID NO: 37343 - protein, 333 aa, Cellulomonas composti
  misc_feature (1)..(333): tr|A0A511J9H6|A0A511J9H6_9CELL 7-cyano-7-deazaguanine s ynthase OS=Cellulomonas composti OX=266130 GN=CCO02nite _13050 PE=3 SV=1
MAEFRRARFDPAAVRISSENAVVMLSGGLDSTVALWWALEHYGSVRAVSLDYGQPHRAELRAAARLAAVAGVERAVVRLDLPRGYRDASGMFIRGHTSLMGGLGALGVGAAGADVVLGMLATDPYADCGAEYLDALSAGLVNEHDEGPTRVVAPLLALEDKTAVAALGFELGAPWHVSWSCRRPLRGRPCADCSACRSRAVVDRRLDEEYGLPPAVVRSWQAVMGSPSHPVIGRCSDELRGLGQRIASAGGAERGTVGTRYVGPDGARRLAPHVRGARRAELRRPARTRYVRARGHGWQVAVCDDGAVAATDGLPSLDTIQRSLVAAVAAAPR

SEQ ID NO: 37344 - protein, 228 aa, Cellulomonas sp.
  misc_feature (1)..(228): tr|A0A1I3T318|A0A1I3T318_9CELL 7-cyano-7-deazaguanine s ynthase OS=Cellulomonas sp. KH9 OX=1855324 GN=queC PE=3 SV=1
MHKPAIVLLSGGLDSTTVLAIAKSQGYAPYALSFRYGQRHVVELTAAQRVAEAQGVERHVVADIDLRVFGGSALTSDVEVPKHESADELAADIPVTYVPARNTIFLSFALAYAETVGASDVFIGVNALDYSGYPDCRPEYIRAYETMANLATRAGVQGSKLTIHSPLLEMSKADIIRTGLELGIDYGLTSSCYDPNDAGRSCGHCDSCLLRLKGFAEAGAIDPVAYQA

SEQ ID NO: 37345 - protein, 227 aa, Cellulosilyticum sp.
  misc_feature (1)..(227): tr|A0A5B9YHA9|A0A5B9YHA9_9FIRM 7-cyano-7-deazaguanine s ynthase OS=Cellulosilyticum sp. WCF-2 OX=2497860 GN=que C PE=3 SV=1
MKAMVLFSGGIDSTTCLALAIEKFGKKNVIPLSITYGQKHSKELAASKSILSYYELEGMDLDLTPMFTYSDCSLLSHSKEEIPLTSYAEQLELTNGKPVSTYVPFRNGLFLSSAASIALAKGCSSIYYGAHSDDAAGNAYPDCSQTFNEAINRAIYEGSGKALQVVAPFVGLTKADVVSEGLRLNVPYHLTWSCYEGHTTPCRECGTCIDREKAFKLNGLIEPLLQE

SEQ ID NO: 37346 - protein, 225 aa, Cellvibrio japonicus
  misc_feature (1)..(225): sp|B3PC22|QUEC_CELJU 7-cyano-7-deazaguanine synthase OS =Cellvibrio japonicus (strain Ueda107) OX=498211 GN=que C PE=3 SV=1
MSRKKAVILVSGGLDSTTVIAIARSQGYDCYTISFDYGQRHRAELKAAEITAKAHGSLEHKVIRLDLGAIGGSALTDTSIDVPEEETSGIPVTYVPARNTVFLSIALGWAEVLGALDIFIGVNAVDYSGYPDCRPDYIAAYETMANLATKRGIEGERLHIRTPLINLTKAQIIQQGLALGVDYRLTVSCYQANDGGEACGKCDSCRLRKQGFEQAGVADPTRYAF

SEQ ID NO: 37347 - protein, 226 aa, Cellvibrio mixtus
  misc_feature (1)..(226): tr|A0A266Q344|A0A266Q344_9GAMM 7-cyano-7-deazaguanine s ynthase OS=Cellvibrio mixtus OX=39650 GN=queC PE=3 SV=1
MSQKKAVVLVSGGLDSTTVLAIARSEGYACYSISFDYGQRHRSELLAAERTAKVLGAVEHKVIKLDLRAIGGSALTDDSIAVPEEETGGIPVTYVPARNTVFLSIALGWAEVLGCDDIFIGVNAVDFSGYPDCRPEYIAAYEVMANLATRAGAEGNKLHIRTPLIHLSKADIIKQGVALGVDYGLTVSCYQANDQGEACGKCDSCRLRKQGFVQAGIADPTHYQSA

SEQ ID NO: 37348 - protein, 226 aa, Cellvibrio sp.
  misc_feature (1)..(226): tr|A0A1U9N570|A0A1U9N570_9GAMM 7-cyano-7-deazaguanine s ynthase OS=Cellvibrio sp. PSBB023 OX=1945512 GN=queC PE =3 SV=1
MSQKKAVVLVSGGLDSTTVLAIARSEGYACYSMSFDYGQRHRSELLAAERTAKALGAVEHKVIKLDLRAIGGSALTDDSIAVPEEETGGIPVTYVPARNTVFLSIALGWAEVLGCDDIFIGVNAVDFSGYPDCRPEYIAAYEVMANLATRAGAEGNKLHIRTPLIHLSKADIIKQGVALGVDYGLTVSCYQANDQGEACGKCDSCRLRKQGFVQAGIADPTHYQTA

SEQ ID NO: 37349 - protein, 224 aa, Cellvibrio sp.
  misc_feature (1)..(224): tr|A0A5J6NVZ5|A0A5J6NVZ5_9GAMM 7-cyano-7-deazaguanine s ynthase QueC OS=Cellvibrio sp. KY-YJ-3 OX=454662 GN=que C PE=4 SV=1
MSQKKAVVLVSGGLDSTTVLAIARSEGYACYSMSFDYGQRHRSELLAAERTAKALGAVEHKVIKLDLRAIGGSALTDDTIAVPEEETGGIPVTYVPARNTVFLSIALGWAEVLGCDDIFIGVNAVDFSGYPDCRPEYIAAYEVMANLATRAGAEGNKLHIRTPLIHLSKGDIIKQGVALGVDYGLTVSCYQANDEGEACGKCDSCRLRKQGFVQAGIADPTRYQ

SEQ ID NO: 37350 - protein, 224 aa, Cellvibrionaceae bacterium
  misc_feature (1)..(224): tr|A0A545U9H1|A0A545U9H1_9GAMM 7-cyano-7-deazaguanine s ynthase OS=Cellvibrionaceae bacterium R142 OX=2591008 G N=queC PE=3 SV=1
MSDKKAVVLVSGGLDSSTVLAMAGAEGFACYTLSFDYGQRHRAELAAAARVSAAMGAVEHKVVALDLRCIGGSALTDDSIAVPEEASEGIPVTYVPARNTVFLSIALGWAEVLGAGDIFIGVNAVDYSGYPDCRPEYIDAYEKMANLATKAGVEGHSLRIRSPLLTLTKAEIIRRGLALGVDYGLTVSCYQASEAGEACGRCDSCRLRRAGFVEAGAADPTRYR

SEQ ID NO: 37351 - protein, 223 aa, Cellvibrionales bacterium
  misc_feature (1)..(223): tr|A0A1Z8Z8P2|A0A1Z8Z8P2_9GAMM 7-cyano-7-deazaguanine s ynthase OS=Cellvibrionales bacterium TMED79 OX=1986768 GN=queC PE=3 SV=1
MTTKAVILTSGGLDSATLLAMAHSQSRECYSLSFDYGQRHRAELNAARAIAASYGDVVHRVISLDLSAIGGSALTDMDIDVPTTPQEGIPVTYVPARNTVFLSLALGWAEVLEATEIYIGVNAVDYSGYPDCRPEFIAAYQNLIGVATKAGVEGASIELKTPLIHLSKSDIIRRGIAHGVDYAMTVSCYQADEQGRACGVCDSCRIRAAGFSDAGVVDPTRYR

SEQ ID NO: 37352 - protein, 235 aa, Cellvibrionales bacterium
  misc_feature (1)..(235): tr|A0A350J1V4|A0A350J1V4_9GAMM 7-cyano-7-deazaguanine s ynthase OS=Cellvibrionales bacterium OX=2026722 GN=queC PE=3 SV=1
MTAIDPSIIKSSTTKKAIVLVSGGLDSATVLAMAIAQGYECHTLSFDYGQRHRAELQAAEQLSAASAAVEHRVISFDLGVIGGSALTDSAIAVPESPTEGIPITYVPARNTIFLSFALGYAEVVDASAIFVGVNAVDYSGYPDCRPDYIAAYQIMADSATKAGVEGHGAKVHAPLIDMSKSDIVKEGVRLGVNYAMTVSCYQANADGEACGKCDSCRLRAEGFKAAGIADPTRYV

SEQ ID NO: 37353 - protein, 228 aa, Centipeda periodontii
  misc_feature (1)..(228): tr|F5RP83|F5RP83_9FIRM 7-cyano-7-deazaguanine synthase OS=Centipeda periodontii DSM 2778 OX=888060 GN=exsB PE= 3 SV=1
MGEKAVILLSGGLDSCTCMAVACAAGYELYPISFDYHQRHDRELDCAKRIAEHYHAVEHLIIETNMNAVGGSALTDDAIAVPEGDAERTDIPVTYVPARNLIFLSYALGYAERVGAAHLYIGVNSVDYSGYPDCRPEFIAAFQAAADAATAAATERGRRIIVETPLQHLSKGAIVQLGTKLGAPYELTTSCYRGGAEACGVCDSCVLRLRGFAEAGRRDPIPYAAGVR

SEQ ID NO: 37354 - protein, 233 aa, Cesiribacter andamanensis
  misc_feature (1)..(233): tr|M7NTB6|M7NTB6_9BACT 7-cyano-7-deazaguanine synthase OS=Cesiribacter andamanensis AMV16 OX=1279009 GN=queC P E=3 SV=1
MTTPTGMIPTAPGTAALVLFSGGQDSTTCLFWAKKHFERVEALGFNYGQKHQVELEQALLIAQKADVPFHVMDVGGLLQGSSLTEHHKAMDSPHEQNQNLPASFVPGRNALFLTIAASWGYTRQIHDLVGGMCQTDYSGYPDCRRVFVDSLQTTASLALDQDVRIHTPLMYLTKAETWKLAKDLGVLEIVRDMSHTDYNGNRSTYNEWGYGELDNPASILRARGWEEAAKGWV

SEQ ID NO: 37355 - protein, 222 aa, Cetia pacifica
  misc_feature (1)..(222): tr|A0A3N1YTJ0|A0A3N1YTJ0_9PROT 7-cyano-7-deazaguanine s ynthase OS=Cetia pacifica OX=1424653 GN=queC PE=3 SV=1
MKAVVILSGGMDSTTAAFIAKQEGYEIIPLHFNYGQRTEKRELKAFNDICDYLKIEKNKRYIIDIPFFKQIGASALVDESLEVPTDGLKPGIPITYVPFRNGIFLSISAAVAEKEGAEAIYIGVVEEDSSGYPDCREEFINYMQKAINAGTKPETKVEIKTPLIHLKKEDIVKKAAEVGVPLELTWSCYKNEDEACGVCDSCRLRLKGFEKAGMKDKIPYKE

SEQ ID NO: 37356 - protein, 222 aa, Chamaesiphon minutus
  misc_feature (1)..(222): tr|K9U8G7|K9U8G7_CHAP6 7-cyano-7-deazaguanine synthase OS=Chamaesiphon minutus (strain ATCC 27169 / PCC 6605) OX=1173020 GN=queC PE=3 SV=1
MKAVILLSGGLDSSTVLYLAKSEGYSCYALSFDYQQRHRRELEAANAIASAAGVVAHQVVSFDLRLWGGSALTDDRIALPQERNLAQMSESIPVTYVPARNTIFLSFALAYAEAIEASRVYIGVNALDYSGYPDCRPDYIDAMRSVFRLGTKQGREGDPIEIVTPLIDLKKTEIIQLGDRLGVPWAQTWSCYSGDRVPCGTCDSCRLRLAAFEELGMVDPGR

SEQ ID NO: 37357 - protein, 435 aa, Chamaesiphon minutus
  misc_feature (1)..(435): tr|K9URI1|K9URI1_CHAP6 7-cyano-7-deazaguanine synthase OS=Chamaesiphon minutus (strain ATCC 27169 / PCC 6605) OX=1173020 GN=Cha6605_6015 PE=3 SV=1
MQVIVSHIPQKLPESSPNIIPVQIYGLDGRKQRNIATIGNSLINSIKRLGVSISPVEFDLMTLALAVTAADTFVKRSRSDDGWTREIKLQVSLCEPSVCLGQKERLEEALHFLSGDLWNLEILSGGYKPPDPYPINSRHKTIDLEGRDCVCLFSGGLDSAIGAIDLIADGKSPLLISHSYKGDKSYQDYIAGKLEGEFSRFSVNANPISIGGQTELTMRTRSLNFLAFAALGASALATVNQLENIELFVPENGLISLNAPLTSRRIGSLSTRTTHPHFLRSMQEIFDAVGIKVLIHNPYQFKTKGEMLLECKNQITLERVVSHTVSCSKWKRKRQQCGKCVPCIIRRAAIFALGITESTPYEHQNLLATVSDRGNRDDLFAIMIAINKLSSSNIGAWISDSGPLTVDPVIKDLYKQVFQRGMQEVDRFLQQEGLL

SEQ ID NO: 37358 - protein, 226 aa, Chamaesiphon polymorphus
  misc_feature (1)..(226): tr|A0A2T1F5U6|A0A2T1F5U6_9CYAN 7-cyano-7-deazaguanine s ynthase OS=Chamaesiphon polymorphus CCALA 037 OX=210769 2 GN=queC PE=3 SV=1
MKAVILLSGGLDSSTVLYLAKSEGYSCYALSFDYQQRHRRELEAASAIASAVGVVEHQVVSFDLRLWGGSALTDDRIALPQERNLAQMSESIPVTYVPARNTIFLSFALAYAEAIEANRVYIGVNALDYSGYPDCRPDYIEAMQSVFRLGTKQGREGDPIEIVTPLIDLKKTEIIQLGDRLGVPWAQTWSCYSGDRVPCGTCDSCRLRLAAFEELGVVDPGMRDRL

SEQ ID NO: 37359 - protein, 442 aa, Chamaesiphon polymorphus
  misc_feature (1)..(442): tr|A0A2T1GP37|A0A2T1GP37_9CYAN 7-cyano-7-deazaguanine s ynthase OS=Chamaesiphon polymorphus CCALA 037 OX=210769 2 GN=C7B77_00025 PE=3 SV=1
MGELLVTQVIVNHIPHKLPESSPNIIPVQIYGLDGRKQRDIATIGNSSIESIKRLGVSISPVEFDLMTLALAVTAADTFVKRNRADDGWTREIELQVSLYEPSIWLEQKERLEEALHFLSGDLWNLEILSGGYKPPDPYPINSRHKTIDLEGRDCVCLFSGGLDSAIGAIDLITDRKSPLLISHSYKGDKSYQNYIAGKLEGEFSRFSVNANPISIGGQTELTMRTRSLNFLAFAALGASAVATVNHLENTQLFVPENGLISLNAPLTSRRIGSLSTRTTHPHFLRSMQEIFDAVGIKVLIHNPYQFKTKGEMLLECKNQITLDRVVSHTVSCSKWKRKRQQCGKCVPCIIRRSAIFALGITESTAYEHQNLLATMSDRGNRDDLFAIMIAINKLSSSNISAWISDSGPLTVDPVTKDLYKQVFQRGMREVDRFLQKEGLLR

SEQ ID NO: 37360 - protein, 232 aa, Chania multitudinisentens
  misc_feature (1)..(232): tr|W0LCK0|W0LCK0_9GAMM 7-cyano-7-deazaguanine synthase OS=Chania multitudinisentens RB-25 OX=1441930 GN=queC P E=3 SV=1
MKRAVVVFSGGQDSTTCLIQALQQYDEVHCITFDYGQRHRAEIDVAKALAQELGVKAHKVLEAGLLNELAISSLTRDNIPLPIFDSTQQEAIPNTFVPGRNIFFLTLASIYAYQVEAETVIIGVCETDFSGYPDCRDEFVKALNHAIVLGIARDIHFETPLMWLNKAETWALADYYQQLERVRQDTLTCYNGIKGDGCGQCAACHLRTHGLQQYQVNKTEVMASLKQKTGLV

SEQ ID NO: 37361 - protein, 232 aa, Chelativorans sp.
  misc_feature (1)..(232): sp|Q11B05|QUEC_CHESB 7-cyano-7-deazaguanine synthase OS =Chelativorans sp. (strain BNC1) OX=266779 GN=queC PE=3 SV=1
MKTFVICSGGLDSVSLAHKVAVEKTLAGLISFDYGQRHKKELDFARACAQRLDVRHMIIDIRAVGEGLAGSALTDEIDVPNGHYAEDTMRITVVPNRNAIMLAIAFGVAAAQNADAVATAVHGGDHFIYPDCRPGFIEAFQAMQAQALDGYAKIALYAPYVNLSKANIVSDGVRHRTPFEATWSCYKGGKHHCGRCGTCVERREAFDLAGVTDPTTYEDAAFWREAVARKAG

SEQ ID NO: 37362 - protein, 244 aa, Chelatococcus sambhunathii
  misc_feature (1)..(244): tr|A0A0K6H0S8|A0A0K6H0S8_9RHIZ 7-cyano-7-deazaguanine s ynthase OS=Chelatococcus sambhunathii OX=363953 GN=queC PE=3 SV=1
MPEIADDKALVLFSGGQDSTVCLGWALERFAHVETIGFDYGQRHAVELTCRGVIRERLARPGAMGEKRLGRDHVVPLAALGAISDTAMTREVAIATGENGLPTTFVPGRNLIFLTFAAALAYRRGTRHIVLGVCETDYSGYPDCRDDTIKAMQVSINLGTDSRFVLHTPLMWRDKAETFALAERLGGADFLALVVEETHTCYLGERSRRHDWGYGCGTCPACELRAAGWAKWRTGRNAEDSDGP

SEQ ID NO: 37363 - protein, 244 aa, Chelatococcus sp.
  misc_feature (1)..(244): tr|A0A0K2D9J3|A0A0K2D9J3_9RHIZ 7-cyano-7-deazaguanine s ynthase OS=Chelatococcus sp. CO-6 OX=1702325 GN=queC PE =3 SV=1
MPGLADDKALVLFSGGQDSTVCLGWALQRFAHVETIGFDYGQRHAVELSCRGVIRERLARPGAMGEGRLGPDHLVPLAALGAISDTAMTREVAIATGENGLPTTFVPGRNLIFLTFAAALAYRRGTRHIVLGVCETDYSGYPDCRDDTIKAMQVAINLGTDSRFVLHTPLMWRDKAETFALAERLGGADFLDLVVEETHTCYLGERSRRHDWGYGCGTCPACELRAAGWAKWRAGRNAEDNDGP

SEQ ID NO: 37364 - protein, 242 aa, Chelatococcus sp.
  misc_feature (1)..(242): tr|A0A2W6XUX6|A0A2W6XUX6_9RHIZ 7-cyano-7-deazaguanine s ynthase OS=Chelatococcus sp. OX=1953771 GN=queC PE=3 SV =1
MGSSRALVLFSGGQDSTTALAWALDRFDEVETVGFDYGQRHRVELECRLAIREKLPALAPRYAERLGPDHLLDLTTLGTISETALTRDSEIAFAETGLPTTFVPGRNLIFLSFAAALAYRRHARHIVLGVCETDYSGYPDCRDDTIKAMQVALGLGLDRRLVLHTPLMWRDKAQTFALARALGGQALLDLVVEETHSCYLGDRSTRHDWGFGCGHCPACELRANGYAAYLASPDDSGPSYDS

SEQ ID NO: 37365 - protein, 222 aa, Chelonobacter oris
  misc_feature (1)..(222): tr|A0A0A3BAB6|A0A0A3BAB6_9PAST 7-cyano-7-deazaguanine s ynthase OS=Chelonobacter oris OX=505317 GN=queC PE=3 SV =1
MLQTKKALVIFSGGQDSTTCLLQAIHDYGKENVEVVTFQYGQRHAIELEKARWIAQDLGVKQTLIDTSVIKAITGNALMDQSAVIEQTDNDMPNTFVDGRNALFLLYAAIYAKGQGISDIITGVCETDFSGYPDCRDVFIKSMNVTLNLAMDYPFNIKTPLMYLDKKQTWALADQLGGLDYVMRHTHTCYLGVEGGCHQCPSCKLREKGLNDYLQQKGQPYV

SEQ ID NO: 37366 - protein, 224 aa, Chitinimonas sp.
  misc_feature (1)..(224): tr|A0A2G3K344|A0A2G3K344_9BURK 7-cyano-7-deazaguanine s ynthase OS=Chitinimonas sp. BJB300 OX=1559339 GN=queC P E=3 SV=1
MKKAVILLSGGLDSTTVLAMARAEGYECYCLSFDYGQRHNAELAAARRIARALGAKEHRVATIDLAAFGGSALTDANIEVPVDGIKAGEIPVTYVPARNTIMLSFALGWAEVLQANDIFIGVNAVDYSGYPDCRPDFIAAFETMANLATRIGVEGNQLNVRTPLISLSKAEIVQAGMRLGVDYGLTVSCYKANLEGQACGVCDACRLRKEGFAAAKVADPTRYI

SEQ ID NO: 37367 - protein, 224 aa, Chitinimonas sp.
  misc_feature (1)..(224): tr|A0A516SFF4|A0A516SFF4_9MICO 7-cyano-7-deazaguanine s ynthase OS=Chitinimonas sp. R3-44 OX=2594795 GN=queC PE =3 SV=1
MKKAVILLSGGLDSATVLAMAVSQGYECYCLSFDYGQRHNAELAAARRVSAALGAREHRIATIDLAAFGGSALTDASIEVPVDGVQDGEIPVTYVPARNTIMLSFALGWAEVLEAHDIFIGVNAVDYSGYPDCRPEYISAFELMANLATRISVEGAKLHIRTPLLSLSKARIVETGAKLGVDYALTVSCYKADLEGRACGVCDACRLRRTGFELAGMADPTRYQ

SEQ ID NO: 37368 - protein, 224 aa, Chitinimonas taiwanensis
  misc_feature (1)..(224): tr|A0A1K2H5W5|A0A1K2H5W5_9BURK 7-cyano-7-deazaguanine s ynthase OS=Chitinimonas taiwanensis DSM 18899 OX=112127 9 GN=queC PE=3 SV=1
MKKAVILLSGGLDSATVLALAQNQGYECYCLSFDYGQRHNAELAAARRVAMALGAKEHRVATIDLAAFGGSALTDAKIEVPVDGVQEGAIPVTYVPARNTIMLSFALGWAEVLGAHEIFIGVNAVDYSGYPDCRPEFIAAFERMANLATKVGVEGAQLHIRTPLINLSKAEIIQTGASLGFDYGLTVSCYKADLQGRACGVCDACRLRRDGFQAAGLADPTHYQ

SEQ ID NO: 37369 - protein, 228 aa, Chitiniphilus sp.
  misc_feature (1)..(228): tr|A0A4U0Q9F7|A0A4U0Q9F7_9NEIS 7-cyano-7-deazaguanine s ynthase OS=Chitiniphilus sp. HX-2-15 OX=2571148 GN=queC PE=3 SV=1
MNTTRRPAVVLLSGGLDSATCLAIARDMDLAPYALSFDYGQRHNAELKAAARVAQALGAVEHRVARIDLAAFGGSALTDASIDVPTSGVEDGTIPVTYVPARNTILLSYALAWAEVLKADDIFIGVNAVDYSGYPDCRPEYIAAFQAMARLATKVGVEGSPLTIHTPLIQWSKARIVQTGIRLGVDYGLTVSCYQADDDGRACGACDACRLRKAGFEAAGVVDPTRYR

SEQ ID NO: 37370 - protein, 224 aa, Chitinivibrio alkaliphilus
  misc_feature (1)..(224): tr|U7D4A2|U7D4A2_9BACT 7-cyano-7-deazaguanine synthase OS=Chitinivibrio alkaliphilus ACht1 OX=1313304 GN=queC PE=3 SV=1
MEKAVVLLSGGIDSSTVAAIARDYGYELYGMSFSYSQNHSVELESAKKIVGDIGFAEHRIIHLDLASFGGSSLTTSASIPKNGDHTMEIPSTYVPARNTIFLSYALAWAEVLRAYRIFIGVTAVDYSGYPDCRSDYISAYETMANLATREGVEGRKLKIEAPLITLSKAEIIRRGTELGVDYSLTHSCYDPTIEGLSCGFCDSCLHRKKGFEEAGVPDPTRYIS

SEQ ID NO: 37371 - protein, 177 aa, Chitinophaga pinensis
  misc_feature (1)..(177): tr|A0A5C6LW54|A0A5C6LW54_9BACT Uncharacterized protein OS=Chitinophaga pinensis OX=79329 GN=FEF09_09020 PE=4 S V=1
MGSHSTRTTHPHYMEMMRQLSRNIGLGVQIENPYQFKTKGEMLRECGNIPLVQSTNTMSCSHPSGRFAGQGNGHCGYCVPCIIRQSAYLAANVQDRSIYRVPVIGQTVAIDRAEGADILAFKYMIEKTSQNPSYLTTVIRSTGPLGTNIDPYIDIIQGVYVRWTRWLVKFNYDDSIS

SEQ ID NO: 37372 - protein, 389 aa, Chitinophagaceae bacterium
  misc_feature (1)..(389): tr|A0A4Q5W6M7|A0A4Q5W6M7_9BACT N-acetyl sugar amidotran sferase OS=Chitinophagaceae bacterium OX=1869212 GN=EOO 15_02420 PE=4 SV=1
MFNWSYNEENLKQNPVVNGGRPYQQCTKTVMDTIMDPDITFDADGVSNYYHNYVNSVDSVVFKGEAGEKRIAEMVRTLKANQKGKYDSIIGLSGGVDSTYMVYKAKEWGINPLVVHFDYGWNLELAVQNIEQTLKHAGLELYTYVMNWEDFKHLQRAYFKAGVLDLDVPADHLIFAALNMVAKKFNIKYLLKGYNFQSEAILPRTWNYNRKFDLKNLQDINRKHGERKLKDLPKLGLWQQIYYERVYKLQSFSPLNNFDYHKEECKKELIEKIGWVDYGGKHFENVFTRFYQGYILPTRFAIDKRKAHLSTLICSGQATREQALAELQRPPYDLKVMQEDYVYVSKKLGFSEAEFDQCLNGPIRRHEEFKEEVKLQNFLSKAAKLILRK

SEQ ID NO: 37373 - protein, 380 aa, Chitinophagaceae bacterium
  misc_feature (1)..(380): tr|A0A1Z5SIH0|A0A1Z5SIH0_9BACT ExsB family protein OS=C hitinophagaceae bacterium IBVUCB1 OX=1985173 GN=CAP35_0 2550 PE=4 SV=1
MQEDKTYQQCAISVMDTIADPNISFDAKGISNYYYEFQDAFKNNVFTGKEAHDKLTQVVTTIKEAGKGKEYDCIMGLSGGVDSTYIALIAKQYGLRPLAVHFDNGWNSELAVKNIENIVAKLGFDLFTYVINWEEFKDLQIAYLKASVVDIEAITDHAIFASLYRIAGQKNIKYILSGTNVQTENTLPKSWIHAKADHINIKSIHKTYGSIKLKTFPFMDAKVKRYYQQTKGITSVSLLNYVDYNKQAVKDTIQKELSWRDYGGKHYESIWTRFYQGYILPTKFKIDKRKAHLSDLIFSGQITKQQAIDELAKPIYDAEQFNADYEFVLKKLGLSESEFKAIMDTPPRSHYDFDYEMPIDKRYPLLKPIKKIYRTIFPPK

SEQ ID NO: 37374 - protein, 220 aa, Chlamydia sp.
  misc_feature (1)..(220): tr|A0A1M3B747|A0A1M3B747_9CHLA 7-cyano-7-deazaguanine s ynthase OS=Chlamydia sp. 32-24 OX=1895742 GN=BGO10_0638 0 PE=3 SV=1
MKKCIILLSGGLDSSVLLAKAKEQKLDCLCLSFNYHQTHSIELKFAKQIAKFYEVPHKIITIDQQVFSNSPLILGHEESTIHRGEEEILRGKKSPFYVPSRNTLFLSHAITIAEIEKAAFIYFGPTAMDKAFPDCQIDYIRALQTIIDKSTQIGLEGNAPIICTPLINFTKDQVVAEALRLKVPIHLTWSCYTPDQSDPCQVCDACVLRKAALLRNQVSL

SEQ ID NO: 37375 - protein, 226 aa, Chlamydia sp.
  misc_feature (1)..(226): tr|A0A1M3BDK0|A0A1M3BDK0_9CHLA 7-cyano-7-deazaguanine s ynthase OS=Chlamydia sp. 32-24 OX=1895742 GN=BGO10_0479 0 PE=3 SV=1
MKKAIIVHSGGMDSTVCLYLASQAYGKENVLSISFDYQQRHGKAELQAAQTICRDWGVDHVVIPIVSLKEISPNALVCHDLEIKHEKGGHANTLVTGRNGLMAMLAGTHANHLGAHCIYMGVIAVDGAKNGYRDCSREYMDLMEQILRLDFNDPTFQIITPLVDKTKAEVVTLAYELGILDYVLENTISCYQGINGKGCQTCPSCLLRNNGIDTFYTKINQLPTFS

SEQ ID NO: 37376 - protein, 241 aa, Chloracidobacterium sp.
  misc_feature (1)..(241): tr|A0A257B4M7|A0A257B4M7_9BACT 7-cyano-7-deazaguanine s ynthase OS=Chloracidobacterium sp. CP2_5A OX=2012633 GN =queC PE=3 SV=1
MIQIPAAPRRAAVLLSGGLDSATTLAIARAEGFACYALSFDYGQRHRRELDAARRIAAALGAEAHLVVAFDLRAIGGSALTSELPVPKDRPLAALAEGIPVTYVPARNTIFLSFALAWAETLAASDIFIGVNAYDYSGYPDCRPEYLRAYETMANLATRAGVEAGRRLTIHAPLIELTKAQIIRRGLALGVDYRLTHSCYDPTPEGLACGRCDSCLLRLKGFAEAGATDPIPYAPRPDVAP

SEQ ID NO: 37377 - protein, 230 aa, Chloracidobacterium thermophilum
  misc_feature (1)..(230): tr|G2LJL7|G2LJL7_CHLTF 7-cyano-7-deazaguanine synthase OS=Chloracidobacterium thermophilum (strain B) OX=98122 2 GN=queC PE=3 SV=1
MSHSSRPAVVLLSGGLDSTTALAIAQAEGFTCHALSFDYGQRHRLELEAARRVAAAFNVARHLVVTFDLRAIGGSALTSDLPVPKDRPLESVGIPPTYVPARNTIFLSFALAWAETLACTDIFLGVNVYDYAGYPDCRPEYLRAYEAMAKLATRAGVEGARPWKIHAPLITLTKAEIIRRGLELGIDYGLTHSCYDPTPEGLACGRCDSCRFRLKGFAEAGATDPLRYAS

SEQ ID NO: 37378 - protein, 227 aa, Chlorobaculum limnaeum
  misc_feature (1)..(227): tr|A0A1D8D193|A0A1D8D193_CHLLM 7-cyano-7-deazaguanine s ynthase OS=Chlorobaculum limnaeum OX=274537 GN=queC PE= 3 SV=1
MRAVLLVSGGMDSLVATALARHEGFELAAMHVNYGQRTSRKELECFRQICDHYGIAHRLEVDAMFLSAIGGSSLTDVAIPVGPADLAGTEIPTSYVPFRNANFLSMAVSWSEVIGANRIYIGAVEEDSSGYPDCRKVFYDAFNQVIDLGTRPETRIEIVTPLIAMSKAEIVRRGLELDAPFNYSWSCYKSEGKACGVCDSCARRLRAFASAGMEDPVEYEVRPNYLQ

SEQ ID NO: 37379 - protein, 227 aa, Chlorobaculum parvum
  misc_feature (1)..(227): sp|B3QPB3|QUEC_CHLP8 7-cyano-7-deazaguanine synthase OS =Chlorobaculum parvum (strain NCIB 8327) OX=517417 GN=q ueC PE=3 SV=1
MKAVLLVSGGMDSLVATALAHHHGFELAAMHVNYGQRTWQKELECFRQICDHYGIEKRLEIDAGFLGAIGGSSLTDAAIPVGPADLAGTDIPTSYVPFRNANFLSMAVSWSEVIGANRIYIGAVEEDSSGYPDCRKVFYDAFNQVIEHGTRPETSIEIVTPLIDMSKAEIVKRGMELDAPFHFSWSCYKSEGKACGVCDSCARRLRAFASVGIADPVEYEVRPDYLQ

SEQ ID NO: 37380 - protein, 227 aa, Chlorobaculum sp.
  misc_feature (1)..(227): tr|A0A4Q1DF00|A0A4Q1DF00_9CHLB 7-cyano-7-deazaguanine s ynthase OS=Chlorobaculum sp. 24CR OX=2508878 GN=queC PE =3 SV=1
MRAVLLVSGGMDSLVATALARHEGFELAAMHVNYGQRTSRKELECFRQICDHYGISHRLEVDAPFLGAIGGSSLTDAAIPVGPADLAGTDIPTSYVPFRNANFLSMAVSWSEVIGANRIYIGAVEEDSSGYPDCRKVFYDAFNQVIEHGTRPETCIEIVTPLIDMSKAEIVKRGMELDAPFNYSWSCYKSEGKACGVCDSCARRLRAFASAGIDDPVEYEVRPNYLQ

SEQ ID NO: 37381 - protein, 227 aa, Chlorobaculum tepidum
  misc_feature (1)..(227): sp|Q8KF00|QUEC_CHLTE 7-cyano-7-deazaguanine synthase OS =Chlorobaculum tepidum (strain ATCC 49652 / DSM 12025 / NBRC 103806 / TLS) OX=194439 GN=queC PE=3 SV=1
MRAVLLVSGGMDSLVATALAHREGLELAAMHVNYGQRTWQKELECFRQICVHYGIVDRLEVDAMFLSAIGGSSLTDATIPVGPADLAGTDIPTSYVPFRNANFLSMAVSWSEVIGANRIYIGAVEEDSSGYPDCRKVFYDAFNQVIEHGTRPETRIEIVTPLIAMSKAEIVRRGMELDAPFHFSWSCYKSEGKACGVCDSCARRLRAFASVGMDDPVEYEVRPNYLQ

SEQ ID NO: 37382 - protein, 227 aa, Chlorobaculum thiosulfatiphilum
  misc_feature (1)..(227): tr|A0A5C4S826|A0A5C4S826_CHLTI 7-cyano-7-deazaguanine s ynthase OS=Chlorobaculum thiosulfatiphilum OX=115852 GN =queC PE=3 SV=1
MKAVLLVSGGMDSLVATALAHREGFELAAMHVNYGQRTWTKELECFRQICDHYGIADRLEVDAMFLSTIGGSSLTDAKIPVGPADLAGTEIPTSYVPFRNANFLSMAVSWSEVIGANRIYIGAVEEDSSGYPDCRKIFYDAFNQVIDLGTRPETRIEIVTPLIAMSKAEIVKKGMELDAPFHFSWSCYKSEGKACGVCDSCARRLRAFASAGMDDPVEYEVRPNYLQ

SEQ ID NO: 37383 - protein, 226 aa, Chlorobi bacterium
  misc_feature (1)..(226): tr|A0A3M1LXQ1|A0A3M1LXQ1_9BACT 7-cyano-7-deazaguanine s ynthase OS=Chlorobi bacterium OX=2268192 GN=queC PE=3 S V=1
MIAVVALSGGMDSLVTLAEIRADGYDIAALHFNYGQRTEQRELEAFHAICDYYTIEKRLVVDVAYLAAIGASSLTDPTIEVERANLERKGIPSSYVPFRNANILAIATSWAEALGARAIGIGAVEEDSSGYPDCRREFFRAFERVIELGTKPDTQISILTPVIGYRKADIVRRGVELGVPFELSWSCYIRSDVACGECDSCALRLRGFQQAGIEDPLPYVVRPHYV

SEQ ID NO: 37384 - protein, 228 aa, Chlorobi bacterium
  misc_feature (1)..(228): tr|A0A4P5UPU5|A0A4P5UPU5_9BACT 7-cyano-7-deazaguanine s ynthase OS=Chlorobi bacterium OX=2268192 GN=queC PE=3 S V=1
MKELAVVLMSGGMDSTVCAGIALEKGFEVCALHVHYGQKTEDREAASFQNICDFYGIQKCLDIDISHLSRIGGSSLTDMNIAISKADLGNLEIPTSYVPFRNANLLSIAVSWAEVLGAHSIFIGAVEEDGSGYPDCRRTFFDAFEKMIAKGTKPGTDIRIETPILHMKKSDIVKEGMRLTAPLHFTWSCYADNVVACGVCDSCALRLRGFSQAGIDDPIEYQQRPKYL

SEQ ID NO: 37385 - protein, 228 aa, Chlorobium chlorochromatii
  misc_feature (1)..(228): sp|Q3AR02|QUEC_CHLCH 7-cyano-7-deazaguanine synthase OS =Chlorobium chlorochromatii (strain CaD3) OX=340177 GN= queC PE=3 SV=2
MKAILLLSGGMDSLVTTAIAQQAGFELAAMHVNYGQRTMQRELNSFRAICSHYSIQQRLEINADFLGKIGGSSLTDLSMPVSVANLESHAIPASYVPFRNAGFLSMAVSWAEVIGAERIFIGAVEEDSSGYPDCRKIFYEAFNRVIELGTKPETHIEVVTPLIALKKWEIVRKGIELHAPFAFSWSCYKNEGQACGVCDSCALRLRAFEQAGMEDPIDYETRPHYIDC

SEQ ID NO: 37386 - protein, 226 aa, Chlorobium ferrooxidans
  misc_feature (1)..(226): tr|Q0YRG0|Q0YRG0_9CHLB 7-cyano-7-deazaguanine synthase OS=Chlorobium ferrooxidans DSM 13031 OX=377431 GN=queC PE=3 SV=1
MRAVVLLSGGMDSLVTTAMAHEHGFELAAMHVNYGQRTWHKELASFRDICNHYNIDRRLEVDADFLARIGGSSLTDLSMPVSGADLQGSEIPTSYVPFRNANFLSMAVSWSEVIGANRIFIGAVEEDSSGYPDCRKIFYEAFNQVIALGTKPETTIEIVTPLIEMQKSDIVHRGMLLDVPFAYSWSCYKSEGRACGVCDSCARRLRAFELVGVRDPIDYEARPRYI

SEQ ID NO: 37387 - protein, 226 aa, Chlorobium limicola
  misc_feature (1)..(226): tr|A0A101JPG8|A0A101JPG8_CHLLI 7-cyano-7-deazaguanine s ynthase OS=Chlorobium limicola OX=1092 GN=queC PE=3 SV= 1
MKAVLLISGGMDSLVTTAIAAEEKFELAAMHVNYGQRTWQKELACFRRICSHYQIRHRLEIDAGYLAQIGGSSLTDPAMPVSGADLQGTDIPTSYVPFRNAGFLSMAVSWSEVIGAGKIFIGAVEEDSSGYPDCRRIFYDAFNRVIELGTRPDTSIEIVTPLIAMQKCDIVLKGMELNAPFAYSWSCYKSEGRACGVCDSCARRLRAFELTGERDPIEYEVRPKYI

SEQ ID NO: 37388 - protein, 226 aa, Chlorobium limicola
  misc_feature (1)..(226): sp|B3EGF5|QUEC_CHLL2 7-cyano-7-deazaguanine synthase OS =Chlorobium limicola (strain DSM 245 / NBRC 103803 / 63 30) OX=290315 GN=queC PE=3 SV=1
MKAVLLISGGMDSLVTTAIAAEEKLELAAMHVNYGQRTWQKELECFRRICNHYQIRHRLEIEAGYLAQTGGSSLTDPAMPVSGADLQGTDIPTSYVPFRNAGFLSMAVSWSEVIGAGKIFIGAVEEDSSGYPDCRQVFYDAFNRVIELGTRPDTAIEIVTPLISMQKCDIVLKGMELNAPFACSWSCYKSEGRACGVCDSCARRLRAFELTGVRDPIEYEVRPKYI

SEQ ID NO: 37389 - protein, 226 aa, Chlorobium phaeobacteroides
  misc_feature (1)..(226): sp|B3ENV8|QUEC_CHLPB 7-cyano-7-deazaguanine synthase OS =Chlorobium phaeobacteroides (strain BS1) OX=331678 GN= queC PE=3 SV=1
MRAVVLISGGMDSLVVAAQARALGYELAAMHVNYGQRTWQKELTAFRRICSHYAIERKLEVDAAYLEHIGGSSLTDSSIPVEQADLQTVAIPSSYVPFRNASFLSMAVSWSEVIGAERIFIGAVEEDSSGYPDCRKIFYDAFNKVIELGTKPETTIEIRTPLIDLQKSEIVRKGVELDVPFFHSWSCYKSEGKACGLCDSCARRLRAFQLVGLDDPIDYEVRPDYI

SEQ ID NO: 37390 - protein, 226 aa, Chlorobium phaeobacteroides
  misc_feature (1)..(226): sp|A1BHS4|QUEC_CHLPD 7-cyano-7-deazaguanine synthase OS =Chlorobium phaeobacteroides (strain DSM 266) OX=290317 GN=queC PE=3 SV=1
MKAVVLLSGGMDSLVTTAIANAQGFELAAMHVNYGQRTWHKELEAFRLIADHYAIGERLEINADYLAQIGGSSLTDYSMPISGADLQGLSIPTSYVPFRNAGFLSMAVSWAEVIGAERIFIGAVEEDSSGYPDCRKVFYDAFNAVIALGTKPETSIAIMTPLIEMQKSEIVRKGMELTAPFELSWSCYKSEGKACGVCDSCALRLRAFERAGMRDPIDYEQRPDYI

SEQ ID NO: 37391 - protein, 227 aa, Chlorobium phaeovibrioides
  misc_feature (1)..(227): sp|A4SDQ0|QUEC_CHLPM 7-cyano-7-deazaguanine synthase OS =Chlorobium phaeovibrioides (strain DSM 265 / 1930) OX= 290318 GN=queC PE=3 SV=1
MKAVVLLSGGMDSLVTTAIAHNEGLQLAAMHVNYGQRTWQRELESFRSIAGHYGIGELLEVNADFLGTIGGSSLTDHTMAVSGADLQGTAIPTSYVPFRNACFLSMAVSWAEVIGAQKLYIGAVEEDSSGYPDCRKVFYDAFNKVIELGTKPETGIEILTPLIAMQKAGIVEKGMELDAPFHYSWSCYKSEGKACGVCDSCARRLRAFELVGVRDPIDYDVRPQYIH

SEQ ID NO: 37392 - protein, 227 aa, Chlorobium phaeovibrioides
  misc_feature (1)..(227): tr|A0A3S0MQL0|A0A3S0MQL0_CHLPH 7-cyano-7-deazaguanine s ynthase OS=Chlorobium phaeovibrioides OX=1094 GN=queC P E=3 SV=1
MKAVVLLSGGMDSLVTTAIAHNEGLQLAAMHVNYGQRTWQRELESFRSIAGHYGIGELLEVNADFLGTIGGSSLTDHTMAVSGADLQGTAIPTSYVPFRNACFLSMAVSWAEVIGAQKLYIGAVEEDSSGYPDCRKVFYDAFNKVIELGTKPETGIEILTPLIAMQKAGIVEKGMELDAPFHYSWSCYKSEGKACGVCDSCARRLRAFELVGVRDPIDYNVRPQYIH

SEQ ID NO: 37393 - protein, 231 aa, Chlorobium sp.
  misc_feature (1)..(231): tr|A0A4R0QL12|A0A4R0QL12_9CHLB 7-cyano-7-deazaguanine s ynthase OS=Chlorobium sp. N1 OX=2491138 GN=queC PE=3 SV =1
MKAVLLLSGGMDSLVTTAVAHREGFDLAAMHVNYGQRTWQKELDCFRRIADHYGIAERLEVDADFLGRIGGSSLTDRDIAVEGADLHGSSIPTSYVPFRNACFLSMATSWSEVIGAERIFIGAVEEDSSGYPDCRRVFYDAFSRVIELGTRPETSIGIVTPLISLQKAGIVELGMELGAPFQHSWSCYKSEGRACGLCDSCARRLRAFELLGLRDPIDYEVRPQYIDGPLP

SEQ ID NO: 37394 - protein, 240 aa, Chlorobium sp.
  misc_feature (1)..(240): tr|A0A533THV9|A0A533THV9_CHLSQ 7-cyano-7-deazaguanine s ynthase OS=Chlorobium sp. OX=1095 GN=queC PE=3 SV=1
MQRFVSTPPPKAVLLLSGGMDSLVTTAIAHEQGFVLAAMHVNYGQRTWQKELESFRSICNHYNIEQRLEVNADFLAQIGGSSLTDFSMPVGGADLQGSSIPTSYVPFRNAGFLSMAVSWSEVIGANKIFIGAVEEDSSGYPDCRKVFYDAFNTVIALGTKPETDIEILTPLIEMQKSEIVRKGMELGAPFNLSWSCYKSEGRACGVCDSCARRLRAFEVMGIPDPIDYEERPLYIRESIF

SEQ ID NO: 37395 - protein, 267 aa, Chloroflexi bacterium
  misc_feature (1)..(267): tr|A0A2N2PVA2|A0A2N2PVA2_9CHLR TIGR00268 family protein OS=Chloroflexi bacterium HGW-Chloroflexi-1 OX=2013723 GN=CVU38_09845 PE=4 SV=1
MVEDKLFQLRNLFRQMGSAIVAYSGGVDSTLLLKIAHDELSAAAVAVTADSPSFPRAELAAAQAIAADLGVRHVCLPTPEGADPRYRANTPDRCYICKTHILDALLAFAESNGYRNVVDGSNADDLGDTRPGQRALSEHGVRSPLQELGLTKAEVRTLARTLGLPNWDKPASACLASRVPYGVPISGEMLAQIERAEDYLHERGFRQLRVRHHGAVARLELEPADFPAALAARETIVAALRGFGFTYVALDLGGFRSGSMNEALPHG

SEQ ID NO: 37396 - protein, 226 aa, Chloroflexi bacterium
  misc_feature (1)..(226): tr|A0A2E5IWH6|A0A2E5IWH6_9CHLR 7-cyano-7-deazaguanine s ynthase OS=Chloroflexi bacterium OX=2026724 GN=CL790_02 380 PE=3 SV=1
MSESPSVEMRVAALVSGLDSCVMVGLLAREYSEITPIYVRAGLRWEDAEIRALNNFFGALAEDVVQPVVEVHLGVGAFYGTHWSIGGVDVPDTNEPDDAWYLPGRNLALLSAAAIYGGTHAIKFLAIGILGSNPFPDATEEFFHSLEHTAGLAMNTTFHVLRPLQGMHKADVIRAGGAFPIELSLSCASPVEGKHCGVCGKCGERRGGFIQAGILDPTDYVESIPV

SEQ ID NO: 37397 - protein, 223 aa, Chlorogloea sp.
  misc_feature (1)..(223): tr|A0A2T1EMA1|A0A2T1EMA1_9CHRO 7-cyano-7-deazaguanine s ynthase OS=Chlorogloea sp. CCALA 695 OX=2107693 GN=queC PE=3 SV=1
MKVVVLLSGGLDSATVLYSAKSSGYECYALSFDYNQRQVRELDSAIALCKAAGVVGKVISFDLRSWGGSALTDDKIDLPVERSLSQMGENIPVTYVPARNTIFLSFALAYAETIGAERVYIGVNALDYSGYPDCRPDYIQAMQEVFRLGTKQGREGESIKIVAPLIDLKKTEIIQLGNKLGVPWDKTWSCYAGNEKACGACDSCKLRLEAFAELGLIDPIAYK

SEQ ID NO: 37398 - protein, 225 aa, Chlorogloeopsis fritschii
  misc_feature (1)..(225): tr|A0A3S1AHN8|A0A3S1AHN8_CHLFR 7-cyano-7-deazaguanine s ynthase OS=Chlorogloeopsis fritschii PCC 6912 OX=211165 GN=queC PE=3 SV=1
MKAVILLSGGLDSSTVLYQALADGCECYTISFDYQQRHRRELQSALAIAQAAGVLQHQVVTFDLRQWGGSALTDNAIDLPTGRSLEEMSQNIPVTYVPARNTIFLSFALAYAETLGAERIYIGVNALDYSGYPDCRPDYIQAMQEVFRLGTKQGREGKPINIFTPLLHLKKTEIIQLGNRLGVPWELTWSCYAGKEIACGVCDACRLRLAAFAELGLKDPLVYAQ

SEQ ID NO: 37399 - protein, 229 aa, Chlorogloeopsis fritschii
  misc_feature (1)..(229): tr|A0A433N6D6|A0A433N6D6_CHLFR 7-cyano-7-deazaguanine s ynthase OS=Chlorogloeopsis fritschii PCC 6912 OX=211165 GN=queC PE=3 SV=1
MPKCLVILSGGQDSTTCLAIASQQFDEVHAVTFEYGQRHAIELESADAVARTLSVTSHEVIKLGAILKGTSPLVSKYPVSTYTTPDEVPDGVAATFVPSRNALFLTIASNRAIALECSTIFTGVSQTDYSGYPDCRRDFIDSLEETLSLANWGTIGHLKIETPLMYLSKAESVLLAKAVLGDRFEEVMELTHTCYQGVKGGCGKCAACLLRDQGFKEANVVDPIWKFRG

SEQ ID NO: 37400 - protein, 226 aa, Chloroherpeton thalassium
  misc_feature (1)..(226): sp|B3QS09|QUEC_CHLT3 7-cyano-7-deazaguanine synthase OS =Chloroherpeton thalassium (strain ATCC 35110 / GB-78) OX=517418 GN=queC PE=3 SV=1
MRAVVLLSGGMDSLVTTAIAAHLGYELAALHINYGQRTEKRELVAFQKICDFYRIERRLEINFEHLSLIGGSSLTDLAMPVTTAKLHSKEIPTSYVAFRNANMLSVAVSWAEVIGANKIFIGAVDEDSSGYPDCRVNFFQAFNELIKHGTKPDTRIEIQTPVISLKKWEIVIKGMELEVPFEHSWSCYKSEHVACGVCDSCALRLRAFEQAGIRDPIEYKIRPSYI

SEQ ID NO: 37401 - protein, 221 aa, Chondrocystis sp.
  misc_feature (1)..(221): tr|A0A1Z4RQE8|A0A1Z4RQE8_9CHRO 7-cyano-7-deazaguanine s ynthase OS=Chondrocystis sp. NIES-4102 OX=2005460 GN=qu eC PE=3 SV=1
MNKAVVLLSGGLDSATTTAIAIDAGYEVIALSFRYGQRHYKELEAAKKIAQAFNIQDHFIIDVNLSQWGGSSLTDQSLTIPQSGVKTDIIPSTYVPGRNTVFIAIALSLAEAKGAQAIYLGINAIDYSGYPDCRPEYLQAFQQLANLASKAGIEGNTPQLIAPLVNDSKADIVRRALKLNVPIADTWSCYQGGENPCGLCDSCRIRDQALIAVGRADLCSN

SEQ ID NO: 37402 - protein, 225 aa, Chromatiaceae bacterium
  misc_feature (1)..(225): tr|A0A3D4RWU2|A0A3D4RWU2_9GAMM 7-cyano-7-deazaguanine s ynthase OS=Chromatiaceae bacterium OX=2049432 GN=queC P E=3 SV=1
MHEQTKAVVLLSGGLDSATALAIAREQGLACHALSIDYGQRHRSELDAACRVASSVGAASHRIIKMDLGTIGGSALTDAHIAVPEVPTTGIPVTYVPARNTLLLALALGQAEVIGAARIVIGVNALDYSGYPDCRPEFIAAFQQLADLATKAGVEGHGPQINAPLIDLSKADIIRRGNQLGVDYSLTVSCYQADAQGRACGLCDSCRIRAAGFNAAGLPDPTRYR

SEQ ID NO: 37403 - protein, 208 aa, Chromatiales bacterium
  misc_feature (1)..(208): tr|A0A257SXF0|A0A257SXF0_9GAMM 7-cyano-7-deazaguanine s ynthase OS=Chromatiales bacterium 21-64-14 OX=1970504 G N=B7Z66_02235 PE=3 SV=1
MTDWSIILVSGGVESMTLLHREARRASVVPLFVDYGQRALEAERRTVRNQCRILDLEPVELDLSRVGRRFHGTALMRAHVPLPHRNMVLLSLGFSYGARIGARRIYLALNRADAHAYASAGTPFLDAFRHMIDILEPDLALCTPFIELHKAQVIQIGQSLGLDFARTYSCLLGHARHCGVCPQCCKRRDAFQAAGLAEPERFYRRTPG

SEQ ID NO: 37404 - protein, 228 aa, Chromatiales bacterium
  misc_feature (1)..(228): tr|A0A524KGZ6|A0A524KGZ6_9GAMM 7-cyano-7-deazaguanine s ynthase OS=Chromatiales bacterium OX=2026725 GN=queC PE =3 SV=1
MVTPESSLRAVVLLSGGMDSATCLALARRDGCTCHALSFDYGQRHRAELAAAVRVAGQLGAAEHRTVRIGLGDIGGSALTDPESAVPTSPGSGIPVTYVPARNTVFLSFALGFAEVLDADRIYAGMNAVDYSGYPDCRPAYLEAFQRLANLATRRGVEGRPITIHTPLLLMSKAQIVRTGTELGVDFGATVSCYQASPEGEACGKCDACRLRKSGFAAAGVADPTRYR

SEQ ID NO: 37405 - protein, 247 aa, Chromatium okenii
  misc_feature (1)..(247): tr|A0A2S7XPD6|A0A2S7XPD6_9GAMM 7-cyano-7-deazaguanine s ynthase OS=Chromatium okenii OX=61644 GN=queC PE=3 SV=1
MNNLVRKDLIVAQTPRGKQTSAVVLLSGGLDSATTLAIAKTEGFTPYALSFRYGQRHVIELAAASRVAAAQGVAEHVIAEIDLRRFGGSALTADLTVPKGRDTAAMSSGIPITYVPARNTVFLSFALAWAEVLGAEAIFIGVNALDYSGYPDCRPAYLAAFEQMANLATAAAVEGRAHFRVHAPLLELSKADIIRRGMALGVDYGLTCSCYDPDPAGRPCGQCDSCLLRARGFAEAGVSDPLLTAAF

SEQ ID NO: 37406 - protein, 229 aa, Chromatocurvus halotolerans
  misc_feature (1)..(229): tr|A0A4R2L400|A0A4R2L400_9GAMM 7-cyano-7-deazaguanine s ynthase OS=Chromatocurvus halotolerans OX=1132028 GN=qu eC PE=3 SV=1
MSDDARRAVILSSGGLDSTTVLAMARSEGYRCYTLSFDYGQRHRAELLAAKRVSEAFSDVEHKVVTLDLGSIGGSALTDTAIDVPEEETQGIPVTYVPARNTVFLAIALGWAEVLGAGDIFIGVNAVDYSGYPDCRPAFINAFERLANVATRAGVEGGGIRIHAPLLDLGKDAIIQRGLALHVDYALTVSCYQATDAGEACGRCESCRLRRQGFEAAGMPDPTRYRTND

SEQ ID NO: 37407 - protein, 233 aa, Chromatocurvus sp.
  misc_feature (1)..(233): tr|A0A2N5Y6N4|A0A2N5Y6N4_9GAMM 7-cyano-7-deazaguanine s ynthase OS=Chromatocurvus sp. F02 OX=1905677 GN=queC PE =3 SV=1
MHLDTEHNNAGKRAVILVSGGLDSTTVLAMARARGYRCYALSFDYGQRHRAELFAAERVCAALGDVEHKVVKLNLDSIGGSALTDTAIAVPEEETAGIPVTYVPARNTVFLSIALGWAEVLAADDIFIGVNAVDYSGYPDCRPEYVAAFQTMANLATRAGVEGQTLTIHTPLMHMGKGDIIRAGLALGVDYALTVSCYQATDDGLACGKCDACRLRREGFREAGVPDTTRYLS

SEQ ID NO: 37408 - protein, 233 aa, Chromobacterium amazonense
  misc_feature (1)..(233): tr|A0A2S9X326|A0A2S9X326_9NEIS 7-cyano-7-deazaguanine s ynthase OS=Chromobacterium amazonense OX=1382803 GN=que C PE=3 SV=1
MNQASEKALVVLSGGQDSTTCLYWALRRFGAGNVEAVTFDYGQRHRVELDCARKIAQLAGVRQTVLPIDTFAAIGGNALTDDAIAPEEGVRDDDALPNTFVPGRNLIFLTFAAAFAYTRGARHLVTGVAQTDYSGYPDCRENTLKALELALRLGMDSRVELHTPLMYLSKAETVTLAQQVGAMEALAWSHTCYNGKVPPCGHCASCELRAKGFAEAGVADPLVERCQAEVERL

SEQ ID NO: 37409 - protein, 232 aa, Chromobacterium haemolyticum
  misc_feature (1)..(232): tr|A0A1W0D3I2|A0A1W0D3I2_9NEIS 7-cyano-7-deazaguanine s ynthase OS=Chromobacterium haemolyticum OX=394935 GN=qu eC PE=3 SV=1
MNQTPEKALVVLSGGQDSTTCLYWALQTFGHGNVEAVTFDYGQRHRVELDCARKIAALAGVRQTVLPIDTFAAIGGNALTDADIAPEDGARDDDALPNTFVPGRNLIFLTFAAALAYTRGARHLVAGVAQTDYSGYPDCRENTLKALEVALRLGMDSRVELHAPLMYLSKAETVALAQQVGAMDALSWSHTCYNGQVPPCGHCASCELRAKGFAEAGVPDPLIVRCQTRRED

SEQ ID NO: 37410 - protein, 232 aa, Chromobacterium haemolyticum
  misc_feature (1)..(232): tr|A0A2T5NUC6|A0A2T5NUC6_9NEIS 7-cyano-7-deazaguanine s ynthase OS=Chromobacterium haemolyticum OX=394935 GN=qu eC PE=3 SV=1
MNQTPEKALVVLSGGQDSTTCLYWALQTFGHGNVETVTFDYGQRHRVELDCARKIAALAGVRQTVLPIDTFAAIGGNALTDADIAPEDGARDDDALPNTFVPGRNLIFLTFAAALAYTRGARHLVAGVAQTDYSGYPDCRENTLKALEVALRLGMDSRVELHVPLMYLSKAETVALAQQVGAMDALSWSHTCYNGQVPPCGHCASCELRAKGFAEAGVPDPLIVRCQTRRED

SEQ ID NO: 37411 - protein, 233 aa, Chromobacterium sp.
  misc_feature (1)..(233): tr|A0A2K4MPR0|A0A2K4MPR0_9NEIS 7-cyano-7-deazaguanine s ynthase OS=Chromobacterium sp. MWU13-2610 OX=2077146 GN =queC PE=3 SV=1
MNQASEKALVVLSGGQDSTTCLYWALRRFGAGNVEAVTFDYGQRHRVELDCARKIAQLAGVRQTVLPIDTFAAIGGNALTDDAIAPEDGVRDDDALPNTFVPGRNLIFLTFAAAFAYTRGARHLVTGVAQTDYSGYPDCRENTLKALELSLRLGMDSRVELHTPLMYLSKAETVTLAQQVGAMEALAWSHTCYNGEVPPCGHCASCELRAKGFAEAGVADPLVERCQAEAEGL

SEQ ID NO: 37412 - protein, 234 aa, Chromobacterium sp.
  misc_feature (1)..(234): tr|A0A344UG39|A0A344UG39_9NEIS 7-cyano-7-deazaguanine s ynthase OS=Chromobacterium sp. IIBBL 274-1 OX=2202142 G N=queC PE=3 SV=1
MNQETKEKALVVLSGGQDSTTCLYWALRRFGAGNVEAVTFDYGQRHRVELDCARKIAALAGVRQTILPIDTFAAIGGNALTDAGIAPEDGVREGDALPNTFVPGRNLVFLTFAAAFAYTLGSRHLVTGVAQTDYSGYPDCRENTLKALEVALRLGMDSRVELHAPLMYLSKAETVTLAQQVGALDALAWSHTCYNGEVPPCGRCASCELRAKGFAEAGVPDPLVERCRTEARGH

SEQ ID NO: 37413 - protein, 233 aa, Chromobacterium sphagni
  misc_feature (1)..(233): tr|A0A1S1X0S6|A0A1S1X0S6_9NEIS 7-cyano-7-deazaguanine s ynthase OS=Chromobacterium sphagni OX=1903179 GN=queC P E=3 SV=1
MNQASEKALVVLSGGQDSTTCLYWALRRFGAGNVEAVTFDYGQRHRVELECARKIAALAGVRQTVLPIDTFAAIGGNALTDDSIAPESGARDDDALPNTFVPGRNLVFLTFAAAFGYTRGARHLVAGVAQTDYSGYPDCRENTLKALEVALRLGMDSRVELHAPLMYLSKAETVTLAQQVGAMDALAWSHTCYNGEVPPCGRCASCELRAKGFAEVGVADPLVARCQAEAQGN

SEQ ID NO: 37414 - protein, 234 aa, Chromobacterium vaccinii
  misc_feature (1)..(234): tr|A0A1D9LFD3|A0A1D9LFD3_9NEIS 7-cyano-7-deazaguanine s ynthase OS=Chromobacterium vaccinii OX=1108595 GN=queC PE=3 SV=1
MNQASDEKALVVLSGGQDSTTCLYWALRRFGAGNVEAVTFDYGQRHRVELDCARKIAALACVRQTVLPIDTFAAIGGNALTDAGIAPEEGVRDDDALPNTFVPGRNLVFLTFAAAFAYTRGARHLVTGVAQTDYSGYPDCRENTLKALEVALRLGMDSRVELHTPLMYLSKAETVTLAQQVGALEALAWSHTCYNGEVPPCGHCASCELRARGFAEAGMPDPLVERCQAEAQGH

SEQ ID NO: 37415 - protein, 234 aa, Chromobacterium vaccinii
  misc_feature (1)..(234): tr|A0A2L2BFT0|A0A2L2BFT0_9NEIS 7-cyano-7-deazaguanine s ynthase OS=Chromobacterium vaccinii OX=1108595 GN=queC PE=3 SV=1
MNQASDEKALVVLSGGQDSTTCLYWALRRFGAGNVEAVTFDYGQRHRVELDCARKIAALAGVRQTVLPIDTFAAIGGNALTDAGIAPEEGVRDDDALPNTFVPGRNLVFLTFAAAFAYTRGARHLVTGVAQTDYSGYPDCRENTLKALEVALRLGMDSRVELHTPLMYLSKAETVTLAQQVGALEALAWSHTCYNGEVPPCGHCASCELRARGFAEAGMPDPLVERCQAEAQGH

SEQ ID NO: 37416 - protein, 234 aa, Chromobacterium violaceum
  misc_feature (1)..(234): sp|Q7NSB9|QUEC_CHRVO 7-cyano-7-deazaguanine synthase OS =Chromobacterium violaceum (strain ATCC 12472 / DSM 301 91 / JCM 1249 / NBRC 12614 / NCIMB 9131 / NCTC 9757) OX =243365 GN=queC PE=3 SV=1
MNQASDEKALVVLSGGQDSTTCLYWALRRFGAGKVEAVTFDYGQRHRVELDCARKIAALAGVRQTVLPIDTFAAIGGNALTDASIAPEEGVRDDDALPNTFVPGRNLVFLTFAAAFAYTRGARHLVTGVAQTDYSGYPDCRENTLKALEVALRLGMDSRVELHTPLMYLSKAETVTLAQQVGALEALAWSHTCYNGEVPPCGHCASCELRAKGFAEAGVPDPLVERCQAEAQGL

SEQ ID NO: 37417 - protein, 234 aa, Chromobacterium violaceum
  misc_feature (1)..(234): tr|A0A381FWF3|A0A381FWF3_CHRVL 7-cyano-7-deazaguanine s ynthase OS=Chromobacterium violaceum OX=536 GN=queC PE= 3 SV=1
MNQASDEKALVVLSGGQDSTTCLYWALRRFGAGNVEAVTFDYGQRHRVELDCARKIAALAGVRQTVLPIDTFAAIGGNALTDAGIAPEEGVRDDDALPNTFVPGRNLVFLTFAAAFAYTRGARHLVTGVAQTDYSGYPDCRENTLKALEVALRLGMDSRVELHTPLMYLSKAKTVTLAQQVGALEALAWSHTCYNGEVPPCGHCASCELRARGFAEAGMPDPLVERCQAEAQGH

SEQ ID NO: 37418 - protein, 206 aa, Chromohalobacter canadensis
  misc_feature (1)..(206): tr|A0A285VKX6|A0A285VKX6_9GAMM 7-cyano-7-deazaguanine s ynthase OS=Chromohalobacter canadensis OX=141389 GN=SAM N05421509_10438 PE=3 SV=1
MKKVLLLASGGLDSTTVGYQLAAAGVEVTPIFFDYGQHCVEIEWERVNEVLSPNMERPERFNISDIFRSSQSRLIREADLWTEEVKDDDLYIPYRTMLFFATAAARAQTVGVLDVYTGFINSNHAKEIDCSAAFMNGLDELTSSVGPVRFHSPFRYWSKAEVAVAAAELGVPIGRTYSCQAAAQFPCGACPNCVERLNALKETKLI

SEQ ID NO: 37419 - protein, 251 aa, Chromohalobacter canadensis
  misc_feature (1)..(251): tr|A0A285VVJ6|A0A285VVJ6_9GAMM 7-cyano-7-deazaguanine s ynthase OS=Chromohalobacter canadensis OX=141389 GN=que C PE=3 SV=1
MTDTPHHVPQPSSAEANAITALTTPDDTAKAVVIYSGGMDSYTVLHRALRAGFEVHALSFHYGQRHSRELETASRVCQQLGVAHQVVDIRAIHGLIGNSALTDATQTMPDGDYDADNMAATVVPNRNMILLSLAIGHAINIGANVCFYGAHGGDHVLYPDCRPEFVERVNDVAAIADFNPVRIAAPYLHASKHTILADGLSMGLDYAQTWTCYLGGEYACGQCGSCRERLAAFATQGIDDPLAYAAPEKMS

SEQ ID NO: 37420 - protein, 251 aa, Chromohalobacter japonicus
  misc_feature (1)..(251): tr|A0A1Q8TB05|A0A1Q8TB05_9GAMM 7-cyano-7-deazaguanine s ynthase OS=Chromohalobacter japonicus OX=223900 GN=queC PE=3 SV=1
MTDISRHAPHPSGAESNAITALTTPDDTAKAVVIYSGGMDSYTVLHRALRAGFEVHALSFHYGQRHSRELETASQVCQQLGIAHQVVDIRAIHGLIGNSALTDADRDMPGGDYDADNMAATVVPNRNMILLSLAIGHAINIGANVCFYGAHGGDHVLYPDCRPEFVERVNDVAAIADFNPVRVAAPYLYVSKHAILADGLAMGLDYAQTWTCYLGGENACGQCGSCRERLAAFAAQGVDDPLTYSAAEKMS

SEQ ID NO: 37421 - protein, 251 aa, Chromohalobacter marismortui
  misc_feature (1)..(251): tr|A0A4V3F3U7|A0A4V3F3U7_9GAMM 7-cyano-7-deazaguanine s ynthase OS=Chromohalobacter marismortui OX=42055 GN=que C PE=3 SV=1
MTDVTRHALRPPEAGAPAITALTTPDDTAKAVVIYSGGMDSYTVLHRALSAGFEVHALSFHYGQRHSRELEAARRVCQQLEVTHQVVDIRAIHGLIGNSALTDTQRDMPGGDYDADNMAATVVPNRNMILLSLAIGHAINIGANVCFYGAHGGDHVLYPDCRPEFVTGVNAVAALADFNPVRIAAPYLYASKHEILADGVSMGLDYAQTWTCYLGGQRACGQCGSCRERLAAFAAQEMADPLDYAEPEVTS

SEQ ID NO: 37422 - protein, 251 aa, Chromohalobacter salexigens
  misc_feature (1)..(251): sp|Q1QVW9|QUEC_CHRSD 7-cyano-7-deazaguanine synthase OS =Chromohalobacter salexigens (strain DSM 3043 / ATCC BA A-138 / NCIMB 13768) OX=290398 GN=queC PE=3 SV=1
MSDLPRHSPRRQHAGESAVTAITSPEDTTKAVVIYSGGMDSYTVLHRALRAGFEVHALSFHYGQRHSRELETAHDVCQRLGIAHQVVDIRAIHGLIGNSALTDATQTMPDGDYDADNMAATVVPNRNMILLSLAIGHAVNIGANVCFYGAHGGDHVLYPDCRPEFVERMNDVAAIADFTPVRIAAPYLHASKEEILADGLAMGLDYAQTWTCYLGAERSCGHCGSCRERLAAFAAQGVTDPLVYAGAGASD

SEQ ID NO: 37423 - protein, 251 aa, Chromohalobacter salexigens
  misc_feature (1)..(251): tr|A0A317QY25|A0A317QY25_CHRSL 7-cyano-7-deazaguanine s ynthase OS=Chromohalobacter salexigens OX=158080 GN=que C PE=3 SV=1
MSDLPRHSPRRQHAGESAVTAITSPEDTTKAVVIYSGGMDSYTVLHRALRAGFEVHALSFHYGQRHSRELETAHDVCQRLGIAHQVVDIRAIHGLIGNSALTDATQTMPDGDYDADNMAATVVPNRNMILLSLAIGHAVNIGANVCFYGAHGGDHVLYPDCRPEFVERMNDVAAIADFTPVRIAAPYLHASKEEILADGLAMGLDYAQTWTCYLGAERSCGHCGSCRERLAAFAAQGVTDPLVYADAGASD

SEQ ID NO: 37424 - protein, 84 aa, Chroococcidiopsis cubana
  misc_feature (1)..(84): tr|A0A433VC89|A0A433VC89_9CYAN 7-cyano-7-deazaguanine s ynthase OS=Chroococcidiopsis cubana SAG 39.79 OX=388085 GN=DSM107010_60050 PE=3 SV=1
MQEVFRLGTKQGREGNAIAIVAPLIQLKKTEIIQLGDRLGVPWEKTWSCYAGDELACGVCDSCRLRLAAFAALGLEDPLPYRRE

SEQ ID NO: 37425 - protein, 229 aa, Chroococcidiopsis sp.
  misc_feature (1)..(229): tr|A0A2P8QTE9|A0A2P8QTE9_9CYAN 7-cyano-7-deazaguanine s ynthase OS=Chroococcidiopsis sp. CCALA 051 OX=869949 GN =queC PE=3 SV=1
MTNDKAVILLSGGLDSSTVLYQARADGYDCYAISFDYQQRHRRELEAAKTIARSAEVADHKLISFDLRQWGGSALTDSSINLPQARSLDEMAQNIPVTYVPARNTIFLSFALAYAETLNASRVYIGVNALDYSGYPDCRPDYIQAMQEVFRLGTKQGREGNAIAIVAPLIQLKKTEIIQLGDRLGVPWEKTWSCYAGDELACGVCDSCRLRLAAFAALGLEDPLPYRRE

SEQ ID NO: 37426 - protein, 228 aa, Chroococcidiopsis sp.
  misc_feature (1)..(228): tr|A0A2S6V4G9|A0A2S6V4G9_9CYAN 7-cyano-7-deazaguanine s ynthase OS=Chroococcidiopsis sp. TS-821 OX=1378066 GN=q ueC PE=3 SV=1
MKAVILLSGGLDSSTVLYQAVADGYKCYAISFDYQQRHQRELKAAIAIAQSTQVLVHKVIDFDLRSWGGSALTDTSIELPSNRAVSEMAQNVPVTYVPARNTIFLSFALAYAETIAAQRVYIGVNALDYSGYPDCRPDYIQAMQEVFRLGTKQGREGQPITIETPLINLKKTEIIQLGNQLGVPWEKTWSCYAGGAIACGVCDACRLRLAAFAELGLEDPMPYRTRTS

SEQ ID NO: 37427 - protein, 229 aa, Chroococcidiopsis thermalis; identical to SEQ ID NO: 37425
  misc_feature (1)..(229): tr|K9TWR1|K9TWR1_CHRTP 7-cyano-7-deazaguanine synthase OS=Chroococcidiopsis thermalis (strain PCC 7203) OX=251 229 GN=queC PE=3 SV=1

SEQ ID NO: 37428 - protein, 227 aa, Chroogloeocystis siderophila
  misc_feature (1)..(227): tr|A0A1U7HFU3|A0A1U7HFU3_9CHRO 7-cyano-7-deazaguanine s ynthase OS=Chroogloeocystis siderophila 5.2 s.c.1 OX=24 7279 GN=queC PE=3 SV=1
MKAVILLSGGLDSSTVLYQAVADGYKCYAISFDYQQRHQRELKAAIAIAQSTQVLVHKVVNFDLRSWGGSALTDTSIELPSDRAVSEMSQNVPVTYVPARNTIFLSFALAYAETIAAQRVYIGVNALDYSGYPDCRPDYIQAMQEVFRLGTKLGREGQPITIETPLINLKKTEIIQLGNQLGVPWEKTWSCYAGGAIACGVCDACRLRLAAFAELGLEDPIPYRTRM

SEQ ID NO: 37429 - protein, 210 aa, Chryseobacterium lactis
  misc_feature (1)..(210): tr|A0A3G6RVY7|A0A3G6RVY7_9FLAO 7-cyano-7-deazaguanine s ynthase OS=Chryseobacterium lactis OX=1241981 GN=EG341_ 12540 PE=3 SV=1
MNLNEGVILVSGGLDSTTLCYLFIKNNINFTPLIINYGQHCFDKELQSLKVVLPEKHLNDLEIIDISDIYKFSNSKFINPANLWEDNITADDLYIPYRNVLLLTAAASFARTLNYNSVYSAFINSNHAKEIDCSNEFFNNLESLLSEYGSVKIEMPFRNLSKFEVAKLGIELNAPIGKTFSCQASPIIPCGACPNCVDRLDALKRIKDEL

SEQ ID NO: 37430 - protein, 208 aa, Chryseobacterium shandongense
  misc_feature (1)..(208): tr|A0A3G6R1U2|A0A3G6R1U2_9FLAO 7-cyano-7-deazaguanine s ynthase OS=Chryseobacterium shandongense OX=1493872 GN= EG353_17645 PE=3 SV=1
MNLKKGVILVSGGLDSTTLCYLFIKEKIEFVPLIINYGQHCFETELERLKDVLPSQYLDKLEIIDISEVYKYSTSKFIQPVNLWEEKISADDLYIPYRNVLILTVAASFARTLDFNYVYSAFINSNHAKEIDCSNDFFNNLENLLSDYGSVKIEMPFRNFSKFDVAKLGVELGAPIGRTFSCQASPVIPCGACPNCVDRLDALKKLVE

SEQ ID NO: 37431 - protein, 199 aa, Chryseobacterium shandongense
  misc_feature (1)..(199): tr|A0A3G6MU98|A0A3G6MU98_9FLAO 7-cyano-7-deazaguanine s ynthase OS=Chryseobacterium shandongense OX=1493872 GN= EG350_11160 PE=3 SV=1
MEFVKKAVLLSGGIDSICLTYGIRPSIAYTVDYGQVVAEREIYVSTYICKSLNIEHKVIKVDCKNLGSGDLANQQSLDLSPSAEWWPYRNQLIITLSLMQAIKDNVSELHLATVKSDGFHTDGTHEFYKLINELSTYQEGNIKVLCETIDFYSHELAEKYNVPLNLLTLAHSCHKSNIACGTCSGCIKQQRVRYELKIE

SEQ ID NO: 37432 - protein, 241 aa, Chryseobacterium sp.
  misc_feature (1)..(241): tr|A0A2R7NLW5|A0A2R7NLW5_9FLAO 7-cyano-7-deazaguanine s ynthase OS=Chryseobacterium sp. HMWF028 OX=2056862 GN=D BR28_12665 PE=3 SV=1
MKRETILVLSGGIDSVTMAHMLVNAGNNCRAVYLDYGKSISQRELAAAKHFSYHLDIPLEIIDAHGMTKLQLGYLPWTRILADEADIKDFEISTSKLSKEQEERLSKYPVVSSNWSRVTGIHHLISVASYFAQITNATQIALGLTKEQFVAFPGLKLALEKWCELLELLNPEKGSFKVLTPLIDMTKSEIIKLALDLEIPIEATWSCFYSTDYHCGKCTRCNERKSAFKTLGIDDPTEYGA

SEQ ID NO: 37433 - protein, 252 aa, Chryseobacterium sp.
  misc_feature (1)..(252): tr|A0A2G7T9M4|A0A2G7T9M4_9FLAO 7-cyano-7-deazaguanine s ynthase OS=Chryseobacterium sp. B5 OX=2050562 GN=queC P E=3 SV=1
MRAMQNDSSSPQAPAARHTAALVLFSGGQDSTTCLAQALSLYERVETLGFDYGQRHSVEMQVRQQVRERLSRDFPQWAPRLGDDHVLSLDVLQQIGGSSLTEDVAFAMQADGLPNTFVPGRNLLFLTLAGALAYRRGLSVIVTGVCETDYSGYPDCRDDTMKAMQLALNLGLERRLRIETPLMWIDKAQTWQMAHDLGGDTLVDLIQRDTHTCYQGTRETLHDWGYGCGTCPACDLRARGWHQWQAQRETAN

SEQ ID NO: 37434 - protein, 762 aa, Chryseolinea flava
  misc_feature (1)..(762): tr|A0A364Y6X5|A0A364Y6X5_9BACT Glycos_transf_1 domain-c ontaining protein OS=Chryseolinea flava OX=2059302 GN=D QQ10_00655 PE=4 SV=1
MKKILYFSRVFESTSFIGSQVTEVSDTHTCYYACFDIDRPKALEISNVKVIKLSEQKQGRWQRLKTKLELSDLYLNLYDARTASEIERVVLDVNPDIIHCQYGYDALIMLDNFYRDDRKYVITFRGFDASLLLILSKYRDKLNYYLSKPNVYPVFVCHALMYNLQEKSIALNPVRAVVYSNTNTEFYTRKTYKATREKIVFTQISNFREKKGHRYTLEAFEKFAEQYPEVNFEVNFAGGIDAQAQVFIDRAKKGPIADRINFPGKVSPGEILALLEQTDVFVHNSITSDHNDQEGIPNAIMEAMSMELPIVATYHSGIRELIGGNEEVFLSPEKNIAAYVEAIHKASTVGYSKRNRDRIVTAFSKETFERNILGFYQRVLNDGERVYQQCVNCVLNTNDDPAIIFDITGICNHCQAYRIVEFKYVRRDAVAEKYLTELVDTIKEKGKDKPYDCILGLSGGVDSTYLAYIAKKLGLRPLAVHFDNGWNSELAVGNIERIVTKLNIPLQTFVVDWEEFRDIQLAVLKASVVDIEMVTDHAIITKLYDLALEHSIDYVLSGTNIVTEAILPSTWIHSKKDHVNIRNIHRQFGKVPMKTYPLFTSARKLRVVWAGIQSVALLDSLPYEKKAVKKLITEELGWRDYGGKHYESIFTRFYQGYILPKKFGIDKRRAHLSNLICSRQLTRDEALEELKAAPYPEALFKSDYDFVLKKLNLSEKEFTEIMNLPVKPHSFYGVEPSFYDRFPVIKFVRPMWLLLKRLRGVS

SEQ ID NO: 37435 - protein, 154 aa, Chrysiogenales bacterium
  misc_feature (1)..(154): tr|A0A524JUL3|A0A524JUL3_9BACT 7-cyano-7-deazaguanine s ynthase (Fragment) OS=Chrysiogenales bacterium OX=25280 39 GN=E4H23_08145 PE=3 SV=1
SIPESLAASRKEPGVPSTYVPFRNGIFLALAAACAESHASRNLVTGFNAIDSPDYPDTTVQFSRKMAAAINQGTAAGKSGRGFKVHTPLIALSKKEIIAMGIELGADYAYSISCYRGAELPCGRCPACDIRARAFAELGRQDPLLARLQKEGKT

SEQ ID NO: 37436 - protein, 126 aa, Chrysiogenales bacterium
  misc_feature (1)..(126): tr|A0A524Q3H2|A0A524Q3H2_9BACT 7-cyano-7-deazaguanine s ynthase (Fragment) OS=Chrysiogenales bacterium OX=25280 39 GN=E4G96_03530 PE=3 SV=1
MADKAVILLSGGIDSATTAAIAAARGLDLTAIIFSYGQKHSIEIRSAKRLTQSFAIRDYIVIDIPVGIFNSALTDRKRAVPKRRDDGKEIPDTYVPARNILFLSYALAFAESIGARRIFIGANAVD

SEQ ID NO: 37437 - protein, 232 aa, Chthoniobacter flavus
  misc_feature (1)..(232): tr|B4D1V5|B4D1V5_9BACT 7-cyano-7-deazaguanine synthase OS=Chthoniobacter flavus Ellin428 OX=497964 GN=queC PE= 3 SV=1
MSRSKVVVLVSGGMDSVAALYHTQAEHPVVGALSFDYGSKHNHKEIPLAAYHCERLGVPHRVIPLSFINELFASDLLQSGGAIPDGHYEELTMKQTVVPFRNGIMLSIAGGYAESVGAQGLIIAAHAGDHAIYPDCREAFMQAMGEAIRLGTYAEIQLLRPFIHFSKAQIAARGHELGVDFAKTWSCYKGQEIHCGTCGTCVERREAFAVAGIPDPTVYASVAPLPAKPVTS

SEQ ID NO: 37438 - protein, 230 aa, Chthoniobacterales bacterium
  misc_feature (1)..(230): tr|A0A2W6AFR6|A0A2W6AFR6_9BACT 7-cyano-7-deazaguanine s ynthase OS=Chthoniobacterales bacterium OX=2201154 GN=q ueC PE=3 SV=1
MQRAIVLLSGGLDSATTLALARQQAYAVHALSFEYGQRHGVEIAAAKKIAQQLGAIEHRILKIDLRSFGGSALTDTIAVPKNRSAGEIEREIAITYVPARNTIFLSYALAWAEVTGARDIFIGVNAIDYSGYPDCRPEFIAQFERLANVATKAGVSCDRIRIHAPLIEMTKAQIIGKGAELGVDFSLTHSCYDPAANGDACGECDSCLLRKKGFADAGACDPTRYADQLS

SEQ ID NO: 37439 - protein, 225 aa, Chthoniobacterales bacterium
  misc_feature (1)..(225): tr|A0A2W5YE73|A0A2W5YE73_9BACT 7-cyano-7-deazaguanine s ynthase OS=Chthoniobacterales bacterium OX=2201154 GN=q ueC PE=3 SV=1
MKRAVVLLSGGLDSATTLALCLREGFESYALSFDYGQRHDVEILAARRVASSLGAREHRVAKIDLRVFGGSALTDEIPVPKNRTDQPGIPVTYVPARNTIFLSYALAWCEVLGAADIFIGVNAIDYSGYPDCRPAFISAFEELSTVATKAGVEGTRFRIHAPLLEMSKAKIIQKGSELGVDFSLTHSCYDPTPDLLACGECDSCRLRLEGFRAAGLVDPIRYAAK

SEQ ID NO: 37440 - protein, 229 aa, Chthonomonas calidirosea
  misc_feature (1)..(229): tr|S0EWZ4|S0EWZ4_CHTCT 7-cyano-7-deazaguanine synthase OS=Chthonomonas calidirosea (strain DSM 23976 / ICMP 18 418 / T49) OX=1303518 GN=queC PE=3 SV=1
MKAVVLVSGGMDSCVTAAIARKEHEAEELHFLHVNYGQRTEKRELKAFHDIADFYGVPAERRLVCSIAHLSQIGGSSLTDPSIPVSEADLDNPGIPTSYVPFRNAHFLSIAVSWAEVCGAKRIYIGAVYEDSSGYPDCRPEYYAAFNELIRLGTACGDIRVETPIIGLTKAQIVQRGLELGAPFHLTWSCYRNEEVACGTCDSCALRLRGFEVAGVPDPLPYVVRPHYG

SEQ ID NO: 37441 - protein, 236 aa, Ciceribacter sp.
  misc_feature (1)..(236): tr|A0A4Q2TG97|A0A4Q2TG97_9RHIZ 7-cyano-7-deazaguanine s ynthase OS=Ciceribacter sp. F8825 OX=2509717 GN=queC PE =3 SV=1
MKTIVVCSGGLDSVSLAHRIAAEHELLALISFDYGQRHKKELDYAADCAARLGVPHEIIDISAVGRHLSGFALTDTIDVPDGHYAEDTMKVTVVPNRNAIMLAIAFGVAAARNADAVAVAVHGGDHFIYPDCRPGFIDAFQVMQDAALDGYAAVRLFAPYVNASKADIVADGARHGTPFERTWSCYKGGERHCGRCGTCVERREAFHLAGVSDPTGYEDPDFWAAATGAFSAEEVR

SEQ ID NO: 37442 - protein, 195 aa, Citreicella sp.
  misc_feature (1)..(195): tr|I1B2T7|I1B2T7_9RHOB 7-cyano-7-deazaguanine synthase OS=Citreicella sp. 357 OX=766499 GN=C357_00349 PE=3 SV= 1
MRVLLFSGGVESTALAYMLRPDVLFTIDYGQAPAQGELRAATFIAKELGLNHETLSVDCSPLGAGDMAGRPIAGHSRVSEAWPFRNQLLVTLAAMKFAGEGLKDILIGTVVSDRVHADGSPEFVERLDMLIKCELPKTSVTAPALNMSTLELVKRSQVPMDILGWSFSCHRSTVACGQCRGCNKTIDLWEALERS

SEQ ID NO: 37443 - protein, 233 aa, Citreicella sp.
  misc_feature (1)..(233): tr|D0DDU0|D0DDU0_9RHOB 7-cyano-7-deazaguanine synthase OS=Citreicella sp. SE45 OX=501479 GN=queC PE=3 SV=1
MKTLVICSGGLDSVSLAHIIADQHRLTRLVSFDYGQRHRKELDFAAAAARRLNVPHHLIDMRGIGASLSGSALTDDIDVPDGHYAEETMRITVVPNRNAIMLAIGFGVAAANGDEAVATAVHGGDHFIYPDCRPAFTQAFDAMQQAALDGYASVRLHTPFVERSKADIVRAGAAHGTPFAETWSCYKGGEVHCGRCGTCVERREAFHLAGVGDPTAYADPDYWAQAVAARGTA

SEQ ID NO: 37444 - protein, 231 aa, Citrobacter amalonaticus
  misc_feature (1)..(231): tr|A0A2S4S0E8|A0A2S4S0E8_CITAM 7-cyano-7-deazaguanine s ynthase OS=Citrobacter amalonaticus OX=35703 GN=queC PE =3 SV=1
MKRAVVVFSGGQDSTTCLVQALHQYDEVHCVTFDYGQRHRAEIDVARDLALQLGARAHKVLDVTLLNELAVSSLTRDSIPVPDYEPNADGIPNTFVPGRNILFLTLAAIYAYQVKAGAVITGVCETDFSGYPDCRDEFVKALNHAVNLGMAKEIRFETPLMWIDKAETWALADYWGKLELVRQETLTCYNGIKGDGCGHCAACNLRANGLNHYLADKPAVMAAMKQKTGLQ

SEQ ID NO: 37445 - protein, 231 aa, Citrobacter amalonaticus
  misc_feature (1)..(231): tr|A0A109YZY8|A0A109YZY8_CITAM 7-cyano-7-deazaguanine s ynthase OS=Citrobacter amalonaticus OX=35703 GN=queC PE =3 SV=1
MKRAVVVFSGGQDSTTCLVQALHQYDEVHCVTFDYGQRHRAEIDVARDLALKLGARAHKVLDVTLLSELAVSSLTRDNIPVPDYEPDADGIPNTFVPGRNILFLTLAAIYAYQVKAEAVITGVCETDFSGYPDCRNDFVEALNHAIKLGMAKDIRFETPLMWIDKAETWALADYWGKLDLVREETLTCYNGIKGDGCGHCAACNLRANGLNHYLADKPVIMAAMKQKTGLK

SEQ ID NO: 37446 - protein, 231 aa, Citrobacter braakii
  misc_feature (1)..(231): tr|A0A1R0G0I1|A0A1R0G0I1_CITBR 7-cyano-7-deazaguanine s ynthase OS=Citrobacter braakii OX=57706 GN=queC PE=3 SV =1
MKRAVVVFSGGQDSTTCLAQALHQYDEVHCVTFDYGQRHRAEIDVARDLALKLGARAHKVLDVTLLSELAVSSLTRDNIPVPDYEPDANGIPNTFVPGRNILFLTLAAIYAYQVQAEAVITGVCETDFSGYPDCRDEFVKALNHAVSLGMAKDIRFETPLMWIDKAETWALADYWGKLDLVREETLTCYNGIKGDGCGHCAACNLRANGLNHYLADKPAVMAAMKQKTGLK

SEQ ID NO: 37447 - protein, 434 aa, Citrobacter braakii
  misc_feature (1)..(434): tr|A0A4R0MCC9|A0A4R0MCC9_CITBR DNA-binding protein OS=C itrobacter braakii OX=57706 GN=EY915_05440 PE=4 SV=1
MTQLVFHHEHRLLPRASENLLPVQLYGLSGQGRGDISIIGNPAIDRIKRLGVKIPAQVMDFLSIALAVTAADTFVQRESSEDGWTRQLSLRLPLHEPSRWIALKKELESALHFLSGDIWDFEFCNGGYAPPEPYSQHSRFHLIKLKELDCVSLFSGGLDSAIGAIDLLTLGRAPLLVSHAYKGDKSRQDQIAERLNGRYSRFEINADPHLYQGVTDITMRTRSLNFLAFAAVGACAVQEVSQQKKVDLFVPENGFISLNAPLTPRRIGTLSTRTTHPYFISSIQQLFDAVGIPCQVINPYQFKTKGQMVSQCLNKQLLSDVVESTVSCSHWKRTDQQCGVCVPCIIRRASLHAGGISRDADYTFQSLAKVMKEIDRRDDLIALRIAIAQRSTSRIGTWIAKSGPLPVAAFNDFKQVFLDGLNEVENYLMSEGIV

SEQ ID NO: 37448 - protein, 231 aa, Citrobacter farmeri
  misc_feature (1)..(231): tr|A0A223JNI8|A0A223JNI8_9ENTR 7-cyano-7-deazaguanine s ynthase OS=Citrobacter farmeri OX=67824 GN=queC PE=3 SV =1
MKRAVVVFSGGQDSTTCLVQALHQYDEVHCVTFDYGQRHRAEIDIARDLALKLGARAHKVLDVTLLSELAVSSLTRDNIPVPDYEPDADGIPNTFVPGRNILFLTLAAIYAYQVKAEAVITGVCETDFSGYPDCRNDFVEALNHAIKLGMAKDICFETPLMWIDKAETWALADYWGKLDLVREETLTCYNGIKGDGCGHCAACNLRANGLNHYLADKSSVMAAMKQKTGLK

SEQ ID NO: 37449 - protein, 200 aa, Citrobacter freundii
  misc_feature (1)..(200): tr|A0A256DUA7|A0A256DUA7_CITFR 7-cyano-7-deazaguanine s ynthase OS=Citrobacter freundii OX=546 GN=B9P90_20085 P E=3 SV=1
MSIVTLVSGGLDSTLVAKLAQEEGLQIFPLFIDYGQRARNRELAACKLSMSTLGLPEPEIANLAGFGQLIHSGLTDKSLHVINDAFTPGRNLLFLLTAAAYAYQKNADAISIGLLHESTSLFPDQTSEFLSRAEIMISLCMGRKIKVLAPLSIFTKPDVVMLANEKGISNTYSCHIGNEKPCGNCISCNEFKFEDMNNGR

SEQ ID NO: 37450 - protein, 231 aa, Citrobacter freundii
  misc_feature (1)..(231): tr|A0A0D7LP22|A0A0D7LP22_CITFR 7-cyano-7-deazaguanine s ynthase OS=Citrobacter freundii OX=546 GN=queC PE=3 SV= 1
MKRAVVVFSGGQDSTTCLAQALHQYDEVHCVTFDYGQRHRAEIDVARDLALKLGARAHKVLDVTLLSELAVSSLTRDNIPVPDYEPDANGIPNTFVPGRNILFLTLAAIYAYQVQAEAVITGVCETDFSGYPDCRDEFVKALNHAVSLGMAKDIRFETPLMWIDKAETWALADYWGKLDLVREETLTCYNGIKGDGCGHCAACNLRANGLNHYLADKPGVMAAMKQKTGLK

SEQ ID NO: 37451 - protein, 231 aa, Citrobacter gillenii
  misc_feature (1)..(231): tr|A0A3E2KX10|A0A3E2KX10_9ENTR 7-cyano-7-deazaguanine s ynthase OS=Citrobacter gillenii OX=67828 GN=queC PE=3 S V=1
MKRAVVVFSGGQDSTTCLAQALHQYDEVHCVTFDYGQRHRAEIDVARDLALKLGARAHKVLDVTLLSELAVSSLTRDNIPVPDYEPEANGIPNTFVPGRNILFLTLTAIYAYQVQAEAVITGVCETDFSGYPDCRDEFVKALNHAVSLGMAKDIRFETPLMWLDKAETWALADYWGKLDLVREETLTCYNGVKGDGCGQCAACNLRANGLKHYLADKPAVMAAMKQKTGLK

SEQ ID NO: 37452 - protein, 231 aa, Citrobacter koseri
  misc_feature (1)..(231): tr|A0A427PHY5|A0A427PHY5_CITKO 7-cyano-7-deazaguanine s ynthase OS=Citrobacter koseri OX=545 GN=queC PE=3 SV=1
MKRAVVVFSGGQDSTTCLAQALRQYDEVHCVTFDYGQRHRAEIDVARNLALKLGARAHKVLDVTLLSELAVSSLTRDNIPVPDYEPDADGIPNTFVPGRNILFLTLAAIYAYQVKAEAVITGVCETDFSGYPDCRDEFVKALNHAVTLGMAKDIRFETPLMWIDKAETWALADYWGKLDLVREETLTCYNGIKGDGCGQCAACNLRANGLNHYLTDKPAVMAAMKQKTGLK

SEQ ID NO: 37453 - protein, 231 aa, Citrobacter koseri
  misc_feature (1)..(231): sp|A8AK09|QUEC_CITK8 7-cyano-7-deazaguanine synthase OS =Citrobacter koseri (strain ATCC BAA-895 / CDC 4225-83 / SGSC4696) OX=290338 GN=queC PE=3 SV=1
MKRAVVVFSGGQDSTTCLAQALHQYDEVHCVTFDYGQRHRAEIDVARDLALKLGARAHKVLDVTLLSELAVSSLTRDNIPVPDYEPDADGIPNTFVPGRNILFLTLAAIYAYQVKAEAVITGVCETDFSGYPDCRDEFVKALNHAVTLGMAKDIRFETPLMWIDKAETWALADYWGKLDLVREETLTCYNGIKGDGCGQCAACNLRANGLNHYLADKPAVMAAMKQKTGLK

SEQ ID NO: 37454 - protein, 231 aa, Citrobacter murliniae
  misc_feature (1)..(231): tr|A0A4S3RWH5|A0A4S3RWH5_9ENTR 7-cyano-7-deazaguanine s ynthase OS=Citrobacter murliniae OX=67829 GN=queC PE=3 SV=1
MKRAVVVFSGGQDSTTCLAQALHQYDEVHCVTFDYGQRHRAEIDVARDLALKLGARAHKVLDVTLLSELAVSSLTRDNIPVPDYEPDADGIPNTFVPGRNILFLTLAAIYAYQVKAEAVITGVCETDFSGYPDCRDEFVKALNHAVSLGMAKDIRFETPLMWIDKAETWALADYWGKLDLVRNETLTCYNGIKGDGCGHCAACNLRANGLNHYLADKSEIMAAMKRKTGLK

SEQ ID NO: 37455 - protein, 201 aa, Citrobacter murliniae
  misc_feature (1)..(201): tr|A0A4S3RCR1|A0A4S3RCR1_9ENTR 7-cyano-7-deazaguanine s ynthase OS=Citrobacter murliniae OX=67829 GN=DJ535_2184 5 PE=3 SV=1
MKTALLLSGGMDSIAIAWWKRPDIALTLDYGQQAANAEIKAATATCETLGIEHHIIRIDCRSLGSGDMAGTATDPNAPSSDWWPYRNQMLISLAAMKAITLGVTHLWIGTVKSDETHLDGTIGFISRISELMSFQEGGMVVEAPAITLSTSELIRISDVTPGGLAWAHSCHKANIPCGNCRGCNKYFQVLDDVGYDLDRSR

SEQ ID NO: 37456 - protein, 231 aa, Citrobacter pasteurii; identical to SEQ ID NO: 37446
  misc_feature (1)..(231): tr|A0A0A1RYH8|A0A0A1RYH8_9ENTR 7-cyano-7-deazaguanine s ynthase OS=Citrobacter pasteurii OX=1563222 GN=queC PE= 3 SV=1

SEQ ID NO: 37457 - protein, 231 aa, Citrobacter portucalensis; identical to SEQ ID NO: 37446
  misc_feature (1)..(231): tr|A0A4P7UN10|A0A4P7UN10_9ENTR 7-cyano-7-deazaguanine s ynthase OS=Citrobacter portucalensis OX=1639133 GN=queC PE=3 SV=1

SEQ ID NO: 37458 - protein, 231 aa, Citrobacter portucalensis
  misc_feature (1)..(231): tr|A0A5A9EH07|A0A5A9EH07_9ENTR 7-cyano-7-deazaguanine s ynthase OS=Citrobacter portucalensis OX=1639133 GN=queC PE=3 SV=1
MKRAVVVFSGGQDSTTCLAQALHQYDEVHCVTFDYGQRHRAEIDVARDLALKLGARAHKVLDVTLLSELAVSSLTRDNIPVPDYEPDANGIPNTFVPGRNILFLTLAAIYAYQVQAEAVITGVCETDFSGYPDCRDKFVKALNHAVSLGMAKDIRFETPLMWIDKAETWALADYWGKLDLVREETLTCYNGIKGDGCGHCAACNLRANGLNHYLADKPAVMAAMKQKTGLK

SEQ ID NO: 37459 - protein, 231 aa, Citrobacter rodentium
  misc_feature (1)..(231): tr|A0A482PV69|A0A482PV69_CITRO 7-cyano-7-deazaguanine s ynthase OS=Citrobacter rodentium OX=67825 GN=queC PE=3 SV=1
MKRAVVVFSGGQDSTTCLVQALHQYDEVHCVTFDYGQRHRAEIDVARELALKLGARAHKVLDVTLLSELAVSSLTRDNIPVPDYEPDADGIPNTFVPGRNILFLTLAAIYAYQVKAQAVITGVCETDFSGYPDCRDEFVKALNHAVTLGMAKEIRFETPLMWLDKAETWALADYWGELERVREETLTCYNGIKGDGCGQCAACNLRANGLNHYLADKPAVMAAMKQKTGLQ

SEQ ID NO: 37460 - protein, 231 aa, Citrobacter sp.; identical to SEQ ID NO: 37445
  misc_feature (1)..(231): tr|A0A3Q8D7G6|A0A3Q8D7G6_9ENTR 7-cyano-7-deazaguanine s ynthase OS=Citrobacter sp. CFNIH10 OX=1920110 GN=queC P E=3 SV=1

SEQ ID NO: 37461 - protein, 231 aa, Citrobacter sp.
  misc_feature (1)..(231): tr|A0A4P6WKQ7|A0A4P6WKQ7_9ENTR 7-cyano-7-deazaguanine s ynthase OS=Citrobacter sp. LY-1 OX=2546350 GN=queC PE=3 SV=1
MKRAVVVFSGGQDSTTCLTQALHQYDEVHCVTFDYGQRHRAEIDVARDLALKLGARAHKVLDVTLLSELAVSSLTRDNIPVPDYEPDANGIPNTFVPGRNILFLTLAAIYAYQVQAEAVITGVCETDFSGYPDCRDEFVKALNHAVSLGMAKDIRFETPLMWIDKAETWALADYWGKLDLVRKETLTCYNGIKGDGCGHCAACNLRANGLNHYLADKPAVMAAMKQKTGLK

SEQ ID NO: 37462 - protein, 231 aa, Citrobacter werkmanii; identical to SEQ ID NO: 37446
  misc_feature (1)..(231): tr|A0A090TY87|A0A090TY87_9ENTR 7-cyano-7-deazaguanine s ynthase OS=Citrobacter werkmanii NBRC 105721 OX=1114921 GN=queC PE=3 SV=1

SEQ ID NO: 37463 - protein, 231 aa, Citrobacter werkmanii
  misc_feature (1)..(231): tr|A0A422V5V1|A0A422V5V1_9ENTR 7-cyano-7-deazaguanine s ynthase OS=Citrobacter werkmanii OX=67827 GN=queC PE=3 SV=1
MKRAVVVFSGGQDSTTCLAQALHQYDEVHCVTFDYGQRHRAEIDVARDLALKLGARAHKVLDVTLLSELAVSSLTRDNIPVPDYEPDANGIPNTFVPGRNILFLTLAAIYAYQVQAEAVITGVCETDFSGYPDCRDEFVKALNHAVSLGMAKDIRFETPLMWIDKAETWALADYWGKLDLVREETLTCYNGIKGDGCGHCAACNLRANGLNHYLADKPAVMTAMKQKTGLK

SEQ ID NO: 37464 - protein, 231 aa, Citrobacter youngae
  misc_feature (1)..(231): tr|D4BD14|D4BD14_9ENTR 7-cyano-7-deazaguanine synthase OS=Citrobacter youngae ATCC 29220 OX=500640 GN=queC PE= 3 SV=1
MKRAVVVFSGGQDSTTCLAQALHQYDEVHCVTFDYGQRHRAEIDVARDLALKLGARAHKVLDVTLLSELAVSSLTRDNIPVPDYEPDANGIPNTFVPGRNILFLTLAAIYAYQVQAEAVITGVCETDFSGYPDCRDEFVKALNHAVSLGMAKDIRFETPLMWIDKAETWALADYWGKLDLVRAETLTCYNGIKGDGCGHCAACNLRANGLNHYLADKPAVMAAMKQKTGLK

SEQ ID NO: 37465 - protein, 231 aa, Citrobacter youngae
  misc_feature (1)..(231): tr|A0A549VAM4|A0A549VAM4_9ENTR 7-cyano-7-deazaguanine s ynthase OS=Citrobacter youngae OX=133448 GN=queC PE=3 S V=1
MKRAVVVFSGGQDSTTCLAQALHQYDEVHCVTFDYGQRHRAEIDVARDLALKLDARAHKVLDVTLLSELAVSSLTRDNIPVPDYEPDANGIPNTFVPGRNILFLTLAAIYAYQVQAEAVITGVCETDFSGYPDCRDEFVKALNHAVSLGMAKDIRFETPLMWIDKAETWALADYWGKLDLVREETLTCYNGIKGDGCGHCAACNLRANGLNHYLADKPAVMAAMKQKTGLK

SEQ ID NO: 37466 - protein, 231 aa, Citromicrobium sp.
  misc_feature (1)..(231): tr|A0A2P0AX22|A0A2P0AX22_9SPHN 7-cyano-7-deazaguanine s ynthase OS=Citromicrobium sp. RCC1897 OX=1812182 GN=que C PE=3 SV=1
MTGTNPDNVAAALLSGGLDSMVAAALARERGHEVHALTIDYGQRHVREIEAARKIAKALGLASHREITLDLRKFGGSALTADIDVPKDGVDGTIPVTYVPARNLVFLALTTAFAESIGAGRIVIGVNALDYSGYPDCRPEFIASFAETARQGTKAGIEGGGFAIDAPLQFLGKAEIASEANRLGLDTALSWSCYDPRGDGLPCGLCDSCRLRRKGFADAGLTDGLTYPADT

SEQ ID NO: 37467 - protein, 230 aa, Citromicrobium sp.
  misc_feature (1)..(230): tr|A0A2E7UC94|A0A2E7UC94_9SPHN 7-cyano-7-deazaguanine s ynthase OS=Citromicrobium sp. OX=2024827 GN=queC PE=3 S V=1
MPATARENIAAVLLSGGLDSMVAAGLAQEAGHQVHALTIDYGQRHRREIEAARNIAKALGLASHSEIALDLRKFGGSALTADIDVPKDGVGEDIPVTYVPARNLVFLSLTAAFAESRGAGRIVIGVNALDYSGYPDCRPEFIAAFAEAARLGTKAGIEGGGFAIDAPLQFMSKADIASEADRLGLDTGLSWSCYDPRGDGLPCGLCDSCRLRLGGFAAAGLEDGLTYPAR

SEQ ID NO: 37468 - protein, 425 aa, Clavibacter michiganensis
  misc_feature (1)..(425): tr|A0A251YB71|A0A251YB71_9MICO 7-cyano-7-deazaguanine s ynthase OS=Clavibacter michiganensis OX=28447 GN=queC P E=4 SV=1
MTRLALVVDKRRIPNNVDEVFLWDDDAADSFKSSLGPSLSALGQVPALNADFVRIALAVYASDHTVKRQGGGSNWNTRDLVILVPVSDTALWGSAAAALAEAVGFLTGDHWVFEFSDLTEVEESDLLFRDASARVVLVSGGADSGVGAIRSGSTLGAEETHTLVSHASSGAARAPQKHVYDQLEARFPGKQAAHHRLFLSRAQKRLNGTRFPNEPSSRSRSFLFLALGLAIASQSGSRLWIPENGFASVNPPLGPERLGALSTRTTQPWFLWKIQAVLESIGAHGSIENPYQLMTKGEMFAQAKEVLGDDDAAIYLSGTNSCSHTDQNYQGVASGTHCGVCFGCIVRRASFKAGGVVDATRYLSDEPRYFGYAASHSVVDAAKDFTANKISEATIMMMPSTPSLSARQAMDLCLRGQAEIGAYLA

SEQ ID NO: 37469 - protein, 430 aa, Clavibacter michiganensis
  misc_feature (1)..(430): tr|A0A251YG41|A0A251YG41_CLAMM 7-cyano-7-deazaguanine s ynthase OS=Clavibacter michiganensis subsp. michiganens is OX=33013 GN=queC PE=4 SV=1
MFEYRLSVLPPVEPFPADVANTFFWHSKRSMPYFHANVGPQLAEYGPVKIRNIDLVRIAAAVLAADRSASRSGSLSRWNQREISLTIDVLAVKPWDTVKKDLEQLLGFLTGDAWSLTFLRERGAAEQIGRLGIDAQRVVLLSGGADSATGALLSALELVPLSQKHILVSHWSSTNLSPLQTRVANEIERLAPGAKADHVKVNIARGKHAPDGTAYGRENSTRSRSFLFIALGLAIASVDELPLWLPENGYASINPPLSKSRRGSLSTKTTHPKFLAGLRRILKAVGAHYDVHNPYADLTKGEMFSKVADAVGVDEASTYLTLTSSCSHTGARTYGTAPNVACGVCFGCVLRRASFTASGLNDGSQYFLPKDDGQQNWVATKSVVPAMRDFLSESFSVAQLAHLQIPSDIPLARVESLVERGREELRQLAL

SEQ ID NO: 37470 - protein, 236 aa, Cloacibacillus sp.
  misc_feature (1)..(236): tr|A0A1Y4GNB8|A0A1Y4GNB8_9BACT 7-cyano-7-deazaguanine s ynthase OS=Cloacibacillus sp. An23 OX=1965591 GN=queC P E=3 SV=1
MACKAMVLFSGGVDSATCLALAVEKYGKENVIPLSIRYGQKHEKEIRAAERILARYGVKGIELDLSAVFAYSGCSLLARSEAAVPEAPYAEQIAASGGAPVSTYVPFRNGLFLSCAASVALSLGCRSVWYGAHRDDAAGAAYPDCGEEFFRSMNSAVYEGSGKALRLEAPFIDKNKAQVVAEGLRLGVPYELTWSCYQGGEKPCGVCGTCIDRRRAFEANGVEDPALKLDRPGADK

SEQ ID NO: 37471 - protein, 222 aa, Cloacimonas acidaminovorans
  misc_feature (1)..(222): tr|B0VHI0|B0VHI0_CLOAI 7-cyano-7-deazaguanine synthase OS=Cloacimonas acidaminovorans (strain Evry) OX=459349 GN=queC PE=3 SV=1
MTRAIVLLSGGMDSLVTAACAVSECDEVCFLHFNYGQLTEKKELSSFEALVNYYQPIQAKVINYSWLSEIGGSALTDRNIPVQKGILSSSKIPVTYVPFRNAIFLCSAVAWAEVIQATRIYIGAVEEDSSGYPDCREVFFQAFNKVIATGTKGEIPIEISTPVLHKSKAEIVQLGIELKAPFELSWSCYTENDVACGVCESCLLRKKAFKTAGVEDPLPYRN

SEQ ID NO: 37472 - protein, 248 aa, Clostridia bacterium
  misc_feature (1)..(248): tr|A0A2V2CDX8|A0A2V2CDX8_9FIRM ATP-dependent sacrificia l sulfur transferase LarE OS=Clostridia bacterium OX=20 44939 GN=larE PE=4 SV=1
MELQDFFHEHPKAVLGFSGGVDSSYLLWAARQCGADVRPYYIKTSFQPEFEFEDAKRLCREIGAELTVLELDALSDPAVAANPADRCYHCKRNLFGTLAARALADGYTLLLDGTNASDDAGDRPGMRALRELSVRSPLRECGLTKARIRALSREAGLFTWDKPAYACLATRVPTGETITAEKLQKTERAEALLFSLGFRDFRVRYFAGAARIQLPEAQLPLALERRTELLSELKKIYPAVLLDLEVRG

SEQ ID NO: 37473 - protein, 216 aa, Clostridia bacterium
  misc_feature (1)..(216): tr|A0A523C2D5|A0A523C2D5_9FIRM 7-cyano-7-deazaguanine s ynthase OS=Clostridia bacterium OX=2044939 GN=queC PE=3 SV=1
MRAVVLLSGGLDSAVNLGKAVSSGQVILGLTFAYGQRAAAREANASAQLAAHFGVPHRVIALPFLGDITRTSLVNVEANIPEAGLEELEQDRLASTARVWVPNRNGLFINIAASFAEALEGDTVVAGFNREEGAAFPDNSPDFVAAANVALGYSTLSRVRVKCFTQEMDKADIVRLGRELGVPLTLTWSCYYGGEVPCGRCESCRRVKRAWEMVAG

SEQ ID NO: 37474 - protein, 227 aa, Clostridiaceae bacterium
  misc_feature (1)..(227): tr|A0A316N2P1|A0A316N2P1_9CLOT 7-cyano-7-deazaguanine s ynthase OS=Clostridiaceae bacterium OX=1898204 GN=queC PE=3 SV=1
MKAVVLFSGGVDSTTCLGMAIDKYGKENVIALSISYGQKHLKEIEASDKIAAYYGVEHLRMDLEKIFAYSDCSLLQHSDQEIPEESYAEQLEKTDGKPVSTYVPFRNGLFLSCAASIALSKECNVIYYGAHADDAAGNAYPDCSSSFNKAISDAIYIGSGNQLIVEAPFVNLTKAEVVKIGLDLKVPYELTWSCYEGKDKPCGVCGTCIDRQEAFLKNGVTDPLLLQ

SEQ ID NO: 37475 - protein, 251 aa, Clostridiales bacterium
  misc_feature (1)..(251): tr|A0A137SWV6|A0A137SWV6_9FIRM TIGR00268 family protein OS=Clostridiales bacterium KA00134 OX=1588750 GN=HMPRE F3189_00390 PE=4 SV=1
MYRLNLEKFFEEYKSVALAFSGGVDSAYLLYMAIKAKIRVRAYYVKSDFQPDFELKDAKRLSKELGADMKIIEMDVLENADIARNPKDRCYYCKHEIFGTILKVAKEDGFKVLIDGTNASDSEADRPGMKAKSELKVLSPLRMAGLSKHDIRELSKEAGLFTWDKPSYSCLATRMEIDKKIDRDDLKRTESAEDFMRDLGFSDFRIRNLNKGAKIQLRDGDFQRFFSKRAQIYKRLIRDYEFVVLDLEVRS

SEQ ID NO: 37476 - protein, 247 aa, Clostridiales bacterium
  misc_feature (1)..(247): tr|A0A176UB27|A0A176UB27_9FIRM TIGR00268 family protein OS=Clostridiales bacterium KLE1615 OX=1715004 GN=HMPRE F2738_00545 PE=4 SV=1
MDLNEFFKEHNKVALAFSGGVDSSYLLYAAIKSGAQVRAYYVNAAFQPQFELDDAMRLAKQLNADMKVLTADVLSNETVVKNPSDRCYHCKNVIFNMILAEAKKDGFTVLMDGTNASDAEDDRPGMRALRELCVYSPLRICGLTKTEIRRRSKEAGLFTWDKPAYACLATRIPTNERITAEKLEKTEEAENYLFSLGFTDFRVRYLNDSAKIQMPAAQMTKLLEMREEILIELKKYYKEVLLDLQAR

SEQ ID NO: 37477 - protein, 219 aa, Clostridium aceticum
  misc_feature (1)..(219): tr|A0A0D8ICN0|A0A0D8ICN0_9CLOT 7-cyano-7-deazaguanine s ynthase OS=Clostridium aceticum OX=84022 GN=queC PE=3 S V=1
MKKAVVLLSGGLDSTTCMAVAKNEGYELYPISFDYNQRHKRELALAKKIADYYGAEGHKIISMENVGGSALTDMSIDVPAYKGDHQIPITYVPARNILFLSYALGYAEVIGAEAIVIGVSAVDYSGYPDCRPEFIEAFQKVVDVGTAAGVEGKSIKIITPLIHLSKAETIELGHQLGAPYHLTTSCYNGEEEACRVCDSCVLRLKGFEEAKLEDPIVYK

SEQ ID NO: 37478 - protein, 218 aa, Clostridium acetireducens
  misc_feature (1)..(218): tr|A0A1E8EYG7|A0A1E8EYG7_9CLOT 7-cyano-7-deazaguanine s ynthase OS=Clostridium acetireducens DSM 10703 OX=11212 90 GN=queC PE=3 SV=1
MNKEKAVVVFSGGQDSTTCLFWAKKRFKEVIAVSFDYNQKHKLELQCAKDICKKYNVEHHILDLNLLNQLAPNSLTRQDIKVDKSSPENGVPNSFVDGRNMLFLSFVAVFAKQRGINTIITGVSQSDFSGYPDCRDVFIKSLNVTLNLAMDYEFEVLTPLMWIDKAETWKMAYDLGVLDIVKNETLTCYNGIKGNGCGDCPSCKLRKNGYLKFKKTYL

SEQ ID NO: 37479 - protein, 222 aa, Clostridium acetobutylicum
  misc_feature (1)..(222): sp|Q97D53|QUEC_CLOAB 7-cyano-7-deazaguanine synthase OS =Clostridium acetobutylicum (strain ATCC 824 / DSM 792 / JCM 1419 / LMG 5710 / VKM B-1787) OX=272562 GN=queC P E=3 SV=1
MEISINKEKALVVFSGGQDSTTCLFWAKKRYKEVVAVSFDYNQKHKLELECAKDICKKHGVEHHILDMKLLNQLAPNSLTRADMKVDEDAPKDGPPNTFVDGRNLLFLSFAAVFAKQRGINNIITGVSQSDFSGYPDCRDVFIKSLNVTLNLAMDYQFVLITPLMWIDKAETWKLADDLGVLDIVKNETLTCYNGIKGNGCGECPACKLRKNGYVEFKRLYK

SEQ ID NO: 37480 - protein, 225 aa, Clostridium acidisoli
  misc_feature (1)..(225): tr|A0A1W1XQG3|A0A1W1XQG3_9CLOT 7-cyano-7-deazaguanine s ynthase OS=Clostridium acidisoli DSM 12555 OX=1121291 G N=queC PE=3 SV=1
MMKKAVVLLSGGLDSSTAMYLAKSEGYEVHAMSFNYGQRHKKEIEFAKKIAEKAGVKEHIIVKTNMNAWGGSALTDSNIDVPKGDLENEEIPVTYVPARNMIFLSYAASYAEAIGAQDIFIGVSQVDYSGYVDCRKEFIDAMENSINLGTVCAVKDNRKIKIHAPFMYMTKSEEIQLGMKLGVDYSLTWTCYNGYEKACGECDSCKLRLNAFKEAGYKDPVEYFN

SEQ ID NO: 37481 - protein, 225 aa, [Clostridium] algidixylanolyticum
  misc_feature (1)..(225): tr|A0A419T7H4|A0A419T7H4_9FIRM 7-cyano-7-deazaguanine s ynthase OS=[Clostridium] algidixylanolyticum OX=94868 G N=queC PE=3 SV=1
MKALVLFSGGVDSTTCLGLAIDKYGKENVIALSISYGQKHSKEVEASRKIAAHYQVEYIYLDLATIFEYSECCLLDHSKQEIPKGDYAKQLKTANGNPVSTYVPFRNGLFLSSAASIALSKGCSIIYYGAHSDDAAGNAYPDCSSSFHNAMNEAIYEGSGKQLRIEAPFVSWTKADVVKKGIELKVPYELTWSCYVGGEKSCGTCGTCIDRAKAFEKNGISDPAI

SEQ ID NO: 37482 - protein, 211 aa, Clostridium amylolyticum
  misc_feature (1)..(211): tr|A0A1M6KDC3|A0A1M6KDC3_9CLOT 7-cyano-7-deazaguanine s ynthase OS=Clostridium amylolyticum OX=1121298 GN=SAMN0 5444401_3319 PE=3 SV=1
MYNNKVVLLFSGGIDSTVLLFYLIRKKYDIFPLYINYGQTSYEGEIAAIEKIIEGLINNKLMIINIQDVSKIGCGSLVGEYPNDVTSREDWYKDEFFPNRNLILLSLAAAYAYKINATNIAIGVVGDSYSDTSKEFLDEMKKTLEISLGKYNIIAPYANMDRKKVIEDAIRYNVPIELTFSCNSVGNRHCMLCTSCLDRENALLLKKLAIQ

SEQ ID NO: 37483 - protein, 216 aa, Clostridium argentinense
  misc_feature (1)..(216): tr|A0A0C1QZ64|A0A0C1QZ64_9CLOT 7-cyano-7-deazaguanine s ynthase OS=Clostridium argentinense CDC 2741 OX=1418104 GN=queC PE=3 SV=1
MNKEKAVVVFSGGQDSTTCLFWAKKKFKEVIAVSFDYNQKHILELECAKNICKKYNVEHHILDLNLLNQLAPNSLTRVDMEVDKEAPEEGVPNSFVDGRNMLFLSFVAVFAKQRGINTIITGVSQSDFSGYPDCRDVFIKSLNVTLNLAMDYQFEILTPLMWINKAEVWKMAKDLDVLNIIKEETLTCYNGIKGDGCGECPACKLRKNGYLEFLRS

SEQ ID NO: 37484 - protein, 224 aa, Clostridium bartlettii
  misc_feature (1)..(224): tr|R5Y4E9|R5Y4E9_9CLOT 7-cyano-7-deazaguanine synthase OS=Clostridium bartlettii CAG:1329 OX=1263063 GN=queC P E=3 SV=1
MNNNSNNNAVVVFSGGQDSTTCLFWALERFDKVIAVTFNYNQKHKLEIECAKNIAKELGVEHHILDMDLLNQLAPNALTRDDIKIEEGKDGELPSTFVEGRNMVFLTFAAILAKTKNARHIVTGVCETDFSGYPDCRDVFVKSLNVTANLAMDYDFVMHTPLMWLDKAQTWELADKYGKLEYVREKTLTCYNGIIGDGCGECPSCKLRQHGLETYLKQKEELNK

SEQ ID NO: 37485 - protein, 217 aa, Clostridium beijerinckii
  misc_feature (1)..(217): sp|A6LWG7|QUEC_CLOB8 7-cyano-7-deazaguanine synthase OS =Clostridium beijerinckii (strain ATCC 51743 / NCIMB 80 52) OX=290402 GN=queC PE=3 SV=1
MSNKAVVVFSGGQDSTTCLFWALKEFDEVIAVTFDYNQKHRKEIECATSIAKELGIEHHILDMGLLNQLAPNALTRNDIEIKAGENGSLPSTFVEGRNMLFLTFAGVLAKVKGAKHIVTGVCETDFSGYPDCRDIFIKSLNVTLNLAMDYNFVVHTPLMWIDKAETWKMADDFGKLDYIREKTLTCYKGIVGDGCGECPACKLRKNGLDKYLESKKN

SEQ ID NO: 37486 - protein, 217 aa, Clostridium beijerinckii; identical to SEQ ID NO: 37485
  misc_feature (1)..(217): tr|A0A0K2MDU6|A0A0K2MDU6_CLOBE 7-cyano-7-deazaguanine s ynthase OS=Clostridium beijerinckii NRRL B-598 OX=14284 54 GN=queC PE=3 SV=1

SEQ ID NO: 37487 - protein, 218 aa, Clostridium bornimense
  misc_feature (1)..(218): tr|W6SCU2|W6SCU2_9CLOT 7-cyano-7-deazaguanine synthase OS=Clostridium bornimense OX=1216932 GN=queC PE=3 SV=1
MNKKAVVVFSGGQDSTTCLFWALKEFDEVIAVTFNYNQRHSLEIECAKNIAKELGVEHHILDMALLNQLAPNALTRNDIEVKAGENGSLPSTFVEGRNMLFLTFAAVLAKVKGAKHIVTGVCETDFSGYPDCRDVFIKSLNVTLNLAMDYEFVVHTPLMWIDKAQTWEMADSFGKLDYVREKTLTCYNGIIGDGCGECPACKLRKHGLEKYLESKKEK

SEQ ID NO: 37488 - protein, 219 aa, Clostridium botulinum
  misc_feature (1)..(219): sp|A5I232|QUEC_CLOBH 7-cyano-7-deazaguanine synthase OS =Clostridium botulinum (strain Hall / ATCC 3502 / NCTC 13319 / Type A) OX=441771 GN=queC PE=3 SV=1
MNKEKAIVVFSGGQDSTTCLFWAKKKYKEVIAVSFDYNQKHKLELDCAKDICKKYNIEHHILDLNLLNQLAPNSLTRQDITVDKSAPKEGVPNSFVDGRNLLFLSFVAVFAKQKGINTIITGVSQSDFSGYPDCRDVFIKSLNVTLNLAMDYEFEIITPLMWINKAETWKMAYDLGVLDIVKEETLTCYNGIKADGCGECPACKLRKKGYWEFEKEYLK

SEQ ID NO: 37489 - protein, 38 aa, Clostridium botulinum
  misc_feature (1)..(38): tr|B1BAD4|B1BAD4_CLOBO Queuosine biosynthesis protein Q ueC OS=Clostridium botulinum C str. Eklund OX=445337 GN =CBC_A0900 PE=4 SV=1
MAYDFGVLDIIKNETLTCYNGVVENILPVNLEKRILKI

SEQ ID NO: 37490 - protein, 218 aa, Clostridium butyricum
  misc_feature (1)..(218): tr|A0A427STJ9|A0A427STJ9_CLOBU 7-cyano-7-deazaguanine s ynthase OS=Clostridium butyricum OX=1492 GN=queC PE=3 S V=1
MNKKAVVVFSGGQDSTTCLFWALEQFDEVIAVTFNYNQKHKLEIECAKSIAKELGVEHHILDMGLLNQLAPNALTRDDIEIKMGENGEPPSTFVEGRNMLFLTFAGVLAKVKGAKHIVTGVCETDFSGYPDCRDVFVKSLNVTMNLAMDYEFVVHTPLMWIDKAETWKMADDFGKLEYVREKTLTCYNGIIGDGCGKCPACILRKRGLDNYLEAKKKR

SEQ ID NO: 37491 - protein, 218 aa, Clostridium butyricum
  misc_feature (1)..(218): tr|A0A2S7FA16|A0A2S7FA16_CLOBU 7-cyano-7-deazaguanine s ynthase OS=Clostridium butyricum OX=1492 GN=queC PE=3 S V=1
MNKKAVVVFSGGQDSTTCLFWALEQFDEVIAVTFNYNQKHKLEIECAKSIAKELGVEHHILDMGLLNQLAPNALTRDDIEIKMGENGEPPSTFVEGRNMLFLTFAGVLAKVKGAKHIVTGVCETDFSGYPDCRDVFVKSLNVTMNLAMDYEFVVHTPLMWIDKAETWKMADDFGKLEYVREKTLTCYNGIIGDGCGKCPACILRKRGLDNYLESKKKR

SEQ ID NO: 37492 - protein, 222 aa, Clostridium carboxidivorans
  misc_feature (1)..(222): tr|C6PUT2|C6PUT2_9CLOT 7-cyano-7-deazaguanine synthase OS=Clostridium carboxidivorans P7 OX=536227 GN=queC PE= 3 SV=1
MNKEKAVVVFSGGQDSTTCLFWAKKKFKEVIAVSFDYNQKHKLELECAKSICKKYNVEHHILDLNLLNQLAPNSLTRQDIKVDKEVPSGGLPNSFVDGRNMLFLTFVAVFAKQRDINNIITGVSQSDFSGYPDCRDVFIKSLNVTLNLAMDYQFDIYTPLMWINKAETWKMAYDLSVLDIVKNETLTCYNGIKGNGCGECPACRLRKNGYLEFKNKYLQSQQ

SEQ ID NO: 37493 - protein, 219 aa, Clostridium carnis
  misc_feature (1)..(219): tr|A0A3P6KUB0|A0A3P6KUB0_9CLOT 7-cyano-7-deazaguanine s ynthase OS=Clostridium carnis OX=1530 GN=queC PE=3 SV=1
MNKKAVVVFSGGQDSTTCLFWALKNFDEVIAVTFNYNQRHKLEIECAKNIAKELNVEHHVLDMELLNQLAPNALTRNDIEITKGEDGELPSTFVEGRNLLFLSFAGVLAKVKCAKHIITGVCETDFSGYPDCRDVFIKSLNVTLNLAMNYDFVIHTPLMWIDKAETWKMADEFGKLDFIRKKTLTCYNGIIGDGCGECPSCILRKNGLNKYLKSKDAFK

SEQ ID NO: 37494 - protein, 222 aa, Clostridium cellulovorans
  misc_feature (1)..(222): tr|D9SUQ8|D9SUQ8_CLOC7 7-cyano-7-deazaguanine synthase OS=Clostridium cellulovorans (strain ATCC 35296 / DSM 3 052 / OCM 3 / 743B) OX=573061 GN=queC PE=3 SV=1
MSSSLKEQDILVVLSGGQDSTTCLFWAIKNFRNVKAIGFNYGQRHELELQCARKICEENNVSYEVLDMGLLNQLTTNSLTRKDIEVQAAKEGESTPNSLVEGRNMIFLTFAAVYAKTHNIKHIVTGVSQSDFSGYPDCRDTFIKSLNVTLNLSMDYEYVIHTPLMWLDKCDTWKLSDDLGVLDTIKDRTLTCYNGIIGAGCGICPSCLLRARGLEEFYKKYR

SEQ ID NO: 37495 - protein, 220 aa, Clostridium chromiireducens
  misc_feature (1)..(220): tr|A0A1V4IBV8|A0A1V4IBV8_9CLOT 7-cyano-7-deazaguanine s ynthase OS=Clostridium chromiireducens OX=225345 GN=que C PE=3 SV=1
MNKKAVVVFSGGQDSTTCLFWALKEFDEVIAVTFNYNQKHKLEIECAENIAKELGVEHHILDMALLNQLAPNALTRDDIEIKAGENGSLPSTFVEGRNMLFLTFAGVLAKVKGAKHIITGVCETDFSGYPDCRDVFIKSLNVTLNLAMDYDFVVHTPLMWIDKAETWKMADSFGKLDYIREKTLTCYNGVIGDGCGECPACELRRKGLENYLYSKKNDNK

SEQ ID NO: 37496 - protein, 271 aa, [Clostridium] citroniae
  misc_feature (1)..(271): tr|G5HTS5|G5HTS5_9FIRM Uncharacterized protein OS=[Clos tridium] citroniae WAL-17108 OX=742733 GN=HMPREF9469_05 987 PE=4 SV=1
MNNELLKKYEQLKQYIYSFGSVAIAFSGGVDSTLLLYAAKEALGDRCIAVTASSYSFPDRELEEAKEYCKSVGVRHFVVMSEELEIEGFSHNPKNRCYLCKHELFEKMRILANEQNIFEIAEGSNLDDMGDYRPGLKAVAELGIKSPLRYIGFTKQNIRDISKYLSIPTWNKQSFACLSSRFPYGDLISKEKLMMVDRAEQLLLDLGFHQVRVRIHGSIARIELNPEEYGLLLEENIRSIVYQKYKEYGFSYVTLDLMGYRTGSMNEVMIV

SEQ ID NO: 37497 - protein, 271 aa, [Clostridium] clostridioforme
  misc_feature (1)..(271): tr|R0CV23|R0CV23_9FIRM TIGR00268 family protein OS=[Clo stridium] clostridioforme 90A6 OX=999406 GN=HMPREF1083_ 03965 PE=4 SV=1
MNNELLKKYEQLKQYISSFGSVAIAFSGGVDSTFLLYAAKEALGARCIAVTASSYSFPERELEEAKEYCASVGVRHFVVSSEELEIEGFSHNPKNRCYLCKHELFEKIRILANEQNIFEIAEGSNLDDMGDYRPGLQAVAELGIKSPLRYIGFTKKNIRDISKYLNIPTWNKQSFACLSSRFPYGDLISKEKLMMVDRAEQLLLDLGFHQVRVRIHGSIARIELNPEEFGLLLKENIRSIVYQKYKEYGFSYVTLDLMGYRTGSMNEVMIV

SEQ ID NO: 37498 - protein, 271 aa, Clostridium clostridioforme; identical to SEQ ID NO: 37497
  misc_feature (1)..(271): tr|R7PJZ8|R7PJZ8_9CLOT Uncharacterized protein OS=Clost ridium clostridioforme CAG:511 OX=1263066 GN=BN688_0307 6 PE=4 SV=1

SEQ ID NO: 37499 - protein, 227 aa, [Clostridium] cocleatum
  misc_feature (1)..(227): tr|A0A1I0EX75|A0A1I0EX75_9FIRM 7-cyano-7-deazaguanine s ynthase OS=[Clostridium] cocleatum OX=69824 GN=queC PE= 3 SV=1
MKALVLFSGGIDSTTALALAIDQYKNENVIALSISYGQKHTKEIEAAKKIAQYYQVEHLYLDLAKIFTYSNCSLLQHSDNEIPHESYDKQLTKTEGTPVSTYVPFRNGLFLSSAASIALSKNCNVIYYGAHGDDAAGCAYPDCSEIFNNAMNQAIYEGSGHQLEIKAPFVEMTKADIIKIGLSLNVPYELTWSCYEGNEHPCGSCGTCIDRQKAFLKNGIKDPLLGE

SEQ ID NO: 37500 - protein, 225 aa, Clostridium colicanis
  misc_feature (1)..(225): tr|A0A151AQW1|A0A151AQW1_9CLOT 7-cyano-7-deazaguanine s ynthase OS=Clostridium colicanis DSM 13634 OX=1121305 G N=queC PE=3 SV=1
MKALVLFSGGVDSTTCLALAIYKYGKENVIALSIFYGQKHVKELEASKKIAEYYEVEHISLDVAKIFEHSECCLLDHSKQEIPKGDYFSQLKEASGNPVLTYVPFRNGLFLSCAASIALSKGCNVIYYGAHRDDAAGNAYPDCSTSFYNAMNEAIYEGSGKQLHIEAPFISLTKADIVKKGIELKVPYQMTWSCYEGGEKSCGVCGTCIDRAKAFEKNGIKDLTI

SEQ ID NO: 37501 - protein, 219 aa, Clostridium combesii
  misc_feature (1)..(219): tr|A0A2G7HEC8|A0A2G7HEC8_9CLOT 7-cyano-7-deazaguanine s ynthase OS=Clostridium combesii OX=39481 GN=queC PE=3 S V=1
MNKEKAIVVFSGGQDSTTCLFWAKKKYKEVIAVSFDYNQKHKLELDCAKDICKKYNIEHHILDLNLLNQLAPNSLTRQDITVDKSAPKEGVPNSFVDGRNLLFLSFVAVFAKQKGINTIITGVSQSDFSGYPDCRDVFIKSLNVTLNLAMDYEFEIITPLMWINKAETWKMAYDLGVLDIVKEETLTCYNGIKADGCGECPACKLRKKGYLEFEKYLMN

SEQ ID NO: 37502 - protein, 238 aa, Clostridium cylindrosporum
  misc_feature (1)..(238): tr|A0A0J8DCQ2|A0A0J8DCQ2_CLOCY 7-cyano-7-deazaguanine s ynthase OS=Clostridium cylindrosporum DSM 605 OX=112130 7 GN=queC PE=3 SV=1
MILRDCYPGTSSYRIERIGDMNKKAVVVFSGGQDSTTCLFWALKEFDEVIAVTFNYNQKHSLEIDCAKDIAKELGVEHHILDMELLNQLAPNALTRDDIKIEKGEDGELPSTFVEGRNMLFLTFAGVLAKVKGAKHIVTGVCETDFSGYPDCRDVFIKSLNVTLNLAMDYDFVVHTPLMWLDKAQTWEMADKFGKLDYVREKTLTCYNGIIGDGCKECPSCILRNNGLNKYLEDKKEK

SEQ ID NO: 37503 - protein, 217 aa, Clostridium diolis; identical to SEQ ID NO: 37485
  misc_feature (1)..(217): tr|A0A2P8RLY6|A0A2P8RLY6_9CLOT 7-cyano-7-deazaguanine s ynthase OS=Clostridium diolis OX=223919 GN=queC PE=3 SV =1

SEQ ID NO: 37504 - protein, 224 aa, Clostridium diolis
  misc_feature (1)..(224): tr|A0A5A5UKF7|A0A5A5UKF7_9CLOT 7-cyano-7-deazaguanine s ynthase OS=Clostridium diolis OX=223919 GN=queC PE=3 SV =1
MSNKAVVVFSGGQDSTTCLFWALKEFDEVIAVTFDYNQKHRKEIECATSIAKELGIEHHILDMGLLNQLAPNALTRNDIEIKAGENGSLPSTFVEGRNMLFLTFAGVLAKVKGAKHIVTGVCETDFSGYPDCRDIFIKSLNVTLNLAMDYNFVVHTPLMWIDKAETWKMADDFGKLDYIREKTLTCYKGIVGDGCGECPACKLRKNGLDKYLESKKNKNIKYKI

SEQ ID NO: 37505 - protein, 222 aa, Clostridium disporicum
  misc_feature (1)..(222): tr|A0A174EPU1|A0A174EPU1_9CLOT 7-cyano-7-deazaguanine s ynthase OS=Clostridium disporicum OX=84024 GN=queC_2 PE =3 SV=1
MKKNKAIVVLSGGQDSTTCLFWAKKNFDEVIAVSFNYNQRNLDELDCAKVTCEKNNIEHHILDLSLLNQLTSNALTRDEISVQAKKDDGRVPNTFVDGRNLLFLSFVAVFAKQRGIQNIITGVSQSDYSGYPDCRDIFIKSLNTTLNLAMDYEFDIITPLMWIDKADTWKMADDLGIIDIIKNETITCYNGVKGNGCGNCPSCSLRKNGYKLYKEKYINNIK

SEQ ID NO: 37506 - protein, 218 aa, Clostridium disporicum
  misc_feature (1)..(218): tr|A0A174BDU0|A0A174BDU0_9CLOT 7-cyano-7-deazaguanine s ynthase OS=Clostridium disporicum OX=84024 GN=queC_1 PE =3 SV=1
MNKKAVVVFSGGQDSTTCLFWALKEFDEVIAVTFNYNQRHSLEIECAKNIAKELGVEHHILDMDLLNQLAPNALTRNNIEIKEGQGKEPPSTFVEGRNMLFLTFAAVLAKVKGAKHIVTGVCETDFSGYPDCRDVFIKSLNVTLNLAMDYDFVVHTPLMWIDKAQTWELADSFGKLDYIREKTLTCYNGIIGDGCGECPACKLRRNGLEKYLKIKDNK

SEQ ID NO: 37507 - protein, 222 aa, Clostridium estertheticum
  misc_feature (1)..(222): tr|A0A1J0GDY4|A0A1J0GDY4_9CLOT 7-cyano-7-deazaguanine s ynthase OS=Clostridium estertheticum subsp. esterthetic um OX=1552 GN=queC PE=3 SV=1
MNREKAVVVFSGGQDSTTCLFWALKKYKEVIAVSFDYGQKHILELDCAKTICSEHDVEFHVLDLNLLNQLAPNSLTRKDMKVDTSAPKDSVPNSFVDGRNLLFLTFVAVFAKQRGISNIITGVSQSDFSGYPDCRDVFIKSLNVTLNLAMGYDFVIETPLMWINKAETWKMAYDLGVLDVVKKQTLTCYNGIKGNGCGDCPSCKLRKKGYIEFKEKYLIQKK

SEQ ID NO: 37508 - protein, 222 aa, Clostridium felsineum
  misc_feature (1)..(222): tr|A0A1S8L3R0|A0A1S8L3R0_9CLOT 7-cyano-7-deazaguanine s ynthase OS=Clostridium felsineum DSM 794 OX=1121310 GN= queC PE=3 SV=1
MEISINKEKALVVFSGGQDSTTCLFLAKKKYKEVIAVSFDYNQKHKLELECAKDICKKYGVEHHILDMKLLNQLAPNSLTRTDIKVDENAPKEGTPNTFVDGRNLLFLTFAAVFAKQRGINNIITGVSQSDFSGYPDCRDVFIKSLNVTLNLAMDYQFVLITPLMWIDKAETWKLADDLGVLDIVKNETLTCYNGIKGNGCGNCPACKLRKHGYVEFKKLYK

SEQ ID NO: 37509 - protein, 225 aa, [Clostridium] fimetarium
  misc_feature (1)..(225): tr|A0A1I0RJ48|A0A1I0RJ48_9FIRM 7-cyano-7-deazaguanine s ynthase OS=[Clostridium] fimetarium OX=99656 GN=queC PE =3 SV=1
MKALVLFSGGVDSTTCLGLAIDQYGKENVIALSISYGQKHSKEIDASRKIAQYYQVEHIYLDLAKIFEYSECSLLDHSTEAIPKSDYAEQIKHTNGKPVSTYVPFRNGLFLSSAASIALSKDCSVIYYGSHSDDAAGDAYPDCSSSFNNAMNEAIYLGSGKQLRIEAPFVTWTKPDVVKKGIELKVPYELTWSCYEGGEKPCGTCGTCIDRAKAFEKNGISDPAL

SEQ ID NO: 37510 - protein, 219 aa, Clostridium formicaceticum
  misc_feature (1)..(219): tr|A0A1D9FGH1|A0A1D9FGH1_9CLOT 7-cyano-7-deazaguanine s ynthase OS=Clostridium formicaceticum OX=1497 GN=queC P E=3 SV=1
MKKAVVLLSGGLDSTTCMAVVKNEGYELYPISFNYNQRHKRELALAKKIAAYYGAEEHEIISMENVGGSALTDMSIDVPVYKGDHHIPITYVPARNILFLSYALGYAEVIGAEAIVIGVSAVDYSGYPDCRPEFIEAFQKIVDVGTAAGVEGKSIKIITPLIHLSKAETIKLGHQLQVPYHLTTSCYNGEEKACGVCDSCVLRLKGFEEAKLEDPIAYK

SEQ ID NO: 37511 - protein, 219 aa, Clostridium gasigenes
  misc_feature (1)..(219): tr|A0A1H0NUS8|A0A1H0NUS8_9CLOT 7-cyano-7-deazaguanine s ynthase OS=Clostridium gasigenes OX=94869 GN=queC PE=3 SV=1
MNKEKAVVVFSGGQDSTTCLFWAKERFKEVIAVSFDYNQKHKLELECAKAICKKHNVEHHILDLALLNQLAPNSLTRQDIEVDKDAPKEGTPNSFVDGRNLLFLTFVAIFAKQREINTIITGVSQSDFSGYPDCRDVFIKSLNVTLTLAMGYEFDILTPLMWINKAETWKMANDLGVLDIVKKETLTCYNGIISNGCGECPACQLRKNGYLEFKKEYLK

SEQ ID NO: 37512 - protein, 218 aa, Clostridium homopropionicum
  misc_feature (1)..(218): tr|A0A0L6Z6T5|A0A0L6Z6T5_9CLOT 7-cyano-7-deazaguanine s ynthase OS=Clostridium homopropionicum DSM 5847 OX=1121 318 GN=queC PE=3 SV=1
MNKEKAVVVFSGGQDSTTCLFWAKKKFKEVIAVSFDYNQKHKLELECAKDICKKHKIEHHILDLSLLNQLAPNSLTRQDIKVDTSAPVNGVPNSFVDGRNMLFLTFVAVFAKQRRINTIITGVSQSDFSGYPDCRDVFIKSLNVTLNLAMDYQFEILTPLMWINKAETWKMSEDLGVLDIIKEETLTCYNGIKGNGCGECPACKLRKQGYLEFKKYKK

SEQ ID NO: 37513 - protein, 223 aa, [Clostridium] indolis
  misc_feature (1)..(223): tr|A0A3P6JX96|A0A3P6JX96_9FIRM 7-cyano-7-deazaguanine s ynthase OS=[Clostridium] indolis OX=69825 GN=queC PE=3 SV=1
MTQRTLNNNKAIVVFSGGQDSTTCLFWAKAHFEEVALVTFEYGQRHDTEIQVAKQIAKEQQVEHHVLDMSLLSQLTPNALTQHDMDIEEGEDGVPNTFVPARNLLFLSFAGALAYQTNAKHIITGVCETDFSGYPDCRDSFIKSMNVTLSLSMDKDFVIHTPLMWLDKKQTWALSDELGVLDYIRYQTLTCYNGIVGEGCGECPACKLRARGLNAYLEEKGAK

SEQ ID NO: 37514 - protein, 226 aa, Clostridium kluyveri
  misc_feature (1)..(226): sp|A5N597|QUEC_CLOK5 7-cyano-7-deazaguanine synthase OS =Clostridium kluyveri (strain ATCC 8527 / DSM 555 / NCI MB 10680) OX=431943 GN=queC PE=3 SV=1
MKKAVVLLSGGLDSTTVLYLAKSQGYEVYAMSFDYGQRHKKEIQCARDVASGTGAADFVLVTTNMNAWGGSALTDNSIKVPEFNEESEKIPVTYVPARNMIFLSYAASYAETIGAYDIFIGVSEVDYSGYVDCRHEFIDSMEKTINLGTVCAVEHKKYIKIHAPFLYKTKSEEIKIGMDLGVKYEKTWTCYNGEEFACGICDSCRLRLEAFKEAGYKDPIKYKGEK

SEQ ID NO: 37515 - protein, 226 aa, Clostridium kluyveri
  misc_feature (1)..(226): tr|A0A1L5F439|A0A1L5F439_CLOKL 7-cyano-7-deazaguanine s ynthase OS=Clostridium kluyveri OX=1534 GN=queC PE=3 SV =1
MKKAVVLLSGGLDSTTVLYLAKSQGYEVYAMSFDYGQRHKKEIQCAKDIASGAGAAEFVLVTTNMNVWGGSALTDDSIKVPEFNEESEKIPVTYVPARNMIFLSYAASYAEAIGAYDIFIGVSEVDYSGYVDCRHEFIDSMEKTINLGTVCAVEHKKYIKIHAPFLHKTKSEEIKIGMNLGVKYEKTWTCYNGEKFACGICDSCRLRLKAFKEAGYKDPIKYKGEK

SEQ ID NO: 37516 - protein, 218 aa, Clostridium magnum
  misc_feature (1)..(218): tr|A0A162T3C3|A0A162T3C3_9CLOT 7-cyano-7-deazaguanine s ynthase OS=Clostridium magnum DSM 2767 OX=1121326 GN=qu eC PE=3 SV=1
MNKEKAIVVFSGGQDSTTCLFWAKKRYKEVIAVSFDYNQKHKLELECAKDICKKYNVEHHILDLNLLNQLAPNSLTRQDITVDKEAPKEGVPNSFVDGRNMLFLTFVAVFAKQRGINNIITGVSQSDFSGYPDCRDVFIKSLNVTLNLAMDFQFQIHTPLMWIDKAETWKMAYDLGVLDIVKNETLTCYNGVIGNGCGECPACKLRKNGYLEFKKVYL

SEQ ID NO: 37517 - protein, 219 aa, Clostridium neonatale
  misc_feature (1)..(219): tr|A0A2A7MI78|A0A2A7MI78_9CLOT 7-cyano-7-deazaguanine s ynthase OS=Clostridium neonatale OX=137838 GN=queC PE=3 SV=1
MNKKAVVVFSGGQDSTTCLFWALKNFDEVIAVTFNYNQRHKLEIECAKNIAKELNVEHHVLDMELLNQLAPNALTRNDIEITKGEDGELPSTFVEGRNLLFLSFAGVLAKVKGAKHIITGVCETDFSGYPDCRDVFIKSLNVTLNLAMNYDFVIHTPLMWIDKAETWKMADEFGKLDFIRKKTLTCYNGIIGDGCGECPSCILRKNGLNKYLKSKDAFK

SEQ ID NO: 37518 - protein, 221 aa, Clostridium novyi
  misc_feature (1)..(221): sp|A0Q1F7|QUEC_CLONN 7-cyano-7-deazaguanine synthase OS =Clostridium novyi (strain NT) OX=386415 GN=queC PE=3 S V=1
MSINNEKAIVVFSGGQDSTTCLFWTKKRFKEVIAVSFDYNQKHKLELECAKEICSKYNIEHHILDLGLLNQLAPNSLTRTDIKVDKNAPEDGVPNSFVDGRNMLFLTFVAVFAKQRGISHIITGVSQSDFSGYPDCRDVFIKSLNVTLNLAMDYEFVLHTPLMWIDKAETWKMAYDFGVLDIIKNETLTCYNGIKGNGCGECPSCKLRKKGYLKFKELYMK

SEQ ID NO: 37519 - protein, 219 aa, Clostridium novyi
  misc_feature (1)..(219): tr|A0A0A0ILE9|A0A0A0ILE9_CLONO 7-cyano-7-deazaguanine s ynthase OS=Clostridium novyi A str. 4570 OX=1444290 GN= queC PE=3 SV=1
MNNQKAIVVFSGGQDSTTCLFWAKKKFTEVIAVSFDYNQKHKLELECAKEICSKYNIEHHILDLGLLNQLAPNSLTRTDIKVDKNAPEDGVPNSFVDGRNMLFLTFVAVFAKQRGISHIITGVSQSDFSGYPDCRDVFIKSLNVTLNLAMDYEFVLHTPLMWIDKAETWKMAYDFGVLDIIKNETLTCYNGIKGNGCGECPSCKLRKKGYLKFKELYMK

SEQ ID NO: 37520 - protein, 225 aa, Clostridium pasteurianum
  misc_feature (1)..(225): tr|A0A1D9N298|A0A1D9N298_CLOPA 7-cyano-7-deazaguanine s ynthase OS=Clostridium pasteurianum OX=1501 GN=queC PE= 3 SV=1
MKKAVVLLSGGLDSTTALYLAKSQGFEVYAISFNYGQRHKKEIEAAKKVAEKAEIKEHIIVNTNMNAWGGSALTDSNIQVPEGKEDREEIPVTYVPARNMIFLSYAASYAEAVGAQDIFIGVSQVDYSGYVDCRKEFIDAMELAINKGTVCAVEDNKPIKIHAPFMNMTKTEEIKLGISLGVDYSLTWTCYNGYEKACGHCDSCLLRLKAFEEAGYKDPVEYMDK

SEQ ID NO: 37521 - protein, 225 aa, Clostridium pasteurianum; identical to SEQ ID NO: 37520
  misc_feature (1)..(225): tr|A0A0H3J462|A0A0H3J462_CLOPA 7-cyano-7-deazaguanine s ynthase OS=Clostridium pasteurianum DSM 525 = ATCC 6013 OX=1262449 GN=queC PE=3 SV=1

SEQ ID NO: 37522 - protein, 429 aa, Clostridium perfringens
  misc_feature (1)..(429): tr|A0A127EH07|A0A127EH07_CLOPF ATPase OS=Clostridium pe rfringens OX=1502 GN=JFP838_05550 PE=4 SV=1
MKIYCSLDEKEKSSLEDIGISLNINDNKIFSYTFWDNIKSLPKFISNEGLDFLYISLFVFGIDRLVYRESANDSWSRDFQVYIPVLNLEVWNENKKLVEEMLSFLSGDNWNIEFRKRDYTDKEVDLKNNIIQENCILENCNKFCMFSGGMDSFIGAIDLLSSEEGKNIIFISHYGGGKGTKEYQDILRDKFIEKYDLSKENFYSFYAVAKSGVEDTTRTRSLMFFANAIALSTVIDKEVELIIPENGVISLNIPLTNSRLGTSSTRTTHPYYFELLQNLLNNLGINIKIKNPYQFMTKGEMAQNCKDKEFFNDNIWNTMSCSHPDSGRMNGEKESCHCGNCLPCTIRRAAFKKANIIDNTRYRDTLYDSGPTARLNLNSYKLGLAKFNEKFAFLTIQKSGPITKNIDKYTKLYVRGIYELKEFLEGLNE

SEQ ID NO: 37523 - protein, 429 aa, Clostridium perfringens
  misc_feature (1)..(429): tr|A0A2X3BR91|A0A2X3BR91_CLOPF Putative PP-loop superfa mily ATPase OS=Clostridium perfringens OX=1502 GN=NCTC8 081_00612 PE=4 SV=1
MKIYCSLDEKEKSSLEDIGISLNINDNKIFSYTFWDNIKSLPKFISNEGLDFLYISLFVFGIDRLVYRESANDSWSRDFQVYIPVLNLEVWNENKKLVEEMLSFLSGDNWNIEFRKRDYTDKEVDLKNNIIQENCILENCNKFCMFSGGMDSFIGAIDLLSSEEGKNIIFISHYGGGKGTKEYQDILRDKFIEKYDLSKENFYSFYAVAKSGVEDTTRTRSLMFFANAIALSTVIDKEVELIIPENGVISLNIPLTNSRLGTSSTRTTHPYYFELLQNLLNNLGINIKIKNPYQFMTKGEMAQNCKDKEFFNDNIWNTMSCSHPDSGRMNGEKESCHCGNCLPCTIRRAAFKKANIIDNTRYRDTLYNSGPTARLNLNSYKLGLAKFNEKFAFLTIQKSGPITKNIDKYTKLYVRGIYELKEFLEGLNE

SEQ ID NO: 37524 - protein, 229 aa, [Clostridium] polysaccharolyticum
  misc_feature (1)..(229): tr|A0A1I0BGI8|A0A1I0BGI8_9FIRM 7-cyano-7-deazaguanine s ynthase OS=[Clostridium] polysaccharolyticum OX=29364 G N=queC PE=3 SV=1
MSSKKKAMVLFSGGVDSATALGMAIEKYGKEHVIALSVSYGQKHTKEIEAARKIAEYYGIEHLFLDLAKIFAYSDCSLLQHSDKEIPKESYAKQIAKTEGEPVSTYVPFRNGLFLASAASIALSKECSVIYYGAHADDAAGSAYPDCSMAFQEAMEQAIYVGSGQQLHVEAPFINWTKEAVVKEGIRLQVPYELTWSCYEGADKPCGVCGTCIDRANAFARNGIKDPAL

SEQ ID NO: 37525 - protein, 229 aa, [Clostridium] populeti
  misc_feature (1)..(229): tr|A0A1I6JM03|A0A1I6JM03_9FIRM 7-cyano-7-deazaguanine s ynthase OS=[Clostridium] populeti OX=37658 GN=queC PE=3 SV=1
MKAMVLFSGGLDSTTCLALAIQRFGADHVIPLSIYYGQKHTKELEAARQVLTHYKIEGLEIDLTKMFSFSNCSLLQHSDEQIPEQSYEEQLKNSNGSPVTTYVPFRNGLFLSAAACIALSKDCSYIYYGAHRDDAAGNAYPDCSSSFHDAMSTAIYEGSGKALQLIAPFVGMTKADVVQIGLSLHVPYELTWSCYEGNEKACGKCGTCRDRIQAFLKNNYTDPILYDAQ

SEQ ID NO: 37526 - protein, 218 aa, Clostridium puniceum
  misc_feature (1)..(218): tr|A0A1S8TII8|A0A1S8TII8_9CLOT 7-cyano-7-deazaguanine s ynthase OS=Clostridium puniceum OX=29367 GN=queC PE=3 S V=1
MNKKAVVVFSGGQDSTTCLFWALKEFEEVIAVTFDYNQKHRKEIECATSIAKELGLEHHILDMALLNQLAPNALTRDDIEIKVSKDGSLPSTFVEGRNMLFLTFAGVLAKVKGAKHIVTGVCETDFSGYPDCRDIFIKSLNVTLNLAMDYDFVVHTPLMWIDKAETWALADSFGKLDYIREKTLTCYNGVIGDGCRTCPACILRKKGLDNYLLSRNNK

SEQ ID NO: 37527 - protein, 222 aa, Clostridium roseum
  misc_feature (1)..(222): tr|A0A1S8L5Z8|A0A1S8L5Z8_9CLOT 7-cyano-7-deazaguanine s ynthase OS=Clostridium roseum OX=84029 GN=queC PE=3 SV= 1
MEISINKDKALVVFSGGQDSTTCLFLAKKKYKEVIAVSFDYNQKHKLELECAKDICKKYGVEHHILDMKLLNQLAPNSLTRADMKVDENAPKEGTPNTFVDGRNLLFLTFAAVFAKQRGINNIITGVSQSDFSGYPDCRDVFIKSLNVTLNLAMDYQFVLITPLMWIDKAETWKLADDLGVLDIVKNETLTCYNGIKGNGCGNCPACKLRKHGYVEFKKLYK

SEQ ID NO: 37528 - protein, 218 aa, Clostridium saccharobutylicum
  misc_feature (1)..(218): tr|U5MSD6|U5MSD6_CLOSA 7-cyano-7-deazaguanine synthase OS=Clostridium saccharobutylicum DSM 13864 OX=1345695 G N=queC PE=3 SV=1
MDKKKAVVVFSGGQDSTTCLFWALEKFDEVIAVTFDYNQKHKKEIECATSIAKELGVEHHILNMDLLNQLAPNALTRDDIEIKAGENGELPSTFVEGRNMLFLTFAGVLAKVKGANHIVTGVCETDFSGYPDCRDVFIKSLNVTLNLAMDYNFVVHTPLMWIDKAETWKMADSFGKLDYIREKTLTCYNGIIGDGCGECPACKLRKRGLENYLASKAK

SEQ ID NO: 37529 - protein, 218 aa, Clostridium saccharobutylicum
  misc_feature (1)..(218): tr|A0A1S8NBT5|A0A1S8NBT5_CLOSA 7-cyano-7-deazaguanine s ynthase OS=Clostridium saccharobutylicum OX=169679 GN=q ueC PE=3 SV=1
MDKKKAVVVFSGGQDSTTCLFWALEKFDEVIAVTFDYNQKHKKEIECATSIAKELGVEHHILNMDLLNQLAPNALTRDDIEIKAGENGELPSTFVEGRNMLFLTFAGVLAKVKGANHIVTGVCETDFSGYPDCRDVFIKSLNVTLNLAMDYNFVVHTPLMWIDKAETWKMADSFGKLDYIREKTLTCYNGIIGDGCGECPACKLRKRGLENYLASKGK

SEQ ID NO: 37530 - protein, 217 aa, Clostridium saccharoperbutylacetonicum
  misc_feature (1)..(217): tr|M1N0G3|M1N0G3_9CLOT 7-cyano-7-deazaguanine synthase OS=Clostridium saccharoperbutylacetonicum N1-4(HMT) OX= 931276 GN=queC PE=3 SV=1
MNRKAVVVFSGGQDSTTCLFWALKEFEEVIAVTFNYNQKHKKEIECATAIAKELGIEHHILDMELLNQLAPNALTRDDIEIKAGENGGLPSTFVEGRNMLFLTFAGVLAKVKGANHIVTGVCETDFSGYPDCRDVFIKSLNVTLNLAMDYNFVVHTPLMWIDKAATWKMADDFGKLDYVREKTLTCYNGIIGDGCGECPACKLRRRGLEQYLESKTK

SEQ ID NO: 37531 - protein, 119 aa, Clostridium scindens
  misc_feature (1)..(119): tr|B0NH10|B0NH10_CLOS5 Uncharacterized protein OS=Clost ridium scindens (strain ATCC 35704 / DSM 5676 / VPI 137 33 / 19) OX=411468 GN=CLOSCI_02765 PE=4 SV=1
MGGSVLFADPPICLTEVSMNLHEFFTDHPRVAIAFSGGVDSAYLLYAAKQYAKDVCAYYVKSAFQPQFELNDALHIATDLGVKMEIIELNILACKLRLNGISVPHARNGYSIFSGTKYY

SEQ ID NO: 37532 - protein, 101 aa, Clostridium scindens
  misc_feature (1)..(101): tr|A0A494WME1|A0A494WME1_CLOS5 tRNA(Ile)-lysidine synth ase OS=Clostridium scindens (strain ATCC 35704 / DSM 56 76 / VPI 13733 / 19) OX=411468 GN=tilS_2 PE=4 SV=1
MNLHEFFTDHPRVAIAFSGGVDSAYLLYAAKQYAKDVCAYYVKSAFQPQFELNDALHIATDLGVKMEIIELNILACKLRLNGISVPHARNGYSIFSGTKYY

SEQ ID NO: 37533 - protein, 218 aa, Clostridium sp.
  misc_feature (1)..(218): tr|A0A099RWQ7|A0A099RWQ7_9CLOT 7-cyano-7-deazaguanine s ynthase OS=Clostridium sp. HMP27 OX=1487921 GN=queC PE= 3 SV=1
MNKKKAIVVFSGGQDSTTCLFWAKEKFEEVIAVSFDYNQKHKVELECAKDICKKYNVEHHILDLNLLNQLAPNSLTRQDIIVDKNAPSEGVPNSFVDGRNMLFLTFVAVFAKQRGINTIITGVSQSDFSGYPDCRNVFIKSLNVTLNLAMDYEFEIITPLMWINKAETWKMASDLGVLNIVKEETLTCYNGIKGNGCGECPACKLRKNGYVEFKKEYL

SEQ ID NO: 37534 - protein, 226 aa, Clostridium sp.
  misc_feature (1)..(226): tr|R5JY29|R5JY29_9CLOT 7-cyano-7-deazaguanine synthase OS=Clostridium sp. CAG:632 OX=1262830 GN=queC PE=3 SV=1
MQNLKNKKQAVVIFSGGQDSTTCLFWAKARYEEVIAISFDYGQKHKKELECAKAIAQEYGVEHHIFDMSLLNQLAPNSLTRSDIKVDTDAPESGTPNSFVDGRNMVFLTYAAIFAKQRGITDLITGVSQSDFSGYPDCRDIFIKSLNTTLNLAMDYEFDIQTPLMWIDKEETWALADELGVLDVIHDKTLTCYNGIIGDGCGNCPSCKLRKKGYDLYMEHKNKKQK

SEQ ID NO: 37535 - protein, 228 aa, [Clostridium] spiroforme
  misc_feature (1)..(228): tr|A0A1Y4QPS6|A0A1Y4QPS6_9FIRM 7-cyano-7-deazaguanine s ynthase OS=[Clostridium] spiroforme OX=29348 GN=queC PE =3 SV=1
MKALVLFSGGIDSTTALALAIDKHGKDNVIALSISYGQKHSKEIEAANKIAKYYQIEHIYLDLEKIFSYSNCALLEHSSDKIPHESYAKQLEKTNVVTTYVPFRNGLFLSTAASIALSKDCQIIYYGAHRDDYANNAYPDCSDVFNEAMNQAIYEGSGHQLKIEAPFVKMTKADIVKIGLDLHVPYELTWSCYEGNDKPCTVCGTCIDRQEAFLKNGVIDPLLGGNNE

SEQ ID NO: 37536 - protein, 219 aa, Clostridium sporogenes
  misc_feature (1)..(219): tr|A0A1V9IV64|A0A1V9IV64_CLOSG 7-cyano-7-deazaguanine s ynthase OS=Clostridium sporogenes OX=1509 GN=queC PE=3 SV=1
MNKEKAIVVFSGGQDSTTCLFWAKKKYKEVIAVSFDYNQKHKLELDCAKDICKKYNIEHHILDLNLLNQLAPNSLTRQDITVDKSAPKEGVPNSFVDGRNLLFLSFVAVFAKQKGINTIITGVSQSDFSGYPDCRDVFIKSLNVTLNLAMDYEFEIITPLMWINKAETWKMAYDLGVLDIVKEETLTCYNGIKADGCGECPACKLRKKGYLEFEKEYLK

SEQ ID NO: 37537 - protein, 219 aa, Clostridium sporogenes
  misc_feature (1)..(219): tr|J7SG57|J7SG57_CLOS1 7-cyano-7-deazaguanine synthase OS=Clostridium sporogenes (strain ATCC 15579) OX=471871 GN=queC PE=3 SV=1
MNKEKAIVVFSGGQDSTTCLFWAKKKYKEVIAVSFDYNQKHKLELEFAKDICKKHNIEHKILDLNLLNQLAPNSLTRQDITVDKSAPKEGVPNSFVDGRNLLFLSFVAVFAKQRGINAIITGVSQSDFSGYPDCRDVFIKSLNVTLNLAMDYEFEILTPLMWINKAETWKMAYDLGVLDIVKEETLTCYNGIKADGCGECPACKLRKKGYLEFEKEYLK

SEQ ID NO: 37538 - protein, 215 aa, Clostridium taeniosporum
  misc_feature (1)..(215): tr|A0A1D7XK70|A0A1D7XK70_9CLOT 7-cyano-7-deazaguanine s ynthase OS=Clostridium taeniosporum OX=394958 GN=queC P E=3 SV=1
MNKEKAIVVFSGGQDSTTCLFWAKKRFKEVIAVSFNYNQKHKLELECAKNICKKYNVEHHILDLNLLNQLAPNSLTRQDINVDKDAPKEGVPNSFVDGRNMLFLTFVAVFAKQREINTIITGVSQSDFSGYPDCRDVFIKSLNVTLNLAMDYQFEILTPLMWIDKAETWKMADDLGVLNIVKEETLTCYNGIIGNGCGECPACKLRKNGYLEFKR

SEQ ID NO: 37539 - protein, 218 aa, Clostridium tagluense
  misc_feature (1)..(218): tr|A0A401UUN0|A0A401UUN0_9CLOT 7-cyano-7-deazaguanine s ynthase OS=Clostridium tagluense OX=360422 GN=queC PE=3 SV=1
MNSEKAVVVFSGGQDSTTCLFWALKKYKEVIAISFDYSQKHILELDCAKDICKKHGVEYHSLDLNLLNQLAPNSLTRKDMIVDTDAPSDGVPNSFVDGRNLLFLTFVAVFAKQRGINNIITGVSQSDFSGYPDCRDVFIKSLNVTLNLAMGYDFVIETPLMWINKAETWKMAYDLGVLPVVKEDTLTCYNGIKGNGCGDCPSCKLRKKGYLEFKEKYL

SEQ ID NO: 37540 - protein, 219 aa, Clostridium tepidiprofundi
  misc_feature (1)..(219): tr|A0A151B397|A0A151B397_9CLOT 7-cyano-7-deazaguanine s ynthase OS=Clostridium tepidiprofundi DSM 19306 OX=1121 338 GN=queC PE=3 SV=1
MNKEKAVVVFSGGQDSTTCLFWAKKRFKEVIAVSFDYNQRHKLELECAKNICNKYGVEHHILDLTLLNQLAPNSLTRTDIDVDKDAPKDGVPNSFVDGRNLLFLSFVAVFAKQRGVNHIITGVSQSDFSGYPDCRDVFIKSLNVTLNLAMDYEFVIHTPLMWINKEETWKMAYDLGVLDIIKNETLTCYNGIIGDGCGECPSCKLRMKGYLDFKEKYLK

SEQ ID NO: 37541 - protein, 219 aa, Clostridium tepidum
  misc_feature (1)..(219): tr|A0A1S9I1C7|A0A1S9I1C7_9CLOT 7-cyano-7-deazaguanine s ynthase OS=Clostridium tepidum OX=1962263 GN=queC PE=3 SV=1
MNKEKAIVVFSGGQDSTTCLFWAKKKYKEVIAVSFDYNQKHKLELECAKDICKKYNIEHKILDLNLLNQLAPNSLTRQDITVDKSAPKEGVPNSFVDGRNLLFLSFVAVFAKQRGINTIITGVSQSDFSGYPDCRDVFIKSLNVTLNLAMDYEFEILTPLMWINKAETWKMAHDLGVLNIVKEETLTCYNGIKADGCGECPACKLRKKGYLEFEKDLMK

SEQ ID NO: 37542 - protein, 218 aa, Clostridium tetanomorphum
  misc_feature (1)..(218): tr|A0A037Z8M2|A0A037Z8M2_CLOTT 7-cyano-7-deazaguanine s ynthase OS=Clostridium tetanomorphum DSM 665 OX=1230342 GN=queC PE=3 SV=1
MNKEKAVVVFSGGQDSTTCLFWAKKKYKEVLAVSFDYNQKHKLELQCAKDICKKYTVEHHILDLNLLNQLAPNSLTRQDIKVDKDAPLDGVPNSFVDGRNMLFLTFVAVFAKQRGINTIITGVSQSDFSGYPDCRDVFIKSLNVTLNLAMDYKFQIITPLMWINKAETWKMAYDLGVLPIVKEETLTCYNGIKGNGCGECPACKLRKNGYLEFKKTYL

SEQ ID NO: 37543 - protein, 221 aa, [Clostridium] thermoalcaliphilum
  misc_feature (1)..(221): tr|A0A1V4IBS0|A0A1V4IBS0_9FIRM 7-cyano-7-deazaguanine s ynthase OS=[Clostridium] thermoalcaliphilum OX=29349 GN =queC PE=3 SV=1
MNNEKAVVVFSGGQDSTTCLFWAKKKFKEVIAVSFDYNQKHKLELECAKKICKEYGFEHHILDLSLLNQLAPNSLTRVDIKVDKKQEDDKLPNSFVDGRNLLFLSFVAIFAKQRNIRNIVTGVSESDFSGYPDCRDVFIKSTNVTLNLAMDYQFEIYTPLMWINKAQTWKMAYDLGVLDIIKNETLTCYNGIKGEGCNDCPACKLRSRGYLEFENLYLNKN

SEQ ID NO: 37544 - protein, 219 aa, Clostridium thermobutyricum
  misc_feature (1)..(219): tr|A0A1V4SZ04|A0A1V4SZ04_9CLOT 7-cyano-7-deazaguanine s ynthase OS=Clostridium thermobutyricum DSM 4928 OX=1121 339 GN=queC PE=3 SV=1
MVNDKAVVVFSGGQDSTTCLFWAKKRFKEVIAVSFDYGQKHKAELDCAREICKKYSVEHYILDLGLLNQLAQNSLTRVDIEVDKDKPKDSLPNSFVDGRNLLFLSFVAVLAKQKGTGNIITGVSQSDFSGYPDCRDVFIKSLNVTLNLSMDYEFNIITPLMWIDKADTWKMADDLGVLDLVKNETLTCYNGIKGDGCGDCPSCKLRSHGFEEFKRRYNK

SEQ ID NO: 37545 - protein, 219 aa, Clostridium thermobutyricum
  misc_feature (1)..(219): tr|N9WAR6|N9WAR6_9CLOT 7-cyano-7-deazaguanine synthase OS=Clostridium thermobutyricum OX=29372 GN=queC PE=3 SV =1
MVNDKAVVVFSGGQDSTTCLFWAKKRFKEVIAVSFDYGQKHKAELDCAREICKKYSVEHYILDLGLLNQLAPNSLTRVDIEVDKDKPKDSLPNSFVDGRNLLFLSFVAVLAKQKGTGNIITGVSQSDFSGYPDCRDVFIKSLNVTLNLSMDYEFNIITPLMWIDKADTWKMADDLGVLDLVKNETLTCYNGIKGEGCGDCPSCKLRSHGFEEFKRRYNK

SEQ ID NO: 37546 - protein, 225 aa, Clostridium thermopalmarium
  misc_feature (1)..(225): tr|A0A2T0AQI7|A0A2T0AQI7_9CLOT 7-cyano-7-deazaguanine s ynthase OS=Clostridium thermopalmarium DSM 5974 OX=1121 340 GN=queC PE=3 SV=1
MKALVLFSGGVDSTTCLALAIYKYGKENVIALSIFYGQKHVKELEASKKIAEYYEVEHISLDVAKIFEHSECCLLDHSKQEIPKGDYFSQLKEASGNPVLTYVPFRNGLFLSCAASIALSKGCNVIYYGAHRDDAAGNAYPDCSTSFYNAMNEAIYEGSGKQLHIEAPFISLTKADIVKKGIELKVPYQMTWSCYEGGEKPCGVCGTCIDRAKAFEKNGIKDLTI

SEQ ID NO: 37547 - protein, 228 aa, Clostridium uliginosum
  misc_feature (1)..(228): tr|A0A1I1GXQ3|A0A1I1GXQ3_9CLOT 7-cyano-7-deazaguanine s ynthase OS=Clostridium uliginosum OX=119641 GN=queC PE= 3 SV=1
MNKEKAIVVFSGGQDSTTCLFWAKKRFKEVIAVSFDYNQKHKLELECARDICKKYNVEHHILDLNLLNQLAPNSLTRQDINVDKDTPKEGPPNSFVDGRNMLFLTFVAVFAKQRGINNIITGVSQSDFSGYPDCRDVFIKSLNVTLNLAMDYQFEILTPLMWINKAETWKMANDLGVLNIVKEETLTCYNGIIGNGCGECPACKLRRNGYLEFKKEYLKYVEEKIKNE

SEQ ID NO: 37548 - protein, 219 aa, Clostridium ventriculi
  misc_feature (1)..(219): tr|A0A173WTD2|A0A173WTD2_CLOVE 7-cyano-7-deazaguanine s ynthase OS=Clostridium ventriculi OX=1267 GN=queC PE=3 SV=1
MNKEKAVVVFSGGQDSTTCLFWAKKRYKEVIAVSFDYGQKHSLELECAKDICKKYDVEHHIMDLNLLNQLAPNSLTRVDIKVDKKKEEDKLPNSFVDGRNMLFLTFVAVFAKQRGINTIITGVSQSDFSGYPDCRDVFIKSLNVTLNLAMDYQFEVLTPLMWIDKAETWKLADDLGVLDIVKNETLTCYNGIKGNGCGECPACTLRKNGYLKFKEQFKK

SEQ ID NO: 37549 - protein, 219 aa, Clostridium vincentii
  misc_feature (1)..(219): tr|A0A2T0BE35|A0A2T0BE35_9CLOT 7-cyano-7-deazaguanine s ynthase OS=Clostridium vincentii OX=52704 GN=queC PE=3 SV=1
MINGKAVVVFSGGQDSTTCLFWAKKNFKEVITVSFDYNQKHVAELDCAKKIAKELGCENHVLDMKLLGQLAPNALTRNDIDIKLGEEGELPSTFVDGRNMLFLTFAAVFAKQVGARHLITGVCETDFSGYPDCRDVFIKSLNVTLNLAMDFQFVIHTPIMWIDKEETWKMADEMGALEFIREKTLTCYNGIIGDGCGECPSCKLRKRGLDNYLNSKKIK

SEQ ID NO: 37550 - protein, 232 aa, Cobetia crustatorum
  misc_feature (1)..(232): tr|A0A558HNZ3|A0A558HNZ3_9GAMM 7-cyano-7-deazaguanine s ynthase OS=Cobetia crustatorum OX=553385 GN=queC PE=3 S V=1
MVSAPRAVVIYSGGMDSYTVLHQALKEGFEVHALSFHYGQRHSRELDVARAVCESLGVAHEIVDIRAIHGLISNSALTNADQAMPKADYDEASMTSTVVPNRNMILLSLAIAKAVNIDADVCFYGAHGGDHVLYPDCRPEFVDKMNAVAAIANFSPIEIRAPFLHSRKDEILAAGIAMQLDYSQTWTCYEGRELACGECGSCRERLEAFASHGLSDPLGYEMPATAKGTDTL

SEQ ID NO: 37551 - protein, 247 aa, Cobetia marina
  misc_feature (1)..(247): tr|A0A4U1LY37|A0A4U1LY37_COBMA 7-cyano-7-deazaguanine s ynthase OS=Cobetia marina OX=28258 GN=queC PE=3 SV=1
MTLNVPNSAVSAPACSAERPRAVVIYSGGMDSYTVLHQALKEGFEVHALSFHYGQRHSRELDVARQVCESLGVAHEVVDIRAIHGLIDNSALTNSDQAMPKADYDEDSMTSTVVPNRNMILLSLAIAKAVNIEAGVCFYGAHGGDHVLYPDCRPEFVEKMNAVAAIANFSPVEIRAPFLHASKDEILAAGIAMQLDYAQTWTCYEGRELACGECGSCRERLAAFAAHGLSDPLGYDTTDSAKGAGTL

SEQ ID NO: 37552 - protein, 247 aa, Cobetia marina
  misc_feature (1)..(247): tr|A0A4Y4GPF7|A0A4Y4GPF7_COBMA 7-cyano-7-deazaguanine s ynthase OS=Cobetia marina OX=28258 GN=queC PE=3 SV=1
MTLNVPNSAVSAPASSAERPRAVVIYSGGMDSYTVLHQALKEGFEVHALSFHYGQRHSRELDVARQVCESLGVAHEVVDIRAIHGLIDNSALTNSDQAMPKADYDEDSMTSTVVPNRNMILLSLAIAKAVNIEAGVCFYGAHGGDHVLYPDCRPEFVEKMNAVAAIANFSPVEIRAPFLHASKDEILAAGIAMQLDYAQTWTCYEGRELACGECGSCRERLAAFAAHGLSDPLGYDTTDSAKGAGTL

SEQ ID NO: 37553 - protein, 247 aa, Cobetia sp.
  misc_feature (1)..(247): tr|A0A2S4K6B3|A0A2S4K6B3_9GAMM 7-cyano-7-deazaguanine s ynthase OS=Cobetia sp. MM1IDA2H-1 OX=1268241 GN=queC PE =3 SV=1
MTLNVPNSAVSAPASSAERPRAVVIYSGGMDSYTVLHQALKEGFEVHALSFHYGQRHSRELDVARQVCESLGVAHEVVDIRAIHGLIDNSALTNSDQAMPKADYDEDSMTSTVVPNRNMILLSLAIAKAVNIEAGVCFYGAHGGDHVLYPDCRPEFVEKMNAVAAIANFSPVEIRAPFLHASKDEILAAGIAMQLDYAQTWTCYEGRELACGECGSCRERLAAFAAHGLSDPLGYDTADSAKGAGTL

SEQ ID NO: 37554 - protein, 247 aa, Cobetia sp.
  misc_feature (1)..(247): tr|A0A2E4Q197|A0A2E4Q197_9GAMM 7-cyano-7-deazaguanine s ynthase OS=Cobetia sp. OX=1873876 GN=queC PE=3 SV=1
MTLNVQNSAVPASASSAERPRAVVIYSGGMDSYTVLHQALKEGFEVHALSFHYGQRHSRELDVARQVCESLGVAHEVVDIRAIHGLIDNSALTNSDQAMPKADYDEASMTSTVVPNRNMILLSLAIAKAVNIEAEVCFYGAHGGDHVLYPDCRPEFVDKMNAVAAIANFSPVEIRAPFLHASKDEILAAGIAMQLDYAQTWTCYEGRELACGECGSCRERLEAFAAHGLSDPLGYETTDSAKGAGTL

SEQ ID NO: 37555 - protein, 226 aa, Cocleimonas flava
  misc_feature (1)..(226): tr|A0A4R1F466|A0A4R1F466_9GAMM 7-cyano-7-deazaguanine s ynthase OS=Cocleimonas flava OX=634765 GN=queC PE=3 SV= 1
MKALVVCSGGLDSVTLSYKVASEGTLSSLLSFDYGQRHRKELDFAAHCAKQLGVKHTIIDLSQVGKQLTSALTDDIDVPDGHYAEESMKTTVVPNRNAIMMTIAFGLASSQNADTVAMAVHGGDHFIYPDCRPDFIESFAAMQKMALDGMSEIELYTPYLHLDKTEIARDSAKYSVPVVDTWSCYKGQEKHCGRCGTCVERREAFHLAGIEDPTEYADADYWQSVT

SEQ ID NO: 37556 - protein, 234 aa, Cognatishimia maritima
  misc_feature (1)..(234): tr|A0A1M5L5Z3|A0A1M5L5Z3_9RHOB 7-cyano-7-deazaguanine s ynthase OS=Cognatishimia maritima OX=870908 GN=queC PE= 3 SV=1
MKTLVICSGGLDSVSLAYKVAAEHELVGLISFDYGQRHKKEVGYAARAAERLGVPHDLIDMTAIGAFLSGSALTDDLDVPDGHYAEDNMKVTVVPNRNAIMLAVAFGVAAAKGADAVAAAVHGGDHFIYPDCRPGFIDAFQKMQDAALEGYAEVKLYTPFVHIPKSDIVLEGAKVNTPFADTWSCYKGGETHCGRCGTCVERREAFHIAGVEDPTVYADPDYWKSVTIDAEGGA

SEQ ID NO: 37557 - protein, 206 aa, Cognatiyoonia koreensis
  misc_feature (1)..(206): tr|A0A1I0RTN9|A0A1I0RTN9_9RHOB 7-cyano-7-deazaguanine s ynthase OS=Cognatiyoonia koreensis OX=364200 GN=SAMN044 88515_3239 PE=3 SV=1
MKRALVMVSGGLDSTTVCHLLVKAGTEVHPIFFDYGQHCAETEWAKVNEVLPTEVLPPERINLSDIFKGSTSRMIVEADLWTEAVVDDDLYIPYRTMLFFASAAARAQTVGILDVYSGFINSNHAKEIDCSTEFMNGLDELSVGVGAVRFHAPFGTWLKSDVVREAVKLGVPVGRTFSCQASSSFPCGACPNCVERLNALTEAGIA

SEQ ID NO: 37558 - protein, 237 aa, Cohaesibacter gelatinilyticus
  misc_feature (1)..(237): tr|A0A285N8B4|A0A285N8B4_9RHIZ 7-cyano-7-deazaguanine s ynthase OS=Cohaesibacter gelatinilyticus OX=372072 GN=q ueC PE=3 SV=1
MKVLVVCSGGLDSVSLAHKVAAEQELVGLISFDYGQRHKCELDYAEQCAKRLGVPFDLIDMSAMGKHLSGSALTDDIDVPEGHYEEGSMKTTVVPNRNAIMLSIAFGIAAAKGADAVATAVHGGDHFIYPDCRPDFVQAFEDMQKKALDGYASVSLYSPFVHKPKSAIVTEGAKYETPFELTWSCYKGGDAHCGRCGTCVERREAFFVAGIEDPTEYLDADFWKSALDAAPKQETSA

SEQ ID NO: 37559 - protein, 213 aa, Cohaesibacter sp.
  misc_feature (1)..(213): tr|A0A2N5XMP0|A0A2N5XMP0_9RHIZ 7-cyano-7-deazaguanine s ynthase OS=Cohaesibacter sp. H1304 OX=2067669 GN=C0081_ 16740 PE=3 SV=1
MKKAVLLASGGLDSTTVAYGLFADGIDVFPLFFDYGQHCVETEWGRVNEVLPRDMRSPERCDISDIFKGSTSRLIKEANLWQDNVADDDLYVPYRTLLFFAAAAARAQTLGIFDVYTGFVNSNHAKEIDCTAEFMNQMDGLIDNIGPVRFTSPFRFSSKTTVVEEALRRGVPIGRTFSCQAASDFPCGACPNCVERLHALKDAAVVISKAQVD

SEQ ID NO: 37560 - protein, 221 aa, Cohnella luojiensis
  misc_feature (1)..(221): tr|A0A4Y8LVJ4|A0A4Y8LVJ4_9BACL 7-cyano-7-deazaguanine s ynthase OS=Cohnella luojiensis OX=652876 GN=queC PE=3 S V=1
MKSGKAVVVFSGGQDSTTCLFWALQRFEEVEAVTFDYGQRHKLELECAARIASDLKIRHHVLDMSLLGQLTPNALTRHDMAIEQKEGELPSTFVDGRNLLFLSFAAVLAKQVGARNIVTGVCQTDFSGYPDCRDVFIKSLNVTLNLSMDYEFVIDTPLMWLNKAQTWQLADELGAFQYVRDNTLTCYEGIMADGCGECPACLLRARGLREFEAASKEGRRV

SEQ ID NO: 37561 - protein, 214 aa, Cohnella lupini
  misc_feature (1)..(214): tr|A0A3D9IA67|A0A3D9IA67_9BACL 7-cyano-7-deazaguanine s ynthase OS=Cohnella lupini OX=1294267 GN=queC PE=3 SV=1
MVFSGGQDSTTCLFWALQRFEEVEAVTFDYGQRHKLELECAARIAAELKVRHHVLDMSLLGQLTPNALTRHDRAIEHNEGELPSTFVDGRNLLFMSFAGVLAKQVGARNIVTGVCQTDFSGYPDCRDIFVKSLNVTLNLSMDYEFVIDTPLMWLTKAQTWQLADDLGAYEYVRDNTLTCYEGIMADGCGECPACLLRSRGLREFEAASKEGRRL

SEQ ID NO: 37562 - protein, 221 aa, Cohnella sp.
  misc_feature (1)..(221): tr|A0A1I0ZMS2|A0A1I0ZMS2_9BACL 7-cyano-7-deazaguanine s ynthase OS=Cohnella sp. OV330 OX=1855288 GN=queC PE=3 S V=1
MKQEKAVVVFSGGQDSTTCLFWAKENFAEVETVTFKYGQRHALETEIAAAISEELGVRHHLLDMSLLGQLAPNALTRGDIEIKQDEGALPTTFVDGRNLLFLSFAAVLAKQLGAKHIVTGVCETDFSGYPDCRDVFVKSLNVTLNLAMDYPFVIDTPLMWLNKAQTWELADRLGAFEFVRDRTLTCYNGIPASGCGECPACKLRANGLSTYLREAGKEGAR

SEQ ID NO: 37563 - protein, 235 aa, Cohnella sp.
  misc_feature (1)..(235): tr|A0A3G3JZT9|A0A3G3JZT9_9BACL 7-cyano-7-deazaguanine s ynthase OS=Cohnella sp. 18JY8-7 OX=2480923 GN=queC PE=3 SV=1
MKQHKAVVVFSGGQDSTTCLFWAMQRFGEVEAVTFDYGQRHRLELDCAAQIAKEQKVRHHVLDMALLNQLAPNALTRQDISIEHDEGALPTTFVDGRNLLFLTFAAILAKQIGARHIVTGVCETDFSGYPDCRDVFIKSLNVTLNLAMEYPFVIETPLMWLTKADTWRMADELGVLEYVRERTLTCYNGIVAEGCGECPSCLLRKKGLEEYLLKKKEGLSDDSTNLSIRRPSFLL

SEQ ID NO: 37564 - protein, 232 aa, Coleofasciculus chthonoplastes
  misc_feature (1)..(232): tr|B4VXJ0|B4VXJ0_9CYAN 7-cyano-7-deazaguanine synthase OS=Coleofasciculus chthonoplastes PCC 7420 OX=118168 GN =queC PE=3 SV=1
MTGVKMSKAVVLLSGGLDSSTVLYQAKAEGYECYAISFDYQQRHQRELESAIAIAKGAGVKYHQVVRFDLSQWGGSALTDDTLDLPQTRSLQQMSQSIPITYVPARNTIFLSFGLSYAEAIGATALYLGVNALDYSGYPDCRPDYIQAMQEVFRLGTKQGREGEPIQIITPLIQLKKTEIIELGNKLGVPWHETWSCYAGDEVACGVCDSCRLRLAAFAELGLNDPLSYKPL

SEQ ID NO: 37565 - protein, 478 aa, Coleofasciculus chthonoplastes
  misc_feature (1)..(478): tr|B4VPR7|B4VPR7_9CYAN Uncharacterized protein OS=Coleo fasciculus chthonoplastes PCC 7420 OX=118168 GN=MC7420_ 5373 PE=4 SV=1
MNWGLDMMKKHYTHDSDYTLRFSPVLNSNGCVHFIDHSRNKENTFGLTVDDQEFGYRVQPRFPSVIADLIDLAVAIHASDRLAVQHLRQEQSRIRVVLPVRHPELLNTKSFQAKLENLLRWATGSRWAFDFQKRTASGRIVEQEERIFPNDPEECEVALWSGGLDALAGLYSRLQTNHAASFMLFGTGSNNNVYARQEHVFKALQPSFRDRLNLCRVPIRFSDSSRHQKNKIPRARGIVFTLLGAAYAYLMGQRVLYVYENGIGAINLPYRASAVGLDHSRSVHPLTLLMVSDVVSELFGEEFRVRNPFLFWTKAEMCRALAEDGRSDLPPLTKSCDSPHRQPQQPIQCGYCSSCILRKQALAASKIEDRTRYVVPHGNRPAKDPSLHLRNMLVQVCTFRRLLSASDQWEALTREFLQLDDIVDRSAAAENLLPADMQSRLIKLYQTYVAEWDTVESRIAAEILDQDSNQQASSALAL

SEQ ID NO: 37566 - protein, 236 aa, Collimonas arenae
  misc_feature (1)..(236): tr|A0A0A1FG63|A0A0A1FG63_9BURK 7-cyano-7-deazaguanine s ynthase OS=Collimonas arenae OX=279058 GN=queC PE=3 SV= 1
MATPHGAIVLFSGGQDSTTCLAWALERYERVETIGFDYGQRHAVELTVRPVLLQKIRAQFPQWADKLGEDHMIDLSLISKISSTAMTEDVEIVMQENGLPNTFVPGRNLLFMTVAATVAYRRGLNVLVGGMCETDFSGYPDCRDDTMKALQVALNLGMATQLKLETPLMWIDKSETWKLAQDLGGDSLVDLIRADTHTCYLGERGALHDWGYGCGTCPACALRARGYQQFKQTAGS

SEQ ID NO: 37567 - protein, 236 aa, Collimonas arenae
  misc_feature (1)..(236): tr|A0A561GIK1|A0A561GIK1_9BURK 7-cyano-7-deazaguanine s ynthase OS=Collimonas arenae OX=279058 GN=queC PE=3 SV= 1
MTTPNGAIVLFSGGQDSTTCLAWALSRYERVETIGFDYGQRHAVELTVRPVLLQKIRAQFPQWAGKLGEDHLIDLSLISKISSTAMTEDVEIVMQENGLPNTFVPGRNLLFMTVAATVAYRRGLNVLVGGMCETDFSGYPDCRDDTMKALQVALNLGMATQLKLETPLMWIDKSETWKLAQDLGGDALVDLIRAETHTCYLGQRGALHDWGYGCGTCPACALRARGYQQFRQAAGA

SEQ ID NO: 37568 - protein, 236 aa, Collimonas fungivorans
  misc_feature (1)..(236): tr|A0A127PI32|A0A127PI32_9BURK 7-cyano-7-deazaguanine s ynthase OS=Collimonas fungivorans OX=158899 GN=queC PE= 3 SV=1
MTTPNGAIVLFSGGQDSTTCLAWALSRYERVETIGFDYGQRHAVELTVRPVLLQKIRAQFPQWAGKLGEDHLIDLSLISKISSTAMTEDVEIVMQENGLPNTFVPGRNLLFMTVAATVAYRRGLNVLVGGMCETDFSGYPDCRDDTMKALQVALNLGMATQLKVETPLMWIDKSETWKLAQDLGGDTLVDLIRADTHTCYLGQRGALHDWGYGCGTCPACALRARGYQQFRSTEGV

SEQ ID NO: 37569 - protein, 236 aa, Collimonas fungivorans
  misc_feature (1)..(236): tr|Q6J6B1|Q6J6B1_9BURK 7-cyano-7-deazaguanine synthase OS=Collimonas fungivorans OX=158899 GN=queC PE=3 SV=1
MTTPNGAIVLFSGGQDSTTCLAWALSRYERVETIGFDYGQRHAVELTVRPVLLQKIRAQFPQWAGKLGEDHLIDLSLISKISSTAMTEDVEIVMQENGLPNTFVPGRNLLFMTVAATVAYRRGLNVLVGGMCETDFSGYPDCRDDTMKALQVALNLGMATQIKLETPLMWIDKSETWKLAQDLGGDALVDLIRADTHTCYLGQRGALHDWGYGCGTCPACALRARGYQQFRSTGGV

SEQ ID NO: 37570 - protein, 322 aa, Collimonas pratensis
  misc_feature (1)..(322): tr|A0A127QAK9|A0A127QAK9_9BURK ExsB family protein OS=C ollimonas pratensis OX=279113 GN=CPter91_4751 PE=4 SV=1
MDSLSIAWWKRPDLAITINYGQLAAKAEILASQTVCAELNIEHIVIDLDCRALGSGDMARNNANVNAPASDWWPYHNQLLITLAAMKAISLNVTHLWIETVKSDGIHLDGTPNFVASICKLLIEQDGAMQVEAPAIEMSTGELVRIADRALLSDGFPPSFWSGSPAEIGAEMKAVGAHQADFIVAQTSDRDAGCMEVASPPAECAGRTGSFYWDENNIATPNFHQSQSAISDYRAVLSNGLPILWWQTPMSVPSATTGCTNQHYRYNRVDYMLRNPQEYGDIHTFAIVFRAGGAFQTTINTDGGQFARLLSQYFTQGGATLR

SEQ ID NO: 37571 - protein, 236 aa, Collimonas pratensis
  misc_feature (1)..(236): tr|A0A127QBA8|A0A127QBA8_9BURK 7-cyano-7-deazaguanine s ynthase OS=Collimonas pratensis OX=279113 GN=queC PE=3 SV=1
MTTPNGAIVLFSGGQDSTTCLAWALARYDRVETIGFDYGQRHAVELTVRPILLQKIRAQFPHWADKLGEDHMIDLSLISKISSTAMTEDVEIVMQENGLPNTFVPGRNLLFMTVAATVAYRRGLNVLVGGMCETDFSGYPDCRDDTMKALQVALNLGMATQLKLETPLMWIDKSETWKLAQDLGGDALVDLIRADTHTCYLGERGALHDWGYGCGTCPACALRARGYQQFRQGPAA

SEQ ID NO: 37572 - protein, 236 aa, Collimonas sp.
  misc_feature (1)..(236): tr|A0A1H3J287|A0A1H3J287_9BURK 7-cyano-7-deazaguanine s ynthase OS=Collimonas sp. OK242 OX=1798195 GN=queC PE=3 SV=1
MTTPNGAIVLFSGGQDSTTCLAWALARYERVETIGFDYGQRHAVELTVRPVLLQKIRAQFPQWAGKLGEDHMIDLSLISKISSTAMTEDVEIVMQENGLPNTFVPGRNLLFMTVAATVAYRRGLNVLVGGMCETDFSGYPDCRDDTMKALQVALNLGMATRLKLETPLMWIDKSETWKLAQDLGGDALVDLIRADTHTCYLGERGTLHDWGYGCGTCPACALRARGYQQFKQNPTA

SEQ ID NO: 37573 - protein, 236 aa, Collimonas sp.
  misc_feature (1)..(236): tr|A0A1I1H062|A0A1I1H062_9BURK 7-cyano-7-deazaguanine s ynthase OS=Collimonas sp. OK412 OX=1801619 GN=queC PE=3 SV=1
MTTPNGAIVLFSGGQDSTTCLAWALSRYERVETIGFDYGQRHAVELTVRPVLLQKIRAQFPQWAGKLGEDHLIDLSLISKISSTAMTEDVEIVMQENGLPNTFVPGRNLLFMTVAATVAYRRGLNVLVGGMCETDFSGYPDCRDDTMKALQVALNLGMATQLKLETPLMWIDKSETWKLAQDLGGDTLVDLIRADTHTCYLGQRGALHDWGYGCGTCPACALRARGYQQFRQAAGA

SEQ ID NO: 37574 - protein, 218 aa, Colwellia beringensis
  misc_feature (1)..(218): tr|A0A222GCE7|A0A222GCE7_9GAMM 7-cyano-7-deazaguanine s ynthase OS=Colwellia beringensis OX=1967665 GN=queC PE= 3 SV=1
MSNKVVVIFSGGMDSFTVLHRALKDGKEVYALTFDYGQKHVKEIACASKVCQQLGVAHKVIDISAINQLLAGSSLTDDIDIPEGHYEAESMKSTVVPNRNMILLSLAVGYAVSVKASQVYYGAHSGDHAIYPDCRPEFVMKMNDVCKIANYEAVEIFSPYLTNSKSDILTDGLNMGLSYDDTWTCYNGREKACGKCGACQERLEAFADNNVTDPLAYE

SEQ ID NO: 37575 - protein, 218 aa, Colwellia chukchiensis
  misc_feature (1)..(218): tr|A0A1H7M9Z5|A0A1H7M9Z5_9GAMM 7-cyano-7-deazaguanine s ynthase OS=Colwellia chukchiensis OX=641665 GN=queC PE= 3 SV=1
MSNKVVVIFSGGMDSFTVLNRALKDGKEVYALTFDYGQKHVKEIACASKVCQQLGVSHKVIDISAINQLLAGSSLTDDIEIPEGHYQADNMKSTVVPNRNMILLSLAVGYAVSVEAEQVYYGAHSGDHDIYPDCRPEFVMKMNEVCQIANYQAVEIFSPYLTNNKSEILTDGLKMGLDYQDTWTCYNGRKKACGKCGACQERLEAFADNNVTDPIAYE

SEQ ID NO: 37576 - protein, 218 aa, Colwellia demingiae
  misc_feature (1)..(218): tr|A0A5C6QA93|A0A5C6QA93_9GAMM 7-cyano-7-deazaguanine s ynthase OS=Colwellia demingiae OX=89401 GN=queC PE=3 SV =1
MAEKVVVIYSGGMDSFTVLNRARKDGKEVFALSFNYGQRHVKELECASTVCNELAINHKVIDISAINQLLAGSSLTDDIDIPEGHYEADSMKSTVVPNRNMILLSLAVAYAVSVGADQVYYGAHSGDHAIYPDCRPEFVEKMNDVCKIANYESVEIFSPYLSVDKTAILADGIAMGLDYSNTWTCYNGRDKACGKCGACEERLQAFEENDVTDPITYE

SEQ ID NO: 37577 - protein, 218 aa, Colwellia hornerae
  misc_feature (1)..(218): tr|A0A5C6QM67|A0A5C6QM67_9GAMM 7-cyano-7-deazaguanine s ynthase OS=Colwellia hornerae OX=89402 GN=queC PE=3 SV= 1
MTNKVVVIYSGGMDSFTVLNRALHDGKEVFALTFDYGQRHVKEIKFASTVCQSLDVNHKIIDISAINQLLAGSSLTDNIDIPEGHYEAESMKSTVVPNRNMILLSLAVGYAVSVGASQVYYGAHSGDHAIYPDCRPEFVMKMNEVCKIANYESVEIFSPYLTVTKSDILTDGLKMGLSYDNTWTCYNGREKACGKCGACQERLEAFSDNNVSDPLSYE

SEQ ID NO: 37578 - protein, 218 aa, Colwellia marinimaniae
  misc_feature (1)..(218): tr|A0A1Z5I5Z5|A0A1Z5I5Z5_9GAMM 7-cyano-7-deazaguanine s ynthase OS=Colwellia marinimaniae OX=1513592 GN=queC PE =3 SV=1
MTEKVVVIYSGGMDSFTVLNRAQKDGKQVFALSFNYGQRHVKELQCASTVCNGLGINHKVIDISAINQLFAGSSLTDDIDIPEGHYEADSMKSTLVPNRNMILLSLAVAYAVSVGAEQVYYGAHSGDHAIYPDCRPEFVEKMNDVCKIANYESVEIFSPYLTVNKTAILADGIAMGLDYSNTWTCYNGRDKACGKCGACQERLEAFFENNITDPIPYE

SEQ ID NO: 37579 - protein, 218 aa, Colwellia psychrerythraea
  misc_feature (1)..(218): sp|Q480C9|QUEC1_COLP3 7-cyano-7-deazaguanine synthase 1 OS=Colwellia psychrerythraea (strain 34H / ATCC BAA-68 1) OX=167879 GN=queC1 PE=3 SV=1
MAEKVVVIYSGGMDSFTVLNRAKKDGKEVFALSFDYGQRHVKELECASIVCKELAVNHKVIDISAINQLLAGSSLTDDIDIPEGHYEAESMKSTVVPNRNMILLSLAVAYAVSVGAEQVYYGAHSGDHAIYPDCRPEFVEKMNDVCKIANYESVEIFSPYLSVDKTAILADGIKMGLDYSNTWTCYNGREKACGKCGSCQERLEAFEENNATDPIPYE

SEQ ID NO: 37580 - protein, 219 aa, Colwellia psychrerythraea
  misc_feature (1)..(219): sp|Q47ZY2|QUEC2_COLP3 7-cyano-7-deazaguanine synthase 2 OS=Colwellia psychrerythraea (strain 34H / ATCC BAA-68 1) OX=167879 GN=queC2 PE=3 SV=1
MKKLVVIYSGGMDSFTALNKAVKEGFDVYALSFDYGQKHNKELIYAQNVCNELNVPHKILDIKSISTLFTSSSLVSDDINVPDGHYEADNMKSTVVPNRNMILISLAIGYAVDIEAEGVWYGAHSGDHLIYPDCRPEFVKVMDQASKVANFEPVYVHAPYLNTDKIGILKDGIKMGLDYSKTWTCYQGKEKACGTCGSCVERLEAFQANNIDDPVQYSI

SEQ ID NO: 37581 - protein, 219 aa, Colwellia sp.
  misc_feature (1)..(219): tr|A0A1D8S0B8|A0A1D8S0B8_9GAMM 7-cyano-7-deazaguanine s ynthase OS=Colwellia sp. PAMC 20917 OX=1816218 GN=queC PE=3 SV=1
MTNKVVVIYSGGMDSFTVLNRALHDGKEVFALTFDYGQRHVKEIEFASTVCQSLDVNHKIIDISSINQLLAGSSLTDNIDIPEGHYEAESMKSTVVPNRNMILLSLAVGYAVSVGASQVYYGAHSGDHAIYPDCRPEFVMKMNEVCKIANYESVEIFSPYLTVTKSDILTDGLKMGLSYDNTWTCYNGREKACGKCGACQERLEAFSDNNVTDPLSYES

SEQ ID NO: 37582 - protein, 218 aa, Colwellia sp.
  misc_feature (1)..(218): tr|A0A2G2FHD8|A0A2G2FHD8_COLSX 7-cyano-7-deazaguanine s ynthase OS=Colwellia sp. OX=56799 GN=queC PE=3 SV=1
MTQKVVVIYSGGMDSFTVLNKALQQGHDVYALSFDYGQRHVKELKVAANVCEKLNVPHKIVDISAINQLIGGSSLTDNIDVPEGHYEEESMKSTIVPNRNMILLSLAVGYAVSLKASQVYYGAHSGDHAIYPDCRPEFVKKMDDVCRIANYDAVEIFSPYLNNTKIDILTDGIKMGLDYSQTWTCYNGREKACGKCGACQERLEAFALNNITDPLEYE

SEQ ID NO: 37583 - protein, 250 aa, Comamonadaceae bacterium
  misc_feature (1)..(250): tr|A0A3M6QVG1|A0A3M6QVG1_9BURK 7-cyano-7-deazaguanine s ynthase OS=Comamonadaceae bacterium NML180581 OX=247874 5 GN=queC PE=3 SV=1
MHSSALVLFSGGQDSATCLADALTRYPRVETIGFDYGQRHHVELQQRQAVLDALRQRFPQWSQRLGPDHMIGLNALGQISDTALTRECAITLEQSGLPNTFVPGRNLVFLTFAAALAYRRGLQAIVTGVCEADYSGYPDCRDDTMKAMQVALSLGMAWRLLIETPLMWLDKAQTWQLAHRLGQQADPAGGGDALVQLIVEHSHTCYLGQRQQRHDWGYGCGQCPACQLRASGWARWRGEQGGAAPLLTTA

SEQ ID NO: 37584 - protein, 239 aa, Comamonadaceae bacterium
  misc_feature (1)..(239): tr|A0A257EA44|A0A257EA44_9BURK 7-cyano-7-deazaguanine s ynthase OS=Comamonadaceae bacterium PBBC1 OX=2015580 GN =queC PE=3 SV=1
MHTSALVLFSGGQDSTTCLAHALTRYERVETLAFDYGQRHKVELDARMNVLAAIRARFPQWAPKMGEDHLLDAGILGQISETSLTRDTAIAMESSGLPNTFVPGRNLLFLTLAAALAYRRGLQVIVTGVCETDFSGYPDCRDDTMKAMQVALSLGMDRKLLIETPLMWIDKAQTWQLAHDLGQKADPAQGGQALVDLIVEHTHTCYLGDRSQRHDWGYGCGQCPACQLRAAGFGRYPKP

SEQ ID NO: 37585 - protein, 227 aa, Comamonas aquatica
  misc_feature (1)..(227): tr|A0A014QAM9|A0A014QAM9_9BURK 7-cyano-7-deazaguanine s ynthase OS=Comamonas aquatica DA1877 OX=1457173 GN=queC PE=3 SV=1
MFSGGQDSTTCLAHALSKYDRVETLGFDYGQRHSVELQARLTVLQQLRAQFPQWAHKLGEDHVLSLDVLKQIGGSSLTEDVAFAMQADGLPNTFVPGRNLLFLTLAGALAYRRGLQVIVTGVCETDFSGYPDCRDDTMKAMQLALNLGLERRLRIETPLMWIDKAATWQMAQDLGGDALVQLIVQDTHTCYEGTRDVLHAWGHGCGHCPACDLRAKGWQRWHAAQAA

SEQ ID NO: 37586 - protein, 234 aa, Comamonas aquatica
  misc_feature (1)..(234): tr|A0A1B2D182|A0A1B2D182_9BURK 7-cyano-7-deazaguanine s ynthase OS=Comamonas aquatica OX=225991 GN=queC PE=3 SV =1
MHTSALVMFSGGQDSTTCLAHALSKYDRVETLGFDYGQRHSVELQARLTVLQQLRAQFPQWAPKLGEDHVLSLDVLKQIGGSSLTEDVAFAMQADGLPNTFVPGRNLLFLTLAGALAYRRGLQVLVTGVCETDFSGYPDCRDDTMKAMQLALNLGLERRLCIETPLMWIDKAATWQMAQDLGGDALVQLIVQDTHTCYEGTRDVLHAWGHGCGHCPACDLRAKGWQRWRAAQAA

SEQ ID NO: 37587 - protein, 234 aa, Comamonas kerstersii
  misc_feature (1)..(234): tr|A0A0W7Z8P6|A0A0W7Z8P6_9BURK 7-cyano-7-deazaguanine s ynthase OS=Comamonas kerstersii OX=225992 GN=queC PE=3 SV=1
MHTSALVMFSGGQDSTTCLAHALSKYERVETLGFHYGQRHSVEMDVRLDVREKLRAGFPQWASRLGEDHVLSLDVLQEIGGSSLTDDMAFALQADGLPNTFVPGRNLLFLTVAGALAYRRGIQVIVTGVCETDFSGYPDCRDDTMKAMQLALNLGLERRLRIETPLMWIDKAQTWQMAQDLGGEQLVELIVKDTHTCYQGTRDVLHDWGYGCGSCPACDLRAKGWQRWKATQAS

SEQ ID NO: 37588 - protein, 234 aa, Comamonas kerstersii
  misc_feature (1)..(234): tr|A0A1V3TMG5|A0A1V3TMG5_9BURK 7-cyano-7-deazaguanine s ynthase OS=Comamonas kerstersii OX=225992 GN=queC PE=3 SV=1
MHTSALVMFSGGQDSTTCLAHALSKYERVETLGFHYGQRHSVEMDVRLDVREKLRAGFPQWASRLGEDHVLSLDVLQEIGGSSLTDDMAFALQADGLPNTFVPGRNLLFLTVAGALAYRRGIQVIVTGVCETDFSGYPDCRDDTMKAMQLALNLGLERRLRIETPLMWIDKAQTWQMAQDLGGDKLVELIVKDTHTCYQGTRDVLHDWGYGCGSCPACDLRAKGWQRWKATQAS

SEQ ID NO: 37589 - protein, 233 aa, Comamonas serinivorans
  misc_feature (1)..(233): tr|A0A1Y0EI88|A0A1Y0EI88_9BURK 7-cyano-7-deazaguanine s ynthase OS=Comamonas serinivorans OX=1082851 GN=queC PE =3 SV=1
MPRGALVLFSGGQDSATCLAWALARFPHVETLAFDYGQRHRVELDCRLRLRAGLRDLAAPWASRLGDDHLLKVDVLGQLGGSAMTDDVAIAMQADGLPNTFVPGRNLLFFTLAAALAYRRGLQVLVGGMSQTDYSGYPDCRDNTLKALQVALSLGVDRPLTLATPLMWRDKADTWALAHTLGGDALVELIRRESHTCYLGQRGDLHDWGHGCGTCPACALRANGWAQWRGQRA

SEQ ID NO: 37590 - protein, 232 aa, Comamonas sp.
  misc_feature (1)..(232): tr|A0A363RV52|A0A363RV52_9BURK 7-cyano-7-deazaguanine s ynthase OS=Comamonas sp. JNW OX=2170731 GN=queC PE=3 SV =1
MQDAKALVLFSGGQDSTVCLAWALSRYAQVETIGFDYGQNHRVELECRSTVLAHLRAQFPQWAAKLGEDHLLNIDVLGQISDTALTRDAALAYQADGLPNTFVPARNLVFLTLASAVAYRRQCTVLVGGMCETDFSGYPDCRDNTMKAMQVALSLGLGRQLVVETPLMWIDKAATWQLAQDLGGDALTALVQEDTHTCYQGDRSERHDWGYGCGECPACALRAQGFARWKRG

SEQ ID NO: 37591 - protein, 235 aa, Comamonas sp.
  misc_feature (1)..(235): tr|A0A1D2U974|A0A1D2U974_9BURK 7-cyano-7-deazaguanine s ynthase OS=Comamonas sp. SCN 67-35 OX=1660096 GN=queC P E=3 SV=1
MPDTRHALVLLSGGQDSATCLAWALAHFARVETVGFDYGQRHHVELDCRERLRTGMQAMPWPGTLGADHLLHVDVLRELGSSAMIDEVAITLQADGLPNTFVPGRNLLFFTLAAALAYRRGLTVLVGGMSETDYSGYPDCRDNTLKALQVALSLGVDRPLVVETPLMWRDKAATWALAHALGGDALVELIRRDSHTCYLGQRGVLHDWGYGCGQCPACELRARGWRAWAQGNASV

SEQ ID NO: 37592 - protein, 234 aa, Comamonas terrigena
  misc_feature (1)..(234): tr|A0A2A7UQ14|A0A2A7UQ14_COMTR 7-cyano-7-deazaguanine s ynthase OS=Comamonas terrigena OX=32013 GN=queC PE=3 SV =1
MHTSALVMFSGGQDSTTCLAHALSKYDRVETLGFDYGQRHRVELQARHTVRDRLRAQFPQWAPRLGEDHVLTLDVLQQIGGSSLTEDVAFAMQADGLPNTFVPGRNLLFLTLAGALAYRRGLQVIVTGVCETDFSGYPDCRDDTMKAMQLALNLGLERRLRIETPLMWIDKAQTWQMAQDLGGDALVELVVRDTHTCYQGTRDALHDWGYGCGSCPACELRAKGWQRWRAAATD

SEQ ID NO: 37593 - protein, 253 aa, Comamonas testosteroni
  misc_feature (1)..(253): tr|A0A076PZ92|A0A076PZ92_COMTE 7-cyano-7-deazaguanine s ynthase OS=Comamonas testosteroni TK102 OX=1392005 GN=q ueC PE=3 SV=1
MANTSTSSANLAAPVAGAGHHKGALVLFSGGQDSTTCLAQALAMFERVETLGFDYGQRHSVEMQVRAGVREQLAQRFPQWAPRLGEDHVLSLDVLKQIGGSSLTEDVAFAMQADGLPNTFVPGRNLLFLTLAGALAYRRGLTVIVTGVCETDYSGYPDCRDDTMKAQQLALNLGLERRLRIDTPLMWLDKAQTWQLAHDLGGSDLVELIRTETHTCYQGTRDVLHDWGYGCGSCPACELRASGWHNWRASQSA

SEQ ID NO: 37594 - protein, 253 aa, Comamonas testosteroni
  misc_feature (1)..(253): tr|A0A0L7MIT7|A0A0L7MIT7_COMTE 7-cyano-7-deazaguanine s ynthase OS=Comamonas testosteroni OX=285 GN=queC PE=3 S V=1
MANTSTSSANLAAHVAGAGHHKGALVLFSGGQDSTTCLAQALAMFERVETLGFDYGQRHSVEMQVRAGVREQLAERFAHWAPRLGEDHVLSLDVLKQIGGSSLTEDVAFAMQADGLPNTFVPGRNLLFLTLAGALAYRRGLTVIVTGVCETDYSGYPDCRDDTMKAQQLALNLGLERRMRIDTPLMWLDKAQTWQLAHDLGGDALVELIRTETHTCYQGTRDVLHDWGYGCGSCPACELRASGWKNWRASQGA

SEQ ID NO: 37595 - protein, 254 aa, Comamonas thiooxydans
  misc_feature (1)..(254): tr|A0A096E5U0|A0A096E5U0_9BURK 7-cyano-7-deazaguanine s ynthase OS=Comamonas thiooxydans OX=363952 GN=queC PE=3 SV=1
MANTSTSSASPAAQVAGAGHHKGALVLFSGGQDSTTCLAQALAMFERVETLGFDYGQRHSVEMQVRAGVREQLVERFPLWAPRLGEDHVLSLDVLKQIGGSSLTEDVAFAMQADGLPNTFVPGRNLLFLTLAGALAYRRGLTVIVTGVCETDYSGYPDCRDDTMKAQQLALNLGLERRLRIDTPLMWLDKAQTWQLAHDLGGSDLVELIRTETHTCYQGTRDALHEWGYGCGSCPACELRASGWRNWRASQSAA

SEQ ID NO: 37596 - protein, 254 aa, Comamonas thiooxydans
  misc_feature (1)..(254): tr|A0A0E3BTJ6|A0A0E3BTJ6_9BURK 7-cyano-7-deazaguanine s ynthase OS=Comamonas thiooxydans OX=363952 GN=queC PE=3 SV=1
MANTSTSSASPAAQVAGAGHHKGALVLFSGGQDSTTCLAQALAMFERVETLGFDYGQRHSVEMQVRAGVREQLAERFPLWAPRLGEDHVLSLDVLKQIGGSSLTEDVAFAMQADGLPNTFVPGRNLLFLTLAGALAYRRGLTVIVTGVCETDYSGYPDCRDDTMKAQQLALNLGLERRLRIDTPLMWLDKAQTWQLAHDLGGSDLVELIRTETHTCYQGTRDALHEWGYGCGSCPACELRASGWRNWRASQSAA

SEQ ID NO: 37597 - protein, 242 aa, Commensalibacter intestini
  misc_feature (1)..(242): tr|G6F1Y2|G6F1Y2_9PROT 7-cyano-7-deazaguanine synthase OS=Commensalibacter intestini A911 OX=1088868 GN=queC P E=3 SV=1
MTDHPSDSFSNSALVLFSGGQDSTTCLAWALQRFQKVETLGFHYGQRHHIEMKCRHGIREKIKDIHPLWSDRLGEDHVLNLSDLGAISDTALTRKTAIEWDKQGLPSTFVPGRNLLFLTYAAIIADRRHLRHIIGGMCETDYSGYPDCRDDTIKALQVAINLGISNRFVLHTPLMWLDKAQEWQMAEQLGGNSLVNLINEETHSCYLGDRSHHHEWGYGCGTCPACELRRSGWESYIQQKEQ

SEQ ID NO: 37598 - protein, 242 aa, Commensalibacter intestini
  misc_feature (1)..(242): tr|A0A251ZVS6|A0A251ZVS6_9PROT 7-cyano-7-deazaguanine s ynthase OS=Commensalibacter intestini OX=479936 GN=queC PE=3 SV=1
MTDHPSDSFSNSALVLFSGGQDSTTCLAWALQRFQKVETLGFHYGQRHHIEMKCRHGIREKIKDIHPLWSDRLGEDHVLNLSDLGAISDTALTRETAIEWDKQGLPSTFVPGRNLLFLTYAAIIADRRHLRHIIGGMCETDYSGYPDCRDDTIKALQVAINLGISNRFVLHTPLMWLDKAQEWQMAEQLGGNSLVNLINEETHSCYLGDRSHHHEWGYGCGTCPACELRRSGWESYIQQKEQ

SEQ ID NO: 37599 - protein, 242 aa, Commensalibacter sp.
  misc_feature (1)..(242): tr|W7DUJ1|W7DUJ1_9PROT 7-cyano-7-deazaguanine synthase OS=Commensalibacter sp. MX01 OX=1208583 GN=queC PE=3 SV =1
MTEIVNPLFSNSALVLFSGGQDSTTCLAWALQRFQKVETLGFNYGQRHSIEMECRHEIRKKIQRINPLWQRRLGEDHVMNLSDLGAISDTALTRETAIEWDKQGLPSTFVPGRNLLFLTYAAIIADRRHLKHIVGGMCETDYSGYPDCRDDTIKALQVAINLGMSNRFVLQTPLMWLDKAQEWQMAEQLGGMSLIELINKDTHSCYLGDRSHYHEWGYGCGECPACELRRAGWNNYVQQKEQ

SEQ ID NO: 37600 - protein, 243 aa, Commensalibacter sp.
  misc_feature (1)..(243): tr|A0A318NBX7|A0A318NBX7_9PROT 7-cyano-7-deazaguanine s ynthase OS=Commensalibacter sp. ESL0284 OX=2070537 GN=q ueC PE=3 SV=1
MKKTADFSEGALVLFSGGQDSTTCLAWALTHFSIVETLGFDYGQRHFVEMECRSVIREKILNIQPEWKERLGEDHILKLSDLGAISDTSLTRETEIEWNRQGLPSTFVPGRNLLFLTYAAIIANRRNLRHLVGGMCETDFSGYPDCRDDTLKALQVALNLGMNTRFVLHTPLMWLDKAAEWKLAAILGNDSLIELINKETHSCYLGDRTHYHEWGYGCGHCPACELRQAGWETYLRQKEMFGV

SEQ ID NO: 37601 - protein, 226 aa, Conchiformibius steedae
  misc_feature (1)..(226): tr|A0A3P2A109|A0A3P2A109_9NEIS 7-cyano-7-deazaguanine s ynthase OS=Conchiformibius steedae OX=153493 GN=queC PE =3 SV=1
MSQALVVFSGGQDSTTCLFLALREHGAGKVRAIAFRYGQRHAVELDKAAAIARDLNVPLTVLDLSVMQSVTHNALMDDHAAISSNSQGMPNTFVDGRNALFLLYAAIFAKSHAIHDIYIGVCETDFSGYPDCRAEFIRSMQQTLQLAMDYPFQLHTPLMYLTKKQTWALADELGAFDFVRTRTHTCYLGVEGGCGECPSCILRERGLREYLAERAHTESTQQGTQP

SEQ ID NO: 37602 - protein, 467 aa, Conexibacter sp.
  misc_feature (1)..(467): tr|A0A2T4UH85|A0A2T4UH85_9ACTN Uncharacterized protein OS=Conexibacter sp. Seoho-28 OX=2133960 GN=C7Y72_02475 PE=4 SV=1
MQRYEPLNFDGGDGPRVDWESGFRLDDQQIAFGLGRALSPRLSDLLDIAMSAYVTDRLRPRRPPGSRGSEDWSRELPVRIAVRDEAFWRQADVAEALRDLLEWLTDDVWGFEFLGGRRQHRFAESQDPLFGMDPIPNARFGLYSGGLDSYAGAASDAAEADRELVLVSATTSKPMGAMQQRTLAALKASSPASIRALQVPVALRGEAIARLAGRRDAPEASQRTRGLVFLVLGAVSAATAGGRELRVYENGVGAMNLPLTEAQYGSHNTRAMRPETLVKASGLMSLVLEDAFDIVNPSFTKTKAQMCALLQGVVRNGIRTTVSCDTGLTHRASKVHLCGTCTSCLLRRQALRAGGLADEDDAEASLYRTDVREVAAGSDKRALRLHYMLNQAAQMDRALREPTPVDALVRAFPDLRRIHDALLAQGYHDPVGLTQGLLTTYVEEWARFEHPLTVRYLPQGERTGVAA

SEQ ID NO: 37603 - protein, 1381 aa, Confluentibacter sp.
  misc_feature (1)..(1381): tr|A0A2N3HGU3|A0A2N3HGU3_9FLAO Carrier domain-containin g protein OS=Confluentibacter sp. 3B OX=1909700 GN=CSW0 8_15240 PE=4 SV=1
MIDQSKSKLYALTQSQLSLWLGQKLHPNVPLYNVPYAYHIHEEIDEGVFAKAFSDMIKQIDVLRTVFIENQNTPYQQIMDDYDYAFEMLDFTSESNVFPVEEWLQKRSEITFDFSKPLFDSVLIKVDSQHYIWFLNVHHLITDASSSVILFDTMSKIYGQIKNHKKPSDLNELFNYSDYVAYEIDQAKNNTEEKKYWERKVDLFTKAPSLYGVKQPLNPTTKSNRVVLNLDFEQSQKLRDLAKQSDIKSWTQELTLFNIFATVIFSYLYRISGQNNIAIGAPIHNRTTNKFKKTAGLFIEVFPLTVDLDEDDTFYTLLQRVKIESNAFLKHAVTGATSAKVSRSFNVIFNYITSSFSNFDGLETNVDWIHPNHNDAAHQMRCHIYDFEATGKIKVVFDLNEGILSSLVMHHFSNILDAFIQDIDQEISKPNLITQQETDAFLLPKLNFDSPYSSILELFETMVKSNPNSVALQCGPETLTYNGLNKKANQFATYLKKEGVVSENKIALYTYRSIEYIVGLLAIMKLRATFILIAADQPKDRVHFMLSNSGASMVLTELPLKTNVLNIELPVLDLKTVIAESSNLSVDNLNIKLTANSIAYILYTSGSTGNPKGVIISHSALSNYLLWAKGYYGIDSKSILPLFTSIGFDLTITSTILPLLNGGRLIVYKENAFGPDISLLQLLGDNLVNTIKLTPSHLSFFKGRDLTNSTIKTMIVGGEDFKVQLGKSITTAFGNNIRIFNEYGPTEATVGCIVSEFNAALHTGASIPIGIPIKNMHAYILDSHKNLVPHGVVGELYLSGASLANGYLDLDELTKAKFVDNPFVTGAKMYHTGDLARINEDGDYEYLGRVDEQIKLRGYRIELTDIESNLMDFKGIDTCAVVLVDNKKRTEEVEKVINCTNCGLPSNYPEIDFDDQGVCHLCNAFKNYEDKVQKYFRTEAELKSILTKNKTNNPSYDCLTLLSGGKDSTYILAQLVGMGLKVLAFTLDNGYISQQAKNNINRIVEKLGVDHIYDSTNHMNQIFVDSLKRHKNVCNGCFKTIYTLSTKIAMEKQIPFIVTGLSRGQFFETRLTEELFWEENLDVTKIDDTILEVRKLYHREEDAVKELLDVSLFENDAVFDKVQFVDFYRYSDVSLEEMLRYLEDTVGWIRPTDTGRSTNCLINQVGIYVHKKEKGYSNYSFPYSWDVRLGHKTRDESLEEINEYIDETEVKRIMNEIGYEDSDNLFENDEKLVAYYTAKDAVSTKDLKAHLLKKVPAYMIPSAFKHLDEMPLTKNGKVDKKVLKEIKYAANKTNDIQTSYVSPRNDIEELVYNVWRDVLRLDKISVHDNFIVLGGHSLAAIRVTSRINDELGMEIPLNKIFNLPTIEAYASHIEQRILESL

SEQ ID NO: 37604 - protein, 232 aa, Confluentimicrobium lipolyticum
  misc_feature (1)..(232): tr|A0A238KQT8|A0A238KQT8_9RHOB 7-cyano-7-deazaguanine s ynthase OS=Confluentimicrobium lipolyticum OX=1524263 G N=queC PE=3 SV=1
MKTLVVCSGGLDSVSLAHKVAAENQLVGLISFNYGQRHAKELASAEACAKRLGVPFDLIDISHLGAALSGSALTDEIDVPDGHYAEDTMKVTVVPNRNAIMLAIAFGIAAARDADAVATAVHGGDHFIYPDCRPEFIDAFQAMQDKALDGYANVRLYTPFVHQPKSAIVTAGAAHGTPFAETWSCYKGGEVHCGRCGTCVERREAFDLAGVEDPTTYADPDFWKAAVAKGGA

SEQ ID NO: 37605 - protein, 226 aa, Congregibacter litoralis
  misc_feature (1)..(226): tr|A4A9S0|A4A9S0_9GAMM 7-cyano-7-deazaguanine synthase OS=Congregibacter litoralis KT71 OX=314285 GN=queC PE=3 SV=1
MNSSKKAVVLVSGGLDSTTVLALAREQGYECYSLSFDYGQRHRAELFAAERVSKTLGDVEHKVVRLNLDSIGGSALTDENIAVPEEASEGIPVTYVPARNTVFLSIALGWAEVLGAQDIFIGVNAVDYSGYPDCRPAFIDAFQQLANVATQVGVEGGRYEIHTPLMDLGKDDIVKLGARLGVDYSQTVSCYQATDDGLACGVCDACRLRREGFVNAGLEDVTRYAN

SEQ ID NO: 37606 - protein, 224 aa, Conservatibacter flavescens
  misc_feature (1)..(224): tr|A0A2M8S1Z6|A0A2M8S1Z6_9PAST 7-cyano-7-deazaguanine s ynthase OS=Conservatibacter flavescens OX=28161 GN=queC PE=3 SV=1
MQLNNPNQNRKAVVIFSGGQDSTTCLLQAIQQYGKQHVEAITFHYGQRHAIELEKAQWIAQDLEIKQTLIDISLIKSITQNALMDSQASIQQQGTIPNTFVDGRNALFLLYTAIYAKGQGIHDIITGVCETDFSGYPDCRDVFIKSMNVTLNLAMDYSFNLITPLMYLTKAQTWALADELGYLDYIRQHTHTCYLGVEQGCGTCPSCELREKGLQTYLASQMPS

SEQ ID NO: 37607 - protein, 438 aa, Conservatibacter flavescens
  misc_feature (1)..(438): tr|A0A2M8S3S1|A0A2M8S3S1_9PAST 7-cyano-7-deazaguanine s ynthase OS=Conservatibacter flavescens OX=28161 GN=CVP0 5_04440 PE=3 SV=1
MTQLVFHHDIEQLKHLSNGVLPIRLYGMGDKNLQIAHIGNMVLDRVRRLGVELNNQVMDFLTIAMAVTAADTFVLRKDTANGWCRSFSITLPLCQPDIWHANKAHLEQILHFLSGDIWQFNFQEDGQLPPKPYKLNGRTKLVDLRNKDSVCLFSGGLDSAIGAIDLLEQGYSPVLVSHSYKGDKSHQQMIVEKFNQSRYANQFSQFNAIAQPHLNNGRTAEITMRTRSLNFLAFAIVSACALQEVVQKEIDIFVPENGVISINAPLTPRRLGTLSTRTTHPYFIQELQKLLTAVNIPFSLKNPYQFKTKGQMIAECKNLPLLQQIIPDTVSCSHWKRKNQQCGVCVPCLIRRASLYYAGITNDAEYEFNDIRKVLTNQDRKDDLFALISAIRRKNHSNMHQWVLQSGSLPIQQLNQFADVFMNGLNEVEQLLIAKEIL

SEQ ID NO: 37608 - protein, 227 aa, Coprobacillus sp.
  misc_feature (1)..(227): tr|H1AM49|H1AM49_9FIRM 7-cyano-7-deazaguanine synthase OS=Coprobacillus sp. 8_2_54BFAA OX=469597 GN=queC PE=3 SV=1
MKALVLFSGGVDSTTALALAIQEHGKDNVVALSISYGQKHTKEIEAANKIAQFYQVEHLYLDLAKIFTYSNCSLLQHSDNEIPHESYNEQLNKTDGNPVSTYVPFRNGLFLSSAASIALSKCCNIIYYGAHSDDAAGSAYPDCSKVFNNAMNQAIYEGSGHQLEIKAPFVEMTKADIVKIGLSLGVPYQLTWSCYEGNDTPCGTCGTCIDRQNAFLKNGIKDPLLGE

SEQ ID NO: 37609 - protein, 227 aa, Coprobacillus sp.
  misc_feature (1)..(227): tr|G9QXV5|G9QXV5_9FIRM 7-cyano-7-deazaguanine synthase OS=Coprobacillus sp. 3_3_56FAA OX=665941 GN=queC PE=3 S V=1
MKALVLFSGGVDSTTALALAIQEHGKDNVVALSISYGQKHTKEIEAANKIAQFYQVEHLYLDLAKIFTYSNCSLLQHSDNEIPHESYNEQLNKTDGNPVSTYVPFRNGLFLSSAASIALSKGCNIIYYGAHSDDAAGSAYPDCSKVFNNAMNQAIYEGSGHQLEIKAPFVEMTKADIVKIGLSLGVPYQLTWSCYEGNDTPCGTCGTCIDRQNAFLKNGIKDPLLGE

SEQ ID NO: 37610 - protein, 220 aa, Coprobacter fastidiosus
  misc_feature (1)..(220): tr|A0A495WB83|A0A495WB83_9BACT 7-cyano-7-deazaguanine s ynthase OS=Coprobacter fastidiosus NSB1 OX=1349822 GN=q ueC PE=3 SV=1
MKQKETALVCFSGGQDSTTCLFWALSHFESVEAVCFIYGQKHVKEVDVARKIAAEAGVPFEVLDVSLIGQLTHNSLTDSSMVMDKEKPEDSYPNTFVPGRNMVFLTFAAIKAFQKGIRHLVTGVSQADFSGYPDCRDTFVRSLNVSLNLAMDAHFEIHTPLMWRDKESVWRLSDELGVFDLVRNETLTCYNGIPADGCGECPACKLRKHGLDLYLKHRNG

SEQ ID NO: 37611 - protein, 220 aa, Coprobacter fastidiosus; identical to SEQ ID NO: 37610
  misc_feature (1)..(220): tr|A0A316R469|A0A316R469_9BACT 7-cyano-7-deazaguanine s ynthase OS=Coprobacter fastidiosus OX=1099853 GN=queC P E=3 SV=1

SEQ ID NO: 37612 - protein, 223 aa, Coprobacter secundus
  misc_feature (1)..(223): tr|A0A0B2JMI6|A0A0B2JMI6_9BACT 7-cyano-7-deazaguanine s ynthase OS=Coprobacter secundus OX=1501392 GN=queC PE=3 SV=1
MKQKETVLVCFSGGQDSTTCLFWALAHFESVQAISFVYGQKHSLEVEMARKIAEKAGVPFEVLDVSLMAQLTDNSLTNPELKMDEEKPENSYPNTFVPGRNMVFLTFAAIVGFQRGIRHLVTGVSQADFSGYPDCRDTFIRSLNVSLNLAMDAQFEIHTPLMWRDKEAVWALSDELGVFDLVRQETLTCYNGIPGDGCGHCPACKLRRNGLEKYLSHRHKKTE

SEQ ID NO: 37613 - protein, 219 aa, Coprobacter sp.
  misc_feature (1)..(219): tr|A0A316SMC7|A0A316SMC7_9BACT 7-cyano-7-deazaguanine s ynthase OS=Coprobacter sp. OX=1941478 GN=queC PE=3 SV=1
MEREESALVCFSGGQDSTTCLYWALSKFKSVQAVSFFYGQKHNREVEVARTIAGKAGVPWEALDMSLLGQLAHCSLTDDAIKMDEDKPANSFPNTFVPGRNMIFLSFAAVIAYNRGIKHLVTGVSEADFSGYPDCRDTFIRSLNVSLNLAMDTQFVIHTPLMWRDKEQVWQLSDELGVFDLIRNETLTCYNGIPGDGCGHCPACKLRRKGLESYLDRRK

SEQ ID NO: 37614 - protein, 226 aa, Coprococcus catus; identical to SEQ ID NO: 36677
  misc_feature (1)..(226): tr|A0A3E2TP11|A0A3E2TP11_9FIRM 7-cyano-7-deazaguanine s ynthase OS=Coprococcus catus OX=116085 GN=queC PE=3 SV= 1

SEQ ID NO: 37615 - protein, 225 aa, Coprococcus catus
  misc_feature (1)..(225): tr|A0A3E2TRV4|A0A3E2TRV4_9FIRM 7-cyano-7-deazaguanine s ynthase OS=Coprococcus catus OX=116085 GN=queC PE=3 SV= 1
MKALVLSSGGVDSTTCLGLAVDKYGSDNVIALAITYGQRHTKEIEAAKAVAAYYHVEMLHLDLTPIFQYSDCSLLSHSDQAIPEESYAEQLQHSDGKPVSTYVPFRNGLFLSSAASIALSKGCDVIYYGAHSDDAAGNAYPDCSEVFKNAMNQAIYEGSGHQLKVEAPFVNLTKADVVKKGLELNVPYELTWSCYEGGEKPCGKCGTCIDRAKAFAANGVADPAL

SEQ ID NO: 37616 - protein, 226 aa, Coprococcus comes; identical to SEQ ID NO: 36677
  misc_feature (1)..(226): tr|A0A3R6A5W4|A0A3R6A5W4_9FIRM 7-cyano-7-deazaguanine s ynthase OS=Coprococcus comes OX=410072 GN=queC PE=3 SV= 1

SEQ ID NO: 37617 - protein, 227 aa, Coprococcus comes
  misc_feature (1)..(227): tr|A0A3R6AKN3|A0A3R6AKN3_9FIRM 7-cyano-7-deazaguanine s ynthase OS=Coprococcus comes OX=410072 GN=queC PE=3 SV= 1
MKALVLFSGGIDSTTALALAINKYGKDRVIALSVSYGQKHDKEIQAAIAVAEYYGVEHLFLDLRKIFTYSNCSLLKQSTEKIPEESYAKQISKTNGETPVSTYVPFRNGLFLSSAASIALSKDCEVIYYGAHADDSAGFAYPDCSPVFNRAMNEAIWEGSGHQLKIEAPFVNVSKAEVVRIGLELNVPYELTWSCYEGGEKPCGKCGTCIDRAAAFQANHVEDPALQ

SEQ ID NO: 37618 - protein, 225 aa, Coprococcus eutactus
  misc_feature (1)..(225): tr|R5VQR7|R5VQR7_9FIRM 7-cyano-7-deazaguanine synthase OS=Coprococcus eutactus CAG:665 OX=1263071 GN=queC PE=3 SV=1
MQNLKNKDEAVVVFSGGQDSTTCLLWALKKYKKVYAVSFDYGQRHALELECAREIADKFGVEHHILDMSLLNQLAPNSLTRTDMKVDENAPDEGTPNSFVDGRNMVFLTFVAIFAKQRGISDIITGVSQSDFSGYPDCRDIFIKSLNTTLNLAMDYEFDIITPLMWIDKMETWKMADELGGLDVIRDMTLTCYNGIKGEGCGHCPSCKLRKKGYDLYMKYKEEHK

SEQ ID NO: 37619 - protein, 230 aa, Coprococcus eutactus
  misc_feature (1)..(230): tr|A8STP5|A8STP5_9FIRM 7-cyano-7-deazaguanine synthase OS=Coprococcus eutactus ATCC 27759 OX=411474 GN=queC PE =3 SV=1
MEDEIMQNLKNKDEAVVVFSGGQDSTTCLLWALKKYKKVYAVSFDYGQRHALELECAREIADKFGVEHHILDMSLLNQLAPNSLTRTDMKVDENAPDEGTPNSFVDGRNMVFLTFVAIFAKQRGISDIITGVSQSDFSGYPDCRDIFIKSLNTTLNLAMDYEFDIITPLMWIDKMETWKMADELGGLDVIRDMTLTCYNGIKGEGCGHCPSCKLRKKGYDLYMKYKEEHK

SEQ ID NO: 37620 - protein, 221 aa, Coprococcus sp.
  misc_feature (1)..(221): tr|A0A417SYV9|A0A417SYV9_9FIRM 7-cyano-7-deazaguanine s ynthase OS=Coprococcus sp. OM04-5BH OX=2293093 GN=queC PE=3 SV=1
MRNKEEAVVVFSGGQDSTTCLLWALSRYKKVYAISFDYGQRHVAELDCAKEIAEKLGVEHYILDMTLLNQLAPNSLTRSDIKVDENAPEVGTPNSFVDGRNHLFLSFVAVFAKQKGISDIITGVSQSDFSGYPDCRDAFVKSLNVTLNLAMDYEFNIITPLMWIDKMETWKMADELGGLELVHDMTLTCYNGIKGDGCGHCPACKLRKRGYDLYMKYKKNK

SEQ ID NO: 37621 - protein, 225 aa, Coprococcus sp.
  misc_feature (1)..(225): tr|D5HHB9|D5HHB9_9FIRM 7-cyano-7-deazaguanine synthase OS=Coprococcus sp. ART55/1 OX=751585 GN=queC PE=3 SV=1
MQNLKNKDEAVVVFSGGQDSTTCLLWALKKYKKVYAVSFDYGQRHALELECAKEIADKFGVEHHILDMGLLNQLAPNSLTRTDMKVDENAPDEGTPNSFVDGRNMVFLTFVAIFAKQRGISDIITGVSQSDFSGYPDCRDIFIKSLNTTLNLAMDYEFDIITPLMWIDKMETWKMADELGGLDVIRDMTLTCYNGIKGEGCGHCPSCKLRKKGYDLYMKYKEDHK

SEQ ID NO: 37622 - protein, 240 aa, Coraliomargarita akajimensis
  misc_feature (1)..(240): tr|D5EK69|D5EK69_CORAD 7-cyano-7-deazaguanine synthase OS=Coraliomargarita akajimensis (strain DSM 45221 / IAM 15411 / JCM 23193 / KCTC 12865 / 04OKA010-24) OX=58335 5 GN=queC PE=3 SV=1
MKTVIIYSGGLDSTVLLYHLRAVGAELFALSVNYGQRHCCELERAAQICAVVDVPHQIADLSSVQSLLAGSSLTSPEIDVAEGHYTEETMKTTVVPNRNMILLALATGHALSVKAESVAYAAHSGDHAIYPDCRNEFADAMAAAMALCDWNQVKLDRPFVDWTKADIVRRGAELKVPFEMTWSCYKGGEVHCGKCGTCIERREAFDIAGVEDPTIYAKDAPSVDSLRANNWRLESSGAKS

SEQ ID NO: 37623 - protein, 217 aa, Coraliomargarita sp.
  misc_feature (1)..(217): tr|R7L2V3|R7L2V3_9BACT 7-cyano-7-deazaguanine synthase OS=Coraliomargarita sp. CAG:312 OX=1262865 GN=queC PE=3 SV=1
MALVIYSGGLDSTVLLYKLFSEGKADGALSVNYGQRHVKEIECARQNCARLGVPFEVADISSLRPLFGASSLTDYSVGVPDGNYADENMKSTVVPNRNMIMLSIAAARAIAIGADSVAYAAHSGDHAIYPDCRPEFAEAVESALKICHYTPITLMRPFIGMSKSEIVRMGADLGVDFSLTWSCYKGGEKHCGTCGTCTERREAFRLAGVDDPTEYLE

SEQ ID NO: 37624 - protein, 237 aa, Coraliomargarita sp.
  misc_feature (1)..(237): tr|A0A424QUW9|A0A424QUW9_9BACT 7-cyano-7-deazaguanine s ynthase OS=Coraliomargarita sp. TMED73 OX=1986604 GN=qu eC PE=3 SV=1
  misc_feature (53)..(53): Xaa can be any naturally occurring amino acid
  misc_feature (63)..(64): Xaa can be any naturally occurring amino acid
MKTVVIYSGGLDSTVLLYKLKAEGRDLHALSVNYGQRHRRELDCAAAICQRIXIPHRTADLSXXRELLAGSSLTSPQIEVAEGHYTEESMKSTVVPNRNMILLSLAAGHALSIGATEVAYAAHSGDHAIYPDCRNEFADAVATAMQLCDWQPVHLIRPFIDQTKAEIVALGAKLSVPFADTWSCYKGGELHCGRCGTCIERREAFHLAGVPDPTPYAPDAPSTDSLIDNQWHLPATA

SEQ ID NO: 37625 - protein, 219 aa, Corallincola sp.
  misc_feature (1)..(219): tr|A0A368NQX5|A0A368NQX5_9GAMM 7-cyano-7-deazaguanine s ynthase OS=Corallincola sp. C4 OX=2282215 GN=queC PE=3 SV=1
MNEKVVVIYSGGMDSYTVLNKAIKQGYDVYALSFDYGQRHVKELEVAASVCKELAIHHKVVDISAINSLIGGSSLTDDIAVAEGHYEEESMKSTVVPNRNMILLSLAVGYAVSLKAGKVFYGAHSGDHAIYPDCRPEFVLKMNEVAKIANYEVVEICSPYLNDSKIDILTDGLKMGLDYSKTWTCYNGRERACGKCGACVERLEAFEKNALKDPLSYEA

SEQ ID NO: 37626 - protein, 231 aa, Corallococcus coralloides
  misc_feature (1)..(231): tr|A0A410S2F6|A0A410S2F6_CORCK 7-cyano-7-deazaguanine s ynthase OS=Corallococcus coralloides OX=184914 GN=exsB PE=3 SV=1
MAKRAVVLLSGGLDSTTCLAMAKADGFEPVCLSIAYGQRHSVELERARKVAATMGVRDVRVVTVDLRQVGGSALTDDIPVPKDRTEDAMSHDVPVTYVPARNALFLSMALGLAEVVGATDLYIGVNAVDYSGYPDCRPEFIRSFETMAQLATKAGVEGATFKVHAPLSGLTKAQIIQAGVKLGVDYGMTHSCYDPDAQGRACGRCDSCLLRAKGFQEAGVPDPTVYTDGVR

SEQ ID NO: 37627 - protein, 231 aa, Corallococcus coralloides
  misc_feature (1)..(231): tr|H8MFS8|H8MFS8_CORCM 7-cyano-7-deazaguanine synthase OS=Corallococcus coralloides (strain ATCC 25202 / DSM 2 259 / NBRC 100086 / M2) OX=1144275 GN=exsB PE=3 SV=1
MAKRAVVLLSGGLDSTTCLAMAKADGFEPVCLSIAYGQRHSVELERAKKVAATMGVRDVRVVTVDLRQVGGSALTDDIPVPKDRTEDAMSHDVPVTYVPARNALFLSMALGLAEVVGATDLYIGVNAVDYSGYPDCRPEFIRSFEAMAQLATKAGVEGATFKVHAPLSGLTKAQIIQAGVKLGVDYGMTHSCYDPDAQGRACGRCDSCLLRAKGFQEAGVPDPTVYTDGGR

SEQ ID NO: 37628 - protein, 231 aa, Corallococcus exiguus
  misc_feature (1)..(231): tr|A0A5C5E1J8|A0A5C5E1J8_9DELT 7-cyano-7-deazaguanine s ynthase OS=Corallococcus exiguus OX=83462 GN=queC PE=3 SV=1
MAKRAVVLLSGGLDSTTCLAMAKADGFEPVCLSIAYGQRHSVELERAKKVAAIMGVRDVRVVTVDLRQVGGSALTDDIPVPKDRSEDDMSHDVPVTYVPARNALFLSMALGLAEVVGATDLYIGVNAVDYSGYPDCRPEFIRSFETMAQLATKAGVEGATFKVHAPLSGLTKAQIIQAGVKLGVDYGMTHSCYDPDAQGRACGRCDSCLLRAKGFQEAGVPDPTVYTDGVR

SEQ ID NO: 37629 - protein, 231 aa, Corallococcus sp.
  misc_feature (1)..(231): tr|A0A554GCM2|A0A554GCM2_9DELT 7-cyano-7-deazaguanine s ynthase OS=Corallococcus sp. Z5C101001 OX=2596829 GN=qu eC PE=3 SV=1
MAKRAVVLLSGGLDSTTCLAMAKADGFEPVCLCIAYGQRHAVELDRARKVAAAMGVRDVRVVSVDLRQVGGSALTDDIPVPKDRSEDAMSHDVPVTYVPARNALFLSLALGLAEVVDATDLYIGVNAVDYSGYPDCRPEFIRSFEAMAQLATKAGVEGARFQVHAPLSGLTKAQIIQAGVKLGVDYGMTHSCYDPDAQGRACGRCDSCVLRAKGFQEAGVPDPTPYTDGVR

SEQ ID NO: 37630 - protein, 231 aa, Corallococcus sp.
  misc_feature (1)..(231): tr|A0A3A8KG82|A0A3A8KG82_9DELT 7-cyano-7-deazaguanine s ynthase OS=Corallococcus sp. CA053C OX=2316732 GN=queC PE=3 SV=1
MAKRAVVLLSGGLDSTTCVAMAKADGFEPVCLSIAYGQRHTVELERARKVAQAMGVRDVRVVNVDLRQIGGSALTDDIPVPKDRTEDAMSHDVPITYVPARNALFLSLALGLAEVVGATDLYIGVNAVDYSGYPDCRPEFIRSFEAMAQLATKAGVEGARFQVHAPLSGLTKAQIIQAGVKLGVDYGMTLSCYDPDPQGRACGHCDSCLLRAKGFQEAGVADPTTYVEGVR

SEQ ID NO: 37631 - protein, 238 aa, Coriobacteriaceae bacterium
  misc_feature (1)..(238): tr|A0A0A8BBS6|A0A0A8BBS6_9ACTN 7-cyano-7-deazaguanine s ynthase OS=Coriobacteriaceae bacterium 68-1-3 OX=153142 9 GN=queC PE=3 SV=1
MDGSVSAASCAVVLSSGGIDSTTCLALAVDRFGAENVTALGVSYGQKHVRELQSARAVAKYYQVAQRTLDLSNVLAASTNALMAHSSRAIEHESYGRQIEERGEGPVSTYVPFRNGLMLSAAAAFALSVYPDRPVLLYLGAHADDAAGSAYPDCSPEFVAAMGRAVELGTYGLVSLEAPFANVNKAAVVKCGLDMAVPYHLTWSCYEGNEKPCGTCGTCIDRIAAFRANGMDDPLEYA

SEQ ID NO: 37632 - protein, 243 aa, Coriobacteriia bacterium
  misc_feature (1)..(243): tr|A0A2V2EAA8|A0A2V2EAA8_9ACTN 7-cyano-7-deazaguanine s ynthase OS=Coriobacteriia bacterium OX=2052159 GN=queC PE=3 SV=1
MEEKALVLCSGGVDSTTLLAMAVSRYGAKNVYALSISYGQRHNKEIESAKAVAAHYGVEQRFLDLGAIFADSDCSLLSHSSQDIPEESYADQLAESDGKPVSTYVPFRNGLFLSAAASMALSLGCGAIYYGAHHDDWAGNAYPDCSREFVDAMNRAIVEGTGGELHLCAPFVEMSKADIVARGIELGVPYELTWSCYEGGDYPCGACGTCIDRNRAFGANGMRDPLLDRLDAERAAANAEGEE

SEQ ID NO: 37633 - protein, 249 aa, Corticibacter populi
  misc_feature (1)..(249): tr|A0A3M6QVF5|A0A3M6QVF5_9BURK 7-cyano-7-deazaguanine s ynthase OS=Corticibacter populi OX=1550736 GN=queC PE=3 SV=1
MRMDALQPRRALVLLSGGQDSATCLAWALARYAHVETIGFDYGQRHRVELDCRTRLREGMAALQPSWTERLGEDHLLTVDVLGQLGGTAMTENVAIAMQADGLPNTFVPGRNLLFFTLAAALAYRRDLEVLVGGMSQTDYSGYPDCRDNTLKALQVALSLGVERPLTLETPLMWLDKARTWELAWQLGGTALVELVRTDSHTCYLGLRGPGHLHAWGHGCGSCPACELRAQGHARWLAAQAAHQGMPQA

SEQ ID NO: 37634 - protein, 232 aa, Cosenzaea myxofaciens
  misc_feature (1)..(232): tr|A0A198FKW9|A0A198FKW9_9GAMM 7-cyano-7-deazaguanine s ynthase OS=Cosenzaea myxofaciens ATCC 19692 OX=1354337 GN=queC PE=3 SV=1
MKKTVVVFSGGQDSTTCLIQAIEQYDEVHCITFNYGQRHKEEIEVAQKISHLLGVAAHKVLDVSLLNELAISSLTRDNIPVPDFKESEESDIPSTFVPGRNILFLTLAAIYAYQIGAESVITGVCETDFSGYPDCRDEFVKALNHAVNLGIARDIKFITPLMWLDKAQTWALADYYNKLEFIRNETLTCYNGVQGDGCGECAACHLRARGLAMYLQDKSRIMTSMKKSVGLK

SEQ ID NO: 37635 - protein, 226 aa, Coxiella burnetii
  misc_feature (1)..(226): sp|Q83A28|QUEC_COXBU 7-cyano-7-deazaguanine synthase OS =Coxiella burnetii (strain RSA 493 / Nine Mile phase I) OX=227377 GN=queC PE=3 SV=2
MKKAVILISGGLDSTTCLAVAKSKGFSCYALSFDYGQKHHSELVAAEKIAAHFNVVRYEVVTLSIGKLGGSALTDNSLDVPDYGGNESIPITYVPARNTIFLSIALGWAEILDAESILIGASAIDYSGYPDCRPEYIAAFQNLANLATKRGIEGHSIKIEAPLIHLSKAETIKLGYSLGVDYSMTVSCYRANEEGLACGYCDSCELRKKGFKEAEIKDPTQYITKV

SEQ ID NO: 37636 - protein, 226 aa, Coxiella burnetii
  misc_feature (1)..(226): sp|A9NBS5|QUEC_COXBR 7-cyano-7-deazaguanine synthase OS =Coxiella burnetii (strain RSA 331 / Henzerling II) OX= 360115 GN=queC PE=3 SV=1
MKKAVILISGGLDSTTCLAVAKSKGFSCYALSFDYGQKHHSELVAAEKIAAHFNVVRHEVVTLSIGKLGGSALTDNSLDVPDYGGNESIPITYVPARNTIFLSIALGWAEILDAESILIGASAIDYSGYPDCRPEYIAAFQNLANLATKRGIEGHSIKIEAPLIHLSKAETIKLGYSLGVDYSMTVSCYRANEEGLACGYCDSCELRKKGFKEAEIKDPTQYITKV

SEQ ID NO: 37637 - protein, 213 aa, Coxiella sp.
  misc_feature (1)..(213): tr|A0A2G1ZXH9|A0A2G1ZXH9_9COXI 7-cyano-7-deazaguanine s ynthase OS=Coxiella sp. (in: Bacteria) OX=59288 GN=queC PE=3 SV=1
MMKKAVVFLSGGVDSTTCLAIAQSQGYACYALTFDYGQRNHHEIVCATAIAKEMEVAEHRIFKVDLQQWKGSALTDATLDVPHERSDVIPITYVPARNTIFLSLALAWAETLGAHDIFFGANADDQLNYPDCRPEYIDAFVKMANLATRERQYQIHTPLLDWDKADIIRKGLSLDVHYSLTLSCYDPDSNGIACGQCDACHFRQQGFDAVKED

SEQ ID NO: 37638 - protein, 228 aa, Coxiella sp.
  misc_feature (1)..(228): tr|A0A0S7XXR2|A0A0S7XXR2_9COXI 7-cyano-7-deazaguanine s ynthase OS=Coxiella sp. DG_40 OX=1703354 GN=queC PE=3 S V=1
MKNKTPKAVILLSGGIDSMTCLGIAKSQNFECYTLSFDYGQRHNFELEAAKKIAAYFNVKEHRVVKINIGELGGSALTDKNIAVPRYQNSNEIPVTYVPARNTIFLSIALGWAEILGANDIFIGVSAIDYSGYPDCRPEFIKAFQNLADLATKVGVKGNSIRINAPLINLSKAETIKLGQKLGIDYSMTVTCYQVDEKGCACGKCDSCVLRIKGFKEAGMVDPTQYKS

SEQ ID NO: 37639 - protein, 219 aa, Crassaminicella sp.
  misc_feature (1)..(219): tr|A0A5C0SHI9|A0A5C0SHI9_9CLOT 7-cyano-7-deazaguanine s ynthase OS=Crassaminicella sp. SY095 OX=2599308 GN=queC PE=3 SV=1
MNKEKAVVIFSGGQDSTTCLFWAKKRFKEVIAISFDYNQKHKLELECAKDICKKHNIEHYILDMALLNQLAPNSLTRTDIEVDKEAPKEGLPNSFVDGRNMLFLTFGAIFAKQRGINHIITGVSQSDFSGYPDCRDVFIKSINVTLNLAMDYQFVIHTPLMWINKEETWKLAYDLGVLDIIKEETLTCYNGIKGNGCGECPACHLRKKGYLDFKKSNNL

SEQ ID NO: 37640 - protein, 234 aa, Crenobacter cavernae
  misc_feature (1)..(234): tr|A0A345Y7D0|A0A345Y7D0_9NEIS 7-cyano-7-deazaguanine s ynthase OS=Crenobacter cavernae OX=2290923 GN=queC PE=3 SV=1
MSIPNQAGRALVVLSGGQDSTTCLFWAIQRFGRDAVEAVTFDYGQRHRVELDAARRIAQMAGVRQTVLPIDTFGVMGGNALTAQDIEPEQGARDDADKTLPNTFVPGRNLVFLTFAAALAWQKGMDHVVTGVAQTDYSGYPDCRENTLKALELAIRLGMDSRVQLHAPLMFMSKAETVHLAEEVGAMEALAYSHTCYNGAVPPCGVCASCELRAKGFAEAGVADPLVVRTRTGA

SEQ ID NO: 37641 - protein, 234 aa, Crenobacter cavernae
  misc_feature (1)..(234): tr|A0A4Q2J9I4|A0A4Q2J9I4_9NEIS 7-cyano-7-deazaguanine s ynthase OS=Crenobacter cavernae OX=2290923 GN=queC PE=3 SV=1
MSIPNQAGRALVVLSGGQDSTTCLFWAIQRFGRDAVEAVTFDYGQRHRVELTAARRIAKMAGVRQTVLPIDTFGVMGGNALTAQDIAPEEGARDDADKTLPNTFVPGRNLVFLTFAAALAWQKGMEHVVTGVAQTDYSGYPDCRENTLKALELAIRLGMDSRVQLHAPLMFMSKAETVHLAEEVGAMEALAYSHTCYNGAVPPCGVCASCELRAKGFAEAGVEDPLVVRTRTGA

SEQ ID NO: 37642 - protein, 234 aa, Crenobacter luteus
  misc_feature (1)..(234): tr|A0A161SIS7|A0A161SIS7_9NEIS 7-cyano-7-deazaguanine s ynthase OS=Crenobacter luteus OX=1452487 GN=queC PE=3 S V=1
MSTPNKTERALVVLSGGQDSTTCLYWAIQRFGRDAVEAVTFDYGQRHRVELTAARHIAQMAGVRQTVLPIDTFGAMGGNALTAADIEPEQGARDDADTALPNTFVPGRNLVFLTFAAALAWQKGMEHVVTGVAQTDYSGYPDCRENTLKALELAIRLGMDSRVQLHAPLMFMSKAETVKLAQQVGAMEALAYSHTCYNGAVPPCGVCASCELRAKGFLEAGVADPLVVRTGAGA

SEQ ID NO: 37643 - protein, 228 aa, Crenobacter sp.
  misc_feature (1)..(228): tr|A0A4V4N957|A0A4V4N957_9NEIS 7-cyano-7-deazaguanine s ynthase OS=Crenobacter sp. GY 70310 OX=2563443 GN=queC PE=3 SV=1
MNHALPDPACALVVLSGGQDSTTCLYWALARYRRVEAVTFDYGQRHRVELDAARTIARMAGVSQTVLPIDTFAALGGNALTDSGIAPAAVEAGALPNTFVPGRNLVFLTFAAALAYQRGLGEIVTGVAEADYSGYPDCRAHTLAALEGAINLGMDTRIRLVAPLMALSKAETVALAAEVGALDALAYSHTCYEGEVPPCGRCVSCELRAKGFAEAGVADPLISRTRGR

SEQ ID NO: 37644 - protein, 224 aa, Crenothrix polyspora
  misc_feature (1)..(224): tr|A0A1R4HF53|A0A1R4HF53_9GAMM 7-cyano-7-deazaguanine s ynthase OS=Crenothrix polyspora OX=360316 GN=queC PE=3 SV=1
MPKKAIVLLSGGLDSVTLLALAQQQGYVCHALSFDYGQRHNAELVAAAQIADEYQVASHKIITLGLGTITGSALTDANIDVPNTPQTGIPVTYVPARNTIFLSFALGWAEVLKVRDIFIGVNAVDYSGYPDCRPAFITAFTALANLATKAGVEGEPFTIHTPLIALSKADIITHGVALGVNYQRTVSCYAADEQGRACGECDACRLRKMGFEQTGIADPTRYQH

SEQ ID NO: 37645 - protein, 224 aa, Crenothrix polyspora
  misc_feature (1)..(224): tr|A0A1R4HAY0|A0A1R4HAY0_9GAMM 7-cyano-7-deazaguanine s ynthase OS=Crenothrix polyspora OX=360316 GN=queC PE=3 SV=1
MQKKAIVLLSGGLDSVTLLALAQQQGYQCYALSFDYGQRHNAELIAAAQIAVDYGVESHKIITLGLGSISGSALTDSDIDVPNTPQTGIPVTYVPARNTIFLSFALGWAEVLKVHDIFIGVNAVDYSGYPDCRPEFIKAFTTLANLATKAGVEGEPFTIHTPLISLSKADIIKQGVALGVDYQRTVSCYAADEQGRACGVCDACRLRAIGFTHAGITDPTRYQR

SEQ ID NO: 37646 - protein, 224 aa, Crenothrix sp.
  misc_feature (1)..(224): tr|A0A1Y2ZXC3|A0A1Y2ZXC3_9GAMM 7-cyano-7-deazaguanine s ynthase OS=Crenothrix sp. D3 OX=1880899 GN=queC PE=3 SV =1
MQKKAIVLLSGGLDSITVLALAQQQGFKCYALSFDYGQRHNAELIAAAQIAADYQVADHKIIKLGLGSIGGSALTDEHIAVPHTLQTGIPVTYVPARNTIFLSFALGWAEVLHLHDIFIGVNAVDYSGYPDCRPEFIESFQKLANLATKAGVEGTHFSIHTPLIHLSKAEIIKTGIALDVDYQRTVSCYSADEQGHACGECDACRLRKAGFIEAGIPDCTRYQK

SEQ ID NO: 37647 - protein, 233 aa, Criblamydia sequanensis
  misc_feature (1)..(233): tr|A0A090D1S4|A0A090D1S4_9BACT 7-cyano-7-deazaguanine s ynthase OS=Criblamydia sequanensis CRIB-18 OX=1437425 G N=quec1 PE=3 SV=1
MAPKMKKKAVVIHSGGMDSSICLALAIEKHGRENVLSLSFFYNQRHTEEVNQAALISKDWKVDHIELPIDCLQEITESALIGKSQAIQHDKGKEANTLVVGRNGLMIRLASIHAHFLGAKEVYTGVIELDGKANGYRDCTREYVDLLEKILRMDFDDDSFEIKTPLVFLTKKETLEVAHQMGLLDYLLQNTITCYEGVKWAGCKKCPSCLLRNQGLKEFKKDHPEFQLPFSLD

SEQ ID NO: 37648 - protein, 223 aa, Criblamydia sequanensis
  misc_feature (1)..(223): tr|A0A090D353|A0A090D353_9BACT 7-cyano-7-deazaguanine s ynthase OS=Criblamydia sequanensis CRIB-18 OX=1437425 G N=quec3 PE=3 SV=1
MKAIILFSGGLDSTVLLAKALEEKKQVFLLSFDYGQRHIVELSSAQKIASHYGLTIKTLKLPNDCFRGSSLIGDGEVSREIKELKVNDIPTTYVPARNTLFFAFAMGFAETIDANEIHYGANKLDYNAYPDCRPEFISAFQKVLDIGSKNANLGKPIKLCTPLVHLDKSEIIQLGKKLKAPIELSFSCYSPSQEGLSCEECLSCRLRNEGFKNVDQSARARYL

SEQ ID NO: 37649 - protein, 438 aa, Cricetibacter osteomyelitidis
  misc_feature (1)..(438): tr|A0A4R2TJ12|A0A4R2TJ12_9PAST 7-cyano-7-deazaguanine s ynthase OS=Cricetibacter osteomyelitidis OX=1521931 GN= EDC44_10262 PE=3 SV=1
MTQLVFHHDIEQLKNLPNNVVPVQLYGTGDKNLQIANIGNKVLDSVRRLGAGLNDQVMDFLTIAMAVTAADTFVLRKDTANGWCRSFSITLPLCQPDIWQASKAHLEQILHFLSGDIWQFDFQENGQFPPRPYSQNGRAKLVDLRNKDCVCLFSGGLDSAIGAIDLLELGYSPVLVSHSYKGDRSRQQAIIQQLNQNGYINQFSQFNAIAQPHLNNGRTTEITMRTRSLNFLAFAIASAYALQEVVQEEIDVFVPENGVISINAPLTARRVGTLSTRTTHPYFIQEIQKLFTAINIPFTLKNPYQFKTKGQMIEKCRNLPLLQEIIPSTVSCSHWKRKNQQCGVCVPCLIRRASLHYAGMTNDAEYEFNDIRQILTNQDRKDDLFALISAIRQKNHRNMNQWVLQSGSLPIQQLNQFADVFMNGLNEVEQLLIANRIL

SEQ ID NO: 37650 - protein, 223 aa, Cricetibacter osteomyelitidis
  misc_feature (1)..(223): tr|A0A4R2T2Z6|A0A4R2T2Z6_9PAST 7-cyano-7-deazaguanine s ynthase OS=Cricetibacter osteomyelitidis OX=1521931 GN= queC PE=3 SV=1
MKNTNPTHRKAVVIFSGGQDSTTCLVKAIRDYGVENVETVTFQYGQRHSIELEKARWIAQDLGVKQTLVDMSVIKAITQNALMDTQAKIEQQGDMPNTFVDGRNALFLLYTAIYAKGQGITDIITGVCETDFSGYPDCRDVFIKSMNVTINLAMDYNFNIITPLMYLTKAQTWRLADELGYLDYIQRHTHTCYLGVEQGCGECPSCILREKGLQEYLGSKNKN

SEQ ID NO: 37651 - protein, 232 aa, Crinalium epipsammum
  misc_feature (1)..(232): tr|K9W4C8|K9W4C8_9CYAN 7-cyano-7-deazaguanine synthase OS=Crinalium epipsammum PCC 9333 OX=1173022 GN=queC PE= 3 SV=1
MKAVVLLSGGLDSSTVLYQAKMDGCVVHAISFDYQQRHQLELQAATKIASAAGVIEHQIIAFDLRRWGGSALTDDAIAVPTNRILTDISEYIPVTYVPARNTIFLSFALAFAEAKGAERVYIGVNAVDYSGYPDCRPDYIQAMQEVFRLGTKQGREGEPISIVAPLIKLKKTEIIQLGNNLGVPWELTWSCYSGGNIACGVCDSCRLRLAAFSELGLEDPLPYAVRGEQGNQ

SEQ ID NO: 37652 - protein, 232 aa, Croceicoccus marinus
  misc_feature (1)..(232): tr|A0A1Z1F7Z2|A0A1Z1F7Z2_9SPHN 7-cyano-7-deazaguanine s ynthase OS=Croceicoccus marinus OX=450378 GN=queC PE=3 SV=1
MTKDDLNEKPAVVLLSGGLDSMVTAGIAKTQGYSVNALTVDYNQRHRRELDSATVIANAIDVDRHLVLPLDLRKIGGSALTSEMAVPKDGVGSDIPITYVPARNLVFLSLTLAWCEAIGAQDIFIGVNALDYSGYPDCRPEFIKSFEKTAELATKAGSEGAKFSIHAPLQFMSKAEIVDKAYELGLDPSMSWSCYDPGEDGRPCGLCDSCRLRQQGFAQTGRQDPVDYSKRI

SEQ ID NO: 37653 - protein, 228 aa, Croceicoccus naphthovorans
  misc_feature (1)..(228): tr|A0A0G3XCJ6|A0A0G3XCJ6_9SPHN 7-cyano-7-deazaguanine s ynthase OS=Croceicoccus naphthovorans OX=1348774 GN=que C PE=3 SV=1
MEKSQKKAVVLLSGGLDSMVTAGIAREKGYALNALTIDYNQRHAREIQSAKTIAVALEVDRHLLLPLDLRAFGGSALTDSIDVPKGGVGNDIPVTYVPARNLVFLSLTLSWAEAIGARDIFIGVNALDYSGYPDCRPEFIEAFQELARLATKAGAEGHQFTIHAPLQHLGKAEIVKEAYRLDLDPGMSWSCYDPELDGSACGLCDSCRLRLAGFAAAQHTDPVSYRQT

SEQ ID NO: 37654 - protein, 227 aa, Croceicoccus ponticola
  misc_feature (1)..(227): tr|A0A437H2J1|A0A437H2J1_9SPHN 7-cyano-7-deazaguanine s ynthase OS=Croceicoccus ponticola OX=2217664 GN=queC PE =3 SV=1
MSEHTNRSAVVLLSGGLDSMVTAAIAHEQGYRLNALTIDYNQRHRRELESATTIAKSLGAERHVVLPLDLRAFGGSALTDDIPVPKTGVGSDIPVTYVPARNLVFLSLTLAWAEALGARDIFIGVNALDYSGYPDCRPEFIEGFQNLARLATKVGSDGGNFTVHAPLQFLGKAAIVDEAYRLGLDPAASWSCYDPTPDGFACGLCDSCRLRLEGFERAGREDPLHYA

SEQ ID NO: 37655 - protein, 232 aa, Croceicoccus sp.
  misc_feature (1)..(232): tr|A0A2D8D3U8|A0A2D8D3U8_9SPHN 7-cyano-7-deazaguanine s ynthase OS=Croceicoccus sp. OX=1927144 GN=queC PE=3 SV= 1
MTGTEPNEKHAVVLLSGGLDSMVTAAIARSQGYTINALTIDYNQRHRRELESASRIAKSLGAARHLVLPLDLRKIGGSALTSDIEVPKDGLGSDIPVTYVPARNLVFLSLTLAWCEAIEAQDIFIGVNALDYSGYPDCRPEFISSFEETAKLATKAGSEGAAFKVHAPLQYLSKADIVEKAYELELDPGLSWSCYDPGADDRACGLCDSCRLRQQGFDQTGRKDPLPYRVRI

SEQ ID NO: 37656 - protein, 231 aa, Crocosphaera chwakensis
  misc_feature (1)..(231): tr|A3IPJ5|A3IPJ5_9CHRO 7-cyano-7-deazaguanine synthase OS=Crocosphaera chwakensis CCY0110 OX=391612 GN=queC PE =3 SV=1
MIHKPLAVVLLSGGLDSATSAAIAIDQGYEVIALSLRYGQRHQRELNAAQTIAQALNISKHYIIDVNIAQWGGSSLTDSSLSLPQSGVDTTVIPSTYVPGRNTVFIALALSLAEAKGAQAIYLGINAVDYSGYPDCRPDYLQAYQTLANLSSKAGLEGKAPLLTAPLITKTKVDIIKDAIKLGVPIAKTWSCYQGKPEPCGLCDSCRIRDRALIEAGYPELATVKGREFYE

SEQ ID NO: 37657 - protein, 233 aa, Crocosphaera subtropica
  misc_feature (1)..(233): tr|B1WWK5|B1WWK5_CROS5 7-cyano-7-deazaguanine synthase OS=Crocosphaera subtropica (strain ATCC 51142 / BH68) O X=43989 GN=exsB PE=3 SV=1
MTNKPVAVVLLSGGLDSATSAAIAIDQGYEVIALSLRYGQRHQRELDAAKIIAQTLNITQHYTIDVNIAQWGGSSLTDTSLSLPQSGVDATIIPSTYVPGRNTVFIALALSLAEAKGAQAIYLGINAVDYSGYPDCRPDYLQAYQTLANLSSKAGLVGKAPQLLAPLITKTKVDIIKDAIKLGVPITKTWSCYQGEQEPCGLCDSCRIRDQALIEAGYPELATPKGREFKDLS

SEQ ID NO: 37658 - protein, 230 aa, Crocosphaera watsonii
  misc_feature (1)..(230): tr|T2IAF5|T2IAF5_CROWT 7-cyano-7-deazaguanine synthase OS=Crocosphaera watsonii WH 8502 OX=423474 GN=queC PE=3 SV=1
MTHKPIAVVLLSGGLDSATSAAIAIDQGYEVIALSLEYGQRHQRELEAAKTIAEALNITQHYIIDVNIAQWGGSSLTDSSLSLPQGGVDPNEIPSTYVPGRNTVFIGLALSLGEAKGATAIYLGINAVDYSGYPDCRPEYLQAYQNLANLSSKAGIEGKAPQLVAPLISKTKVDIVKDAIRLGVPISKTWSCYQGEQEPCGLCDSCRIRDRALIEAGYPQLATTQGRAFL

SEQ ID NO: 37659 - protein, 230 aa, Crocosphaera watsonii; identical to SEQ ID NO: 37658
  misc_feature (1)..(230): tr|T2JZP3|T2JZP3_CROWT 7-cyano-7-deazaguanine synthase OS=Crocosphaera watsonii WH 0402 OX=1284629 GN=queC PE= 3 SV=1

SEQ ID NO: 37660 - protein, 231 aa, Cronobacter condimenti
  misc_feature (1)..(231): tr|K8A0R0|K8A0R0_9ENTR 7-cyano-7-deazaguanine synthase OS=Cronobacter condimenti 1330 OX=1073999 GN=queC PE=3 SV=1
MKRAVVVFSGGQDSTTCLIQALHQYDEVHCVTFDYGQRHRAEIDVASALAASLGARAHKVLDVTLLNELAVSSLTRDSIPVPDYDPDAEGLPSTFVPGRNILFLTLASIYAYQVQAEAVITGVCETDFSGYPDCRDEFVKALNHAVMLGMARDVRFETPLMWLNKAETWALADYWDKLEVIRHQTLTCYNGIQGDGCGECAACHLRANGLSQYQADRPAIMAAMKQKTGLK

SEQ ID NO: 37661 - protein, 231 aa, Cronobacter dublinensis
  misc_feature (1)..(231): tr|K8B4A1|K8B4A1_9ENTR 7-cyano-7-deazaguanine synthase OS=Cronobacter dublinensis 1210 OX=1208656 GN=queC PE=3 SV=1
MKRAVVVFSGGQDSTTCLIQALHQYDEVHCVTFDYGQRHRAEIDVASALAASLGARAHKVLDVTLLNELAVSSLTRDSIPVPDYDPDAEGLPSTFVPGRNILFLTLASVYAYQVQAEAVITGVCETDFSGYPDCRDEFVKALNHAVTLGMARDVRFETPLMWLNKAETWALADYWGKLDVIRQQTLTCYNGIQGDGCGECAACHLRANGLSEYQADRPAVMAAMKQKTGLK

SEQ ID NO: 37662 - protein, 231 aa, Cronobacter dublinensis; identical to SEQ ID NO: 37661
  misc_feature (1)..(231): tr|A0A0K2NZH4|A0A0K2NZH4_9ENTR 7-cyano-7-deazaguanine s ynthase OS=Cronobacter dublinensis subsp. dublinensis L MG 23823 OX=1159554 GN=queC PE=3 SV=1

SEQ ID NO: 37663 - protein, 231 aa, Cronobacter malonaticus
  misc_feature (1)..(231): tr|V5U305|V5U305_9ENTR 7-cyano-7-deazaguanine synthase OS=Cronobacter malonaticus OX=413503 GN=queC PE=3 SV=1
MKRAVVVFSGGQDSTTCLIQALHQYDEVHCVTFDYGQRHRAEIDVASTLAASLGARAHKVLDVTLLNELAVSSLTRDSIPVPDYDPDAEGLPSTFVPGRNILFLTLASIYAYQVQAEAVITGVCETDFSGYPDCRDEFVKALNHAVALGMARDVRFETPLMWLNKAETWALADYWGKLDVIRQQTLTCYNGIQGDGCGECAACHLRANGLSQYQDDKPAIMAAMKQKTGLK

SEQ ID NO: 37664 - protein, 231 aa, Cronobacter malonaticus
  misc_feature (1)..(231): tr|A0A423Y4H8|A0A423Y4H8_9ENTR 7-cyano-7-deazaguanine s ynthase OS=Cronobacter malonaticus OX=413503 GN=queC PE =3 SV=1
MKRAVVVFSGGQDSTTCLIQALHQYDEVHCVTFDYGQRHRAEIDVASTLAASLGARAHKVLDVTLLNELAVSSLTRDSIPVPDYDPDAEGLPSTFVPGRNILFLTLASIYAYQVQAEAVITGVCETDFSGYPDCRDEFVKALNHAVALGMARDVRFETPLMWLNKAETWALADYWGKLDVIRQQTLTCYNGIQGDGCGECAACHLRANGLNQYQADKPAIMTAMKQKTGLK

SEQ ID NO: 37665 - protein, 231 aa, Cronobacter muytjensii
  misc_feature (1)..(231): tr|A0A2T7AQC7|A0A2T7AQC7_9ENTR 7-cyano-7-deazaguanine s ynthase OS=Cronobacter muytjensii OX=413501 GN=queC PE= 3 SV=1
MKRAVVVFSGGQDSTTCLIQALHQYDEVHCVTFDYGQRHRAEIDVASALAASLGARAHKVLDVTLLNELAVSSLTRDSIPVPDYDPDAGGLPSTFVPGRNILFLTLASVYAYQVQAEAVITGVCETDFSGYPDCRDEFVKALNHAVTLGMARDVRFETPLMWLNKAETWALADYWGKLDVIRQQTLTCYNGIQGDGCGECAACHLRANGLSQYQANQPAVMAAMKQKTGLK

SEQ ID NO: 37666 - protein, 231 aa, Cronobacter sakazakii
  misc_feature (1)..(231): sp|A7MFJ8|QUEC_CROS8 7-cyano-7-deazaguanine synthase OS =Cronobacter sakazakii (strain ATCC BAA-894) OX=290339 GN=queC PE=3 SV=1
MKRAVVVFSGGQDSTTCLIQALHQYDEVHCVTFDYGQRHRAEIDVASALAASLGARAHKVLDVTLLNELAVSSLTRDSIPVPDYDPDAEGLPSTFVPGRNILFLTLASIYAYQVQAEAVITGVCETDFSGYPDCRDEFVKALNHAVALGMARDVRFETPLMWLNKAETWALADYWGKLDVIRHQTLTCYNGIQGDGCGECAACHLRANGLSQYEADKPAIMAAMKQKTGLK

SEQ ID NO: 37667 - protein, 231 aa, Cronobacter sakazakii
  misc_feature (1)..(231): tr|A0A5D1BHC7|A0A5D1BHC7_CROSK 7-cyano-7-deazaguanine s ynthase OS=Cronobacter sakazakii OX=28141 GN=queC PE=3 SV=1
MKRAVVVFSGGQDSTTCLIQALHQYDEVHCVTFDYGQRHRAEIDVASVLAASLGARAHKVLDVTLLNELAVSSLTRDSIPVPDYDPDAEGLPSTFVPGRNILFLTLASIYAYQVQAEAVITGVCETDFSGYPDCRDEFVKALNHAVALGMARDVRFETPLMWLNKAETWALADYWGKLDVIRHQTLTCYNGIQGDGCGECAACHLRANGLSQYKADKPAIMAAMKQKTGLK

SEQ ID NO: 37668 - protein, 231 aa, Cronobacter sp.
  misc_feature (1)..(231): tr|A0A5J6XC20|A0A5J6XC20_9ENTR 7-cyano-7-deazaguanine s ynthase QueC OS=Cronobacter sp. JZ38 OX=1906275 GN=BJP6 1_16070 PE=4 SV=1
MKRAVVVFSGGQDSTTCLIQALHQYDEVHCVTFDYGQRHRAEIDVASALAASLGARAHKVLDVTLLNELAVSSLTRDSIPVPDYDPDADGLPSTFVPGRNILFLTLASVYAYQVQAEAVITGVCETDFSGYPDCRDEFVKALNHAVTLGMARDVRFETPLMWLNKAETWALADYWGKLDVIRQQTLTCYNGIQGDGCGECAACHLRANGLSQYQANQPAVMAAMKQKTGLK

SEQ ID NO: 37669 - protein, 231 aa, Cronobacter turicensis
  misc_feature (1)..(231): tr|C9XXP5|C9XXP5_CROTZ 7-cyano-7-deazaguanine synthase OS=Cronobacter turicensis (strain DSM 18703 / LMG 23827 / z3032) OX=693216 GN=queC PE=3 SV=1
MKRAVVVFSGGQDSTTCLIQALHQYDEVHCVTFDYGQRHRAEIDVASALAASLGARAHKVLDVTLLNELAVSSLTRDSIPVPDYDPNAEGLPSTFVPGRNILFLTLASIYAYQVQAEAVITGVCETDFSGYPDCRDEFVKALNHAVALGMARDVRFETPLMWLNKAETWALADYWGKLDVIRQQTLTCYNGIQGDGCGECAACHLRANGLSQYQAAKPAIMAAMKQKTGLK

SEQ ID NO: 37670 - protein, 231 aa, Cronobacter turicensis
  misc_feature (1)..(231): tr|A0A2T7B6L7|A0A2T7B6L7_9ENTR 7-cyano-7-deazaguanine s ynthase OS=Cronobacter turicensis OX=413502 GN=queC PE= 3 SV=1
MKRAVVVFSGGQDSTTCLIQALHQYDEVHCVTFDYGQRHRAEIDVASALAASLGARAHKVLDVTLLNELAVSSLTRDSIPVPDYDPDAEGLPSTFVPGRNILFLTLASIYAYQVQAEAVITGVCETDFSGYPDCRDEFVKALNHAVALGMARDVRFETPLMWLNKAETWALADYWGKLDVIRQQTLTCYNGIQGDGCGECAACHLRANGLSQYQAAKPAVMAAMKQKTGLK

SEQ ID NO: 37671 - protein, 231 aa, Cronobacter universalis
  misc_feature (1)..(231): tr|A0A376E3R4|A0A376E3R4_9ENTR 7-cyano-7-deazaguanine s ynthase OS=Cronobacter universalis NCTC 9529 OX=1074000 GN=queC PE=3 SV=1
MKRAVVVFSGGQDSTTCLIQALHQYDEVHCVTFDYGQRHRAEIDVASALAASLGARAHKVLDVTLLNELAVSSLTRDSIPVPDYDPDAEGLPSTFVPGRNILFLTLASIYAYQVQAEAVITGVCETDFSGYPDCRDEFVKALNHAVALGMARDVRFETPLMWLNKAETWALADYWGKLDVIRQQTLTCYNGIQGDGCGECAACHLRANGLSQYQADKPAIMAAMKQKTGLK

SEQ ID NO: 37672 - protein, 221 aa, Cruoricaptor ignavus
  misc_feature (1)..(221): tr|A0A1M6G662|A0A1M6G662_9FLAO 7-cyano-7-deazaguanine s ynthase OS=Cruoricaptor ignavus OX=1118202 GN=queC PE=3 SV=1
MKAVVLLSGGQDSTTCLYWAKERFEDVHAVSFDYGQTNIEEVERARKIAKEAKSQHRVFDISGILRTGSLVTGENHNSKSSINSDLPASFVGGRNLLFLTITASYCAEFGINDIVIGACQSDFNGYPDCRRNTITAMELSLSLGMGMGDIRIHSPLMYLSKAEIWKLSKELGCIDVIVNDTLTDYNGNTSKMNEWGVGDEDNNGSKLRAEGYREAKMKGWI

SEQ ID NO: 37673 - protein, 220 aa, Cryomorphaceae bacterium
  misc_feature (1)..(220): tr|A0A2D4QW29|A0A2D4QW29_9FLAO 7-cyano-7-deazaguanine s ynthase OS=Cryomorphaceae bacterium OX=1898111 GN=queC PE=3 SV=1
MTNKVVVIYSGGMDSFTLMNQAIAQGKRVYALSFNYGQKHSKELHYAQKVCDDLGLPHKIVDITPIHQLLMGSSLTDDIEIPEGHYEEESMKSTVVPNRNMIMLSLAIAYAVSIKAEAVYYGAHGGDHAIYPDCRPEFIEKMDAVSKVANYEPVEIIAPFQNINKTEILSKGLAMGLDYSKTWTCYNGRERACGKCGACQERLEAFRDNGQIDPLKYESA

SEQ ID NO: 37674 - protein, 240 aa, Cryptobacterium curtum
  misc_feature (1)..(240): tr|C7ML00|C7ML00_CRYCD 7-cyano-7-deazaguanine synthase OS=Cryptobacterium curtum (strain ATCC 700683 / DSM 156 41 / 12-3) OX=469378 GN=queC PE=3 SV=1
MTRTNETAPASTAHALVLSSGGVDSTTCLALAVDRFGQANVSTVSFFYGQRHSRELDAAAAVAEHYGVHHYVLDLASVMHYSNNALMATSTQHVPHGSYAQQMEDDGHPNTYVPFRNGLMLSAAAALAASLFPDTSCALYLGAHADDAAGNAYPDCSPAFTAHMGRAISFGTYGNVRLETPFVNQNKAQVVAEGLRLGVPYEMTWSCYEGGEKPCGTCATCLDRIAAFEANGVKDPVSYR

SEQ ID NO: 37675 - protein, 229 aa, Cryptobacterium sp.
  misc_feature (1)..(229): tr|R7CEM2|R7CEM2_9ACTN 7-cyano-7-deazaguanine synthase OS=Cryptobacterium sp. CAG:338 OX=1262868 GN=queC PE=3 SV=1
MRALVLCSGGVDSTTLLAMAVEKYGSDEVCALSISYGQRHEKELKAAHAVAAHYGVTQRFLNLEEIFADSSCSLLAHSGVDIPKESYAEQLKDSDTALVSTYVPFRNGLFLSSAASIALSLGCSVLYYGAHHDDWAGNAYPDCSLAFVEAMNEAIVQGTGGELHMEAPFVQWSKADIVKKGLELNVPYELTWSCYEGGDKPCGTCATCIDRARAFELNGTVDPLLTDNL

SEQ ID NO: 37676 - protein, 222 aa, Culturomica sp.
  misc_feature (1)..(222): tr|A0A356DIL1|A0A356DIL1_9BACT 7-cyano-7-deazaguanine s ynthase OS=Culturomica sp. OX=1926652 GN=queC PE=3 SV=1
MKKAIVLLSGGLDSSTALYVAKKEGFDELYALTFEYGQKHDREIRSASAIAKAVGVREHKIVRLMLNAWKGSSLTDPDVVIQDGDADRTDIPDTYVPARNMVFLSVAASYADALDITDIFIGVSEMDYSGYVDCREEFIRSMEQTINLGTVLGAEKKQKITIHAPFLRMTKADEVKLGTKLGVDFSLTWSCYRGGEKPCGTCDSCLLRARAFAEAGIVDPLV

SEQ ID NO: 37677 - protein, 239 aa, Cupriavidus alkaliphilus
  misc_feature (1)..(239): tr|A0A2W7PB81|A0A2W7PB81_9BURK 7-cyano-7-deazaguanine s ynthase OS=Cupriavidus alkaliphilus OX=942866 GN=queC P E=3 SV=1
MFLRAAPGATRTMTQRAIVLLSGGLDSATVLAMARAQGFETYALSMRYGQRHSSELEAAKRVAAALGAVRHEIVDLDLRRFGGSALTDDALEVPTDGASGGIPVTYVPARNTIMLSLALGWAEAVGGRDLFFGANAVDYSGYPDCRPEYVAAYETLANLATKAGVEGDRFRVHAPIIDMTKGEIIRAGMALGVDYSLTVSCYQADDDGRACGVCDSCRIRRAGFEAAGVPDPTRYQAAA

SEQ ID NO: 37678 - protein, 239 aa, Cupriavidus alkaliphilus
  misc_feature (1)..(239): tr|A0A329AYH5|A0A329AYH5_9BURK 7-cyano-7-deazaguanine s ynthase OS=Cupriavidus alkaliphilus OX=942866 GN=queC P E=3 SV=1
MFLRAAPGATRTMTQRAIVLLSGGLDSATVLAMARAQGFETYALSMRYGQRHSSELEAAKRVAAALGAVRHEIVDLDLRRFGGSALTDDALEVPTDGASGGIPVTYVPARNTIMLSLALGWAEAVGGRDLFFGANAVDYSGYPDCRPEYVAAYETLANLATKAGVEGDRFRVHAPIIDMTKGEIIRAGIALGVDYSLTVSCYQADDDGRACGVCDSCRIRRAGFEAAGVPDPTRYQAAA

SEQ ID NO: 37679 - protein, 227 aa, Cupriavidus basilensis
  misc_feature (1)..(227): tr|H1SFB5|H1SFB5_9BURK 7-cyano-7-deazaguanine synthase OS=Cupriavidus basilensis OR16 OX=1127483 GN=queC PE=3 SV=1
MKKRAIVLLSGGLDSATVLAMANAQGFETYALSMRYGQRHSSELEAAKRVAAAQGAVRHEIIDLDLRRFGGSALTDDSLDVPTDGAVGGIPVTYVPARNTIMLSLALGWAEAVGGRDLFFGANAVDYSGYPDCRPEYVSAYEALANLATKAGVEGERIRVHAPIIDMTKGEIIRAGVRLGVDYGMTVSCYKADDDGRACGVCDSCRIRRAGFEAAGVPDPTRYQGAA

SEQ ID NO: 37680 - protein, 227 aa, Cupriavidus basilensis
  misc_feature (1)..(227): tr|A0A0C4YC63|A0A0C4YC63_9BURK 7-cyano-7-deazaguanine s ynthase OS=Cupriavidus basilensis OX=68895 GN=queC PE=3 SV=1
MKKRAIVLLSGGLDSATVLAMANAQGFETYALSMRYGQRHSSELEAAKRVAAALGAVRHEIIDLDLRRFGGSALTDDSLEVPTDGAVGGIPVTYVPARNTIMLSLALGWAEAVGGRDLFFGANAVDYSGYPDCRPEYVSAYEALANLATKAGVEGERIRVHAPIIDMTKGEIIRAGVKLGVDYGMTVSCYKADDDGRACGVCDSCRIRRAGFEAAGVPDPTRYQGAA

SEQ ID NO: 37681 - protein, 227 aa, Cupriavidus campinensis
  misc_feature (1)..(227): tr|A0A556UQW0|A0A556UQW0_9BURK 7-cyano-7-deazaguanine s ynthase OS=Cupriavidus campinensis OX=151783 GN=queC PE =3 SV=1
MTKRAIVLLSGGLDSATVLAMANAAGFETYALSMRYGQRHSSELEAAKLVAAALGAKRHEIIDLDLRRFGGSALTDDTLDVPTDGATGGIPITYVPARNTIMLSLALGWAEAIGGRDLFFGANAVDYSGYPDCRPEYVSAYEALANLATKAGVEGDRFRVHAPIIDMTKAEIIRAGVKLGVDYGLTVSCYKADDAGRACGVCDSCRIRRAGFETAGVPDPTRYQAAA

SEQ ID NO: 37682 - protein, 229 aa, Cupriavidus gilardii
  misc_feature (1)..(229): tr|A0A0M4KQF6|A0A0M4KQF6_9BURK 7-cyano-7-deazaguanine s ynthase OS=Cupriavidus gilardii CR3 OX=1267562 GN=queC PE=3 SV=1
MTQRAIVLLSGGLDSATVLAMAKAQGFETYALSMRYGQRHSSELEAAKRVAAALGARRHEIVDLDLRRFGGSALTDDALEVPTDGAAGGIPVTYVPARNTIMLSLALGWAEAIGGRDLFFGANAVDYSGYPDCRPEYVQAYEALANLATKAGVEGERIRVHAPIIDMTKAEIIQAGVRLGVDYGMTVSCYQADEQGRACGVCDSCRIRRAGFEAAGVPDPTRYQNAAAS

SEQ ID NO: 37683 - protein, 227 aa, Cupriavidus gilardii
  misc_feature (1)..(227): tr|A0A5A8ETL9|A0A5A8ETL9_9BURK 7-cyano-7-deazaguanine s ynthase OS=Cupriavidus gilardii OX=82541 GN=queC PE=3 S V=1
MTQRAIVLLSGGLDSATVLAMANAQGFETYALSMRYGQRHSSELEAAKRVAAALGAKRHEIVDLDLRRFGGSALTDDALDVPTDGAAGGIPVTYVPARNTIMLSLALGWAEAIGGRDLFFGANAVDYSGYPDCRPEYVQAYEALANLATKAGVEGERIRVHAPIIDMTKAEIIQAGVRLGVDYGMTVSCYQADEQGRACGVCDSCRIRRAGFEAAGVPDPTRYQNAA

SEQ ID NO: 37684 - protein, 227 aa, Cupriavidus metallidurans
  misc_feature (1)..(227): sp|Q1LJY1|QUEC_CUPMC 7-cyano-7-deazaguanine synthase OS =Cupriavidus metallidurans (strain ATCC 43123 / DSM 283 9 / NBRC 102507 / CH34) OX=266264 GN=queC PE=3 SV=1
MTKRAIVLLSGGLDSATVLAMANAAGFETYALSMRYGQRHSSELEAAKRVAAELGAKRHEIIDLDLRRFGGSALTDDALDVPTDGAAGGIPITYVPARNTIMLSLALGWAEAIGGRDLFFGANAVDYSGYPDCRPEYVAAYETLANLATKAGVEGDRFHVHAPIIDMTKAEIILAGVKLGVDYGLTVSCYKADDDGRACGVCDSCRIRRAGFEAAGVPDPTRYQTPN

SEQ ID NO: 37685 - protein, 227 aa, Cupriavidus metallidurans
  misc_feature (1)..(227): tr|A0A132HKD7|A0A132HKD7_9BURK 7-cyano-7-deazaguanine s ynthase OS=Cupriavidus metallidurans OX=119219 GN=queC PE=3 SV=1
MTKRAIVLLSGGLDSATVLAMANAAGFETYALSMRYGQRHSSELEAAKRVAAELGAKRHEIIDLDLRRFGGSALTDDALDVPTDGTAGGIPITYVPARNTIMLSLALGWAEAIGGRDLFFGANAVDYSGYPDCRPEYVAAYEALANLATKAGVEGDRFHVHAPIIDMTKAEIILAGVKLGVDYGLTVSCYKADDDGRACGVCDSCRIRRAGFEAAGVPDPTRYQTPN

SEQ ID NO: 37686 - protein, 227 aa, Cupriavidus nantongensis
  misc_feature (1)..(227): tr|A0A142JQL7|A0A142JQL7_9BURK 7-cyano-7-deazaguanine s ynthase OS=Cupriavidus nantongensis OX=1796606 GN=queC PE=3 SV=1
MTQRAIVLLSGGLDSATVLAMARAQGFETYALSMRYGQRHSSELEAARRVAAALGAVRHEIVDLDLRRFGGSALTDDALEVPTDGASGGIPVTYVPARNTIMLSLALGWAEAVGGRDLFFGANAVDYSGYPDCRPEYVAAYETLANLATKAGVEGDRFRVHAPIIDMTKGEIIRAGIALGVDYSLTVSCYQADDDGRACGVCDSCRIRRAGFEAAGVPDPTRYQAAA

SEQ ID NO: 37687 - protein, 227 aa, Cupriavidus necator
  misc_feature (1)..(227): sp|Q0K7W8|QUEC_CUPNH 7-cyano-7-deazaguanine synthase OS =Cupriavidus necator (strain ATCC 17699 / H16 / DSM 428 / Stanier 337) OX=381666 GN=queC PE=3 SV=1
MTKRAIVLLSGGLDSATVLAMARAQGFETYALSMRYGQRHSSELEAARRVAAALGATRHEIIDLDLRRFGGSALTDDALAVPTDGASDGIPVTYVPARNTIMLSLALGWAEAVGGRDLFFGANAVDYSGYPDCRPEYVAAYETLANLATKAGVEGDRFRVHAPIIDMTKGEIIRAGIALGVDYSLTVSCYQADDDGRACGVCDSCRIRRAGFEAAGVPDPTRYQAAA

SEQ ID NO: 37688 - protein, 227 aa, Cupriavidus necator
  misc_feature (1)..(227): tr|G0ET38|G0ET38_CUPNN 7-cyano-7-deazaguanine synthase OS=Cupriavidus necator (strain ATCC 43291 / DSM 13513 / N-1) OX=1042878 GN=queC PE=3 SV=1
MTQRAIVLLSGGLDSATVLAMARAQGFETYALSMRYGQRHSSELEAAKRVAAALGATRHEIIDLDLRRFGGSALTDDTLAVPTDGASGGIPVTYVPARNTIMLSLALGWAEAVGGRDLFFGANAVDYSGYPDCRPEYVAAYETLANLATKAGVEGDRFRVHAPIIDMTKGEIIRAGIALGVDYSLTVSCYQADDDGRACGVCDSCRIRRAGFEAAGVPDPTRYQAAA

SEQ ID NO: 37689 - protein, 227 aa, Cupriavidus oxalaticus
  misc_feature (1)..(227): tr|A0A375G3D6|A0A375G3D6_9BURK 7-cyano-7-deazaguanine s ynthase OS=Cupriavidus oxalaticus OX=96344 GN=queC PE=3 SV=1
MTKRAIVLLSGGLDSATVLAMARAQGFETYALSMRYGQRHSSELEAAKRVAAALGATRHEIVGLDLRRFGGSALTDDALEVPTDGATGGIPVTYVPARNTIMLSLALGWAEAVGGRDLFFGANAVDYSGYPDCRPEYVAAYETLANLATKAGVEGDRFRVHAPIIDMTKAEIIRAGIGLGVDYGLTVSCYQADDDGRACGVCDSCRIRRAGFEAAGVPDPTRYQGAA

SEQ ID NO: 37690 - protein, 227 aa, Cupriavidus oxalaticus
  misc_feature (1)..(227): tr|A0A4P7LE99|A0A4P7LE99_9BURK 7-cyano-7-deazaguanine s ynthase OS=Cupriavidus oxalaticus OX=96344 GN=queC PE=3 SV=1
MTKRAIVLLSGGLDSATVLAMARAQGFETYALSMRYGQRHSSELEAAKRVAAALGATRHEIVDLDLRRFGGSALTDDALEVPTDGATGGIPVTYVPARNTIMLSLALGWAEAVGGRDLFFGANAVDYSGYPDCRPEYVAAYETLANLATKAGVEGDRFRVHAPIIDMTKAEIIRAGIGLGVDYSLTVSCYQADDDGRACGVCDSCRIRRAGFEAAGVPDPTRYQGAT

SEQ ID NO: 37691 - protein, 227 aa, Cupriavidus pauculus
  misc_feature (1)..(227): tr|A0A3G8GZJ9|A0A3G8GZJ9_9BURK 7-cyano-7-deazaguanine s ynthase OS=Cupriavidus pauculus OX=82633 GN=queC PE=3 S V=1
MTQRAIVLLSGGLDSATVLAMANAAGFETYALSMRYGQRHSSELDAARKVAAALGAKRHEIIDLDLRRFGGSALTDDALDVPTAGETGGIPITYVPARNTIMLSLALGWAEAIGGRDLFFGANAVDYSGYPDCRPEYVSAYETLANLATKAGVEGDRFRVHAPIIDMTKADIIRAGVKLGVDYGLTVSCYKADDEGRACGVCDSCRIRRAGFEQAGVADPTRYQPAA

SEQ ID NO: 37692 - protein, 227 aa, Cupriavidus pauculus
  misc_feature (1)..(227): tr|A0A2N5CHP5|A0A2N5CHP5_9BURK 7-cyano-7-deazaguanine s ynthase OS=Cupriavidus pauculus OX=82633 GN=queC PE=3 S V=1
MTKRAIVLLSGGLDSATVLAMANAAGFETYALSMRYGQRHSSELDAAKKVASALGAKRHEIIDLDLRRFGGSALTDDTMDVPVDGATGGIPVTYVPARNTIMLSLALGWAEAIGGRDLFFGANAVDYSGYPDCRPEYVSAYETLANLATKAGVEGDRFRVHAPIIDMTKAEIIRAGVKLGVDYGLTVSCYKADDEGRACGVCDSCRIRKAGFEQAGVADPTHYQPAA

SEQ ID NO: 37693 - protein, 226 aa, Cupriavidus pinatubonensis
  misc_feature (1)..(226): sp|Q474K5|QUEC_CUPPJ 7-cyano-7-deazaguanine synthase OS =Cupriavidus pinatubonensis (strain JMP 134 / LMG 1197) OX=264198 GN=queC PE=3 SV=1
MTKRAIVLLSGGLDSATVLAMAKAQGFETYALSMRYGQRHSSELDAAKQVASALGAVRHEIVDLDLRRFGGSALTDDKLDVPTGGASSGIPITYVPARNTIMLSLALGWAEAVGGRDLFFGANAVDYSGYPDCRPEYVAAYETLANLATKAGVEGDRFHVHAPIIDMTKAEIIRAGIRLGVDYSMTVSCYKADDDGRACGVCDSCRIRRAGFEAAGVPDPTRYQNA

SEQ ID NO: 37694 - protein, 228 aa, Cupriavidus plantarum
  misc_feature (1)..(228): tr|A0A316F3Z8|A0A316F3Z8_9BURK 7-cyano-7-deazaguanine s ynthase OS=Cupriavidus plantarum OX=942865 GN=queC PE=3 SV=1
MTKRAIVLLSGGLDSATVLAMANAQGFETYALSMRYGQRHSSELEAAKRVAAALGAVRHEIIDLDLRRFGGSALTDDAFDVPTDGAVGGIPITYVPARNTIMLSLALGWAEAVGGRDLFFGANAVDYSGYPDCRPEYVSAYETLANLATKAGVEGDRFHVHAPIIDMTKGEIIRAGTRLGVDYSLTVSCYQADDDGRACGVCDSCRIRRAGFEAAGVPDPTRYQDAAS

SEQ ID NO: 37695 - protein, 227 aa, Cupriavidus sp.
  misc_feature (1)..(227): tr|A0A370P2I4|A0A370P2I4_9BURK 7-cyano-7-deazaguanine s ynthase OS=Cupriavidus sp. S23 OX=2219262 GN=queC PE=3 SV=1
MTKRAIVLLSGGLDSATVLAMAHAQGFETYALSMRYGQRHSSELEAAKRVAAALGATRHEIVDLDLRRFGGSALTDDTLEVPTDGASGGIPVTYVPARNTIMLSLALGWAEAVGGRDLFFGANAVDYSGYPDCRPEYVAAYETLANLATKAGVEGDRFRVHAPIIDMTKGEIIRAGIALGVDYSLTVSCYQADDDGRACGVCDSCRIRRAGFEAAGVPDPTRYQSAA

SEQ ID NO: 37696 - protein, 227 aa, Cupriavidus sp.
  misc_feature (1)..(227): tr|L2EMI3|L2EMI3_9BURK 7-cyano-7-deazaguanine synthase OS=Cupriavidus sp. HMR-1 OX=1249621 GN=queC PE=3 SV=1
MTKRAIVLLSGGLDSATVLAMANAAGFETYALSMRYGQRHSSELEAAKRVAAELGAKRHEIIDLDLRRFGGSALTDDALDVPTDGTAGGIPITYVPARNTIMLSLALGWAEAIGGRDLFFGANAVDYSGYPDCRPEYVAAYEALANLATKAGVEGDRFHVHAPIIDMTKAEIILAGVKLGVDYGLTVSCYKADDDGRACGVCDSCRIRRAGFEAAGVPDPTRYQTSN

SEQ ID NO: 37697 - protein, 227 aa, Cupriavidus taiwanensis
  misc_feature (1)..(227): sp|B3R5T4|QUEC_CUPTR 7-cyano-7-deazaguanine synthase OS =Cupriavidus taiwanensis (strain DSM 17343 / BCRC 17206 / CIP 107171 / LMG 19424 / R1) OX=977880 GN=queC PE=3 SV=1
MTQRAIVLLSGGLDSATVLAMARAQGFETYALSMRYGQRHSSELEAAKRVAAALGAVRHEIVDLDLRRFGGSALTDDALEVPTDGASGGIPVTYVPARNTIMLSLALGWAEAVGGRDLFFGANAVDYSGYPDCRPEYVAAYETLANLATKAGVEGDRFRVHAPIIDMTKGEIIRAGIALGVDYSLTVSCYQADDDGRACGVCDSCRIRRAGFEAAGVPDPTRYQAAA

SEQ ID NO: 37698 - protein, 239 aa, Cupriavidus taiwanensis
  misc_feature (1)..(239): tr|A0A375I9D9|A0A375I9D9_9BURK 7-cyano-7-deazaguanine s ynthase OS=Cupriavidus taiwanensis OX=164546 GN=queC PE =3 SV=1
MFLRAAAGATRTMTQRAIVLLSGGLDSATVLAMARAQGFETYALSMRYGQRHSSELEAATRVAAALGAARHEIVDLDLRRFGGSALTDDALAVPTDGASGGIPVTYVPARNTIMLSLALGWAEAVGGRDLFFGANAVDYSGYPDCRPEYVAAYETLANLATKAGVEGDRFRVHAPIIDMTKGEIIRAGIALGVDYSLTVSCYQADDDGRACGVCDSCRIRRAGFEAAGVPDPTRYQAAA

SEQ ID NO: 37699 - protein, 231 aa, [Curtobacterium] plantarum
  misc_feature (1)..(231): tr|A0A3M7UKJ5|A0A3M7UKJ5_9GAMM 7-cyano-7-deazaguanine s ynthase OS=[Curtobacterium] plantarum OX=221276 GN=queC PE=3 SV=1
MKRAVVVFSGGQDSTTCLIQALEQYDDVHCVTFDYGQRHREEIDVARDLAIKLGARAHKVLDVTMLNELAVSSLTRDNIPVPAYNPEASGLPSTFVPGRNILFLTLASVYAYQVEAEAVITGVCETDFSGYPDCRDEFVKALNHAVSLGMARDVRFETPLMWLNKAETWALADYWQQLALVREQTLTCYNGVKGDGCGECAACHLRANGLQGYLNDRAGVMAAMKAKSGLN

SEQ ID NO: 37700 - protein, 422 aa, Curtobacterium sp.
  misc_feature (1)..(422): tr|A0A2W1UX25|A0A2W1UX25_9MICO Uncharacterized protein OS=Curtobacterium sp. MCLR17_007 OX=2175648 GN=DEJ13_17 775 PE=4 SV=1
MRFQSGPATSLQNLGDAIPISLFAVPDLDAGATAGKAIRESVQHRGLAPDPAAWDFLAIALSVITADGISRRGDSPDGWTREIAIDIAVREPEAWASQLLGLNRALGFLTTDRWSLSVRDGGDAIDVPLEPYRYDVDAVALLSGGLDSLIGAIDLTDLGSKLLATSHVVRGDAEKQERFARELGIEHLPLNHNASTERSVKETSQRARSLIFLAYAIVAATCTDRYRAGETVPIYMCENGFIAINPPLTTSRISSLSTRTARPEFLNAIERILRNVGLNLQIINPYLLKTKGEMMQECSDQSRLEALAHVSTSCGRFQRFNYTHCGRCVPCQIRRASFLTWGHDDPTRYYFHEIGKLDSEHAGFDDVRSVAIARLEIEEAGFDRWVGPTLSSSAFADPAPVAAMLKRGMLELGALHDAYRIR

SEQ ID NO: 37701 - protein, 208 aa, Curtobacterium sp.
  misc_feature (1)..(208): tr|A0A4P8SWS1|A0A4P8SWS1_9MICO 7-cyano-7-deazaguanine s ynthase OS=Curtobacterium sp. SGAir0471 OX=2070337 GN=C 1N91_12605 PE=3 SV=1
MDSQPNTLLLLSGGLDSSALAALLRPQHALYLDYGQRPAHTEQRAAERIATEYGIRLHVATLGIRDFGSGILHDDADAVKDAPSPEWWPYRNQFLATAASALALKTGSEAIALGTVRGDGDRHLDGTEEFYRLLDALVAYQEGGIRISAPAINYTTEELLVAAGLGANIIAETASCHRSNFPCGACPGCWKRQRVLASMNLPGYSWNS

SEQ ID NO: 37702 - protein, 143 aa, Curvibacter putative
  misc_feature (1)..(143): tr|C9YE01|C9YE01_9BURK 7-cyano-7-deazaguanine synthase OS=Curvibacter putative symbiont of Hydra magnipapillat a OX=667019 GN=Csp_D28070 PE=3 SV=1
  misc_feature (85)..(131): Xaa can be any naturally occurring amino acid
MHTSALVLFSGGQDSTTCLAHALARYERVETIAFDYRQRHNVELEARLNVLREIKTRFPQWAAKLGEDHLLDLAVLGEVSETSLXXXXXXXXXXXXXXXXXXXXXXXXXXXXXXXXXXXXXXXXXXXXXXXVDQQGPDLGARP

SEQ ID NO: 37703 - protein, 82 aa, Curvibacter putative
  misc_feature (1)..(82): tr|C9YE00|C9YE00_9BURK Uncharacterized protein (Fragmen t) OS=Curvibacter putative symbiont of Hydra magnipapil lata OX=667019 GN=Csp_D28060 PE=4 SV=1
  misc_feature (1)..(4): Xaa can be any naturally occurring amino acid
XXXXWINKAQTWELAHELGERSGVPEGGQALVDLVVEHTHTCYLGDRTHRHAWGYGCGTCPACELRAKGYAGFVDKVNKAAA

SEQ ID NO: 37704 - protein, 234 aa, Curvibacter sp.
  misc_feature (1)..(234): tr|A0A1F8W443|A0A1F8W443_9BURK 7-cyano-7-deazaguanine s ynthase OS=Curvibacter sp. GWA2_64_110 OX=1797747 GN=qu eC PE=3 SV=1
MHKTALVLFSGGQDSTTCLAHALKAYERVETIAFDYRQRHHIELESRIKVLSEIRRQFPQWADKLGEDHLLDLEVLGRVSETSLTRETAFKMEASGLPNTFVPGRNLLFLTLAAAVAYRRGLEVIVTGVCETDFSGYPDCRDDTMKAMQLALSLGMDKRFLIETPLMWIDKADTWRLAESLGGPALVDLIIEHTHTCYLGDREHRHAWGYGCGTCPACELRARGWERYKAQVPN

SEQ ID NO: 37705 - protein, 235 aa, Curvibacter sp.
  misc_feature (1)..(235): tr|A0A0R0MMJ5|A0A0R0MMJ5_9BURK 7-cyano-7-deazaguanine s ynthase OS=Curvibacter sp. PAE-UM OX=1714344 GN=queC PE =3 SV=1
MHKTALVLFSGGQDSTTCLAHALKTYERVETIAFDYRQRHHVELEARVQVLAEIRRQFPHWAPKLGQDHMLDLAVLGAVSETSLTRETAFKMESSGLPNTFVPGRNLLFLTLAAAVAYRRDLQVIVTGVCETDFSGYPDCRDDTMKAMQLALSLGMDKRYLIETPLMWIDKADTWRLAEALGGKALVDLIVEHTHTCYLGDRAHRHAWGYGCGTCPACELRARGWERYRAGGATT

SEQ ID NO: 37706 - protein, 224 aa, Cuspidothrix issatschenkoi
  misc_feature (1)..(224): tr|A0A2S6CZC1|A0A2S6CZC1_9CYAN 7-cyano-7-deazaguanine s ynthase OS=Cuspidothrix issatschenkoi CHARLIE-1 OX=2052 836 GN=queC PE=3 SV=1
MKAVILLSGGLDSSTVLYQAKEDGCECYAISFDYQQRHRKELSSALMVGKRAGIIQHQVVNFDLRQWGGSALTDDKIDLPQQRSLDEMADHIPVTYVPARNTIFLSFALGYAEAIAAERVYIGVNALDYSGYPDCRLDYIQAMQEVFRLGTKQGREGEGIKIVAPLIELKKTEIIQLGNQLGVPWNLTWSCYAGGDAACGVCDSCQLRLAAFAELGLEDPINYV

SEQ ID NO: 37707 - protein, 223 aa, Cyanobacteria bacterium
  misc_feature (1)..(223): tr|A0A3M1L3B6|A0A3M1L3B6_9CYAN 7-cyano-7-deazaguanine s ynthase (Fragment) OS=Cyanobacteria bacterium J083 OX=2 420336 GN=queC PE=3 SV=1
AIVLLSGGLDSATTTAIALQQGYEVIALSFRYGQRHVKELDAAKKVAQYFQIKQHYIVDINLAQWGGSALTDSQLSLPQTGVDPNIIPLTYVPGRNTVFIATALSLAEAEGAEAIFLGINAVDYSGYPDCRPEYLEAYQKLAKLASKAGIEGKAPQLIAPLITLAKTDIVRLALKLQVPIELTWSCYQGETNPCGLCDSCRIRDQALIAVGREDLASQINMGD

SEQ ID NO: 37708 - protein, 225 aa, Cyanobacteria bacterium
  misc_feature (1)..(225): tr|A0A353QWI6|A0A353QWI6_9CYAN 7-cyano-7-deazaguanine s ynthase OS=Cyanobacteria bacterium UBA9971 OX=2055776 G N=queC PE=3 SV=1
MNKSIVLLSGGLDSLISLAYAKDEYNIQLALTFDYGQRAAKKEIEAAKIIAEYFNIEHKVIKTQWLQEITETSLVNTSQDLPLLDSNELDNPELTLNSAKKVWVPNRNGVFLNIAACFADSIEFSHIIFGANKEEGSTFPDNTQEFIDKINEAFEFSTLVKPKVFAPLINLNKTEIIKLALEIEAPLNLMRSCYTEEEKHCGKCESCLRLKRALEANGKTFEFIQ

SEQ ID NO: 37709 - protein, 217 aa, Cyanobacterium aponinum
  misc_feature (1)..(217): tr|K9Z9R1|K9Z9R1_CYAAP 7-cyano-7-deazaguanine synthase OS=Cyanobacterium aponinum (strain PCC 10605) OX=755178 GN=queC PE=3 SV=1
MKKAIVLLSGGLDSATSAAIAVSQGYDTIALSFRYGQKHAKELEIAQNLAPKLGIKEHFVIDVNLSLWGGSSLTDNNLAIPQEGVNPQIIPSTYVPGRNTVFIAIALSLAEAASAEAIYLGINAVDYSGYPDCRPEYLQAFQNLANLSSKVGIEGKTPQLIAPLINLSKVDIIKKALSLNVPIDETWSCYQGGEIPCGVCDSCRIRNEALKQLGISN

SEQ ID NO: 37710 - protein, 218 aa, Cyanobacterium aponinum
  misc_feature (1)..(218): tr|A0A2G3PAQ4|A0A2G3PAQ4_9CHRO 7-cyano-7-deazaguanine s ynthase OS=Cyanobacterium aponinum IPPAS B-1201 OX=2047 986 GN=queC PE=3 SV=1
MVKKAIVLLSGGLDSATSAAIAVSQGYDTIALSFRYGQKHAKELEIAQNLAPKLGIKEHFVIDVNLSLWGGSSLTDNNLAIPQEGVNPQIIPSTYVPGRNTVFIAIALSLAEATSAEAIYLGINAVDYSGYPDCRPEYLQAFQNLANLSSKVGIEGKTPQLIAPLINLSKVDIIKKALSLNVPIDETWSCYQGGDIPCGVCDSCRIRNEALKQLGISN

SEQ ID NO: 37711 - protein, 218 aa, Unknown
  misc_feature (1)..(218): tr|A0A0R2U4F4|A0A0R2U4F4_9CYAN 7-cyano-7-deazaguanine s ynthase OS=cyanobacterium BACL30 MAG-120619-bin27 OX=16 55601 GN=queC PE=3 SV=1
MPGPPLAIALLSGGLDSATAAALAIEAGYQVIGLSLDYGQRHRRELQAAAELAPLLGLAEHHTIAVNLAAWGGSALTDSAIAVPSAGVEAGVIPSTYVPGRNTVFIAVALSLAEARGAQKLVLGVNAVDYSGYPDCRPDYLEAFQSLAELASKAGREGHATQLWAPLVTWSKARIVQEARRLGVPIERTWSCYEGGEQPCGLCDSCRIRDAALLAAGA

SEQ ID NO: 37712 - protein, 234 aa, Epithemia turgida
  misc_feature (1)..(234): tr|A0A077JJ00|A0A077JJ00_9CYAN 7-cyano-7-deazaguanine s ynthase OS=cyanobacterium endosymbiont of Epithemia tur gida isolate EtSB Lake Yunoko OX=1228987 GN=exsB PE=3 S V=1
MNQPRAVVLLSGGLDSATSAAIALFKGYNLIALSLRYGQRNEKELAAAKKIAQDLGISEHYITDVNIAQWGGSSLTDKSLTIPQKGIQSDIIPSTYVPGRNTVFIALALSLAETKEAKAIFIGINAVDYSGYPDCRLDYLKAYQMLANLSSKAGIEGNAPQLIAPLLRNSKVDIVHRAIALGVTIEDTWSCYQGGETPCGLCDSCRIRDFALIEAGYPELATPKGRRRLTNFES

SEQ ID NO: 37713 - protein, 227 aa, Rhopalodia gibberula
  misc_feature (1)..(227): tr|A0A2Z5TAC9|A0A2Z5TAC9_9CYAN 7-cyano-7-deazaguanine s ynthase OS=cyanobacterium endosymbiont of Rhopalodia gi bberula OX=1763363 GN=exsB PE=3 SV=1
MNQPRAVVLLSGGLDSATSAAIALFEGYNLIALSLRYGQRNEKELAAAKKIAQDLGITEHYIIDVNIAQWGGSSLTDKSLSIPQKGIKSDTIPSTYVPGRNTIFIALALSLAETKGAKAIFIGINAVDYSGYPDCRLDYLEAYQRLASLSSKVGIEGNAPQLIAPLLGNSKVDIVHRAIALGVTIEDTWSCYQGGERPCGLCDSCRIRDFALIEAGYPELATPEGRR

SEQ ID NO: 37714 - protein, 221 aa, Cyanobacterium sp.
  misc_feature (1)..(221): tr|A0A2K8WQR4|A0A2K8WQR4_9CHRO 7-cyano-7-deazaguanine s ynthase OS=Cyanobacterium sp. HL-69 OX=2054282 GN=queC PE=3 SV=1
MTKKAIVLLSGGLDSATSGAIALKEGYEVIALSFRYGQKHFKELEASGNVAKSLGIKEHHIIDVNLSMWGGSSLTDATMNIPEDGIKADEIPSTYVPGRNTVFISIALSLAEAKGAQAIYLGINAVDYSGYPDCRPEYLDAFQNLANLSSKVGIEGKAPQLIAPLVMLSKVEIVQRAIALNVPIEKTWSCYQGGEKPCGVCDSCRIRNKALIDAGYPELVG

SEQ ID NO: 37715 - protein, 221 aa, Cyanobacterium sp.
  misc_feature (1)..(221): tr|A0A1E5QRM0|A0A1E5QRM0_9CHRO 7-cyano-7-deazaguanine s ynthase OS=Cyanobacterium sp. IPPAS B-1200 OX=1562720 G N=queC PE=3 SV=1
MTKKAIVLLSGGLDSATSGAIALKEGYEVIALSFRYGQKHFKELEASGNVAKSLGIKEHHIIDVNLSMWGGSSLTDASMNIPEDGVKADEIPSTYVPGRNTVFIAIALSLAEAKGAQAIYLGINAVDYSGYPDCRPEYLSAFQNLANLSSKVGIEGKAPQLIAPLVTLSKVEIVQRAIALNVPIEKTWSCYQGGEKPCGVCDSCRIRNKALIEAGYPELVG

SEQ ID NO: 37716 - protein, 223 aa, Cyanobacterium stanieri
  misc_feature (1)..(223): tr|K9YPD8|K9YPD8_CYASC 7-cyano-7-deazaguanine synthase OS=Cyanobacterium stanieri (strain ATCC 29140 / PCC 720 2) OX=292563 GN=queC PE=3 SV=1
MNKKAIVLLSGGLDSATSGAIALKEGYDVIALSFRYGQRHLKELEASRNVAEALGIKEHYIIDVNLSLWGGSSLTDATMNIPKDGVKADEIPSTYVPGRNTVFIAIALSLAEAKGAEAIYLGINAVDYSGYPDCRPEYLTAFQNLANLSSKVGIEGKSPQLIAPLVTLSKVEIVQRAIALNVPIEKTWSCYQGGETPCGVCDSCRIRNKALIDAGYPELAVVK

SEQ ID NO: 37717 - protein, 226 aa, Ornithocercus magnificus
  misc_feature (1)..(226): tr|A0A4Y3G6Y8|A0A4Y3G6Y8_9CYAN 7-cyano-7-deazaguanine s ynthase OS=cyanobiont of Ornithocercus magnificus OX=24 96102 GN=queC PE=3 SV=1
MTYTTAVALLSGGLDSATAAALAREAKARVIGLSLDYGQRQQRELKAASELAKLLDLEDHITIQVNLATWGGSALTDLKQTIPDSAVQAGIIPSTYVPGRNTVFIALGLSLAEARGANCLVLGVNAVDYSGYPDCRPDYLEAFQKLANLASRVGREGHGTRIWAPLLVWSKRKIVEEALRLKVPIERTWSCYSNGVQPCSVCDSCRIRDDALRAVGRDDLCSSSVQ

SEQ ID NO: 37718 - protein, 279 aa, Cyanobium gracile
  misc_feature (1)..(279): tr|K9P933|K9P933_CYAGP 7-cyano-7-deazaguanine synthase OS=Cyanobium gracile (strain ATCC 27147 / PCC 6307) OX= 292564 GN=queC PE=3 SV=1
MASSVASDRSAPRDRFHNGWAVATARPITRSPATSSPFPPLAIALLSGGLDSATAAALAIEAGHRVIGLSFDYGQRHRRELDAAAAVAGALALEEHHVIAVNLAAWGGSALTDPAIPVPDGGVVEGVIPSTYVPGRNTVFIALGLSLAEARGATSLVLGVNAVDYSGYPDCRPDYLAAFQNLADLATKAGREGQGARLWAPLVAWDKATIVREALRLGVPIAATWSCYSGEDLPCGRCDSCRIRDAALVAAGRADLTSAAVRAGADLPAGAALRTGADC

SEQ ID NO: 37719 - protein, 227 aa, Cyanobium sp.
  misc_feature (1)..(227): tr|A0A081GLM4|A0A081GLM4_9CYAN 7-cyano-7-deazaguanine s ynthase OS=Cyanobium sp. CACIAM 14 OX=1496688 GN=queC P E=3 SV=1
MTPPLAIALLSGGLDSATAAALAIEAGHRVIGLSFDYGQRHRRELTAAAAVAEALGLEEHHVIEVNLAAWGGSALTDPAIPVPKGGVREGIIPATYVPGRNTVFIALGLSLAEARGAGSLVLGVNAVDYSGYPDCRPDYLAAFQALADLATRSGREGHGPRLWAPLVTLSKTEIVREALRLRVPIAATWSCYGGGEVPCGVCDSCRIRDAALVAAGRGDLAGAGVDP

SEQ ID NO: 37720 - protein, 225 aa, Cyanobium sp.
  misc_feature (1)..(225): tr|A0A182ARL9|A0A182ARL9_9CYAN 7-cyano-7-deazaguanine s ynthase OS=Cyanobium sp. NIES-981 OX=1851505 GN=queC PE =3 SV=1
MASPSPTAIALLSGGLDSATAAALAIEAGHRVIGLSFDYGQRHRRELLAASAIAGALNLAEHHTVAVNLAAWGGSALTDPALPVPQEGTAAGVIPSTYVPGRNTVFIALGLSLAEARGAGRLVLGVNAVDYSGYPDCRPDYLEAFQTLADLASKAGREGHGVRLWAPLVQWSKTRIVREALRLGVPIASTWSCYSGGDRPCGVCDSCRIRDAALIEAGRADLVGR

SEQ ID NO: 37721 - protein, 218 aa, Cyanobium usitatum
  misc_feature (1)..(218): tr|A0A2P7MX32|A0A2P7MX32_9CYAN 7-cyano-7-deazaguanine s ynthase OS=Cyanobium usitatum str. Tous OX=2116684 GN=q ueC PE=3 SV=1
MPAPPLAIALLSGGLDSATASALAIEAGYQVIGLSLDYGQRHRRELQAAAELAPLLGLAEHHTIAVNLAAWGGSALTDTAIAVPSAGVEAGVIPSTYVPGRNTVFIALALSLAEARGAQKLVLGVNAVDYSGYPDCRPDYLEAFQTLAELASKSGREGHAAQLWAPLVNWSKTRIVQEARRLGVPIERTWSCYEGGEQPCGVCDSCRIRDAALLEAGV

SEQ ID NO: 37722 - protein, 229 aa, Cyanosarcina cf.; identical to SEQ ID NO: 37425
  misc_feature (1)..(229): tr|A0A2T1F8I9|A0A2T1F8I9_9CHRO 7-cyano-7-deazaguanine s ynthase OS=Cyanosarcina cf. burmensis CCALA 770 OX=2107 697 GN=queC PE=3 SV=1

SEQ ID NO: 37723 - protein, 228 aa, Cyanothece sp.
  misc_feature (1)..(228): tr|A0A3B8XZN0|A0A3B8XZN0_9CYAN 7-cyano-7-deazaguanine s ynthase OS=Cyanothece sp. UBA12306 OX=2055757 GN=queC P E=3 SV=1
MIHQPKAVILLSGGLDSATSGAIAISEGYNVIAISFRYGQRHEKELESAINIAQALGITEHYTVDVNIAQWGGSSLTDTSLNLPQEGINPNIIPSTYVPGRNTVFIAIALSLAEAKEAKAIFLGINAIDYSGYPDCRPDYLQAYQTLANLSSKAGIEGNAPQLIAPLINDSKVDIVRRAVSLGVPIEQTWSCYQGGEKPCGFCDSCRIRDRALIDAGYPHLASFNNID

SEQ ID NO: 37724 - protein, 229 aa, Cyanothece sp.
  misc_feature (1)..(229): sp|B8HQ99|QUEC_CYAP4 7-cyano-7-deazaguanine synthase OS =Cyanothece sp. (strain PCC 7425 / ATCC 29141) OX=39596 1 GN=queC PE=3 SV=1
MKIVILLSGGLDSTTVLYLARSLGHDCYALSFNYGQRHKQELAAAIAVAQLAGVIQHQVISFDLGLWGGSALTDYTLDLPQNRAFKEMAEQIPITYVPARNTIFLSFALSYAEAIGATQVYAGMNAIDYSGYPDCRPDYIAAMQEVYRLGTKQGREGEPIQIITPLIDLTKPAIIQLGNRLGVPWAKTWSCYSDGGGNDPPVACGVCDSCRLRLAAFAELSLTDPLPYR

SEQ ID NO: 37725 - protein, 224 aa, Cycloclasticus sp.
  misc_feature (1)..(224): tr|A0A1M6ETT4|A0A1M6ETT4_9GAMM 7-cyano-7-deazaguanine s ynthase OS=Cycloclasticus sp. DSM 27168 OX=1884353 GN=q ueC PE=3 SV=1
MLKKAVILVSGGLDSATVLAIAKSQGYECYALSFDYGQRHDSELEAASRLAKIYDVQEHKIIELGMGEFGGSALTDDEINVPTEKATGIPVTYVPARNTVFLSIALGWAEVLSAWDIFIGVNAVDYSGYPDCRQEFINAFENLANLATKAGVEEGGFKIHTPLINLSKAQIIQKGEALNVDYSETVSCYQANTKGEACGECESCRLRQQGFEKAKVQDPTRYQH

SEQ ID NO: 37726 - protein, 226 aa, Cycloclasticus sp.
  misc_feature (1)..(226): tr|A0A1X1QNV1|A0A1X1QNV1_9GAMM 7-cyano-7-deazaguanine s ynthase OS=Cycloclasticus sp. symbiont of Bathymodiolus heckerae OX=1284675 GN=queC PE=3 SV=1
MTIKKAVVLLSGGLDSATVLAIAKEQGYECYALSFDYGQRHNSELEAASKLSKKFDVEEHKTIKLGMGEFGGSALTDDDIDVPTEKASGIPVTYVPARNTVFLSIALGWAEVLNAWDIFIGVNAVDYSGYPDCRPEFISAFEKLANLATKAGVEKGGFRIHTPLITLSKAQIIQKGSTLNVDYSATVSCYQANVKGEACGECESCRLRQQGFEKAKIADPTRYEVK

SEQ ID NO: 37727 - protein, 224 aa, Cycloclasticus zancles; identical to SEQ ID NO: 37725
  misc_feature (1)..(224): tr|S5TZ31|S5TZ31_9GAMM 7-cyano-7-deazaguanine synthase OS=Cycloclasticus zancles 78-ME OX=1198232 GN=queC PE=3 SV=1

SEQ ID NO: 37728 - protein, 226 aa, Cylindrospermopsis raciborskii
  misc_feature (1)..(226): tr|A0A1S2A2F6|A0A1S2A2F6_9CYAN 7-cyano-7-deazaguanine s ynthase OS=Cylindrospermopsis raciborskii MVCC14 OX=940 191 GN=queC PE=3 SV=1
MKAVILLSGGLDSSTVLYQARADGYQCYAISFDYHQRHRRELQSAMSIAQSLGVVEHQLITFDLRSWGGSALTDNSIPVPQNRPLDQMSEYIPITYVPARNTIFLSFALAYAEAIRAERVYIGVNALDYSGYPDCRPDYIHAMQEVFRLGTKQGREGNRIDIVAPLINLTKTQIIQLGNLLGVPWELTWSCYSGDQHPCGVCDSCQLRWSAFHELGLEDPVKQQGM

SEQ ID NO: 37729 - protein, 226 aa, Cylindrospermopsis raciborskii
  misc_feature (1)..(226): tr|A0A1X4G4T0|A0A1X4G4T0_9CYAN 7-cyano-7-deazaguanine s ynthase OS=Cylindrospermopsis raciborskii CENA303 OX=11 70769 GN=queC PE=3 SV=1
MKAVILLSGGLDSSTVLYQARADGYECYVISFDYHQRHRRELQSAISIAQSLEVVEHQLVTFDLRSWGGSALTDNSIPVPQNRPLDQMSGSIPITYVPARNTIFLSFALAYAEAIRAERVYIGVNALDYSGYPDCRPDYIHAMQEVFRLGTKQGREGKRIDIVAPLINLTKSQIIQLGNLLGVPWELTWSCYSGDQQPCGVCDSCQLRWAAFHELGLEDPVKQQGM

SEQ ID NO: 37730 - protein, 222 aa, Cylindrospermopsis sp.
  misc_feature (1)..(222): tr|A0A0R0ME73|A0A0R0ME73_9CYAN 7-cyano-7-deazaguanine s ynthase OS=Cylindrospermopsis sp. CR12 OX=1747196 GN=qu eC PE=3 SV=1
MKAVILLSGGLDSSTVLYQARADGYECYAISFDYHQRHRRELQSAMSIAQSLGVVEHQLVTFDLRSWGGSALTDNSIPVPHNRPLDQMSESIPITYVPARNSIFLSFGLAYAEAIRAERVYVGVNALDYSGYPDCRPDYIHAMQEVFRLGTKQGREGKPIDIIAPLINLTKTQIIQLGNRLGVPWELTWSCYSGGEHPCGVCDSCQLRWVAFHELGLKDPGV

SEQ ID NO: 37731 - protein, 247 aa, Cylindrospermum sp.
  misc_feature (1)..(247): tr|A0A1Z4QP59|A0A1Z4QP59_9NOST 7-cyano-7-deazaguanine s ynthase OS=Cylindrospermum sp. NIES-4074 OX=2005457 GN= queC PE=3 SV=1
MASSLGVIWQAISSPKFKTEMKAVILLSGGLDSSTVLYQAKVDGCECHAISFDYQQRHRRELQSALVIAQKAGVVKHQVVNFDLRQWGGSALTDNTIDLPQERSLEEMSQNIPVTYVPARNTIFLSFALGFAEAIAAERVYIGVNALDYSGYPDCRPDYIQAMQEVYRLGTKQGREGQPISIVAPLITLKKTEIIQLGNQLGVPWDLTWSCYDGGDVACGVCDSCRLRLAAFAELGLKDPLTYAQFG

SEQ ID NO: 37732 - protein, 623 aa, Cylindrospermum sp.
  misc_feature (1)..(623): tr|A0A1Z4QGH5|A0A1Z4QGH5_9NOST 7-cyano-7-deazaguanine s ynthase OS=Cylindrospermum sp. NIES-4074 OX=2005457 GN= queC PE=4 SV=1
MIQPQLILCSGVTLPDNDPLRVGRKVLDLDACSTNPNVNIQFDDVAKVFRKHLSPRLVDLLEIASYVYSTDAAIQRGEGWLDDHTREPWTRDFQFVIPVRDLDFWCKPNVQQLLVQVLKFLSDDDYKFEFRALERDRPVHQYLDLQNDEDWPFYGVERVLMFSGGLDSLAGSVETAHNGSNLVLVSHRPVVTLDARLRRLFAQLQQTYTVKMIHVPVWIYKNRKLGREHTQRTRSFLFSALGTVVAESLKAQGVRFFENGIVSLNLPVADEVLRARASRTTHPHALELFTRLYSLVTERQFVVDNPYLLKTKAEVVSIIAERGASHLIQYTCSCAHTGFFQSRTQWHCGTCSQCIDRRIAILATGQAVNDLETDYVSDVFTGSRKDGYEKNMAVDYTRHAIELCHMSETEIATKFNLELSRAVRSQPNRREVAQKLVELHKRHGETTKKVLDKQLQQYVSQLIEGKLDKSSMLAMIAGQEHLASSWHRYADRIGNLLLSGIPTACKTHKPENEPHLQEICDGILKAHDSDLVREFPFMRWSSTLTKPDWSVESLKLWVELKYVRKREDVRKINEAISADITQYGDNQRRVLFVVYDPNHLITDEQAFSEPIHRREEMRVSFVR

SEQ ID NO: 37733 - protein, 231 aa, Cylindrospermum stagnale
  misc_feature (1)..(231): tr|K9WZQ1|K9WZQ1_9NOST 7-cyano-7-deazaguanine synthase OS=Cylindrospermum stagnale PCC 7417 OX=56107 GN=queC P E=3 SV=1
MKAVILLSGGLDSSTVLYQAKADGCECHAISFDYQQRHRRELQSALLVAQTNGVVKHQVVNFDLRQWGGSALTDDAIALPQERSLDEMSQNIPVTYVPARNTIFLSFALGYAETIAAERVYIGVNALDYSGYPDCRPDYIQAMQDVFRLGTKQGREGQPISIVAPLINLKKTEIIQLGNQLGVPWKLTWSCYDGGDIACGVCDSCRLRLAAFAELGLKDPLLYAEDKNFKF

SEQ ID NO: 37734 - protein, 233 aa, Cystobacter ferrugineus
  misc_feature (1)..(233): tr|A0A1L9BAK3|A0A1L9BAK3_9DELT 7-cyano-7-deazaguanine s ynthase OS=Cystobacter ferrugineus OX=83449 GN=queC PE= 3 SV=1
MLASKKKAVVLLSGGLDSTTCLAMAKAAGFEPVCLAVAYGQRHAVELERARGVAQSMGVTDFRVVTVDLRQVGGSALTADIDVPKDRPEEEMSHGIPVTYVPARNALFLSLALGLAESVGASDLYIGVNAVDYSGYPDCRPEFIRAFEAMATLATKAGVEGTRFRVHAPLSGMTKADIIREGVRLGVDYGMTHSCYDPDEQGRACGRCDSCALRRRGFEQAGVPDPTRYTTGA

SEQ ID NO: 37735 - protein, 975 aa, Cystobacter ferrugineus
  misc_feature (1)..(975): tr|A0A1L9AXU9|A0A1L9AXU9_9DELT Carrier domain-containin g protein OS=Cystobacter ferrugineus OX=83449 GN=BON30_ 40290 PE=3 SV=1
MDNREIAPTQSARTRDAYTAVPPAKAEYPSDVCVHQLFESQADRTPDAVAARAGNESLTYRELNFRANQLARYLVAKGVVPRGSVAVLMNRTPACLVSLLAIIKAGAAYVPVDAGLPAKRVDYILTDSGATCVLTDRETRSLLDEPRSASTLVIDVDDPSIYSGETSNLGLAVDPEQQVYCIYTSGSTGLPKGVMVQHRALMNYVWWAKKQYVTDAVESFALYSSLSFDLTVTSIFVPLISGRCIDVYPDLGEDVPVINRVLEDNRVDVVKLTPAHLALLRNTDLSQSRLKVLILGGEDLRAETAGDVHKRLDGRAVIYNEYGPTETVVGCMIHRYDPAVDLHGSVPIGVGIDNMRIYLLDDRRRPVKPGEVGEIYIGGDGVTLGYKDKPQVTADHFISNPFVEGERLYASGDLGRVNERGALVFLGRKDLQIKLRGYRIELGEIESALLSYPGIKECIVDSTKTAQSQAAAQLTYCTKCGLASSFPNTTYSAEGVCNHCEAFDKYRSVVDDYFSTMDELQSIVTEMKSIHNSKYDCIVALSGGKDSTYALCRMIETGARVLAFTLDNGYISEEAKQNINRVVARLGVDHRYLSTGHMKEIFVDSLKRHSNVCNGCFKTIYTFAINLAQEVGVKHVVMGLSKGQLFETRLSALFRTSTFDNAAFEKSLVDARKIYHRIDDAVSRLLDTTCVKNDKVIENIRFVDFYRYCHASRQEMYDYIQERVGWARPIDTGRSTNCLLNDVGIYVHNKERRYHNYSLPYSWDVRMGHISREEAMRELDDSADIDVERVEGIIKDLGYELNDQVVGSAEAQLVAYYVSAEEFPASDLRQFLSEILPEYMVPRSFVQLDSIPLTPNGKVNRQALPKPDLLRKAGTDGQAAPRTPVEKQLAELWKEVLQVDSVGIHDNFFEMGGHSLPALMLLYKIDSQFHKTISIQEFSKVPTISALAAHLGSDTEAVPPGLGEVVDQSAPAYRG

SEQ ID NO: 37736 - protein, 233 aa, Cystobacter fuscus
  misc_feature (1)..(233): tr|A0A250JI67|A0A250JI67_9DELT 7-cyano-7-deazaguanine s ynthase OS=Cystobacter fuscus OX=43 GN=queC PE=3 SV=1
MLASKKKAVVLLSGGLDSTTCLAMAKAAGFEPVCLAVAYGQRHAVELERARGVAQAMGVTDYRVVTVDLRQVGGSALTADIDVPKDRAEEEMSHGIPVTYVPARNALFLSLALGLAESVGASDLYIGVNAVDYSGYPDCRPEFIRAFEAMATLATKAGVEGTRFRVHAPLSGMTKADIIREGVRLGVDYGMTHSCYDPDAQGRACGRCDSCSLRRRGFEQAGVPDPTRYTTGA

SEQ ID NO: 37737 - protein, 233 aa, Cystobacter fuscus
  misc_feature (1)..(233): tr|S9P936|S9P936_9DELT 7-cyano-7-deazaguanine synthase OS=Cystobacter fuscus DSM 2262 OX=1242864 GN=queC PE=3 SV=1
MRASKKKAVVLLSGGLDSTTCLAMAKAAGFEPVCLAVAYGQRHAVELERARGVAQALGVTDFRVVTVDLRQVGGSALTADIDVPKDRPEEEMSHGIPVTYVPARNALFLSLALGLAESVDASDLYIGVNAVDYSGYPDCRPEFIRAFEAMAVLATKAGVEGTRFRVHAPLSGMTKADIIREGVRLGVDYGMTHSCYDPDEQGRACGRCDSCSLRRRGFELAGVPDPTRYTTGA

SEQ ID NO: 37738 - protein, 975 aa, Cystobacter sp.
  misc_feature (1)..(975): tr|A0A0H4NUD7|A0A0H4NUD7_9DELT CysH OS=Cystobacter sp. Cbv34 OX=1679164 GN=cysH PE=3 SV=1
MDNREIAPTQSARTRDAYTAVPPAKAEYPSDVCVHQLFELQADRIPDAVAARAGNESLTYRELNFRANQLARYLVAKGVVPRGSVAVLMNRTPACLVSLLAIIKAGAAYVPVDAGLPAKRVDYILTDSGATCVLTDRETRSLLDEPRSASTLVIDVDDPSIYSGETSNLGLAVDPEQQVYCIYTSGSTGLPKGVMVQHRALMNYVWWAKKQYVTDAVESFALYSSLSFDLTVTSIFVPLISGRCIDVYPDLGEDVPVINRVLEDNKVDVVKLTPAHLALLRNTDLSQSRLKVLILGGEDLRAETAGDVHKRLDGRAVIYNEYGPTETVVGCMIHRYDPAVDLHGSVPIGVGIDNMRIYLLDDRRRPVKPGEVGEIYIGGDGVTLGYKDKPQVTADHFISNPFVEGERLYASGDLGRVNERGALVFLGRKDLQIKLRGYRIELGEIESALLSYPGIKECIVDSTKTAQSQAAAQLTYCTKCGLASSFPNTTYSAEGVCNHCEAFDKYRSVVDDYFSTMDELQSIVTEMKSIHNSKYDCIVALSGGKDSTYALCRMIETGARVLAFTLDNGYISEEAKQNINRVVARLGVDHRYLSTGHMKEIFVDSLKRHSNVCNGCFKTIYTFAINLAQEVGVKHVVMGLSKGQLFETRLSALFRTSTFDNAAFEKSLVDARKIYHRIDDAVSRLLDTTCVKNDKVIENIRFVDFYRYCHASRQEMYDYIQERVGWARPIDTGRSTNCLLNDVGIYVHNKERRYHNYSLPYSWDVRMGHISREEAMRELDDSADIDVERVEGIIKDLGYELNDQVVGSAEAQLVAYYVSAEEFPASDLRQFLSEILPEYMVPRSFVQLDSIPLTPNGKVNRQALPKPDLLRKAGTDGQAAPRTPVEKQLAELWKEVLQVDSVGIHDNFFEMGGHSLPALMLLYKIDSQFHKTISIQEFSKVPTISALAAHLGSDTEAVPPGLGEVVDQSAPAYRG

SEQ ID NO: 37739 - protein, 223 aa, Cytophaga xylanolytica
  misc_feature (1)..(223): tr|A0A2W7NPI2|A0A2W7NPI2_9BACT 7-cyano-7-deazaguanine s ynthase OS=Cytophaga xylanolytica OX=990 GN=queC PE=3 S V=1
MSSKQAIVLLSGGLDSAVALYLAKSQGFEVHALSFDYGQRHNRELQSARAIAQKAGVTSHHVVSLQLGSWGSSSLTDAAMPVEDGDVDRTDIPATYVPARNMVFLSVAASLAEARGAQDIFIGVSQVDYSGYVDCRESFIKAMETAINQGTVMGAELNRPITIHAPFIYKTKADEIRLGVELGVDFSLTWSCYRGGDKPCGTCDSCLLRAKAFAEAGVTDTSL

SEQ ID NO: 37740 - protein, 504 aa, Cytophagaceae bacterium
  misc_feature (1)..(504): tr|A0A4Q3NN63|A0A4Q3NN63_9BACT FumaraseC_C domain-conta ining protein OS=Cytophagaceae bacterium OX=2026729 GN= EOO38_14805 PE=4 SV=1
MQTHPVTILSSPFQQLRCLVSGLQVMGNAAGIGFAGANGHFELNVFKPMMVTALLHSICLMGDACTSFTHNCVDNMEANEPRIAQLLNESLMLVTALNNHIGYDKAAKTAKKAHKEGTTLKQAALDLGVVTEEQLAEIVAKVDKAEADDGWARDLRLFIPIADPQLWQAAIPLLQKALHFLSGDLWEIILLPDGPRQLTYQNRGRITVMAGHDCVSLFSGGMDSGIGALNLLGEGRHPLLISHAYRGDSEKQIMVRDHLPVQVSRFAAVANPVSLTGRKTDVQMRTRSFNFLAYGALVGATLAQLRVAGTPVELFVPENGLIALNPPMTARRIGALSTRTTHPHFLGLFQQILDTVGLPVRVENPYALQTKGEMLSGCLDQANLRVLASKTVSCGKWKRTHQQCGKCVPCIIRRASFHAAGITDGTTYHAKGADLASVVRDANARDDLMAMILAARRLPAEDVARWVRQSGPLPLHRQSRDYLIGVATRGMGEVRNYLWSLGLL

SEQ ID NO: 37741 - protein, 110 aa, Cytophagales bacterium
  misc_feature (1)..(110): tr|A0A2M6GIZ0|A0A2M6GIZ0_9BACT 7-cyano-7-deazaguanine s ynthase (Fragment) OS=Cytophagales bacterium CG18_big_f il_WC_8_21_14_2_50_42_9 OX=1973956 GN=COW65_09190 PE=3 SV=1
MSEQNNKALVLFSGGQDSTTCLYWAKKQFNTVEALGFRYGQKHDVELRQAEIIAAQAQVPFRVLDITGMLQGSALTEHDKAMAAPHELNENLPASFVPGRNAVFLTIATS

SEQ ID NO: 37742 - protein, 221 aa, Cytophagia bacterium
  misc_feature (1)..(221): tr|A0A2E5GUV6|A0A2E5GUV6_9BACT 7-cyano-7-deazaguanine s ynthase OS=Cytophagia bacterium OX=2026730 GN=queC PE=3 SV=1
MNKAIILLSGGQDSTTCLYWAKQKFDLVEAIGFDYGQRHLIELEFAKKICNKEKISFDIISLKEILSNSALINPQEDFNKSHPSNQNLPNSFVPGRNLIFLSIASSIAYNRKIENIIIGVCETDFSGYPDCRDEFIKSMKKTIYLATEKLIEIHTPLMNLDKAQTWKLANDLGCIETIINSTMTDYNGSQNENDWGLGNLDNPASILRHKGYLKAKKNKWI

SEQ ID NO: 37743 - protein, 225 aa, Dactylococcopsis salina
  misc_feature (1)..(225): tr|K9YUI8|K9YUI8_DACSA 7-cyano-7-deazaguanine synthase OS=Dactylococcopsis salina PCC 8305 OX=13035 GN=queC PE =3 SV=1
MTDKAVVLLSGGLDSSTVLYQGKADGYECYALSFNYQQRHQRELDAARDIAAAAGVTQQVISFDLGLWGGSALTDATINVPRDRAPEEMATEIPVTYVPARNTIFLSFGLAYAEALEAKRVYLGVNALDYSGYPDCRPDYINAMQQVFKLGTKQGREGRSIEIISPLIELKKTEIIQLGNQLNVPWEKTWSCYQGGEKACGVCDSCQLRLKAFQELGLTDPLPYL

SEQ ID NO: 37744 - protein, 231 aa, Dankookia rubra
  misc_feature (1)..(231): tr|A0A4R5Q8V8|A0A4R5Q8V8_9PROT 7-cyano-7-deazaguanine s ynthase OS=Dankookia rubra OX=1442381 GN=queC PE=3 SV=1
MRDDAALVLFSGGQDSATCLAWALDRFAHVETIGFDYGQRHRVELDVRGTFRTRLAAENPHWAAKLAEDHVLALDALRAVSDTALTRDTGIAMQADGLPNTFVPGRNLLFLTFAAALAYRRGLRHIVAGVCETDYSGYPDCRDDTLKALQVAINLGMERRFVLHTPLMWRDKAATWALAERLGGAALVEAIRAETHSCYLGDRSRLYPWGFGCGACPACELRRRGWEQWHG

SEQ ID NO: 37745 - protein, 225 aa, Dechloromonas aromatica
  misc_feature (1)..(225): sp|Q478G3|QUEC_DECAR 7-cyano-7-deazaguanine synthase OS =Dechloromonas aromatica (strain RCB) OX=159087 GN=queC PE=3 SV=1
MMKKAVVLLSGGLDSATCLAIARSQGFESYCLSFNYGQRHCAELVAADRVVKALGAAEHRVLNFGLAQFGGSALTDTNIAVPTEGVQPGIPVTYVPARNTIMLSLALAWAEVLGSRDIFVGVNAVDYSGYPDCRPEYIAAFETMANLATKAGVEGHKLSIHAPLIDLSKAEIIRTGAALGVDYSLTVSCYQADEQGRACGVCDSCRLRAEGFAAAGLADPTLYRA

SEQ ID NO: 37746 - protein, 225 aa, Dechloromonas denitrificans
  misc_feature (1)..(225): tr|A0A133XFL0|A0A133XFL0_9RHOO 7-cyano-7-deazaguanine s ynthase OS=Dechloromonas denitrificans OX=281362 GN=que C PE=3 SV=1
MMKPAVVLLSGGLDSATCLALARSQGFDCYCLSFDYGQRHNAELQAAERVVKALGAAEHRVINFGLAQFGGSALTDTNIAVPTAGVQPGIPVTYVPARNTIMLSLALAWAEVLGSRDIFVGVNAVDYSGYPDCRPEYIAAFETMANLATKAGVEGVKLSIHAPLIDMSKAEIIRTGTTLGVDYGLTVSCYQADSAGRACGECDSCRLRAEGFAAAGLADPTIYRV

SEQ ID NO: 37747 - protein, 225 aa, Dechloromonas sp.
  misc_feature (1)..(225): tr|A0A5C7ZEQ7|A0A5C7ZEQ7_9RHOO 7-cyano-7-deazaguanine s ynthase OS=Dechloromonas sp. OX=1917218 GN=queC PE=3 SV =1
MMKPAVVLLSGGLDSATCLAIARSQGFDCYCLSFDYGQRHNAELKAAERVVKALGAKEHRVLNLGLAQFGGSALTDTSIAVPTDGVHPGIPVTYVPARNTIMLSLALAWAEVLGSDDIFVGVNAVDYSGYPDCRPEYIAAFEKMANLATKSGVEGHKLQIHAPLIALSKAEIIRTGAALGVDYGLTVSCYQADEQGRACGVCDSCRLRAEGFAAAGVADPTPYRI

SEQ ID NO: 37748 - protein, 225 aa, Dechloromonas sp.
  misc_feature (1)..(225): tr|A0A3B7A963|A0A3B7A963_9RHOO 7-cyano-7-deazaguanine s ynthase OS=Dechloromonas sp. HYN0024 OX=2231055 GN=queC PE=3 SV=1
MMKPAVVLLSGGLDSATCLAIARSQGFDCYCLSFNYGQRHCAELQAADRVVKALGAVEHRVLNLGLAQFGGSALTDSAINVPVDGVQPGIPVTYVPARNTIMLSLALAWAEVLGSRDIFVGINAVDYSGYPDCRPEYLAAFEKMANLATRAGVEGVKLSIHAPLIDLSKADIIRTGAALGVDYGLTVSCYQADQLGRACGVCDSCRLRAEGFAAAGLTDPTIYQA

SEQ ID NO: 37749 - protein, 235 aa, Deferribacter autotrophicus
  misc_feature (1)..(235): tr|A0A5A8F1V3|A0A5A8F1V3_9BACT 7-cyano-7-deazaguanine s ynthase OS=Deferribacter autotrophicus OX=500465 GN=que C PE=3 SV=1
MSKGIVLVSGGMDSCVTAAIAKDLGYELYFLHVNYGQRTEKRELQAFYDISSFYNAKDTMVVDISYLKKIGGSSLTDESMEVEKGKLNREGIPTTYVPFRNANILSIATSWAEVIGAEKIFIGAVEEDSSGYPDCREIFYKKFNELLSVALASDFKVEVVTPLINLKKGQIVQKGVELKAPLHLSWSCYKSEDKACGECDSCFLRLKGFMDAGEIDPISYKKYPDFYQEFLKSSH

SEQ ID NO: 37750 - protein, 237 aa, Deferribacter desulfuricans
  misc_feature (1)..(237): tr|D3PCT8|D3PCT8_DEFDS 7-cyano-7-deazaguanine synthase OS=Deferribacter desulfuricans (strain DSM 14783 / JCM 11476 / NBRC 101012 / SSM1) OX=639282 GN=queC PE=3 SV=1
MRKAIVLVSGGMDSCVTAAIAKDMGYELYLLHTNYGQRTENRELKAFYDIASYYDAKDTLVVSIDYLKKIGGSALTDEKIEVEKGNLNRKEIPKTYVPFRNANILSIATSWAEVIEAERIFIGAVEEDSSGYPDCRKIFYDKFNDLLSVALAKDIGLKVETPLINMKKKDIVKKGVELNAPLHLSWSCYKSEDKACGECDSCLLRLKGFMEAGEIDPIPYEKFPEFYETYLIKRRGV

SEQ ID NO: 37751 - protein, 224 aa, Deferribacteraceae bacterium
  misc_feature (1)..(224): tr|A0A3C1BPX8|A0A3C1BPX8_9BACT 7-cyano-7-deazaguanine s ynthase OS=Deferribacteraceae bacterium OX=2053543 GN=q ueC PE=3 SV=1
MSKKKAIVLVSGGMDSCVTAAIAAQNYEPCFLHVNYGQRTENREYKAFEDLCRFYGIKRKLVVDISYLKEIGGSSLTDEAIEVEEGELERQGIPKTYVPFRNANILSIAASWAEVLEASAIFIGAVEEDGSGYPDCRRVFYDAFEAAVDAGTKPETKIKIETPLISLKKSDIVKLGKELKAPLELSWSCYKSEDEACGECDSCLLRLRGFEQAGYSDPIPYKKR

SEQ ID NO: 37752 - protein, 620 aa, Defluviimonas aquaemixtae
  misc_feature (1)..(620): tr|A0A2R8BLT5|A0A2R8BLT5_9RHOB 7-cyano-7-deazaguanine s ynthase OS=Defluviimonas aquaemixtae OX=1542388 GN=queC _2 PE=4 SV=1
MGAAAPPPEHRVRCLGHVAGPRRGERLTFEIDGETRHATLRIGQLTKELAASLPAKTLDLLDLATLVYAVDAAVRRGGTADQRMGAKWYRRFLIEMPVRDLAAWSDFDLKRELEEMLLFLSGDRFEFAFRATEDLVQTASPFFRFGPDEGWRPDRVLMFSGGLDSFAGALEEIVDHGNRVALISHFSSTKIAPIQRDLVAALKDGLGKNMARHFPVQIQLGKGTNLEGTHRTRSFLFAALGTVVALAFNRDRVSFHENGIVSLNLAPVANVLGTRASRTTHPQALDRFTSFFGQLVGTGMRIDNPFFWKTKTDVLLTISRLKMADQIAHTRSCADVHNQTIQHVHCGRCSQCIDRRFAVLAAGLERFDPAEAYRIDLLTGERNAVQDREMALSYLRNAIEAEFTTPISLLASHPEIVAAITHVGEPTAPALDRIVALLNRHGRAVADVIQSATDRRPPSDFPADSLPNLFGDIRRAQMSAYPPLGADRSTEAAQPRFVTLVFDDERKRLSIEDRIDIGSGATYRLLRALAEYHLAAAGKGLDPFDYPMIAAQKLAHKLAVASDEHVRKSVMRARTLLAKRFASAQLDPELGRGVIENNPWRGYRLDPQLVAVRLGSLDMG

SEQ ID NO: 37753 - protein, 455 aa, Defluviimonas aquaemixtae
  misc_feature (1)..(455): tr|A0A2R8BKN9|A0A2R8BKN9_9RHOB 7-cyano-7-deazaguanine s ynthase OS=Defluviimonas aquaemixtae OX=1542388 GN=queC _1 PE=4 SV=1
MRRFSLIGRLGPDDKSKIKLVQSDSDVFEIDFLDGDLRMGFGIGHALDQLASLGMRPSEKGIDLVVLAALVNAGDTRVSRRLNAQDGWTREIDLYVPVSAAAAWTTSTGSIESMLRFLSGDRWRVFFRDRPKRTRTLAVAPKRLAIDGLTKVSLLSGGLDSLIGAVDLLSGSERPLFVSHYWDSETAKAQAYILDRLENRFSKEAFKSLRVRLGFDKHHLTTGETENTQRGRSFLFYSLATLAASAIEGRSTVDIPENGLIALNVPLDPLRFGALSTRTAHPHFIASMQRLIDALSLDVELDNPYRHMTKGEMVANCADKPFLEKIVENSMSCSSPAKARYKKLSPRHCGYCVPCLIRRASLEVGLDGDDETVYTIEDLKGHILASDQPEGEHVRSFQLMAKRIRAKPDLAKILVHKPGPLHDKPDEIPDYADVFRRGVLEVAELLKGVRARPGG

SEQ ID NO: 37754 - protein, 206 aa, Defluviimonas denitrificans
  misc_feature (1)..(206): tr|A0A2S8S3M7|A0A2S8S3M7_9RHOB 7-cyano-7-deazaguanine s ynthase OS=Defluviimonas denitrificans OX=404881 GN=LX7 0_03363 PE=3 SV=1
MKKAVVMVSGGLDSTTVCYLLAKEGREVHPIFFDYGQHCAETEWAKVQEVLPQEAKPPERLNISDIFKGSPSRMIVEADLWKEAVSDDDLYLPYRTMLFFAVAAARAQTLRILDVYSGFINSNHAKEIDCSTEFMNGLEELSRGVGAVRFHAPFREKTKADVVRQALDLGVPIGRTFSCQASSSFPCGACPNCVERLNALLEAGIA

SEQ ID NO: 37755 - protein, 233 aa, Defluviimonas sp.
  misc_feature (1)..(233): tr|A0A059II89|A0A059II89_9RHOB 7-cyano-7-deazaguanine s ynthase OS=Defluviimonas sp. 20V17 OX=1417296 GN=queC P E=3 SV=1
MKTIVICSGGLDSVSLAQMVAAEHDLTRLVSFDYGQRHRKELEFAARAAARLGVPHDIIDMRGIGAALTGSALTDDIDVPDGHYAEDTMRITVVPNRNAIMLAVAFGMAAANGDDAVATAVHGGDHFIYPDCRPAFTEAFETMQKAALDGYADIRLYTPFVHRTKADIVTEGARVGTPFAETWSCYKGGARHCGRCGTCVERREAFHLAGIPDPTDYEDPDYWRQAIAAREGR

SEQ ID NO: 37756 - protein, 630 aa, Defluviimonas sp.
  misc_feature (1)..(630): tr|A0A059IMA3|A0A059IMA3_9RHOB Uncharacterized protein OS=Defluviimonas sp. 20V17 OX=1417296 GN=U879_13630 PE= 4 SV=1
MTETLVRVETGSQDRVRDMVIRINGANPTFDLQTDPIEHQLLVPANELLLDLLDVAASVFAADSSVPRGGATRPEFGAGWRRRMTFSIPVRSPDIWNRPEVTAALVDAVEFLTDDEVAFEFHKGRQSIGPQQYFDFAGDSAHSGQIEDVLLFSGGLDSLSGAVERLTQGPGRIALVTHLSANKIIKHQKLLIEALKKRFPGRILHIPIRATRKGSEAAETTQRSRSFLFASLAYVVARMLGAKRIAFYENGIVSHNLPISTQVIGTMATRTTHPLSLVKLGAFLDTLGGSPIPIENRFAWLTKAEVITRLTENGGADLIKTSISCTQVRDQSVLHTHCGACSQCLDRRFAMLATGLHVHEPDDMYLTDVISGARDAGRSRTIALDWIAHACRLADLSQRDWMDRFGSELLRIVEGLPNLSGTDALQRIIALHQRHSNTVKKALEDAVAKYAPDLVSRSLPVTSLLRLYLNDPPGTPSLPRLARGRYVSAEPSVAAPTLDAGTRDTGIFPLQVAFHNDGKDDLITVRGLGEVRGRSASAAHLLRPAYEEDQKKGLNSDNHTFVPAMSLFLPVHVSKAAVRKCVQRCRDALAEFYRAIEGHDPPRDLLIENKPQRGYRLDPTCKIVDRDQSK

SEQ ID NO: 37757 - protein, 219 aa, Dehalobacter sp.
  misc_feature (1)..(219): tr|T0I7J1|T0I7J1_9FIRM 7-cyano-7-deazaguanine synthase OS=Dehalobacter sp. UNSWDHB OX=1339256 GN=queC PE=3 SV= 1
MQKKEKALVVFSGGQDSTTCLFWARQLFTEVVALSFDYGQRHRLELDCAREICAKHQIEHHLLDLGLLNQLAPNSLTRPEIEVEKNLPGDRLPNTFVDGRNMLFLSFAAIFAKQRGIRHLITGVSQSDYSGYPDCRDIFVKSLNVTLNLAMDYEFVIHTPLMWVDKAETWKLADDLGVLPIIQEETLTCYNGIKGDGCGECPACLLRKEGYQRYCSGVK

SEQ ID NO: 37758 - protein, 235 aa, Dehalobacter sp.
  misc_feature (1)..(235): tr|A0A4R4D0U7|A0A4R4D0U7_9FIRM 7-cyano-7-deazaguanine s ynthase OS=Dehalobacter sp. 12DCB1 OX=2070364 GN=queC P E=3 SV=1
MQKNEKALVVFSGGQDSTTCLFWARQLFAEVIALSFDYEQKHRLELDCAREICAKHQIEHHLLDLGLLNQLAPNALTRTEIEVEKNPSAGRLPNTFVDGRNMLFLSFAAVFAKQRGIRHLITGVSQSDYSGYPDCRDIFIKSLNVTLNLAMDYEFVIHTPLMWIDKAETWKLADDLGVLPIIQEETLTCYNGIKGDGCGECPACLLRKEGYQKYYSKESSHTLVNQKVDKYNEFE

SEQ ID NO: 37759 - protein, 447 aa, Dehalococcoides mccartyi
  misc_feature (1)..(447): tr|A0A328EJR7|A0A328EJR7_9CHLR Uncharacterized protein OS=Dehalococcoides mccartyi OX=61435 GN=C1G87_1587 PE=4 SV=1
MNCFDFGDFTQSPELENRYWVDDSPLSRAFGSVLPPKLADLVDLAMAVYYADRRSQRQRNSFELTGHREIRVRLPVRELELWKSKEITSSLVDLLAWFTEDTWEFEFSKLNTKRKSEYEESLFSSPVAEHNVSLLFSGGLDSLAGLCTLMDVDRDCSFVLVSGCTSQRMGQVQRDLIRELVRYWRDQSRELRSLVVPFGIRRPMGSFREESSQRSRGFVFLLFGAAAAMMAKSKSLYVCENGVGAANLPFNEGQLGIDNTRGVHPLSLARMSDFIGLILGKPLPIVNPFEFSTKTEMCQVLKKLGLGALIKMTVSCDSFPLRIPDSPAQCGICTSCLLRRCSLHAAGLDGDDSGADYRFDVKKSFVRINKRDLYPLMAMLDQVDRIHACLTQESSWAMLTETFPELFEIQHGLSAHRHMAMNDIAQSYLRMYRAYVGEWGVFPLNVS

SEQ ID NO: 37760 - protein, 445 aa, Dehalococcoides mccartyi
  misc_feature (1)..(445): tr|A0A328EPY9|A0A328EPY9_9CHLR Uncharacterized protein OS=Dehalococcoides mccartyi OX=61435 GN=C1G86_1552 PE=4 SV=1
MNCFDFGDFTQSPELENRYWVDDSPLSRAFGSVLPPKLADLVDLAMAVYYADRRSQRQRNSFELTGHREIRVRLPVRELELWKSKEITSSLVDLLAWFTEDTWEFEFSKLNTKRKSEYEESLFSSPVAEHNVSLLFSGGLDSLAGLCTLMDVDRDCSFVLVSGCTSQRMGQVQRDLIRELVRYWRDQSRELRSLVVPFGIRRPMGSFREESSQRSRGFVFLLFGAAAAMMAKSKSLYVCENGVGAANLPFNEGQLGIDNTRGVHPLSLARMSDFIGLILGKPLPIVNPFEFSTKTEMCQVLKKLGLGALIKMTVSCDSFPLRIPDSPAQCGICTSCLLRRCSLHAAGLDGDDSGADYRFDVKKSFVRINKRDLYPLMAMLDQVDRIHACLTQESSWAMLTETFPELFEIQHGLSAHRHMAMNDIAQSYLRMYRAYVGEWGYFLST

SEQ ID NO: 37761 - protein, 193 aa, Dehalococcoides sp.
  misc_feature (1)..(193): tr|A0A0C6EMS8|A0A0C6EMS8_9CHLR 7-cyano-7-deazaguanine s ynthase OS=Dehalococcoides sp. UCH007 OX=1522671 GN=que C PE=3 SV=1
MSMVTLVSGGLDSTLMSILAKEEGITLFPLFIDYGQLCIEREWEACIYVHKQFGLPSPIRMDLAGYGKTIPSGLTSKSLRVNEDAFLPGRNLLFLLAACSYAYSKNANAVAIGLLSEETHIFPDQTKDFVEKAQSTINVALERDIRIITPLMNLNKHDVLAMAKKKGIEGTYSCHSGTLPTCGSCIACRQYID

SEQ ID NO: 37762 - protein, 254 aa, Dehalococcoidia bacterium
  misc_feature (1)..(254): tr|A0A523UQ73|A0A523UQ73_9CHLR 7-cyano-7-deazaguanine s ynthase OS=Dehalococcoidia bacterium OX=2026734 GN=queC PE=3 SV=1
MRKVGVILLSGGLDSTTVAAYAKKQGYELIAITLHYGQKHTKEVESAKKVAEVMGIKQEVIDISFFKKLAWYSALTSTEDFKVPKQRDSKEMAKDIPITYVPLRNTFFITIAAAFLESEVLNLIENEKVDPAEAEASIFIAADTIDYSGYPDCRPEFYEKMTRALFEGTKLGAQYNKQINIQTPIILKTKAEIVSLAMELKAPLEYTWSCYEGGEVPCGKCDSCILRAKGFAEVGSEDPLIVRLDKDGKIAKSK

SEQ ID NO: 37763 - protein, 247 aa, Dehalococcoidia bacterium
  misc_feature (1)..(247): tr|A0A352UCG2|A0A352UCG2_9CHLR 7-cyano-7-deazaguanine s ynthase OS=Dehalococcoidia bacterium OX=2026734 GN=queC PE=3 SV=1
MTSYGITLLSGGLDSTTVTAYAKDRVDHLTAITFYYGQTHSKEVDCAQNIAELMGIEHKLLDISFLGEVAWYSALTNPEKFPIPVDRQDGEIGFSIPITYVPLRNTIFLSLSAAYLESDILHAIEVEGMNPKEVEAHIFLAPNAIDYSGYPDCRPEYYEKMRESLELGSKLWTQYKVHINVETPIIELSKAEIAELGKRIQAPIEHTWSCYKGGNEPCGGCDSCILRAKGYEEAGFPDPLLVKLGKA

SEQ ID NO: 37764 - protein, 230 aa, Deinococcus actinosclerus
  misc_feature (1)..(230): tr|A0A2Z3Z7W3|A0A2Z3Z7W3_9DEIO 7-cyano-7-deazaguanine s ynthase OS=Deinococcus actinosclerus OX=1768108 GN=queC PE=3 SV=1
MTEGKKRAVVLLSGGLDSSTVLGMATRDGYACTALSFRYGQRHTVELERAAKVAAHFGADHRVIDINIGSFGGSALTDESMVVPTDGTEDGVIPPTYVPGRNTVFIAVGLSLAEAIDAERVFLGINAVDYSGYPDCRPEYLAAYQTLADLATKAGLEGRGAVLTAPLAEMTKADIVREALAVGVPIDVTWSCYQGGKEPCGVCDSCRIRDKALIEAGRPDLATTYARAQL

SEQ ID NO: 37765 - protein, 230 aa, Deinococcus actinosclerus
  misc_feature (1)..(230): tr|A0A0U4BAP0|A0A0U4BAP0_9DEIO 7-cyano-7-deazaguanine s ynthase OS=Deinococcus actinosclerus OX=1768108 GN=queC PE=3 SV=1
MTEGKKRAVVLLSGGLDSSTVLGMATCDGYACTALSFRYGQRHTVELERAAKVAAHFGAAHRVIDINIGSFGGSALTDENIVVPTDGTAEGVIPPTYVPGRNTVFIAVGLSLAEAIDAERVFLGINAVDYSGYPDCRPEYLAAYQTLADLATKAGLEGRGAVLTAPLAELTKADIVREALAVGVPIDVTWSCYQGGEEPCGVCDSCRIRDKALIEAGRPDLATTYAQAQL

SEQ ID NO: 37766 - protein, 231 aa, Deinococcus cellulosilyticus
  misc_feature (1)..(231): tr|A0A511MZT0|A0A511MZT0_9DEIO 7-cyano-7-deazaguanine s ynthase OS=Deinococcus cellulosilyticus NBRC 106333 = K ACC 11606 OX=1223518 GN=queC PE=3 SV=1
MTRKAVVLLSGGLDSSTTAAIAKHEDGYEVTALSFRYGQRHTIELEQAQKIANHFGLKHFVVDVNISQWGGSALTDESIDVPTSGTEDGVIPPTYVPGRNTVFISIGLSLAEAIDAEALYLGINAVDYSGYPDCRPEYLEAFQNLADLATKAGLEGRGAKLKAPLVLMTKVDIVKKALELGVPIDQTWSCYQGGTEPCGVCDSCRIRDKALIEAGRPDLASRYAQEHLGQQ

SEQ ID NO: 37767 - protein, 237 aa, Deinococcus deserti
  misc_feature (1)..(237): tr|C1CXM6|C1CXM6_DEIDV 7-cyano-7-deazaguanine synthase OS=Deinococcus deserti (strain VCD115 / DSM 17065 / LMG 22923) OX=546414 GN=queC PE=3 SV=1
MTTQQKRAVVLLSGGLDSSTVLGIATRRDGYTCAALSFRYGQRHTVELDRAAQIARHFGAEHRIIDINLGSFGGSALTDETITVPTDGADDGVIPPTYVPGRNTVFIAIGLSLAEAIGAERIYLGINAVDYSGYPDCRPEYLEAYQHLANLATKAGLEGHGAALVAPLLHMTKVDIVNAALELGVPVDVTWSCYQGGTEPCGVCDSCRIRDRALTEAGHPELASRPAQLAADSGLTS

SEQ ID NO: 37768 - protein, 231 aa, Deinococcus gobiensis
  misc_feature (1)..(231): tr|H8GTZ3|H8GTZ3_DEIGI 7-cyano-7-deazaguanine synthase OS=Deinococcus gobiensis (strain DSM 21396 / JCM 16679 / CGMCC 1.7299 / I-0) OX=745776 GN=exsB PE=3 SV=1
MIDMQKRAVVLLSGGLDSSTVLGLTVREGYACTALSFRYGQRHTVELERAATIARQFGSDHRVIDINIGSFGGSALTDEAMDVPTGGTQDGVIPPTYVPGRNTVFIAVALSLAEAIGAERVCLGINAVDYSGYPDCRPEYLAAYQTLADLASKAGLEGRGAVLTAPLLAMSKVDIVRAALDVGVPIGETWSCYQGGKEPCGVCDSCMIRDKALAEAGHPELTGPASPYHQG

SEQ ID NO: 37769 - protein, 230 aa, Deinococcus grandis
  misc_feature (1)..(230): tr|A0A100HGF5|A0A100HGF5_9DEIO 7-cyano-7-deazaguanine s ynthase OS=Deinococcus grandis OX=57498 GN=queC PE=3 SV =1
MTEDMKRAVVLLSGGLDSSTVLGMATRDGYACTALSFRYGQRHTVELERAATVAAHFGAAHRVIDINIGSFGGSALTDESMVVPTDGTEDGVIPPTYVPGRNTVFIAVGLSLAEAIDAERVFLGINAVDYSGYPDCRPEYLAAYQTLADLATKAGLEGRGAVLTAPLAEMTKADIVREALAVGVPIDVTWSCYQGGEEPCGVCDSCRIRDKALIEAGRPDLATTYAQAQL

SEQ ID NO: 37770 - protein, 231 aa, Deinococcus indicus
  misc_feature (1)..(231): tr|A0A246BEY9|A0A246BEY9_9DEIO 7-cyano-7-deazaguanine s ynthase OS=Deinococcus indicus OX=223556 GN=queC PE=3 S V=1
MTEGMKRAVVLLSGGLDSSTVLGMATRDGYACTALSFRYGQRHTVELERAATVAAHFGAVHRVIDINIGSFGGSALTDESMVVPTDGTEDGVIPPTYVPGRNTVFIAVGLSLAEAIDAERVFLGINAVDYSGYPDCRPEYLSAYQTLADLATKAGLEGRGAVLTAPLAEMTKADIVREALAVGVPIEVTWSCYQGGEEPCGVCDSCRIRDRALIEAGRPDLATRHAQAQLA

SEQ ID NO: 37771 - protein, 230 aa, Deinococcus maricopensis
  misc_feature (1)..(230): tr|E8U3S5|E8U3S5_DEIML 7-cyano-7-deazaguanine synthase OS=Deinococcus maricopensis (strain DSM 21211 / LMG 221 37 / NRRL B-23946 / LB-34) OX=709986 GN=queC PE=3 SV=1
MHKAVVLLSGGLDSSTTLAIAQQDGYAVTALSFRYGQRHTVELERAAHIAAHFGADHRVIDINIGSFGGSALTDDRIDVPVDATPDGVIPPTYVPGRNTVFIAVALSLAEAIEAERLYLGITAVDYSGYPDCRPEYLDAYQRLADLATKAGLEGRGAKLVAPLLTLTKLDIVRAALDLGVPVNVTWSCYQGGTQPCGVCDSCRIRDRALIDAGRADLATPHAQAHLNHHA

SEQ ID NO: 37772 - protein, 210 aa, Deinococcus peraridilitoris
  misc_feature (1)..(210): tr|L0A3Q2|L0A3Q2_DEIPD 7-cyano-7-deazaguanine synthase OS=Deinococcus peraridilitoris (strain DSM 19664 / LMG 22246 / CIP 109416 / KR-200) OX=937777 GN=queC PE=3 SV= 1
MAVRRDGYEVSALSFRYGQRHTVELECAASIAQHFGAQHQVVDINISQWGASALTDERIDVPTDGTPDGVIPPTYVPGRNTVFIALGLSLAEAIDAECIYLGINAVDYSGYPDCRPEYLAAYQRLADLATRSGLEGRGARLVAPLVMMTKTDIVRAALELGVPIEQTWSCYQGGEEPCGVCDSCRIRDKALIEAGHGELASRQGRARLGL

SEQ ID NO: 37773 - protein, 233 aa, Deinococcus proteolyticus
  misc_feature (1)..(233): tr|F0RP03|F0RP03_DEIPM 7-cyano-7-deazaguanine synthase OS=Deinococcus proteolyticus (strain ATCC 35074 / DSM 2 0540 / JCM 6276 / NBRC 101906 / NCIMB 13154 / VKM Ac-19 39 / CCM 2703 / MRP) OX=693977 GN=queC PE=3 SV=1
MTETTNPRAVVLLSGGLDSSTVLGLAVRSGLEATALSFRYGQRHTVELERAAQIAAHFGAAHRVVDINIGSFGGSALTDEGLAVPQEATPDGVIPPTYVPGRNTVFIAVGLSLAEAIDAGSLHLGITAVDYSGYPDCRPDYLAAYQTLADLATVAGREGRGARLVAPLLEMSKVDIVRTALEVGVPVHLTWSCYSGGSEPCGLCDSCRIRDEALLSAGHPELMTRVGRGRLGV

SEQ ID NO: 37774 - protein, 236 aa, Deinococcus radiophilus
  misc_feature (1)..(236): tr|A0A3S0IEQ0|A0A3S0IEQ0_9DEIO 7-cyano-7-deazaguanine s ynthase OS=Deinococcus radiophilus OX=32062 GN=queC PE= 3 SV=1
MSHSFPNDNPRAVVLLSGGLDSSTVLGLAVQDGYQPTALSFRYGQRHTAELERAAVIAAHFGAEHRIVDINIGSFGGSALTDDGLDVPLEATPDGVVPPTYVPGRNTVFIAVGLSLAEAINAGSVHLGITAVDYSGYPDCRSDYLAAYQTLADLSSVAGREGHGARLVAPLLEMSKVDIVRAALDAHVPIAQTWSCYSGGAEPCGRCDSCRIRDEALRAAGHPELMTAWGQAQLRT

SEQ ID NO: 37775 - protein, 230 aa, Deinococcus soli
  misc_feature (1)..(230): tr|A0A0F7JRU4|A0A0F7JRU4_9DEIO 7-cyano-7-deazaguanine s ynthase OS=Deinococcus soli Cha et al. 2016 OX=1309411 GN=queC PE=3 SV=1
MTEGKKRAVVLLSGGLDSSTVLGMATRDGYACTALSFRYGQRHTVELERAATVAAHFGADHRVIDINIGSFGGSALTDESIVVPTDGTEDGVIPPTYVPGRNTVFIAVGLSLAEAIDAERVFLGINAVDYSGYPDCRPEYLAAYQTLADLATKAGLEGRGAVLTAPLAELTKADIVREALAVGVPIDVTWSCYQGGEEPCGVCDSCRIRDKALIEAGRPDLATTYAQAQL

SEQ ID NO: 37776 - protein, 234 aa, Deinococcus sp.
  misc_feature (1)..(234): tr|A0A1T1B6W4|A0A1T1B6W4_9DEIO 7-cyano-7-deazaguanine s ynthase OS=Deinococcus sp. LM3 OX=1938608 GN=queC PE=3 SV=1
MTNQNKRAVVLLSGGLDSSTVLGMATRDGYACTALSFRYGQRHTVELERAATVAAHFGAVHRVIDINIGSFGGSALTDESMAVPTDGTEDGVIPPTYVPGRNTVFIAVGLSLAEAIDAERVFLGINAVDYSGYPDCRPEYLSAYQTLADLATKAGLEGRGAVLTAPLAEMTKADIVREALAVGVPIDVTWSCYQGGEEPCGVCDSCRIRDKALIEAGRPDLATRYAQAQDGIQE

SEQ ID NO: 37777 - protein, 231 aa, Deinococcus sp.
  misc_feature (1)..(231): tr|A0A1T1BDC9|A0A1T1BDC9_9DEIO 7-cyano-7-deazaguanine s ynthase OS=Deinococcus sp. LM3 OX=1938608 GN=queC PE=3 SV=1
MSDGQKRAVVLLSGGLDSSTVLGMATRDGYACTALSFRYGQRHTVELERAATVAAHFGAVHRVIDINIGSFGGSALTDESMAVPTDGTEDGVIPPTYVPGRNTVFIAVGLSLAEAIDAERVFLGINAVDYSGYPDCRPEYLSAYQTLADLATKAGLEGRGAVLTAPLAEMTKADIVREALAVGVPIEVTWSCYQGGEEPCGVCDSCRIRDRALIEAGRPDLATRYAQAQLA

SEQ ID NO: 37778 - protein, 230 aa, Deinococcus yavapaiensis
  misc_feature (1)..(230): tr|A0A318S507|A0A318S507_9DEIO 7-cyano-7-deazaguanine s ynthase OS=Deinococcus yavapaiensis KR-236 OX=694435 GN =queC PE=3 SV=1
MTAPKRAVVLLSGGLDSSTTLAIATKRDGYDVTALSFRYGQRHTIELERAASIARLFGARHRVVDVNISSWGGSALTDERIDVPTGGTEEGVIPQTYVPGRNTVFIAVGLSLAEAIDADAIYLGINAVDYSGYPDCRPEYLEAFQKLADLATKAGLEGRGAKLVAPLVLMTKTDIVKTALELGVPIVETWSCYQGGEEPCGVCDSCRIRDKALVEAGHPELATPIGRSAR

SEQ ID NO: 37779 - protein, 252 aa, Delftia acidovorans
  misc_feature (1)..(252): tr|A0A080NIY3|A0A080NIY3_DELAC 7-cyano-7-deazaguanine s ynthase OS=Delftia acidovorans OX=80866 GN=queC PE=3 SV =1
MRAMQNDSSSPQAPAARHTAALVLFSGGQDSTTCLAQALSLYERVETLGFDYGQRHSVEMQVRQQVRERLARDFPQWAPRLGDDHVLSLDVLQQIGGSSLTEDVAFAMQADGLPNTFVPGRNLLFLTLAGALAYRRGLSVIVTGVCETDYSGYPDCRDDTMKAMQLALNLGLERRLRIETPLMWIDKAQTWKMAHDLGGDTLVDLIQRDTHTCYQGTRETLHDWGYGCGTCPACDLRARGWHQWQAQRETAN

SEQ ID NO: 37780 - protein, 252 aa, Delftia acidovorans
  misc_feature (1)..(252): tr|A0A286J675|A0A286J675_DELAC 7-cyano-7-deazaguanine s ynthase OS=Delftia acidovorans OX=80866 GN=queC PE=3 SV =1
MRAMQNDSSSPQAPAARHTAALVLFSGGQDSTTCLAQALSLYERVETLGFDYGQRHSVEMQVRQQVRERLARDFPQWAPRLGDDHVLSLDVLQQIGGSSLTEDVAFAMQADGLPNTFVPGRNLLFLTLAGALAYRRGLSVIVTGVCETDYSGYPDCRDDTMKAMQLALNLGLERRLRIETPLMWIDKAQTWQMAHDLGGDTLVDLIQRDTHTCYQGTRETLHDWGYGCGTCPACDLRARGWHQWQAQRETAN

SEQ ID NO: 37781 - protein, 249 aa, Delftia lacustris
  misc_feature (1)..(249): tr|A0A1H3EDD8|A0A1H3EDD8_9BURK 7-cyano-7-deazaguanine s ynthase OS=Delftia lacustris OX=558537 GN=queC PE=3 SV= 1
MQNDSSSPQAPAGRHTAALVLFSGGQDSTTCLAQALSMYERVETLGFDYGQRHSVEMQVRQQVRERLARDFPEWAPRLGDDHVLSLDVLQQIGGSSLTEDVAFAMQADGLPNTFVPGRNLLFLTLAGALAYRRGLSVIVTGVCETDYSGYPDCRDDTMKAMQLALNLGLERRLRIETPLMWIDKAQTWQMAHDLGGDTLVDLIQRDTHTCYQGTRETLHDWGYGCGTCPACDLRARGWHQWQAQRETAN

SEQ ID NO: 37782 - protein, 252 aa, Delftia sp.
  misc_feature (1)..(252): tr|A0A543BG09|A0A543BG09_9BURK 7-cyano-7-deazaguanine s ynthase OS=Delftia sp. HK171 OX=1920191 GN=queC PE=3 SV =1
MRAMQNDSSSPQAPAARHTAALVLFSGGQDSTTCLAQALSLYERVETLGFDYGQRHSVEMQVRQQVRERLARDFPQWAPRLGDDHVLSLDVLQQIGGSSLTEDVAFAMQADGLPNTFVPGRNLLFLTLAGALAYRRGLSVIVTGVCETDYSGYPDCRDDTMKAMQLALNLGLERRLRIETPLMWIDKAQTWQMAHELGGDTLVDLIQRDTHTCYQGTRETLHDWGYGCGTCPACDLRSRGWRQWQAQRAHAN

SEQ ID NO: 37783 - protein, 231 aa, Delftia sp.
  misc_feature (1)..(231): tr|A0A081J5M1|A0A081J5M1_9BURK 7-cyano-7-deazaguanine s ynthase OS=Delftia sp. 670 OX=1537702 GN=queC PE=3 SV=1
MVLFSGGQDSTTCLAQALSLYERVETLGFDYGQRHSVEMQVRQQVRERLARDFPEWAPRLGDDHVLSLDVLQQIGGSSLTEDVAFAMQADGLPNTFVPGRNLLFLTLAGALAYRRGLSVIVTGVCETDYSGYPDCRDDTMKAMQLALNLGLERRLRIETPLMWIDKAQTWQMAHDLGGDTLVDLIQRDTHTCYQGTRETLHDWGYGCGTCPACDLRARGWHQWQAQRETAN

SEQ ID NO: 37784 - protein, 252 aa, Delftia tsuruhatensis
  misc_feature (1)..(252): tr|A0A4R5GT52|A0A4R5GT52_9BURK 7-cyano-7-deazaguanine s ynthase OS=Delftia tsuruhatensis OX=180282 GN=queC PE=3 SV=1
MRAMQNDSSSPQAPAGRHTAALVLFSGGQDSTTCLAQALSLYERVETLGFDYGQRHSVEMQVRQQVRERLARDFPGWAPRLGDDHVLSLDVLQQIGGSSLTEDVAFAMQADGLPNTFVPGRNLLFLTLAGALAYRRGLSVIVTGVCETDYSGYPDCRDDTMKAMQLALNLGLERRLRIETPLMWIDKAQTWQMAHDLGGDTLVDLIQRDTHTCYQGTRETLHDWGYGCGTCPACDLRARGWHQWQAQRETAN

SEQ ID NO: 37785 - protein, 252 aa, Delftia tsuruhatensis
  misc_feature (1)..(252): tr|A0A1I1A8J4|A0A1I1A8J4_9BURK 7-cyano-7-deazaguanine s ynthase OS=Delftia tsuruhatensis OX=180282 GN=queC PE=3 SV=1
MRAMQNDSSSPQAPAGRHTAALVLFSGGQDSTTCLAQALSLYERVETLGFDYGQRHSVEMQVRQQVRERLARDFPQWAPRLGDDHVLSLDVLQQIGGSSLTEDVAFAMQADGLPNTFVPGRNLLFLTLAGALAYRRGLSVIVTGVCETDYSGYPDCRDDTMKAMQLALNLGLERRLRIETPLMWIDKAQTWQMAHDLGGDTLVDLIQRDTHTCYQGTRETLHDWGYGCGTCPACDLRARGWHQWQAQRETAN

SEQ ID NO: 37786 - protein, 228 aa, Unknown
  misc_feature (1)..(228): tr|D8FCB6|D8FCB6_9DELT 7-cyano-7-deazaguanine synthase OS=delta proteobacterium NaphS2 OX=88274 GN=queC PE=3 S V=1
MTAFKEKAVVLLSGGLDSTTVAAIACSEGYDVFALTFRYGQRHAVELKAAEKVAHNLGLTEHLIVDLDLRKIGGSALTDHIDVPKRRGAELSEEEIPVTYVPARNTIFLSYALAWAEVLGAWNIFIGVNAVDYSGYPDCRAEFIKAFEEMANLATKAGVTLTRRLKIRTPVIYMSKGDIIKTGLKLGVDYTLTHSCYDPSPDGKACGLCDSCLLRKKGFEEAGVEWIP

SEQ ID NO: 37787 - protein, 239 aa, Unknown
  misc_feature (1)..(239): tr|Q1NXP2|Q1NXP2_9DELT 7-cyano-7-deazaguanine synthase OS=delta proteobacterium MLMS-1 OX=262489 GN=queC PE=3 SV=1
MTENNQPGEAAVVLLSGGLDSTTVLAWASTAGYRCHCLSFDYGQRHTHELELARQNAARWGAVQHLVLKLGLEAIGGSALTSELAVPKADPAGTLSTDPAETGAGQIPVTYVPGRNTIFLSCAVAWAEVLGAGEIFIGVNAVDYSGYPDCRPDFLESFNRTANLGTKAGREGRGFRIQAPLLRLSKAEIIKKGLALGVDYSLTHSCYDPDEHHRPCGRCDACRLRRRGFAAAGVDDPLA

SEQ ID NO: 37788 - protein, 254 aa, Deltaproteobacteria bacterium
  misc_feature (1)..(254): tr|A0A3M1TW86|A0A3M1TW86_9DELT 7-cyano-7-deazaguanine s ynthase OS=Deltaproteobacteria bacterium OX=2026735 GN= queC PE=3 SV=1
MSTPTGFSKRYRGTTKVPQESQIDELRHAVVLVSGGLDSATVLAMASATGWTCHGLTVDYGQRHKAELEAARAVCEALGAASHRIVRVELGAFGGSALTEPHRTVPTGRDARAIEAGGIPETYVPARNTVMLSVALSLAEAIEADAIFCGVNAIDYSGYPDCRPDFIAAFQALANVATRRGVQGRPIQIKAPLIRMRKAEIIRTGLDLGVDYALTVSCYDPDGAGRACGRCDACTLRRAGFEAAGVADPTRYRP

SEQ ID NO: 37789 - protein, 228 aa, Deltaproteobacteria bacterium
  misc_feature (1)..(228): tr|A0A1F9HBT2|A0A1F9HBT2_9DELT 7-cyano-7-deazaguanine s ynthase OS=Deltaproteobacteria bacterium RIFCSPLOWO2_02 _FULL_40_36 OX=1797875 GN=A3I69_07750 PE=3 SV=1
MRPSALVLLSGGLDSLASLHWASQNADLALGLTINYGHKAFAKECEAAQNICKKYDISHQVMDLTWLGGFGHNALVDPKVLLPKLHRADLDDEKLVQESAQIVWVPNRNGLFINAAASLAENEMISWIVMGFNKEEAKTFPDNSSGFVDAVNKSLSFSTQKKVSVVAPHVEKNKKEIVSWLLKAGGDLTHLWSCYEGSKKMCGECESCQRLMRALDEAGAHEWKSQFF

SEQ ID NO: 37790 - protein, 227 aa, Dendrosporobacter quercicolus
  misc_feature (1)..(227): tr|A0A1G9LG38|A0A1G9LG38_9FIRM 7-cyano-7-deazaguanine s ynthase OS=Dendrosporobacter quercicolus OX=146817 GN=q ueC PE=3 SV=1
MRAVVLLSGGLDSTVCMAVAKHRGYEVFPLSFHYQQRHCIELENARKVANFFGVSRHLVIETNMGEFGGSALTDPDIAVPLGDITRRDIPSTYVPARNLIFLSYALGYAEALQAEKIFIGVNALDYSGYPDCRPEFISLFQQLADYSTKAAVQDKQRISIETPLIQLSKKDIILLGAELKAPFELTHSCYRGGVKACGTCDSCLLRLKGFAEAGFADPVPYEASNDL

SEQ ID NO: 37791 - protein, 237 aa, Denitratisoma sp.
  misc_feature (1)..(237): tr|A0A518UCK5|A0A518UCK5_9PROT 7-cyano-7-deazaguanine s ynthase OS=Denitratisoma sp. DHT3 OX=1981880 GN=queC PE =3 SV=1
MKPAVILLSGGLDSATVLAIARQQGFVCHCLSVDYGQRHSVELAAARRVADALGAREHRVLHLDMNQFGGSALTDPGIGVPTDGVEAAGIPITYVPARNTIMLALAMGWAEVLGADDLFVGVNAVDYSGYPDCRPEFIRAFETMANLATRAGVEGRRLHIHAPLIDMTKAEIIRAGHDLGVDYALTVSCYQADDQGRACGLCDSCRLRRAGFTAAGLPDPTPYAGQAGTLQESSDKR

SEQ ID NO: 37792 - protein, 234 aa, Denitrobacterium detoxificans
  misc_feature (1)..(234): tr|A0A172RZF5|A0A172RZF5_9ACTN 7-cyano-7-deazaguanine s ynthase OS=Denitrobacterium detoxificans OX=79604 GN=qu eC PE=3 SV=1
MSPAAKRALVLSSGGVDSTTCLGLAVEKLGAENVASVSFFYGQRHDRELRAADAVAKHYGVRHYTLDLAGIMQYSDSAMLANSSQQVPHGTYAKQIDENGRPNTYVPFRNGLMLSAAGALAMSLFPDEACDIYLGAHADDAAGDAYPDCSPAFTQAMDEALSVGTYGNVHLVAPFVNCTKAQVVERGLSLDVPYELTWSCYEGGEAPCGTCATCLDRIAAFRANGTEDPVPYAE

SEQ ID NO: 37793 - protein, 242 aa, Denitromonas halophilus
  misc_feature (1)..(242): tr|A0A557RS72|A0A557RS72_9RHOO 7-cyano-7-deazaguanine s ynthase OS=Denitromonas halophilus OX=1629404 GN=queC P E=3 SV=1
MTEITETPPRRAVVLLSGGLDSATCLAIAREQGFECYALSVAYGQRHAAELTASKRVADSLGAAEHRLARVGLGQFGGSALTDPTIDVPIEARGADTSPIPVTYVPARNTVMLSIALAWAEVLGARNIFVGVNAVDYSGYPDCRPEYIQAFETMANLATKAGVEGERLTIHAPLISLSKAEIIRQGTTLGVDYAQTVTCYLADDTGRACGRCEACRLRRAGFLEAGVDDPTRYVNGKPPEIS

SEQ ID NO: 37794 - protein, 242 aa, Denitromonas halophilus
  misc_feature (1)..(242): tr|A0A557QXR7|A0A557QXR7_9RHOO 7-cyano-7-deazaguanine s ynthase OS=Denitromonas halophilus OX=1629404 GN=queC P E=3 SV=1
MTETTETPPRRAVVLLSGGLDSATCLAIAREQGFECYALSVAYGQRHAAELTASKRVADSLGAAEHRLARVGLGQFGGSALTDPTIDIPLDDRQTASPIPVTYVPARNTVMLSIALAWAEVLGANDIFVGVNAVDYSGYPDCRPEYIKAFETMANLATKVGVEGERMSIHAPLIELSKADIIRRGTTLGVDYSQTVTCYQADDTGRACGRCEACRLRRAGFLDAGVDDPTRYANGKPPELSA

SEQ ID NO: 37795 - protein, 226 aa, Denitrovibrio sp.
  misc_feature (1)..(226): tr|A0A2N6D523|A0A2N6D523_9BACT Uncharacterized protein OS=Denitrovibrio sp. OX=2053308 GN=C0603_11395 PE=4 SV= 1
MDTYNQFFNKYNKALVALSGGADSAYALILAVQHMGCENIVAATCVNNHIFNYEIENARKICEFLGVKHIEFITEVTPEFLKNDDQRCYHCKKTIMSQMQTISDHEVIFDGTNIDDDASDRPGSKAISELKIISPLKELGIGKELILSKVAHLPVVFHDDSCKATRLTHTIDDERMSLVEKLEDQLRDKFSGVRYRIDDKQLAFNKPIRLYKKDFEYINKIKHQNE

SEQ ID NO: 37796 - protein, 238 aa, Desertifilum sp.
  misc_feature (1)..(238): tr|A0A1E5QFW8|A0A1E5QFW8_9CYAN 7-cyano-7-deazaguanine s ynthase OS=Desertifilum sp. IPPAS B-1220 OX=1781255 GN= queC PE=3 SV=1
MSKPKAVVLLSGGLDSATTAASAIADGCDPIAISFRYGQRHEREIEAARAIALRLQIVEHYVVDINLAQWGGSSLTDASAPIPTEGIQAGEIPSTYVPGRNTVFIAIALSLAEAKGAEAIYLGINAVDYSGYPDCRPEYLAAFQQLANLSSKVGVEGNSPRLVAPLVRDTKVDIVRRAVQLGVPIQLTWSCYQGGEEPCGVCDSCRIRDRALIEAGYPELATAIGQRLHVQNSDIARL

SEQ ID NO: 37797 - protein, 229 aa, Desmospora activa
  misc_feature (1)..(229): tr|A0A2T4Z6V5|A0A2T4Z6V5_9BACL 7-cyano-7-deazaguanine s ynthase OS=Desmospora activa DSM 45169 OX=1121389 GN=qu eC PE=3 SV=1
MGKKAVIVLSGGLDSTTCMGLAQAEGYELYPLTFDYGQRHDREVEQAKAIAHHYEVKEHRIVDIGFLNQIGGSALTEDSISVPTEEEEGIPTTYVPARNLIFLSLAAAYAEVIEAEAVYTGVSAVDYSGYPDCRPQFISHLEETICRATKAGEEGRPIRLVTPLIHLSKGETIREGLRLHVPYHLTTSCYQGGEVACGVCDSCRLRRKGFADAEAIDPIPYVDGVKAGG

SEQ ID NO: 37798 - protein, 231 aa, Desmospora sp.
  misc_feature (1)..(231): tr|F5SDQ8|F5SDQ8_9BACL 7-cyano-7-deazaguanine synthase OS=Desmospora sp. 8437 OX=997346 GN=exsB PE=3 SV=1
MAEKAVVVLSGGLDSTTCMGLAREAGYELYPLTFHYGQRHDREVEQARKVAKHFGVKKHRVVDMGFLRQIGGSALTDDKMEVPVPDGSGEEIPSTYVPARNLIFLSLATAYAEVIGAVKVYIGVSAVDYSGYPDCRPEFIRSMEETVRRGTKAGVNGNPIRLEAPLLHLSKGETIREGLRLQVPYHLTTSCYRGDRVACGLCDSCRLRLKGFRDVGAEDPIPYAEQVNRVN

SEQ ID NO: 37799 - protein, 254 aa, Desulfacinum hydrothermale
  misc_feature (1)..(254): tr|A0A1W1XKC3|A0A1W1XKC3_9DELT 7-cyano-7-deazaguanine s ynthase OS=Desulfacinum hydrothermale DSM 13146 OX=1121 390 GN=queC PE=3 SV=1
MTHGERPKAVVLLSGGLDSTTCLAIAKDAGYACYALTFSYGQRHKVELEAARRVAAAFSVEEHLVLELPLDRIGGSALTSPMEVPKDAPLAMEGGSIPVTYVPARNTIFLSLALAWAEVLGAADIFIGVNAVDYSGYPDCRPEYIEAFQHMANLATKAGVEGQMKVRIRTPLLHWSKAQIVRKGRELGVDYDLTHSCYDPDPEGRPCGRCESCRLRARGLEGAQELVRERTGCSLLVRTEGWDYHASPFSRPGL

SEQ ID NO: 37800 - protein, 229 aa, Desulfallas geothermicus
  misc_feature (1)..(229): tr|A0A1I6D4Y0|A0A1I6D4Y0_9FIRM 7-cyano-7-deazaguanine s ynthase OS=Desulfallas geothermicus DSM 3669 OX=1121426 GN=queC PE=3 SV=1
MKKAVVVLSGGLDSTVCMSVAKQDGYKIFPITFSYGQRHSREVEQAKKVAEFYRCNKHLILDIGFFREIGASALTSYNIDVPTDRSVEQMQEDIPVTYVPFRNAVFLSMAVGYAEAIQAEKIYIGVNALDYSGYPDCRPRFIQAFQEAVNLGTAASDKNMPIKIATPLISLTKGEIIKVGVKNGAPLHLTTSCYLGGEKACGKCDSCRLRLKGFREAGIQDPIEYEIKD

SEQ ID NO: 37801 - protein, 219 aa, Desulfamplus magnetovallimortis
  misc_feature (1)..(219): tr|A0A1W1H7S6|A0A1W1H7S6_9DELT 7-cyano-7-deazaguanine s ynthase OS=Desulfamplus magnetovallimortis OX=1246637 G N=queC PE=3 SV=1
MTDSVVVFSGGMDSTVLMADILGKGKNVQALSFDYGSRHNDRELLCAATFCQEHKIEHRIVKLPFINELFSSSLLKSGKDVPDGSYMEENMKSTVVPFRNGIMLSIAAGFAESIGAGEVLLASHSGDHFIYPDCRPEFNEAFSRAVFMGTGEQVSIRFPFANMDKRDIGDLGRELGIDFTTTWTCYKGGEIHCGTCGACDERKYALRYDEGFDPTNYAI

SEQ ID NO: 37802 - protein, 234 aa, Desulfarculus baarsii
  misc_feature (1)..(234): tr|E1QIA2|E1QIA2_DESB2 7-cyano-7-deazaguanine synthase OS=Desulfarculus baarsii (strain ATCC 33931 / DSM 2075 / VKM B-1802 / 2st14) OX=644282 GN=queC PE=3 SV=1
MKRFDQKPPAVVLLSGGLDSATCLAMANDQGFEPHALSFRYGQRHAVELLAAQRVAQALGARRHLILDVDLRGVGGSALTADMAVPKGRSLAEMTDGVPVTYVPARNTLFLSLALAWAETLDCADIFIGVNALDYSGYPDCRPEFILAFENLANLATKMSTEQGRYIRVHAPLIRMTKAQIIRAGLALGVDYGLTHSCYDPDADGKPCGQCDSCLLRAKGFAEAKTPDPALKDS

SEQ ID NO: 37803 - protein, 696 aa, Desulfarculus baarsii
  misc_feature (1)..(696): tr|E1QK27|E1QK27_DESB2 Uncharacterized protein OS=Desul farculus baarsii (strain ATCC 33931 / DSM 2075 / VKM B- 1802 / 2st14) OX=644282 GN=Deba_2565 PE=4 SV=1
MSNERSILCGDVKGDRLPFDDKKPLSLHLWGKGENVSLHISDIRSQLLRDIPSFFHDLIEIATYVYCADQAITRGGDGVDNFGENWRRTLFFRIAVRNPDLWNSSPLKDQLVETLSFLSEDEYYFDFVELKNGPLTQKHLELNVDPPEEVMLFSGGLDSLGGAIEEAVINSRRIVMVTHKATHKFNRRHRRLLDLLSSAAVHKPLHIPVSINKSKFLGREYTQRSRSFLYAALGATVAQMFNLRRIRFYENGVISFNLPISAQVVGARATRTTHPQVINGFANIFSTLSGQPFTVENPFIWKTKTEVVSDIVKAGCADTIKFSTSCTHTWAMTKLNTHCGTCSQCIDRRFAVLAADAQEHDPKEAYGVDLLTGERDEGEPKAMLAAYVETANEVADMTALEFFGSYGEATRVLNHLNGSPDSTALRLYELHHRHAKCITKVVDDAIAQNRSAIRKRQLPANCLLRLVCDSGGVQADPGDSNTCPTHEPTNNYICIRGQCWTIRYDGNEEKIYTPDIGFYHLQILLDNPGSTFSASELDVMVRRMTKNELYTSVCPGETPFDEGVSVLGQSDAGPVLDDDAVRSYRTRLHEIDNDLEKAQANNDLGKIEALANEKGWIESELSNAQGLGGAIRKLGDDRNKVRNRVGNAIRRALKKIKQYDKHLSDHLQKPILNLGHALSYVPRDGLTWSSTSTQNN

SEQ ID NO: 37804 - protein, 233 aa, Desulfarculus sp.
  misc_feature (1)..(233): tr|A0A3A6P109|A0A3A6P109_9DELT 7-cyano-7-deazaguanine s ynthase OS=Desulfarculus sp. OX=2093367 GN=queC PE=3 SV =1
MPEPQPKPVAVVLLSGGLDSSTCLALAQDQGYECYALTVRYGQRHQAELAAARRVARALGVKQHLELSVDLAAVGGSALTADIAVPKGRDAAQMAQGVPVTYVPARNTVFLSLALAWAETLSAEHIFIGVNALDYSGYPDCRPEFIMAFENLAALATKMGTQQGRRLRVHAPLIRMSKAQIIQTGLSLGLDYGLTHSCYDPTPDGGPCGACDSCLLRAKGFAEAGAADPLLKP

SEQ ID NO: 37805 - protein, 233 aa, Desulfatibacillum aliphaticivorans
  misc_feature (1)..(233): sp|B8FMW6|QUEC_DESAL 7-cyano-7-deazaguanine synthase OS =Desulfatibacillum aliphaticivorans OX=218208 GN=queC P E=3 SV=1
MNAIQKEKAVVLLSGGLDSATAMAIAKDMGFQVYALSFSYGQRHTTELEAAKRVAKTLGAVEHQVANIDLTCFGGSALTADLDVPKGRAPEDMEKEIPVTYVPARNTIFLSFALAWAEVLETSHIFIGVNAVDYSGYPDCRPEYIQAFTAMANLATKAGVEGRTKIEIHTPLIDLTKAQIIQKGIALGVDYGLTHSCYDPSPEGLACGQCDSCLLRKKGFAEAGIPDPTKYIP

SEQ ID NO: 37806 - protein, 234 aa, Desulfatibacillum alkenivorans
  misc_feature (1)..(234): tr|A0A1M6MMM0|A0A1M6MMM0_9DELT 7-cyano-7-deazaguanine s ynthase OS=Desulfatibacillum alkenivorans DSM 16219 OX= 1121393 GN=queC PE=3 SV=1
MTEKQTKKAVVLLSGGLDSATAMAMAKDMGFQVYALSFSYGQRHTTELESAKRVAKTQGAVRHQIANIDLTCFGSSALTADLDVPKGRATEDMQKEIPVTYVPARNTIFLSFALAWAEVLETPHIFIGVNAVDYSGYPDCRPEYIRAFATMANLATKAGVEGRTKIEIHTPLIDLTKAQIIQKGTALGVDYGLTHSCYDPSPEGLACGQCDSCLLRKKGFEEAGVPDPTKYFGG

SEQ ID NO: 37807 - protein, 229 aa, Desulfatitalea sp.
  misc_feature (1)..(229): tr|A0A0F2QZC1|A0A0F2QZC1_9DELT 7-cyano-7-deazaguanine s ynthase OS=Desulfatitalea sp. BRH_c12 OX=1629708 GN=que C PE=3 SV=1
MKKKAVVLSSGGIDSTTAMAIAAQEGFTLFSLSFDYGQRHRCELAAAGRVAVFFNVDKHLVLKIDMGAIGGSALTTDMAVPKEREISDVENDIPVTYVPARNTIFLSYGLAWAEVLAASDIVIGVNAVDYSGYPDCRPAFIQAYQAMANLATKAAVQGHMAVRIHTPLIHMTKAQIIQTGAALGVDYALTHSCYDPSPAGLACGRCDSCVLRRKGFQEAGVPDPTQYSI

SEQ ID NO: 37808 - protein, 186 aa, Desulfitibacter sp.
  misc_feature (1)..(186): tr|A0A101V6B5|A0A101V6B5_9FIRM 7-cyano-7-deazaguanine s ynthase OS=Desulfitibacter sp. BRH_c19 OX=1734395 GN=AP F76_18260 PE=3 SV=1
MNYPVLVLSSGGIDSTAVIKFYLNQSFEVSTLFVDYGQLSLKNEEKAVTKVCEYYNVPLKKIGFFGFKKKTDGFILGRNALLLHIALMEFKQPKGLIGIGIHSSTSYVDCSNEFVNIMQASFDLYTNGCISIGAPFLNWGKKEICEYCVNNQVPLNLTYSCELGLDQPCGRCLSCRDLEVIYKDDS

SEQ ID NO: 37809 - protein, 233 aa, Desulfitobacterium chlororespirans
  misc_feature (1)..(233): tr|A0A1M7UQB8|A0A1M7UQB8_9FIRM 7-cyano-7-deazaguanine s ynthase OS=Desulfitobacterium chlororespirans DSM 11544 OX=1121395 GN=queC PE=3 SV=1
MKKAVVLLSGGLDSTTCMSVAHKAGYELYPLSFDYGQRHQRELEAAKAVAQYYKAKEHRIIKIDNVGGSALTDSSIQVPDYAEDGQIPVTYVPARNILFLSYALGYGEAIGAEAIFIGISSVDYSGYPDCRPEFLQAFQKVVDVGTKAGVSGQTIEIKAPLIYLSKAETIQLAAENGAPLHETTSCYRGGEKACGTCDSCTLRLKGFAEAGIKDPITYVNQGDRSCFSTPLED

SEQ ID NO: 37810 - protein, 222 aa, Desulfitobacterium dehalogenans
  misc_feature (1)..(222): tr|I4AAL7|I4AAL7_DESDJ 7-cyano-7-deazaguanine synthase OS=Desulfitobacterium dehalogenans (strain ATCC 51507 / DSM 9161 / JW/IU-DC1) OX=756499 GN=queC PE=3 SV=1
MKKAVVLLSGGLDSTTCMSVAYKAGYELYPLSFDYGQRHQRELDAAKAVAQYYKVKEHRIIKIDSVGGSALTDSAIQVPDYAEDGEIPVTYVPARNILFLSYALGYGEVIGAEAIFIGISSVDYSGYPDCRPEFLQAFQKVVDVGTKAGVSGQTIAIKAPLMYLSKAETIQLAVENDAPLHSTTSCYRGGEKACGTCDSCALRLKGFAEAGIKDPISYKEMD

SEQ ID NO: 37811 - protein, 221 aa, Desulfitobacterium dichloroeliminans
  misc_feature (1)..(221): tr|L0F750|L0F750_DESDL 7-cyano-7-deazaguanine synthase OS=Desulfitobacterium dichloroeliminans (strain LMG P-2 1439 / DCA1) OX=871963 GN=queC PE=3 SV=1
MKKSVVLLSGGLDSTTCMSVAAKAGYEIYPLSFDYGQRHQRELEAAKAVAQFYQVKEHRIITLDNVGGSALTDPSIQVPDYAEDDQIPVTYVPARNLLFLSYALGYGEVIGAEAIFIGISSVDYSGYPDCRPEFLEAFQKVAEVGTKAGANGQRIEIKAPLLHLSKADTIRLAGSNGAPLHLTTSCYRGGERACGTCDSCILRLKGFAEAGVADPVPYIEN

SEQ ID NO: 37812 - protein, 233 aa, Desulfitobacterium hafniense
  misc_feature (1)..(233): sp|Q24VU8|QUEC2_DESHY 7-cyano-7-deazaguanine synthase 2 OS=Desulfitobacterium hafniense (strain Y51) OX=138119 GN=queC2 PE=3 SV=2
MKKAVVLLSGGLDSTTCMSVAHKAGYELYPLSFDYGQRHQRELEAAKAVAQYYKVKEHRLIKIEHVGGSALTDASIQVPDYTEDGQIPVTYVPARNILFLSYALGYGEVMGAEAIFIGISSVDYSGYPDCRPEFLQAFQKVVDVGTKAGVSGQTIAIKAPLLYLSKAETIQLAAENGAPLHHTTSCYRGGEKACGTCDSCTLRLKGFAEAGIKDPIDYVNQGDRSCFSTPLED

SEQ ID NO: 37813 - protein, 233 aa, Desulfitobacterium hafniense
  misc_feature (1)..(233): tr|G9XNX0|G9XNX0_DESHA 7-cyano-7-deazaguanine synthase OS=Desulfitobacterium hafniense DP7 OX=537010 GN=queC P E=3 SV=1
MKKAVVLLSGGLDSTTCMSVAHKAGYELYPLSFDYGQRHQRELEAAKAVAQYYKVKEHRLIKIEHVGGSALTDASIQVPDYTEDGQIPVTYVPARNILFLSYALGYGEVIGAEAIFIGISSVDYSGYPDCRPEFLQAFQKVVDVGTKAGVSGQTIAIKAPLLYLSKGETIQLAAENGAPLHHTTSCYRGGEKACGTCDSCTLRLKGFAEAGIKDPIDYVNQGDRSCFSTPLED

SEQ ID NO: 37814 - protein, 223 aa, Desulfitobacterium metallireducens
  misc_feature (1)..(223): tr|W0ECM1|W0ECM1_9FIRM 7-cyano-7-deazaguanine synthase OS=Desulfitobacterium metallireducens DSM 15288 OX=8719 68 GN=queC PE=3 SV=1
MKKAVILLSGGLDSTTCMSVAHQEGYELYPISFNYGQRHQRELESAKAVASFYRVKEHRIFEIDYVGGSALTDPSISVPAYQEAEGIPVTYVPARNILFLSYALGYAEVLGAEAIFIGVSSIDYSGYPDCRPEFIEAFQQVVKVGTKAGVDGKAMTIRTPLIQLSKAATIQLAMANGAPLHLTTSCYQGGEKACGICDSCTLRLKGFKEAGLVDPIPYETFSV

SEQ ID NO: 37815 - protein, 233 aa, Desulfitobacterium sp.
  misc_feature (1)..(233): tr|A0A562HBS9|A0A562HBS9_9FIRM 7-cyano-7-deazaguanine s ynthase OS=Desulfitobacterium sp. LBE OX=884086 GN=queC PE=3 SV=1
MKKAVVLLSGGLDSTTCMSVAHKAGYELYPLSFDYGQRHQRELEAAKAVAQYYKVKEHRLIKIEHVGGSALTDASIQVPDYAEDGQIPVTYVPARNILFLSYALGYGEVIGAEAIFIGISSVDYSGYPDCRPEFLQAFQKVVDVGTKAGVSGQTIAIKAPLLYLSKGETIQLAAENGAPLHHTTSCYRGGEKACGTCDSCTLRLKGFAEAGIKDPIDYVNQGDRSCFSTPLED

SEQ ID NO: 37816 - protein, 227 aa, Desulfobacca acetoxidans
  misc_feature (1)..(227): tr|F2NDB5|F2NDB5_DESAR 7-cyano-7-deazaguanine synthase OS=Desulfobacca acetoxidans (strain ATCC 700848 / DSM 1 1109 / ASRB2) OX=880072 GN=queC PE=3 SV=1
MSDRKLAVVLLSGGLDSCVTAAVAGQDYDLALFHGNYGQRTVRRELQAFRELAVFFRCRHLLEANLDYLGAIGGSSLTDASLAIPQTDTESEELPSTYVPFRNTILIAAVVAWAEVIGASAVFIGANIIDGPDYPDCRPDYFNAYNRLIELGTRPGTHIRIHTPLIHLDKADIIRLGLKLQVPLELTWSCYRNEDRACGCCPSCRIRLKGFAEVGIKDPILYDEENL

SEQ ID NO: 37817 - protein, 258 aa, Desulfobacca acetoxidans
  misc_feature (1)..(258): tr|F2NET7|F2NET7_DESAR Uncharacterized protein OS=Desul fobacca acetoxidans (strain ATCC 700848 / DSM 11109 / A SRB2) OX=880072 GN=Desac_0387 PE=4 SV=1
MRALLRTWRRVLVLFSGGIDSTLLLKIVADLFGENSAALTFEGPHRPTGETLEARKITRLLGVRHLTEDFDPFGLPDFRENTPERCYACKCEMYRRGWEIASKFEAEVLLDGTNLDDLNDTRPGLKAAQEMGVRSPFLKIGWRKADIRELSRVWQLPGWDRPPQSCLATRFPAYTHLQSQDLQKVDQVETFLGDKGFGPVRCRVHGDLVRLELPLKQRFRLLEPETLTALNLMIREQGWRYATLDLRGYQTGSMNLKE

SEQ ID NO: 37818 - protein, 233 aa, Desulfobacca sp.
  misc_feature (1)..(233): tr|A0A1F9P787|A0A1F9P787_9DELT 7-cyano-7-deazaguanine s ynthase OS=Desulfobacca sp. RBG_16_60_12 OX=1797909 GN= queC PE=3 SV=1
MVVSSSPKTENGKRKTAVVLASGGLDSCVAAAVARRHFDLAMFHANYGQRSLEQELEAFRAQAAFFQAATLEADLNYLGEIGGSSLTDFGPAVPTNAAEPPGIPSTYVPFRNTNLLAAAVAWAEVLGADAVFIGANVLDNPGYPDCRPEYFEAFSRLIELGTRPETHIRIHTPLIHLDKAGIVRLGLELGAPLELTWSCYQGEFRACGRCSSCRLRLKGFAAAGVPDPIPYQP

SEQ ID NO: 37819 - protein, 243 aa, Desulfobacter hydrogenophilus
  misc_feature (1)..(243): tr|A0A328FKE2|A0A328FKE2_9DELT 7-cyano-7-deazaguanine s ynthase OS=Desulfobacter hydrogenophilus OX=2291 GN=que C PE=3 SV=1
MTKKAVVLSSGGIDSTTAMAIARDRGHNIYSLSFSYGQRHSVELECAKKVACHMGAVMHKIVDIDLRQFGGSALTDDIAVPKHESVSQIDQTQIPVTYVPARNTIFLSYAMAWAEVLKAEAIFIGVTAVDYSGYPDCRPQFIEAFQTMANLATKTGITKQTVLTIETPLIQMSKSEIITTGHGLGVDYSLTISCYDPDSQGRSCGRCDSCLHRKKGFTEAGLPDPTPYIRDPQSYSNLLQLKS

SEQ ID NO: 37820 - protein, 229 aa, Desulfobacter postgatei
  misc_feature (1)..(229): tr|I5AYH8|I5AYH8_9DELT 7-cyano-7-deazaguanine synthase OS=Desulfobacter postgatei 2ac9 OX=879212 GN=queC PE=3 SV=1
MTKKAVVLSSGGIDSTTAMAIARDMGYDIYSLSFRYGQRHSVELECAKKVACHLGTIDHKIMDIDLRQFGGSALTDDIAVPKHDNVAQIDQTRIPVTYVPARNTIFLSYAMAWAEVLKAEAIFIGVTAVDYSGYPDCRPKFIEAFQTMANLATKTGVTKQTVLTIETPLIQMSKSEIITTGHRLGVDYSLTISCYDPDDQGRSCGRCDACLHRKKGFREAGIPDPTPYT

SEQ ID NO: 37821 - protein, 229 aa, Desulfobacter sp.
  misc_feature (1)..(229): tr|A0A357YSP5|A0A357YSP5_9DELT 7-cyano-7-deazaguanine s ynthase OS=Desulfobacter sp. OX=2294 GN=queC PE=3 SV=1
MTKKAVVLSSGGIDSTTAMAIARDREYDIYSLSFRYGQRHSVELECAKKVACHLGTIDHKIIDIDLRQFGGSALTDDIAVPKHDNVAQIDQTRIPITYVPARNTIFLSYAMAWAEVLKAEAIFIGVTAVDYSGYPDCRPKFIQAFQTMANLATKTGVTKQTVLTIETPLIQMSKSEIITTGDRLGVDYSLTISCYDPDDQGRSCGRCDACLHRKKGFSEAGIPDPTPYT

SEQ ID NO: 37822 - protein, 234 aa, Desulfobacter sp.
  misc_feature (1)..(234): tr|A0A2D6ETF1|A0A2D6ETF1_9DELT 7-cyano-7-deazaguanine s ynthase OS=Desulfobacter sp. OX=2294 GN=queC PE=3 SV=1
MHQRKKAIVLSSGGLDSTTAMAIAKNKRFEVYSLSFFYGQRHAEELDAAKRVAAFIGAAKHLLLNIDLTMIGGSALTDQIRVPKDRNKHKMIEEIPVTYVPARNTIFLSFALAWAEVLQSSDIFIGVNAVDYSGYPDCRPEYIEAFERMSNLATKAGLEGRISIKIRTPLMHMTKSQIIRKGLELGVDYSITHSCYDPFPGGLACGRCDSCVLRKKGFEEAMAKDPLPYKTEVK

SEQ ID NO: 37823 - protein, 231 aa, Desulfobacteraceae bacterium
  misc_feature (1)..(231): tr|A0A1J5DZ90|A0A1J5DZ90_9DELT 7-cyano-7-deazaguanine s ynthase OS=Desulfobacteraceae bacterium CG2_30_51_40 OX =1805128 GN=queC PE=3 SV=1
MKRAVVLLSGGIDSTTAMAVAKAEGFDLYALSFRYGQRHAVELEAAKTVAALLGVKEHLVMDIRLDRIGGSALTSEIVVPKDRNEHEIGRGIPATYVPARNTIFLSVALAWAEVLQAEDIFIGVNILDYSGYPDCRTEYIDAFERMANLATRAGVEGRARIEIHTPLIAMTKAEIIKKGLDLGVDYSITHSCYDPSYGGLACGRCDSCLLRIKGFRDAGVQDPTRYVSGSL

SEQ ID NO: 37824 - protein, 230 aa, Desulfobacteraceae bacterium
  misc_feature (1)..(230): tr|A0A1W9TRC5|A0A1W9TRC5_9DELT 7-cyano-7-deazaguanine s ynthase OS=Desulfobacteraceae bacterium 4572_187 OX=197 1620 GN=queC PE=3 SV=1
MTIDKKAVILSSGGLDSTTVMAMAKNECYAIYSMSFSYGQRHKIELEAAKNVAEIIGVEKHLVINLDLNKIGGSALTDSIDVPKNRDEEAFSTDIPATYVPARNTIFLSYALAWAEVVGSSDIFIGVNAIDYSGYPDCRPEYIQAFEKMANLATKAGVEGLTRIKINTPLINMSKSRIIKKGIELGVDYSLTHSCYDPNPEGVACGRCDSCILRKKGFKEAGVKDPTKYF

SEQ ID NO: 37825 - protein, 239 aa, Desulfobacterales bacterium
  misc_feature (1)..(239): tr|A0A0S8AIC8|A0A0S8AIC8_9DELT 7-cyano-7-deazaguanine s ynthase OS=Desulfobacterales bacterium SG8_35 OX=170340 0 GN=queC PE=3 SV=1
MAQKTRKEKKAVVLLSGGLDSTTVLAIARDAGFVCCCLSFKYGQRQSVELEKAKLNSAKMGAAQHLVLDIGLERIGGSALTGEFEVPKGRSFEAMEEGIPQTYVPGRNTIFLAYAMAWAEVVGADDIFIGVNALDYSGYPDCRPEYIKAFEKMARLATRAGTEGERTLRIHAPLMYRSKKEIIQKGMELGVDYSTTHSCYDPGTDGIACGQCDACRLRLKGFAEAGIDDPLPYQGKRNE

SEQ ID NO: 37826 - protein, 233 aa, Desulfobacterales bacterium
  misc_feature (1)..(233): tr|A0A2G9ZZM1|A0A2G9ZZM1_9DELT 7-cyano-7-deazaguanine s ynthase OS=Desulfobacterales bacterium CG23_combo_of_CG 06-09_8_20_14_all_51_8 OX=1973983 GN=queC PE=3 SV=1
MEKNQKKAIVLCSGGLDSTTVLAIARSQNYDCHTLTFFYGQRHHHELLAAEKISRALGAAGHHVITVDLGKIGGSALTGDIPVPKNRNAEEISSGIPVTYVPARNTIFLSHALAWAEVLGAPDIFIGVNAVDYSGYPDCRPEYIAAFETMANLALKCAVEGENTIHIRAPLLNMTKADIIRTGVQLHVDYSMTHSCYDPDLAGRACGFCDSCVLRKKGFAEAGVPDPTVYIKP

SEQ ID NO: 37827 - protein, 228 aa, Desulfobacterium sp.
  misc_feature (1)..(228): tr|A0A1W9U1T9|A0A1W9U1T9_9DELT 7-cyano-7-deazaguanine s ynthase OS=Desulfobacterium sp. 4572_20 OX=1971621 GN=q ueC PE=3 SV=1
MKKKAVVLASGGLDSTTIMAITRHGGYDIYALTFDYGQRHKIELKAAQKIAKYFGAKKHLILHIELDTIGGSALTADIPIPQERKLKEISSSGVPITYVPARNTIFLAYALSWAEVLEATDIFIGVNSIDFSNYPDCRPEFIESFQRTANLATRAGMEGKEIRINTPLIDMTKGEIIKKGLSLGVDYSMTHSCYNPKKDGLPCGKCDSCLLRKKGFEEAGIADPLFDQ

SEQ ID NO: 37828 - protein, 219 aa, Desulfobacterium vacuolatum
  misc_feature (1)..(219): tr|A0A1W2A6T3|A0A1W2A6T3_9DELT 7-cyano-7-deazaguanine s ynthase OS=Desulfobacterium vacuolatum DSM 3385 OX=1121 400 GN=queC PE=3 SV=1
MVDAIIVLSGGMDSAVLLADTLEQGKTVEAISFDYGSKHNGRELPMARELCEHFKIDHEIIPLPFINELFSSSLLSSGEDVPDGAYMASNMKSTVVPFRNGIMLSIAAGYAESVEASEVLLGSHSGDHHIYPDCRPEFNNAFAHAVNVGTDGKIDIRFPFSHLNKRDIGDIGRRLGVDFSRTWTCYKGGRIHCGTCGACDERKYALRHEQGLDVTRYLV

SEQ ID NO: 37829 - protein, 229 aa, Desulfobacula phenolica
  misc_feature (1)..(229): tr|A0A1H2IEC0|A0A1H2IEC0_9DELT 7-cyano-7-deazaguanine s ynthase OS=Desulfobacula phenolica OX=90732 GN=queC PE= 3 SV=1
MPDKAIVLSSGGIDSSTAMAIAKSKGKEIYSLSFRYGQRHSIEIEASKKIAQSLGAKAHKIIDIDLRQFGGSALTDDITVPKHDTVDDINANQIPITYVPARNTIFLSYAMAWAEVLKATSIYIGVTAVDYSGYPDCRPQFIEAFEKMANLATRTGITKEAVLKIETPLIHLSKADIIRTGVDLGVDYGLTTSCYDPDALGSSCGSCESCLHRIKGFKEAGIKDPTLYY

SEQ ID NO: 37830 - protein, 236 aa, Desulfobacula sp.
  misc_feature (1)..(236): tr|A0A1F9NC48|A0A1F9NC48_9DELT 7-cyano-7-deazaguanine s ynthase OS=Desulfobacula sp. GWF2_41_7 OX=1797910 GN=qu eC PE=3 SV=1
MQDKAVVLSSGGIDSTTAMAIAKSEGKDIYSLSFRYGQRHSVELKAAVKIAKMLGAKAHKIIDIDLRQFGHSALTDEIPVPKHNTLDDIKKDEVPVTYVPARNTIFLSYAMAWAEVLKASSIFIGVTAVDYSGYPDCRPEFIKAFEKMANLATKTGITKETILKIETPLIHLSKAEIIKTGIQLGVDYSLTISCYDPDDKGRSCGFCDSCLHRKKGFAKAGITDPTPYYPPASASA

SEQ ID NO: 37831 - protein, 151 aa, Desulfobacula sp.
  misc_feature (1)..(151): tr|A0A1F9RDH4|A0A1F9RDH4_9DELT 7-cyano-7-deazaguanine s ynthase (Fragment) OS=Desulfobacula sp. RIFOXYB2_FULL_4 5_6 OX=1797912 GN=A3J80_07470 PE=3 SV=1
MPDKAIVLSSGGIDSTTAMAIAKSKGKDIYSLSFRYGQRHSAELDAAVKIARTLGAKAHKIIEIDLRQFGGSALTDEIPVPKHGRLEDLKKDGIPVTYVPARNTIFLSYAMAWAEILKADSIYIGVTAVDYSGYPDCRPEFIAAFEKMANL

SEQ ID NO: 37832 - protein, 229 aa, Desulfobacula toluolica
  misc_feature (1)..(229): tr|K0NK54|K0NK54_DESTT 7-cyano-7-deazaguanine synthase OS=Desulfobacula toluolica (strain DSM 7467 / Tol2) OX= 651182 GN=queC PE=3 SV=1
MPDKAIVLSSGGIDSSTAMAIAKSKGKEIYSLSFRYGQRHSIEIKASKKIAQSLGAKAHKIIDIDLRQFGGSALTDDINVPKHDTVDDIDANQIPITYVPARNTIFLSYAMAWAEVLKATSIYIGVTAVDYSGYPDCRPQFIEAFEKMANLATRTGITKEAVLKIETPLIHLSKADIIRTGVDLGVDYGLTTSCYDPDALGRSCGSCESCLHRIKGFKEAGIKDPTLYY

SEQ ID NO: 37833 - protein, 229 aa, Desulfobotulus alkaliphilus
  misc_feature (1)..(229): tr|A0A562RVG1|A0A562RVG1_9DELT 7-cyano-7-deazaguanine s ynthase OS=Desulfobotulus alkaliphilus OX=622671 GN=que C PE=3 SV=1
MSGCTDCVLVLSGGMDSTVLLYDLISRGKKTAALSFDYGSRHNHKELPLAASTCRKLGISHKIVSLDFMAELFSSALFHTGPPVPEGPYKSENMSQTIVPFRNPIMMSIAVGYAESIGAAEVLLASHSGDHALYPDCRREFNAAFNQAVRLGTDDKVRLSFPYADLDKRQIADLGRSLGVDFSRTWTCYKGGALHCGRCSACIERSHALRHGEGMDPTSYENPDEKNGR

SEQ ID NO: 37834 - protein, 434 aa, Desulfobulbaceae bacterium
  misc_feature (1)..(434): tr|A0A1W9LVL0|A0A1W9LVL0_9DELT DNA-binding protein OS=D esulfobulbaceae bacterium A2 OX=1934250 GN=BWK76_25960 PE=4 SV=1
MTCLVFHHNHQLLPPADDDLLPVQLYGLSGQGRGDISIIGNPVIDKVKRLGVRVPAQVMDFLTIALAVTAADTFIRRSDAVDGWTRQFSIQLPLHEPGRWQLLNKDLQRALHFLSGDIWDFDFREGGCPPPVPYRQRDRFHLVRLRGLDCVCLFSGGLDSAIGAIDLLAQGRAPLLVSHAYKGDKTRQDEIAEALKGRYSRFEVNADPHLYTGETDITMRTRSLNFFAFAAVGAYAVKAASQQERVDLVVPENGFISLNAPLTSRRIGALSTRTTHPHFIESIQKLFDAADIPCRINNPYQFKTKGQMAAECLNGQLLEDIVDSTVSCSHWKRSNRQCGVCVPCIIRRAALYAGGFTEETEYTYNDMANVLNETDRRDDLLALSIAVAQKATRKPGPWIADSGPLPPSQFADFQEVFLRGLDEVEAFLKAEGAV

SEQ ID NO: 37835 - protein, 235 aa, Desulfobulbaceae bacterium
  misc_feature (1)..(235): tr|A0A1Q6DMS1|A0A1Q6DMS1_9DELT 7-cyano-7-deazaguanine s ynthase OS=Desulfobulbaceae bacterium DB1 OX=1920419 GN =queC PE=3 SV=1
MENEIKKAVVLLSGGLDSTTVLAIARDRGFACYCLSFSYGQRQKVELDRAREIARRQGAVTHLVLGLDLDKIGGSALTADIDVPKKRSAAEMQASIPVTYVPGRNTIFLSHAMAWAEVIGAFDLFIGINVLDYSGYPDCRPEYLDAFEKVANLGTRAGVEAGKKFKIHAPLMHLTKKEIIMKGKGMGVDYSLTHSCYDPDGQGRACGQCDACQLRLKGFAEAGFVDPAHYQKVVA

SEQ ID NO: 37836 - protein, 228 aa, Desulfobulbus oralis
  misc_feature (1)..(228): tr|A0A2L1GR48|A0A2L1GR48_9DELT 7-cyano-7-deazaguanine s ynthase OS=Desulfobulbus oralis OX=1986146 GN=queC PE=3 SV=1
MQDEKKAVILLSGGLDSTTVLAMAKDRGFACHCLSFRYGQRQELELEKAQHIARHFGASHLILRVDLDIIGGSALTTGAAVPKDRPMNTVGQDIPATYVPGRNIIFLAHALAWAEVLGADDIFLGINAMDYSGYPDCRPEFLEAFARMASLGTRAGVQGRAFRFHAPLQYLSKKEIIVRGLALGVDYSMTHSCYDPVDGRACGHCDACRLRLKGFAEAGAQDPAPYAS

SEQ ID NO: 37837 - protein, 234 aa, Desulfobulbus propionicus
  misc_feature (1)..(234): tr|A0A2G6M6M2|A0A2G6M6M2_9DELT 7-cyano-7-deazaguanine s ynthase OS=Desulfobulbus propionicus OX=894 GN=queC PE= 3 SV=1
MGSENNAVILLSGGLDSTTVLAMAANQGYTCNCLSFRYGQRQEIELQRAQKVSEQLGAARHLVLEVDLGAIGGSALTTTIDVPKDREIGDNEIPVTYVPARNIIFLAHALSWAEVVGARDIFLGINAVDYSGYPDCRPEFLDAFTQMANLGTKAGSTGQSFHFHAPLMRMSKKEIIEQGVRLGVNYGLTHSCYDPVGELACGRCDACLLRLKGFAEAGLTDPAPYVKIEKRSGS

SEQ ID NO: 37838 - protein, 228 aa, Desulfobulbus sp.
  misc_feature (1)..(228): tr|A0A0A2HU82|A0A0A2HU82_9DELT 7-cyano-7-deazaguanine s ynthase OS=Desulfobulbus sp. Tol-SR OX=1536652 GN=queC PE=3 SV=1
MPEQPPAVILLSGGLDSTTVLAIADAEGYACHCLSFDYGQKQTVELAKAEKIAARYGAKRHLILRLDLDRIGGSALTDNIVVPKDGNPEQQGTIPVTYVPARNTILLAHAVAWAEVLGAWDIFIGVNAVDYSGYPDCRPEFLAAFAHMANLGTKAGISGAAQFTIKAPLMYLSKAEIIKRGLSLGVDYSLTHSCYDPRGTKACGRCDACILRRNGFAAAGVPDPTDYL

SEQ ID NO: 37839 - protein, 230 aa, Desulfobulbus sp.
  misc_feature (1)..(230): tr|A0A3A6MY48|A0A3A6MY48_9DELT 7-cyano-7-deazaguanine s ynthase OS=Desulfobulbus sp. OX=895 GN=queC PE=3 SV=1
MKEQQKEAVVLFSGGLDSTTVLAIAQAEGYLCSCLSFRYGQRQEIELERARDIGARMGVRRHLILRLDLAAIGGSALTDDIAVPKDRAPDEMQNEIPITYVPGRNIIFLAHALAWGEVIGAADIFLGINAIDYSGYPDCRPDFLAAFEKMANLGTKNGCAGRPFSLHAPLQHLRKSEIIKLGLTLGVDYSLTHSCYDPQDGLACGRCDACRLRLQGFTEAGIVDPLRYVP

SEQ ID NO: 37840 - protein, 232 aa, Desulfocapsa sp.
  misc_feature (1)..(232): tr|A0A432QP51|A0A432QP51_9DELT 7-cyano-7-deazaguanine s ynthase OS=Desulfocapsa sp. OX=2066021 GN=queC PE=3 SV= 1
MRSIEKKKAVILFSGGLDSTTVLAIVQEAGYSCHCLSFQYGQKQTVELEKAARLAKESKVSKHLILNLDLDKIGGSALTDAIEVPKDRDTDDDSIPITYVPARNTIFLSHAVAWAEVLGARDIFIGVNAVDYSGYPDCRPEFLEAFSTMANLGTKAGVSGKDGFIIHAPLLRMSKAEIVAEGMRLGVDYAKTHSCYDPVADKACGRCDACLLRLQGFRDAGLTDPADYISSS

SEQ ID NO: 37841 - protein, 232 aa, Desulfocapsa sulfexigens
  misc_feature (1)..(232): tr|M1P1I3|M1P1I3_DESSD 7-cyano-7-deazaguanine synthase OS=Desulfocapsa sulfexigens (strain DSM 10523 / SB164P1 ) OX=1167006 GN=queC PE=3 SV=1
MIPDNKKAVILFSGGLDSTTVLAIAKEAGYSCYCLSFQYGQKQTVELEKARRIADASQVAKHLILNLDLDKIGGSALTDSIDVPKDRDMIHNAEEIPITYVPARNIIFLAHAVAWAEVLGATEIFIGINAVDYSGYPDCRPEFLESFTQMANLGTRAGIEKTGRFSIQAPLLNMSKAEIIKTGIGLGVDYATTHSCYDPVSGKACGRCDACVLRMKGFSEAGIVDPTDYIKT

SEQ ID NO: 37842 - protein, 136 aa, Desulfocarbo indianensis
  misc_feature (1)..(136): tr|A0A0K9I262|A0A0K9I262_9DELT 7-cyano-7-deazaguanine s ynthase (Fragment) OS=Desulfocarbo indianensis OX=13481 63 GN=AAU61_22385 PE=3 SV=1
GIPITYVPARNTIMLSLALGWAEAVGARDLFFGANAVDYSGYPDCRPEYVAAYETLANLATKAGVEGEHIRVNAPIIAMTKAEIIQAGARLGVDYGMTVSCYKADEEGRACGVCDSCRIRKAGFEAAGVPDPTRYV

SEQ ID NO: 37843 - protein, 231 aa, Desulfocarbo indianensis
  misc_feature (1)..(231): tr|A0A0K9I437|A0A0K9I437_9DELT 7-cyano-7-deazaguanine s ynthase OS=Desulfocarbo indianensis OX=1348163 GN=queC PE=3 SV=1
MPPAKPKAIVLLSGGLDSSTCLAMAQEQGFAVYALSFDYGQRHQVELAASQRVARALGAAQHLILRVDLRPIGGSALTADLEVPKGREPQAMAQGVPITYVPARNTLFLSLALAWAETLQCSDIFIGVNAVDYSGYPDCRPEFIQAFERLARLATRLGAEEGTDFKIHTPLIKLSKAQIIAKGAELGLDYGLTHSCYDPTPPGLACGQCDSCLLRLKGFAEAGLKDPLPYA

SEQ ID NO: 37844 - protein, 159 aa, Desulfococcus multivorans
  misc_feature (1)..(159): tr|S7TBW7|S7TBW7_DESML 7-cyano-7-deazaguanine synthase (Fragment) OS=Desulfococcus multivorans DSM 2059 OX=112 1405 GN=dsmv_3424 PE=3 SV=1
METPRKAIVLSSGGLDSTTVMAIAKSEGYDIYSLSFSYGQRHSAELDAANRVADTIGVKKHLVINVDMRLIGGSALTDDIAVPKDRNESDMAGEIPVTYVPARNTIFLSYALGWAEAVGAPDIFIGVNAVDYSGYPDCRHEFIAAFEALANLDTKAGVE

SEQ ID NO: 37845 - protein, 228 aa, Desulfococcus oleovorans
  misc_feature (1)..(228): tr|A8ZTP2|A8ZTP2_DESOH 7-cyano-7-deazaguanine synthase OS=Desulfococcus oleovorans (strain DSM 6200 / Hxd3) OX =96561 GN=queC PE=3 SV=1
MTADSRRAVVLSSGGIDSTTAMAMAVSQGFSVFSLTFDYGQRHRHELSAARAVARHLNAEKHLVLETDFRKIGGSALTADIPVPGTGPVENTIPVTYVPARNTIFLAYALAWAETLDAADIFIGVNAVDYSGYPDCRPEYIEAFARVANLGSKAGVEGRITFAVHTPLIHMTKAEIIRTGAALGVDYSITSSCYDPSPEGLACGLCDSCRIRKKGFVDAGLPDPTRYV

SEQ ID NO: 37846 - protein, 228 aa, Desulfococcus sp.
  misc_feature (1)..(228): tr|A0A1W9PWX0|A0A1W9PWX0_9DELT 7-cyano-7-deazaguanine s ynthase OS=Desulfococcus sp. 4484_241 OX=1968522 GN=que C PE=3 SV=1
MNNRQTKAVILSSGGIDSTTAMAIAAFQGFEIYSLTFSYGQRHSCELAAAAKVAQRFKAADHLVLETDLTKIGGSALTDDIPVPKDGPDKTQIPITYVPARNIIFLSYALAWAETIGSRDIFIGANAVDYSGYPDCRPEFISAFERMANLGTKTGVEKKGNITIHAPLMEMTKARIIQTGARLGVDYSITWSCYDPAPGGLACGRCDSCRIRKKGFEQAGIPDPTRYA

SEQ ID NO: 37847 - protein, 229 aa, Desulfocucumis palustris
  misc_feature (1)..(229): tr|A0A2L2X6Q0|A0A2L2X6Q0_9FIRM 7-cyano-7-deazaguanine s ynthase OS=Desulfocucumis palustris OX=1898651 GN=queC PE=3 SV=1
MKKAVVILSGGLDSTVCMSIAKSKGYDVFPLTFAYGQRHNKEVEQARKVADYYGCNKHLVVDIDFFRAIGESALTSDRINVPVNRSQEELAEGIPVTYVPFRNAVFLSMATGYAESIRAEIIYIGVNALDYSGYPDCRPQFIQAFQEVIRLGATTSDKGAQIKIESPLIHMSKGEIVKLGLKNKSPLHLTTSCYQGRERACGICDSCQLRLKGFSDAGTKDPIQYEEVM

SEQ ID NO: 37848 - protein, 219 aa, Desulfofaba hansenii
  misc_feature (1)..(219): tr|A0A2M9DJX0|A0A2M9DJX0_9DELT 7-cyano-7-deazaguanine s ynthase OS=Desulfofaba hansenii OX=157842 GN=queC PE=3 SV=1
MIDCIVVLSGGMDSTVLLADALKRNRHPAAISFDYGSKHNDRELPRAAEICKKFGVSHRIIRLPFIGELFSSSLLSSGEAIPDGNYNEADMKRTVVPFRNGILLSIAVGYAESKGAAEVLLGSHAGDHFIYPDCRPEFNKAFAEAALLGTDRAVHVLFPFASITKRDIGDLGRTLDVDFAATWTCYRGGEIHCGTCAACLERKNALRNDEGLDPTPYAA

SEQ ID NO: 37849 - protein, 229 aa, Desulfofarcimen acetoxidans
  misc_feature (1)..(229): tr|C8VWI1|C8VWI1_DESAS 7-cyano-7-deazaguanine synthase OS=Desulfofarcimen acetoxidans (strain ATCC 49208 / DSM 771 / VKM B-1644 / 5575) OX=485916 GN=queC PE=3 SV=1
MKNAVIILSGGMDSTVCMAYAGSREYNLYPITFNYGQRHAYEVGQAKKIASYFQSNRHLVVDLAFFREIGGSALTSEAIELPLNRTEKEIGSGIPITYVPFRNGVFLSLAVAYAEAVKAQAIFIGVNALDYSGYPDCRPEFIEAYQTVIDAGTKQASEDKQKLQIITPLLYKTKAEIVKMGMDLAAPLQLTTSCYRGEELACGRCDSCLLRLKGFSEAGFIDPISYESY

SEQ ID NO: 37850 - protein, 216 aa, Desulfofundulus australicus
  misc_feature (1)..(216): tr|A0A1M5C6Y0|A0A1M5C6Y0_9FIRM 7-cyano-7-deazaguanine s ynthase OS=Desulfofundulus australicus DSM 11792 OX=112 1425 GN=queC PE=3 SV=1
MKSVVLLSGGLDSTVSMAQALIEGEVQLCLTIDYGQRAAAKEIAAAQALAAHYNLAHRVISLPFLADVTTTSLVNRKVIIPEPEGELDNPQQARTRAKAVWVPNRNALFINIAACFAEALGCEQVVTGFNREEAAAFPDNSIDFIEAINLSLSYSTANKIRVVSYTARLNKREIVRLGQRLKIPWHLLWSCYYGGETMCGRCESCRRFMRAMSAAR

SEQ ID NO: 37851 - protein, 233 aa, Desulfofundulus kuznetsovii
  misc_feature (1)..(233): tr|A0A101HZ21|A0A101HZ21_9FIRM 7-cyano-7-deazaguanine s ynthase OS=Desulfofundulus kuznetsovii OX=58135 GN=queC PE=3 SV=1
MRSVVLLSGGLDSTVSLAHALRESEVELCLTMDYGQRSAAREINSASAIAEYYDLNHMVIDLPFLRKITFSALVNTSKAVPNPSADLLDDPQAALDCAAAVWVPNRNGLFINIAASFAEALDCGLIVTGFNREEARTFPDNRPAFVKAANEALAFSTRNSVRVVSYTQRLDKVEIVQLGKKLNVPWRLIWSCYHGGSEMCGVCESCLRFSKAMKEAGIDGFSAEPGGSGDSSV

SEQ ID NO: 37852 - protein, 224 aa, Desulfofundulus salinum
  misc_feature (1)..(224): tr|A0A494WW94|A0A494WW94_9FIRM 7-cyano-7-deazaguanine s ynthase OS=Desulfofundulus salinum OX=2419843 GN=queC P E=3 SV=1
MKSIVLLSGGLDSTVSMAQALREGQVELCLTMDYGQRAAAREIAAASALAAYYKLAHRVIQLPFLGEVTTTSLVNKEETIPEPAEESLNDPQQATATAAAVWVPNRNGLFINIAACFAEALGCEQVVTGFNREEAATFPDNSLDFLEAINNSLAYSTASGVRVVSYTARLNKAEIVRLGQHLGVPWHLIWSCYYGGQTMCGRCESCRRLGRAMAAAGLEDQVRR

SEQ ID NO: 37853 - protein, 224 aa, Desulfofundulus thermosubterraneus
  misc_feature (1)..(224): tr|A0A1M6DGX9|A0A1M6DGX9_9FIRM 7-cyano-7-deazaguanine s ynthase OS=Desulfofundulus thermosubterraneus DSM 16057 OX=1121432 GN=queC PE=3 SV=1
MKSIVLLSGGLDSTVSMAQALREGEVELCLTMDYGQRAAAREIAAASALAAYYKLAHRVIQLPFLGEVTTTSLVNRKETIPEPAEEFLDDPQQATATAAAVWVPNRNGLFINIAACFAEALGCEQVVTGFNREEAATFPDNSFDFLEAINSSLAYSTASGVRVVSYTARLNKAEIVRLGQRLGVPWHLIWSCYYGGETMCGRCESCRRLCRAMAAAGLEDWVRR

SEQ ID NO: 37854 - protein, 234 aa, Desulfofustis glycolicus
  misc_feature (1)..(234): tr|A0A1M5SDM7|A0A1M5SDM7_9DELT 7-cyano-7-deazaguanine s ynthase OS=Desulfofustis glycolicus DSM 9705 OX=1121409 GN=queC PE=3 SV=1
MENRPLSPRAVILLSGGLDSTTVLAIASAQGYDCYCLSFRYGQKQAIELQRAARIAEHFNARRHLILQLDLGLIGGSALTDNIAVPKDRDLERCTDIPVTYVPARNTIMLAHALAWAEVIGAAEIFIGVNAVDYSGYPDCRPEFLEAFTVMANLGTKAGSTAGDHFQIRAPLMTMSKAEIIRTGLSLGVDYSMTHSCYDPDADAACGRCDACLLRLRGFAEVGITDPAPYRGTI

SEQ ID NO: 37855 - protein, 233 aa, Desulfoglaeba alkanexedens
  misc_feature (1)..(233): tr|A0A4P8L3G6|A0A4P8L3G6_9DELT 7-cyano-7-deazaguanine s ynthase OS=Desulfoglaeba alkanexedens ALDC OX=980445 GN =queC PE=3 SV=1
MQHQTSIPKAVVILSGGLDSSTCLAVAADQGFEPCALTFDYGQRHRVELEAARRVARSFGVSHHLVLELPLRKIGRSALTDNMEVPKDRSEIGGSTIPVTYVPARNTIFLSLALGWAEVLGAADIFIGVNALDYSGYPDCRPEYIRAFERMANLALKETVEGRLTIRIHTPLIHLSKAEIIRKGVALGVDYSLTLSCYDPDPEGRACGRCDSCRLRKRGFQEAGIPDPTPYVD

SEQ ID NO: 37856 - protein, 219 aa, Desulfoluna butyratoxydans
  misc_feature (1)..(219): tr|A0A4U8YQL0|A0A4U8YQL0_9DELT 7-cyano-7-deazaguanine s ynthase OS=Desulfoluna butyratoxydans OX=231438 GN=queC PE=3 SV=1
MYETVVVLSGGMDSAVLLAHCLSKGQRCVAISFDYGSKHNASELPMAKAMCDHLGVTHTLVPLPFINELFDSSLLKSGEEVPDGAYDSENMKSTVVPFRNGIMLSIAAGYAESVGARQVVLASHAGDHFIYPDCRPEFNEALGKAIHLGTDGQVTIAFPFAQLDKREIGDLGRTLGVDFAATWTCYKGGTAHCGTCGACDERKYALRFDEGLDPTTYLA

SEQ ID NO: 37857 - protein, 219 aa, Desulfoluna spongiiphila
  misc_feature (1)..(219): tr|A0A1G5FWB3|A0A1G5FWB3_9DELT 7-cyano-7-deazaguanine s ynthase OS=Desulfoluna spongiiphila OX=419481 GN=queC P E=3 SV=1
MYETVVVLSGGMDSAVLLADCVAKGQNCVAISFDYGSKHNASELPMAKAMCDHLGVPHTLVPLPFINELFDSSLLQSGDAVPDGAYDAENMKSTVVPFRNGIMLSIAAGYAESVGARQVVLASHAGDHVIYPDCRPEFNEALGKAIHLGTDGQVAIAFPFARMDKREIGDLGRTLGVDFAATWTCYKGGSAHCGTCGACDERKYALRFDEGLDPTTYLV

SEQ ID NO: 37858 - protein, 271 aa, Desulfoluna spongiiphila
  misc_feature (1)..(271): tr|A0A5E7X958|A0A5E7X958_9DELT Pyridinium-3 5-biscarbox ylic acid mononucleotide sulfurtransferase lare OS=Desu lfoluna spongiiphila OX=419481 PE=4 SV=1
MKSSALKYESLLTRLKLYDSLAVAFSGGVDSTLLLKAAVDTLGENVVAVTSVSPVHARREIEAAKACAATLGVRHILYDPGMMEDKGFLENTPRRCYFCKRRMFMRMSNEVRALGVSNVVHGVNCDDLGDYRPGLKAAEELGIGAPMVDAGLFKAEIRELAEELGLSVARKPAMSCLATRIPYGEPITREALAMVEAAEATLDDLGFQQFRVRHHGDVARIEFSRKDLARLFTESMMAQVVSGVRRAGYLHVAADLEGYGQGRMNRGLEDV

SEQ ID NO: 37859 - protein, 218 aa, Desulfomicrobium apsheronum
  misc_feature (1)..(218): tr|A0A1I3UR98|A0A1I3UR98_9DELT 7-cyano-7-deazaguanine s ynthase OS=Desulfomicrobium apsheronum OX=52560 GN=queC PE=3 SV=1
MDAVIVLSGGMDSAVLLAHELSLGTRVAALSFDYGSKHNPRELPMAREICARLNVGHKVVGLPFINELFASSLLQSGEAIPEGAYDADSMKSTVVPFRNGILIAIAVGYAESVGASRVLIGSHSGDHHIYPDCRPEFNAAIDEAARLGTDDAVRVAFPFSAMDKREIGDLGRTLGVDFARTWTCYKGGELHCGTCGACDERKFALRHDQGLDPTRYLK

SEQ ID NO: 37860 - protein, 700 aa, Desulfomicrobium norvegicum
  misc_feature (1)..(700): tr|A0A1I4LR50|A0A1I4LR50_DESNO 7-cyano-7-deazaguanine s ynthase (Queuosine biosynthesis) OS=Desulfomicrobium no rvegicum (strain DSM 1741 / NCIMB 8310) OX=52561 GN=SAM N05421830_109112 PE=4 SV=1
MQDKRYIICGNAPTDGIEENPDRDLRLRLWGKDGPDKITLRIEDIHKKMSKDVPDSFQDLLEIATYVYSADQAIPRGADDVDSFGHGWRRDLHFIIPVRKPDFWNGDDIHQALRSTLGFLSDDNYHFEFVKLKEAQAFQGYLKFDDDGRLFGYPEQVVMFSGGLDSLAGAIDEVLNEKHKVVLVTHKSTPKLNTRHRRLEKMIADKAGENAPLHIGVRVNKNKGLNYEYTQRSRSFLYVSIGATIAKMLNLKSVRFYENGVISLNLPVCAQVVGGRATRTTHPRVIRGFQEIISLVAGEPFTIENPYIWKTKAGVIEVITKAGCQDMIAASTTCTHTWEMTNHHTHCGTCSQCIDRRFAMIAAKADQYDPVEAYKADIFTQSRSKDEDKIMTAAYLERANQVREQDDITQFIARFSEVSRVFRYLNGNSGKVAQKVYDLYKRHAKEVCDAMDTMVGRNITAIRQRTLPGDCLLRTVYESGSVISVPAIPVEQKQPDNYFRKRGGVWAARFNGNAEVLVTGVDKGAEYINFLLARPNKETSVYEIVCGFAIDSCNAVLNSNETDEGFQVTQGVPLGDTGFVADRKAVEQYRETAHELLREIEEARAENNDAEIQRLENEMTQITAAINEAVGLGGKLRKSNDKRKNIRDAFRSAVNRAITYLEKYDKPLAAHLKESIKCGNEPVYRTEEEIVWEVRPIVNE

SEQ ID NO: 37861 - protein, 218 aa, Desulfomicrobium norvegicum
  misc_feature (1)..(218): tr|A0A1I4KY47|A0A1I4KY47_DESNO 7-cyano-7-deazaguanine s ynthase OS=Desulfomicrobium norvegicum (strain DSM 1741 / NCIMB 8310) OX=52561 GN=queC PE=3 SV=1
MDAVIVLSGGMDSAVLLAHEISMGTRVAALSFDYGSKHNPRELPMAREICARLNVGHKVVGLPFINELFASSLLQSGEAIPEGAYDADSMKSTVVPFRNGILIAIAVGYAESVGASRVLIGSHSGDHHIYPDCRPEFNAAIDEAARLGTDDAVRVAFPFASMDKREIGDLGRTLGVDFARTWTCYKGGELHCGTCGACDERKFALRHDQGLDPTRYLK

SEQ ID NO: 37862 - protein, 233 aa, Desulfomonile tiedjei
  misc_feature (1)..(233): tr|I4C7D7|I4C7D7_DESTA 7-cyano-7-deazaguanine synthase OS=Desulfomonile tiedjei (strain ATCC 49306 / DSM 6799 / DCB-1) OX=706587 GN=queC PE=3 SV=1
MQKRPEEKAVVLLSGGLDSTTCLAIARAQGYLTYALSFFYDQRHEIEMRAAKRVAAIMGITHHLILQIPLGKIGGSALTSDLQVPKSADISHMPQGIPLTYVPARNTIFLSFALAWAEVLEAENIFIGVNALDYSGYPDCRPEYIAAFETMANLGTKMAVEGFMRFRIHTPLIRLSKGEIIKKGIELGVDYSATHSCYDPDPEGMACGHCDSCLLRKKGFAEAGVPDPTVYVE

SEQ ID NO: 37863 - protein, 271 aa, Desulfonatronum thiosulfatophilum
  misc_feature (1)..(271): tr|A0A1G6ET40|A0A1G6ET40_9DELT Uncharacterized protein OS=Desulfonatronum thiosulfatophilum OX=617002 GN=SAMN0 5660653_03112 PE=4 SV=1
MTAPEPNTGAKHQDLLRALRAMGKAVVAFSGGLDSTFLLHAARQALGENVVAVTIFTPYMPETEIEDATNTARVMSVAHELLNVPFPEAIRTNPANRCYFCKRTLFAHLLQLAAARGIDHVLDGTNLDDLGDHRPGFKAVRELGVESPLLAAGLTKQDLRDLSKNQGLPTWNKPAGACLLTRIPHDTPVKEAELRRIDRAETVLKELGFHAVRLRSHGDIARIEVPREQLVDVVEADARHGISKQLIALGYRHVTLDLAGYRMGSLNREAK

SEQ ID NO: 37864 - protein, 227 aa, Desulfonauticus sp.
  misc_feature (1)..(227): tr|A0A117KMZ5|A0A117KMZ5_9DELT 7-cyano-7-deazaguanine s ynthase OS=Desulfonauticus sp. 38_4375 OX=1635258 GN=qu eC PE=3 SV=1
MRPTNRDWALVCLSGGQDSATCLAWAKDRFTKVYSVSFYYGQRHAIELECSRKLSELAQCEHHFEIQMDQLFSQIEVSSLLDKSKDVTSSFDLDANLPSSFVPFRNLFFISSAASIAYLYGIKNIVVGVSQTDFSGYPDCRNNFIKSLNATLELAVDSSFEIHAPLMYLSKKETVLLMKNLGCLDWYRYTHTCYKGERPACGICPACKLRLKGFAEAGIKDLIEYRK

SEQ ID NO: 37865 - protein, 233 aa, Desulfonema ishimotonii
  misc_feature (1)..(233): tr|A0A401FU07|A0A401FU07_9DELT 7-cyano-7-deazaguanine s ynthase OS=Desulfonema ishimotonii OX=45657 GN=queC PE= 3 SV=1
METDKKAVVLSSGGLDSSTVIAIAKDQGYTVHSLSFFYGQRHAFELEAARKVAGAMGVAKHLVVEADLKKIGGSALTDDIEVPKSRNEAEMAGEIPVTYVPARNTVFLSYALAWAEVLGASDIFIGVNAVDYSGYPDCRPEYIAAFERMANLATKAGVEGKTVLRIHAPLMRMTKADIIRKGTELGVDYGITHSCYDPSPEGLACGQCDSCLLRKKGFAEAGVPDPTRYVRVI

SEQ ID NO: 37866 - protein, 219 aa, Desulfopila sp.
  misc_feature (1)..(219): tr|A0A4U1A9K4|A0A4U1A9K4_9DELT 7-cyano-7-deazaguanine s ynthase OS=Desulfopila sp. IMCC35005 OX=2569541 GN=queC PE=3 SV=1
MIDSVIILSGGMDSTVMLAHEIDSGRKVAALSFHYGSKHNDKELPLAAMSCKQFGIDHKQVALPFIDQLFSSSLLQSGTEIPDGTYDAENMQSTVVPFRNGILIAIAVGYAESIGASKVLLGSHSGDHHIYPDCRPAFNEAMNTAVLSGTDNAVQLEFPFARMDKREIGDLGRKLGIDFTTTWTCYKGGDIHCGTCSACVERKFALRKDKGLDPTIYHQ

SEQ ID NO: 37867 - protein, 219 aa, Desulfopila sp.
  misc_feature (1)..(219): tr|A0A4U1AHY0|A0A4U1AHY0_9DELT 7-cyano-7-deazaguanine s ynthase OS=Desulfopila sp. IMCC35006 OX=2569542 GN=queC PE=3 SV=1
MFDCLVVLSGGLDSTVLLIDSISRYPKVAAVSFDYGSKHNGCELPLAKSTCARLGVDHKIIHLPFINALFSSTLLASGEDIPNGAYDEPTMKSTVVPFRNGIMLSIAAGYAESIGAAKVLLGSHAGDHFIYPDCRPEFNLAFAEAVKLGTDAKVVIEFPYSMLDKRDIGDLGRRLDVDFLATWTCYKGEDIHCGTCGACNERKYALRKNQGMDPTVYRN

SEQ ID NO: 37868 - protein, 219 aa, Desulforhopalus singaporensis
  misc_feature (1)..(219): tr|A0A1H0IZ97|A0A1H0IZ97_9DELT 7-cyano-7-deazaguanine s ynthase OS=Desulforhopalus singaporensis OX=91360 GN=qu eC PE=3 SV=1
MCDTLVVLSGGMDSAVLLADCINKAHRCAAISFDYGAKHNDCELAMATALCQLLKVPHTVVELPFINRLFSSTLLQSGEEVPDGAYDAETMQSTVVPFRNGIMLSIAAGYAESLGASRVVLASHSGDHFIYPDCRPEFNDAFSRAVRMGTDGKVAIEFPFARLDKRQIGDLGHTLGVDFTSTWTCYKGGEVHCGTCGACDERKYALRFDEGKDPTIYAR

SEQ ID NO: 37869 - protein, 220 aa, Desulforudis audaxviator; identical to SEQ ID NO: 37105
  misc_feature (1)..(220): sp|B1I3W2|QUEC_DESAP 7-cyano-7-deazaguanine synthase OS =Desulforudis audaxviator (strain MP104C) OX=477974 GN= queC PE=3 SV=1

SEQ ID NO: 37870 - protein, 231 aa, Desulfosporosinus acididurans
  misc_feature (1)..(231): tr|A0A0J1FWU8|A0A0J1FWU8_9FIRM 7-cyano-7-deazaguanine s ynthase OS=Desulfosporosinus acididurans OX=476652 GN=q ueC PE=3 SV=1
MAGIVLLSGGLDSTVAMALFLEKTTLDLAITFDYGQRAKEKEISASRQIADHFNIRHTIIALPFLQEQTRTALVNRSTDLPQLEFKQLDNIEEEALKSAHQVWVPNRNGLFMNIAAVFAENMGEAVTLITGFNREEAATFPDNSLEFMTAMNDCFKYSTQNTVTVDSPTAALSKSEIVREGLRLNIPFEKVWSCYENGQRPCGHCESCLRMKRALIVNEAEALVSELFDTP

SEQ ID NO: 37871 - protein, 231 aa, Desulfosporosinus acidiphilus
  misc_feature (1)..(231): tr|I4D853|I4D853_DESAJ 7-cyano-7-deazaguanine synthase OS=Desulfosporosinus acidiphilus (strain DSM 22704 / JC M 16185 / SJ4) OX=646529 GN=queC PE=3 SV=1
MSGIVLLSGGLDSTVSLALFLEKATVDLALTFDYGQRAKDKELSASLEIAKYYNIPHKIVALPFLQEQTRTALVNRSHELPQIMYEQLDDLQGEALESARQVWVPNRNGLFMNIAAVFAENMGEEATIITGFNREEAATFPDNSIEFMAAMDECFKYSTQNKVKVASPTATFSKSEIVREGLRVGIPFEKLWSCYENGVQPCGHCESCLRMKRALIANNAQELANTLFTVP

SEQ ID NO: 37872 - protein, 219 aa, Desulfosporosinus fructosivorans
  misc_feature (1)..(219): tr|A0A4Z0R6B7|A0A4Z0R6B7_9FIRM 7-cyano-7-deazaguanine s ynthase OS=Desulfosporosinus fructosivorans OX=2018669 GN=queC PE=3 SV=1
MNKSALVVFSGGQDSTTCLFWAMKNFDRVEAITFNYNQRHKAEIDCAIKIASEFDIPHLVVDMGLLNQLAPNALTRNDLEIKVGEGGEPPNTFVDGRNLLFLSFAAVVAKQKGINHIVTGVCETDFSGYPDCRDIFIKSLNVTLDLAMDYTFVIDTPLMWIDKADTWELADKLGRLEYVQKNTLTCYNGIMGIGCGECPACILRSAGLKKYLEKKEAAQ

SEQ ID NO: 37873 - protein, 234 aa, Desulfosporosinus fructosivorans
  misc_feature (1)..(234): tr|A0A4Z0R982|A0A4Z0R982_9FIRM 7-cyano-7-deazaguanine s ynthase OS=Desulfosporosinus fructosivorans OX=2018669 GN=queC PE=3 SV=1
MDSPRSAIVLLSGGIDSTTCAVLACREFGPENVLALSLFYGQKHAKEIDAAREVSKHLGLKDHIIQQLPDIFKGGGSTLIDQDRQNPEKTYEELSTSQGISPTYVPFRNANLLSVATSISLIKGADTIFYGAHSEDARNWAYPDCTPEFNGAMANAIYIGSYMKVRLVTPLQWFSKSEVVALGKKIGTPFQLTWSCYNGKEKACGVCPACVGRLHGFEENGLIDPIEYETGRCF

SEQ ID NO: 37874 - protein, 219 aa, Desulfosporosinus hippei
  misc_feature (1)..(219): tr|A0A1G7W4X0|A0A1G7W4X0_9FIRM 7-cyano-7-deazaguanine s ynthase OS=Desulfosporosinus hippei DSM 8344 OX=1121419 GN=queC PE=3 SV=1
MNQSALVVFSGGQDSTTCLFWAMKTFERVEAVTFNYNQRHKSEIDCARKIAEEFNIAHMVIDMSLLNQLAPNALTRTELEIKTGEDGQPPTTFVDGRNLLFLSFAAVVAKQKGIKHIVTGVCETDFSGYPDCRDIFIKSLNVTLNLAMDYSFVIDTPLMWIDKAETWELADQLGHLEYVQKNTLTCYNGIMGEGCGDCPACKLRNAGLKKYLDKKEQSS

SEQ ID NO: 37875 - protein, 233 aa, Desulfosporosinus lacus
  misc_feature (1)..(233): tr|A0A1M5WJ99|A0A1M5WJ99_9FIRM 7-cyano-7-deazaguanine s ynthase OS=Desulfosporosinus lacus DSM 15449 OX=1121420 GN=queC PE=3 SV=1
MAGIVLLSGGLDSTVALALYLEKDSIDLALTIDYGQRASRNEISASRKIAEYYNIAHQVIPIPFLQDQTHSALVNRSENLPLIEYNKLDDLQGQALESARQVWVPNRNGLFLNIAAVFGENMGDHPVIITGFNREEAATFPDNSLEFIKAVNRCLTFSTQNNVTVVSPTSVYEKKEIVREGLRLNVPFHYIWSCYESGNKVCGQCESCQRLKRALLKNDAEELVRELFEIDHK

SEQ ID NO: 37876 - protein, 187 aa, Desulfosporosinus meridiei
  misc_feature (1)..(187): tr|J7IUP9|J7IUP9_DESMD 7-cyano-7-deazaguanine synthase OS=Desulfosporosinus meridiei (strain ATCC BAA-275 / DS M 13257 / NCIMB 13706 / S10) OX=768704 GN=Desmer_0370 P E=3 SV=1
MKSEILVLLSGGLDSTACVAYYLNLGFKVKALFVDYNQNAVDQEKKSAYAISNYYCVDFQVLKCSGLRQWGTGVIPGRNAFLLSIALLSSNLSQGLIAIGIHSGTSYYDCSPNFLLEMNNLFDCYTDGKISISAPFLNYNKDFIWQYCLDHAVPIELTYSCEKGFLEPCGSCLSCRDREVLRACKKK

SEQ ID NO: 37877 - protein, 219 aa, Desulfosporosinus meridiei
  misc_feature (1)..(219): tr|J7IZ58|J7IZ58_DESMD 7-cyano-7-deazaguanine synthase OS=Desulfosporosinus meridiei (strain ATCC BAA-275 / DS M 13257 / NCIMB 13706 / S10) OX=768704 GN=queC PE=3 SV= 1
MNQSALVVFSGGQDSTTCLFWAMKTFERVEAVTFNYNQRHKSEIDCARKIAEEFNIPHMVIDMSLLNQLAPNALTRTELEIKTGEEGQPPTTFVDGRNLLFLSFAAVVAKQKGIKHIVTGVCETDFSGYPDCRDIFIKSLNVTLNLAMDYSFVIDTPLMWIDKAETWELADQLGHLEYVQENTLTCYNGIMGEGCGDCPACKLRNAGLKKYLAKKEQST

SEQ ID NO: 37878 - protein, 230 aa, Desulfosporosinus orientis
  misc_feature (1)..(230): tr|G7WDT2|G7WDT2_DESOD 7-cyano-7-deazaguanine synthase OS=Desulfosporosinus orientis (strain ATCC 19365 / DSM 765 / NCIMB 8382 / VKM B-1628) OX=768706 GN=queC PE=3 S V=1
MAGIVLLSGGLDSTVALALYLEKNRLDLALTFDYGQRARIQEISAAQKIAEHYQLAHRVVPIPFLQEQTRSALVNRSEDLPLVDYSKLDDLQGQALASARQVWVPNRNGLFLNIGAVFAENMGDAPVLITGFNREEAATFPDNSLEFMEAMNRSLSFSTQNKVTVVSPTSVYTKKEIVSEGLRLQVPWQYIWSCYESGERVCGQCESCQRLKRALLNNQAQDLVQELFGA

SEQ ID NO: 37879 - protein, 230 aa, Desulfosporosinus sp.
  misc_feature (1)..(230): tr|A0A1C3F4M1|A0A1C3F4M1_9FIRM 7-cyano-7-deazaguanine s ynthase OS=Desulfosporosinus sp. BG OX=1633135 GN=queC PE=3 SV=1
MAGIALLSGGLDSTLAVALYLEKAGINLALTFDYGQRANEKEVSAARRIADYYNIPHKVIALPFLQEQTHSALVNRSEDLPLLKSDELDDLSRAQLSAHQVWVPNRNGLFMNIAAVYAENLGEPAELITGFNQEEAATFPDNSLEFIGAMNRCLSYSTQEKVTVVSPTSTLTKTEIVREGLRLKVPFEDIWSCYESKETICGQCESCQRLKRALHRNEAQGLVDQLFGAE

SEQ ID NO: 37880 - protein, 219 aa, Desulfosporosinus sp.
  misc_feature (1)..(219): tr|A0A101WRC1|A0A101WRC1_9FIRM 7-cyano-7-deazaguanine s ynthase OS=Desulfosporosinus sp. BRH_c37 OX=1734396 GN= queC PE=3 SV=1
MNQSALVVFSGGQDSTTCLFWAMKNFARVEAITFNYNQRHKAEIDCAIKIAQEFDVPHSVIDMSLLNQLAPNALTRHDLEIKASGSGELPTTFVDGRNLLFLSFAAVVAKQKGIHHIVTGVCETDFSGYPDCRDIFIKSLNVTLDLAMDYTFILDTPLMWIDKAETWELAEQLGRLEYVQHNTLTCYNGIIGVGCGNCPACKLRSAGLKKYLEKKEAVQ

SEQ ID NO: 37881 - protein, 220 aa, Desulfosporosinus youngiae
  misc_feature (1)..(220): tr|H5XXM9|H5XXM9_9FIRM 7-cyano-7-deazaguanine synthase OS=Desulfosporosinus youngiae DSM 17734 OX=768710 GN=qu eC PE=3 SV=1
MNRSALVVFSGGQDSTTCLFWAMENFEKVEAITFNYNQRHRAEIDCASKIAKELHIPHLVLDMSLLNQLAPNALTRNDLEIKSGDNGQLPNTFVDGRNLLFLSFAAVSAKQKGIRHIVTGVCETDFSGYPDCRDIFIKSLNVTLNLAMDYTFVIDTPLMWIDKADTWELADQLGKLEYIQKNTLTCYNGIMGVGCGECPACKLRSAGLEKYLQKKATHNL

SEQ ID NO: 37882 - protein, 219 aa, Desulfotalea psychrophila
  misc_feature (1)..(219): sp|Q6ARX9|QUEC_DESPS 7-cyano-7-deazaguanine synthase OS =Desulfotalea psychrophila (strain LSv54 / DSM 12343) O X=177439 GN=queC PE=3 SV=1
MVDSIIVLSGGMDSAVLLAQTLKEGKTAQAISFDYGSKHNDRELPMAVGLCEEFAIKHQIIKLPFIGELFSSSLLTGGEEIPDGAYGQENMKSTVVPFRNGIMLAIAAGYAESVQAGEVLLGSHSGDHHIYPDCRPEFNNAFAEAVNLGTDGQVAIRFPFSEMTKRDIGDLGRTLDLDFAKTWTCYKGGELHCGVCAACDERKEALRHPEGLDVTKYLV

SEQ ID NO: 37883 - protein, 219 aa, Desulfotignum phosphitoxidans
  misc_feature (1)..(219): tr|S0FWD4|S0FWD4_9DELT 7-cyano-7-deazaguanine synthase OS=Desulfotignum phosphitoxidans DSM 13687 OX=1286635 G N=queC PE=3 SV=1
MVDAVLVLSGGMDSAVLLAQTLNQGKTVEAVSFDYGSKHNARELPMARDLCAHFNIPHQVILLPFINALFSSSLLAGGETVPDGAYTAATMKSTVVPFRNGIMLAIAAGYAESINASQVLLGSHSGDHHIYPDCRPGFNSAFRDAVYIGTDKKVMVCFPFSGMDKRDIGDLGRKLDLDFTKTWTCYKGLALHCGTCGACNERKYALRHEEGLDATTYLA

SEQ ID NO: 37884 - protein, 270 aa, Desulfotignum phosphitoxidans
  misc_feature (1)..(270): tr|S0FY02|S0FY02_9DELT ExsB family protein OS=Desulfoti gnum phosphitoxidans DSM 13687 OX=1286635 GN=Dpo_4c0138 0 PE=4 SV=1
MTDESTSACDANKLTLKAGLKKLKTAAVAFSGGVDSAFLLAVAAESGLENLLAVTVESAFVTKQEIRQARQTAKDLGVAHQVVKLDILSHEQVTANTLARCYHCKNVVFSVIRRVADKNGITHVLHGVNTDDLGDFRPGLKAAEELGVRAPLVEAGFSKHRIRTCSRQMGLATWDLPSQSCLATRIPFFDVITEKALVRIDQAEQFLRSLGFFHVRVRCHGTVARIEIEAAAIEAMVAHRKQISVALKTIGFTFVSLDLDGYHTGKMNPS

SEQ ID NO: 37885 - protein, 234 aa, Desulfotomaculum aeronauticum
  misc_feature (1)..(234): tr|A0A1M6NES4|A0A1M6NES4_9FIRM 7-cyano-7-deazaguanine s ynthase OS=Desulfotomaculum aeronauticum DSM 10349 OX=1 121421 GN=queC PE=3 SV=1
MSSVVLLSGGLDSTVNLAYALTEGSVKLALTVNYGQLAAQQEIEAAGRLAKHYGIAHQIIELPWLQRITNTALVNQEQLLPEPSGDALDQYEQARQTAAAVWVPNRNGLFVNIAACFAENLHCHRVITGFNREEAATFPDNTPEFTQAATAAMKYSTANQVEVVSYTARLDKKEIVALGQRLGVPWELVWSCYRGGDAMCGKCESCQRLIRAFRYLNVDLPASLPKAGEGDSLC

SEQ ID NO: 37886 - protein, 42 aa, Desulfotomaculum aquiferis
  misc_feature (1)..(42): tr|A0A4Q2WIZ8|A0A4Q2WIZ8_9FIRM Uncharacterized protein OS=Desulfotomaculum aquiferis OX=1397668 GN=N752_13995 PE=4 SV=1
MKSVVLLSGGLDSAVCLAYAKTEGDVRLALTFNYGKGPQKRK

SEQ ID NO: 37887 - protein, 96 aa, Desulfotomaculum aquiferis
  misc_feature (1)..(96): tr|A0A4Q2WL10|A0A4Q2WL10_9FIRM 7-cyano-7-deazaguanine s ynthase OS=Desulfotomaculum aquiferis OX=1397668 GN=N75 2_13985 PE=3 SV=1
MRSNYLPDNTPEFAQAASAAMAFSTANQVKVLSYTGRLDKGEIVALGHRLGVPWQLLWSCYQAGENMCGRCESCRRFIRAFQAQGLAIPGLIQRGE

SEQ ID NO: 37888 - protein, 228 aa, Desulfotomaculum arcticum
  misc_feature (1)..(228): tr|A0A1I2QJK3|A0A1I2QJK3_9FIRM 7-cyano-7-deazaguanine s ynthase OS=Desulfotomaculum arcticum DSM 17038 OX=11214 24 GN=queC PE=3 SV=1
MKKSIVILSGGLDSTVCMSVAHSKGYELYPITFSYGQRHSREVEQAKKVAKYYSCARHLILDIGFFREIGASALTSQEIEVPTNRHIDDEIPLTYVPFRNAVFLSMAVGYAEAIGAEKIYIGVNALDYSGYPDCRPQFIKAFQEAVNLGSAAPQKGCPIAIETPLLSLTKAEIVKLGVKNGAPLHLTTSCYNGGEKACGICDSCQLRLKGFKEAGVEDPIDYEDYQQK

SEQ ID NO: 37889 - protein, 227 aa, Desulfotomaculum copahuensis
  misc_feature (1)..(227): tr|A0A1B7LE18|A0A1B7LE18_9FIRM 7-cyano-7-deazaguanine s ynthase OS=Desulfotomaculum copahuensis OX=1838280 GN=q ueC PE=3 SV=1
MKSVVLLSGGLDSTVSLAQALRESSVELCLTVDYGQRAAIREAGAARALAAYYHLHHQTVAVPFLQSLTCTALVNREFSVPRPDEEDLDDPQKAGETAALVWVPNRNGLLINIAACFAESLGCTRVVTGFNREEAVTFPDNSPAYVEAANRALSYSTANGVQVVSYTQRLNKVEIVRLGQRLGVPWHLIWSCYLGKELMCGQCESCRRLQRALKAVGIPFPGGREEI

SEQ ID NO: 37890 - protein, 229 aa, Desulfotomaculum ferrireducens
  misc_feature (1)..(229): tr|A0A1S6IWG7|A0A1S6IWG7_9FIRM 7-cyano-7-deazaguanine s ynthase OS=Desulfotomaculum ferrireducens OX=1833852 GN =queC PE=3 SV=1
MSSVVLLSGGLDSTVNLAYALTEGPVKLALTINYGQLAANQEIAAASRLAKYYHIPHRVIELPWLQQITNTALVNQGQTLPEPTTEALDQYEQASKSAAAVWVPNRNGLFVNIAACFAESLQCQRVITGFNGEEAATFPDNTPEFTEAVSAAMKYSTANQVKVLSYTARMTKKEIVALGQRLGVPWELVWSCYRGDHTMCGKCESCQRLMRAFRYLNLDLPAQFAKGEG

SEQ ID NO: 37891 - protein, 171 aa, Desulfotomaculum hydrothermale
  misc_feature (1)..(171): tr|K8DXB3|K8DXB3_9FIRM 7-cyano-7-deazaguanine synthase OS=Desulfotomaculum hydrothermale Lam5 = DSM 18033 OX=1 121428 GN=DESHY_110064 PE=3 SV=1
MDSVVLLSGGLDSTVNLAYALTEGSVKLALTMDYGQRAARREIKAAAALAGYYNIRHQVVELPWLAQITATSLVKEEGSLPEPAAEELDNPDVTQKTAAAVWVPNRNGLFINIAACFAESLNCGQVVAGFNREEAATFPDNTPEFAAAAGKALAYATANQVRVSQLYQPLV

SEQ ID NO: 37892 - protein, 228 aa, Desulfotomaculum nigrificans
  misc_feature (1)..(228): tr|F6B4U3|F6B4U3_DESCC 7-cyano-7-deazaguanine synthase OS=Desulfotomaculum nigrificans (strain DSM 14880 / VKM B-2319 / CO-1-SRB) OX=868595 GN=queC PE=3 SV=1
MKSIVLLSGGLDSAVCLAYGLTETKVELALTFNYGQRSATREIQAAAALANYYGVKHRVIDLPWLAEITTTSLVNEEENIPEPMGPELDYMPTAKATAAAVWVPNRNGLFVNIAACFAETLNCQLVVAGFNREEAATFPDNTPEFVTAASTAMAYSTANQVKVVSFTNRLNKKEIVALGHRLGVPWDLIWSCYHGGDKMCGRCESCQRMMRAFTSQGLDLPATLVYNG

SEQ ID NO: 37893 - protein, 232 aa, Desulfotomaculum profundi
  misc_feature (1)..(232): tr|A0A2C6MEX8|A0A2C6MEX8_9FIRM 7-cyano-7-deazaguanine s ynthase OS=Desulfotomaculum profundi OX=1383067 GN=queC PE=3 SV=1
MNSVVLLSGGLDSAVNLAYALTEGRVELALTMNYGQRAAEKEIEAAGQLARHYNIPHRVIELPWVAQITQTALVSRDDTLPEPTAGELDDMNAASKTAAAVWVPNRNGLFVNIAACFAEALKCGQVVTGFNREEAATFPDNTPEFAMAASRAMEYSTANQVKVISYTNRLDKKEIVALGDRLRVPWDFIWSCYRGETQMCGRCESCRRMIRAFTSLNIDLPAALKNNQAGGE

SEQ ID NO: 37894 - protein, 231 aa, Desulfotomaculum putei
  misc_feature (1)..(231): tr|A0A1M4T169|A0A1M4T169_9FIRM 7-cyano-7-deazaguanine s ynthase OS=Desulfotomaculum putei DSM 12395 OX=1121429 GN=queC PE=3 SV=1
MNSVVLLSGGLDSAVNLAYALTEGKVKLALTMNYGQHAANKEIDAAAALARHYDIPHRVIELPWLAQITQTALVSNQNALPEPSAEELDNMDAAHKTAAAVWVPNRNGLFVNIAACFAETLNCGLVVAGFNREEAATFPDNTPEFAAAASRAMAYSTSNQVKVISYTNRLDKKEIVALGDRLGVPWDFIWSCYRGEEQMCGKCESCRRMMRAFTSLNINLPAALKNRAGGE

SEQ ID NO: 37895 - protein, 228 aa, Desulfotomaculum reducens
  misc_feature (1)..(228): sp|A4J5C7|QUEC_DESRM 7-cyano-7-deazaguanine synthase OS =Desulfotomaculum reducens (strain MI-1) OX=349161 GN=q ueC PE=3 SV=1
MNSVVLLSGGLDSAVNLAFARTEGNVKLALTINYRQRAAHKEIAAAAQLARYYAIPHRVIELPWLAEITKTALVRSESQLPEPKTEELDQLELAGKTAAEVWVPNRNGLFVNIAACFAETLHCEIVVAGFNCEEAATFPDNTPEFALAASAAMQYSTANQVKVLSYTGRLNKKDIVALGQRLQLPWELIWSCYRGEALMCGKCESCQRMIRAFHSLGLNLPQNFLMTE

SEQ ID NO: 37896 - protein, 238 aa, Desulfotomaculum ruminis
  misc_feature (1)..(238): tr|F6DLC0|F6DLC0_DESRL 7-cyano-7-deazaguanine synthase OS=Desulfotomaculum ruminis (strain ATCC 23193 / DSM 21 54 / NCIMB 8452 / DL) OX=696281 GN=queC PE=3 SV=1
MLKAVVLLSGGLDSAVCLAYARTEASVELALTMDYGQRSAEKEIAAAAQLARYYQIPHKVIALPWLAEITHTALVQREEDLPEPAAADLDNLELGNQTAAAVWVPNRNGLFLNLAACFAESLGCSLVIAGFNREEAATFPDNTPEFTLAATAAMAYSTANKVKVVSYTGHLDKGEIVALGNRLGVPWESIWSCYRGESSMCGSCESCRRLIRAFATAGLTLPASLKDFATTGGEANAG

SEQ ID NO: 37897 - protein, 221 aa, Desulfotomaculum sp.
  misc_feature (1)..(221): tr|A0A3C2C495|A0A3C2C495_9FIRM 7-cyano-7-deazaguanine s ynthase OS=Desulfotomaculum sp. OX=41211 GN=queC PE=3 S V=1
MRSVVLLSGGLDSAVSLAHALREGMVKLCLTMDYGQRAATREISAAAALADYYDIEHRVVELPFLREVTSTALVNRSTVVPEPVDEILDDPVHAKASAAAVWVPNRNGLFINIAASFAEAMNCQLVVTGFNKEEALSFPDNSAAFVSKVNDALAYSTANQVRVISYTQRLSKIEIVRLGQRLQVPWRLLWSCYYGGRTMCGNCESCRRFFRAMEAAGLAGY

SEQ ID NO: 37898 - protein, 218 aa, Desulfotomaculum sp.
  misc_feature (1)..(218): tr|A0A358QWC0|A0A358QWC0_9FIRM 7-cyano-7-deazaguanine s ynthase OS=Desulfotomaculum sp. OX=41211 GN=queC PE=3 S V=1
MSSIVLLSGGLDSAVSLAQALREGEVKLCLTFAYGQRAAAREAAASSALAQHYGLDHRVIELPFLRSITRTSLVNLEEDVPLPGDGDLDSCAKSEESAKAVWVPNRNGIFINIAAGFAESMGAGQVVTGFNAEEAKTFPDNSRAYLQAASQALCYSTLSGVRVLSYTMLLDKAGIVKLGRRLGVPLGIVWPCYFGGEELCGRCESCKRYFRALEAAGE

SEQ ID NO: 37899 - protein, 235 aa, Desulfovibrio carbinolicus
  misc_feature (1)..(235): tr|A0A4V0YQQ3|A0A4V0YQQ3_9DELT 7-cyano-7-deazaguanine s ynthase OS=Desulfovibrio carbinolicus OX=296842 GN=queC PE=3 SV=1
MTTDIQKKAVVLFSGGLDSTTCLAVARRDGFLPCALSFEYGQRHKVELEAARRVAKAMAVTSHLILPLPLGAIGGSALTADIDVPKDRDIGEMEADIPVTYVPARNTIFLSMALGWAEVLGASDIYIGVNALDYSGYPDCRPEFIGAFEAMANLAVKEAVEGRLSIRIHTPLLHLSKAGIVELGTSLGVDYGLTHSCYDPDPDGLACGRCDSCLLRKKGFEEAGVADPTRYRPSL

SEQ ID NO: 37900 - protein, 201 aa, Desulfovibrio carbinoliphilus
  misc_feature (1)..(201): tr|G7QAY2|G7QAY2_9DELT 7-cyano-7-deazaguanine synthase OS=Desulfovibrio carbinoliphilus subsp. oakridgensis OX =694327 GN=DFW101_2318 PE=3 SV=1
MVKNSAILLSGGMDSTSLAFWKKPNFAFTIDYGQKAAMAEIRAARQVAKEIGISHDTIAIDCSSLGSGDMAMAAPLPNAPSTDWWPFRNQLLITLAAMKAICRNINLLYIGLVKSDSSYKDGCSDFVDKISRTLSFQEGNIEVMAPAIDMTAAELVNMSKIPRTLLAWSHSCHVSDFACGRCRGCNKHRLVMEECYGKESC

SEQ ID NO: 37901 - protein, 233 aa, Desulfovibrio carbinoliphilus
  misc_feature (1)..(233): tr|G7QC35|G7QC35_9DELT 7-cyano-7-deazaguanine synthase OS=Desulfovibrio carbinoliphilus subsp. oakridgensis OX =694327 GN=queC PE=3 SV=1
MTAQPKAVVLFSGGLDSTTCLAVARSEGFLPCALSFEYGQRHSVELLAARRVAAALDVHAHLILPLPLGAIGGSALTADIDVPKDRDPATMETEIPATYVPARNTIFLSLALGWAEVLGAEDIFIGVNALDYSGYPDCRPQFIAAFEAMANLAVKEAVEGRLRIRIHTPLLHLTKAGIVRLGTSLGVDFGLTHSCYDPTEEGLACGRCDSCLLRKKGFEEADIQDPTRYRPSL

SEQ ID NO: 37902 - protein, 234 aa, Desulfovibrio desulfuricans
  misc_feature (1)..(234): tr|A0A1M6LB45|A0A1M6LB45_DESDE 7-cyano-7-deazaguanine s ynthase OS=Desulfovibrio desulfuricans OX=876 GN=queC P E=3 SV=1
MNNSALVIFSGGQDSTTCLAWALERFDSVATIGFSYGQRHSIEMDCRKNVLSEIRDIRKNWGQRLTHDEVLEISLFNEIGGTALTEEVEIQMGENGLPTTFVPGRNLVFLTAASAYAYRQGIRHIIMGVCETDFSGYPDCRDDTIKAMQVALNLGMESRFVIHTPLMWIDKAATWTMADELGGKPFVNLVREHTHTCYLGDRTELHAWGYGCGTCPACELRAKGWEQFEKGKQK

SEQ ID NO: 37903 - protein, 258 aa, Desulfovibrio desulfuricans
  misc_feature (1)..(258): tr|A0A1K1MMK7|A0A1K1MMK7_DESDE 7-cyano-7-deazaguanine s ynthase OS=Desulfovibrio desulfuricans OX=876 GN=queC P E=3 SV=1
MSRQSPGRTTSSPLADQTALVIFSGGQDSATCLAWALDRFARVRTLGFDYGQRHAVELACRQNLREKLATLNPQWAARLDADCLLDIGLFRQLANTALTSTSPIEDKPEGLPNTFVPGRNLIFILHAAAWAYGLDIRHMVLGVCQSDSSGYPDCRDDSIKAMQVALNVGMDANFVLHTPLMWRSKKDAWTLAEVLGGANLVDLIVEESHTCYEGQRGQRHPWGYGCGQCPACRLRAAGYTEYLTEKSEAKERVCPKSN

SEQ ID NO: 37904 - protein, 252 aa, Desulfovibrio fairfieldensis
  misc_feature (1)..(252): tr|A0A109W484|A0A109W484_9DELT 7-cyano-7-deazaguanine s ynthase OS=Desulfovibrio fairfieldensis OX=44742 GN=que C PE=3 SV=1
MSTVSPSPLQQEQALVIFSGGQDSATCLAWALSRFERVQTLGFDYGQRHNVELACRQRLRAALADLDPLWASRLGPDTLLNVDIFRQLADTALTSEAPIAADGPGGLPTTFVPGRNLLFILHAAVWAYAKNIRHLILGVCQSDSSGYPDCRDDSIKAMQVALNCGMDSRFVLHTPLMWLSKRGAWELAESLGGTALVDLILEESHTCYAGERGRRYDWGYGCGVCPACRLRASGYAAYREARKNGEQGRTEV

SEQ ID NO: 37905 - protein, 233 aa, Desulfovibrio fructosivorans
  misc_feature (1)..(233): tr|E1JX68|E1JX68_DESFR 7-cyano-7-deazaguanine synthase OS=Desulfovibrio fructosivorans JJ OX=596151 GN=queC PE =3 SV=1
MTTPEKKAVVLFSGGLDSTTCLAVAREEGFAPCALSFAYGQRHEVELQAAKRVAAAMNVAAHLVLPLPLGAIGGSALTADIAVPKDRDVAAMEAEIPVTYVPARNTIFLSMALGWAEVLGAQDIYIGVNALDYSGYPDCRPQFVAAFEAMANLAVKEAVEGHLRISIHTPLLHLTKADIVRLGTRLGVDYGLTHSCYDPDPSGLACGRCDSCLLRKKGFAEAGIPDPTRYTPA

SEQ ID NO: 37906 - protein, 182 aa, Desulfovibrio fructosivorans
  misc_feature (1)..(182): tr|E1JT92|E1JT92_DESFR 7-cyano-7-deazaguanine synthase OS=Desulfovibrio fructosivorans JJ OX=596151 GN=DesfrDR AFT_0841 PE=3 SV=1
MKKVYVLLSGGIDSSACAHFYQQADFLVEAIFFSYGQAASAKEEIASKNIADHLGIHLTKYNLETTQTFSTGELIGRNAFFIFSAIFFSRITNGSISLGIHAGTTYYDCSAIFFDRINKLVNEYTNGCVNIQAPFLKWTKNDIYQYFLSTKIPIELTYSCELGSDYPCGRCASCRDRKALGC

SEQ ID NO: 37907 - protein, 273 aa, Desulfovibrio legallii
  misc_feature (1)..(273): tr|A0A1G7JPC2|A0A1G7JPC2_9DELT 7-cyano-7-deazaguanine s ynthase OS=Desulfovibrio legallii OX=571438 GN=queC PE= 3 SV=1
MTAMHNASLVPPSPSSGPAANPQPAALPGALADQQALVIFSGGQDSATCLAWALSRFGRVLTLGFDYGQRHAVELSCRQALREGLAALNPQWAARLGSDTLLRLDIFRDLANTALTSDAPIEEHGPGGLPNTFVPGRNLIFILHAAAWAYARQIRHLVLGVCQSDYSGYPDCRDDSVKAMQVAVNTGMDANYVLHTPLMWRSKKDAWELAEQLGGEHLVDMIVERSHTCYLGERGERHPWGYGCGNCPACRLRAAGYAAYVRAKAEAGAAAHD

SEQ ID NO: 37908 - protein, 235 aa, Desulfovibrio magneticus
  misc_feature (1)..(235): tr|K6GQW2|K6GQW2_9DELT 7-cyano-7-deazaguanine synthase OS=Desulfovibrio magneticus str. Maddingley MBC34 OX=12 06767 GN=queC PE=3 SV=1
MTTDVQKKAVVLFSGGLDSTTCLAVARRDGFTPCALSFEYGQRHKVELEAARRVAKAMAVATHLILPLPLGAIGGSALTADIDVPKDRDVNEMEADIPVTYVPARNTIFLSMALGWAEVLGASDIYIGVNALDYSGYPDCRPEFIGAFTAMANLAVKEAVEGRLSIRIHTPLLHLSKAGIVELGTSLGVDYGLTHSCYDPDPDGLACGRCDSCLLRKKGFEEAGVADPTRYRPSL

SEQ ID NO: 37909 - protein, 235 aa, Desulfovibrio magneticus
  misc_feature (1)..(235): sp|C4XPJ3|QUEC_DESMR 7-cyano-7-deazaguanine synthase OS =Desulfovibrio magneticus (strain ATCC 700980 / DSM 137 31 / RS-1) OX=573370 GN=queC PE=3 SV=1
MTTDAPQKAVVLFSGGLDSTTCLAVARRDGFLPCALSFEYGQRHKVELEAARRVAKAMAVTTHLILPLPLGSIGGSALTADIDVPKDRDIGEMEADIPVTYVPARNTIFLSMALGWAEVLGASDIYIGVNALDYSGYPDCRPEFIAAFEAMANLAVKEAVEGRLAIRIHTPLLHLSKAGIVELGTSLGVDYGLTHSCYDPAPDGLACGRCDSCLLRRKGFEEAGVADPTRYRPSL

SEQ ID NO: 37910 - protein, 233 aa, Desulfovibrio mexicanus
  misc_feature (1)..(233): tr|A0A238Z463|A0A238Z463_9DELT 7-cyano-7-deazaguanine s ynthase OS=Desulfovibrio mexicanus OX=147047 GN=queC PE =3 SV=1
MTPTPIGALVVFSGGQDSTTCLAWALSRFDRVETLGFDYGQRHSIELECREAVLAALRGQRPDWAQKLGSDTLLSLDVFRQLGETALTHDVEISMTATGLPSTFVPGRNLVFLTLAGAQAYRRGLKHLVTGVCETDYSGYPDCRDDTMKALQVALNLGMETRLVIDTPLMWLTKGQTWALARDLGGQPFVDLILEHTHTCYRGERGQRHPWGYGCGQCPACQLRAAGWRDYSE

SEQ ID NO: 37911 - protein, 242 aa, Desulfovibrio piger
  misc_feature (1)..(242): tr|A0A1K1LDS0|A0A1K1LDS0_9DELT 7-cyano-7-deazaguanine s ynthase OS=Desulfovibrio piger OX=901 GN=queC PE=3 SV=1
MSHQPPLSDRQALVIFSGGQDSATCLAWALSRFAAVRTLGFDYGQRHSVELACRGKVRSAIAALRAEWRDRLGPDTLLDIGLFRQLADTALTSDMPIEQADGGIPNTFVPGRNLLFIMHAAAWAYGKGIRHLVLGVCESDSSGYPDCRDDSIKAMQVALNAGMDSHFVLHTPLMWRDKADTWRLAEELGGMPLVDCILEQSHTCYEGTRRERHPWGYGCGRCPACKLRAHGYEVYLSRYHRK

SEQ ID NO: 37912 - protein, 242 aa, Desulfovibrio piger
  misc_feature (1)..(242): tr|B6WQF2|B6WQF2_9DELT 7-cyano-7-deazaguanine synthase OS=Desulfovibrio piger ATCC 29098 OX=411464 GN=queC PE= 3 SV=1
MSHQPPLSDQQALVIFSGGQDSATCLAWALSRFARVCTLGFDYGQRHSVELECRGKVRSAIAALKPEWQDRLGPDTLLDISLFRQLADTALTSDMPIEQEGEGIPNTFVPGRNLLFIMHAAAWAYGKDIRHLVLGVCESDSSGYPDCRDDSIKAMQVALNTGMDSHFVLHTPLMWLDKADTWRLAEDLGGMPLVDCILEQSHTCYEGTRGERYPWGYGCGRCPACKLRAHGYEVYLSRYHQK

SEQ ID NO: 37913 - protein, 269 aa, Desulfovibrio salexigens
  misc_feature (1)..(269): tr|C6BXJ5|C6BXJ5_DESAD ExsB family protein OS=Desulfovi brio salexigens (strain ATCC 14822 / DSM 2638 / NCIB 84 03 / VKM B-1763) OX=526222 GN=Desal_0486 PE=4 SV=1
MDRLALKYKTLLGILAETGGAVIAFSGGVDSTLLLHTAKEALGDKAIAASISTPYVPQWEQGEAKEFAEQMEVKHVVVDMGFPEELRMNPPEHCYTCKNILFSKLLEIAQENDIEHVLEGTNIDDLSDYRPGIKALRELEIRSPFVEAELTKQEIRDISRRFNLPTWNKPSFACLLSRMPVDVEVTDLALQQVEQAEVFLMKIGFPAVRVRHHGEVARIEVPADKIQDVINANEIHGINNKLKEFGYRHVTLDLGGYKMGSLNKNSKIN

SEQ ID NO: 37914 - protein, 260 aa, Desulfovibrio sp.
  misc_feature (1)..(260): tr|A0A231NZL1|A0A231NZL1_9DELT 7-cyano-7-deazaguanine s ynthase OS=Desulfovibrio sp. MES5 OX=1899016 GN=queC PE =3 SV=1
MSGWLEQNDAAHGPLADQTALVIFSGGQDSATCLAWALERFGKVRTLGFDYGQRHSVELACRQNLRQGMAALKPQWEQRLGPDCLLDIDLFRQLANTALTSSAPIEEQGPDGLPNTFVPGRNLIFILHAAAWAYGLGIRHMVLGVCQSDYSGYPDCRDDSIKAMQVALNTGMGASYVLHTPLMWRSKKDAWTLASNLGGSALVDLIVEESHTCYAGQRGDRHTWGYGCGQCPACRLRAAGHAEYVAARQTESEKTCPKNS

SEQ ID NO: 37915 - protein, 264 aa, Desulfovibrio sp.
  misc_feature (1)..(264): tr|A0A2E3R6C2|A0A2E3R6C2_9DELT Uncharacterized protein OS=Desulfovibrio sp. OX=885 GN=CL942_06850 PE=4 SV=1
  misc_feature (188)..(188): Xaa can be any naturally occurring amino acid
MTTTTTKLFFTGGWDSTFRLLELLVAEKRPVQPIYVIDPDRWSLREEQKAMADIKTTVVERFPEAANLLKPTMIIDKTDLKPDPAFKACELKLLETNIFGSQYEWLGRAAKQFGLEGAEVCVEYSEIKVAGCYVTINPLVEQIEDGSYYFAEEHKNTLEYEFFGMYSFPVMRTSKAEMMEKAEKYGFXDILEMSWFCHKPNFLGQACGMCNPCKDAMTMEMTHRVPPFGRFCYHLKRNLNPRTHLQHFPKVYDYLRTLKRKLKG

SEQ ID NO: 37916 - protein, 242 aa, Desulfovibrio vulgaris
  misc_feature (1)..(242): sp|Q728E4|QUEC_DESVH 7-cyano-7-deazaguanine synthase OS =Desulfovibrio vulgaris (strain Hildenborough / ATCC 29 579 / DSM 644 / NCIMB 8303) OX=882 GN=queC PE=3 SV=1
MPSCDGNALVIFSGGQDSTTCLGWALNRFRTVATIGFHYGQRHDVEMQCRQDVLAAIGDVRPGWKAHLGTDTVVEMGLFRELGETALTHDVAIEMGRNGLPSTFVPGRNLMFLTAAAACAYRQGIRHLVLGVCETDFSGYPDCRDDAMKAMQVALNLGMESRFVVHTPLMWLTKAQTWDMARDEGGQDFVELVLERSHTCYKGVRDVRHPWGYGCGTCPACELRRAGWDAYVAGHAVHGEGR

SEQ ID NO: 37917 - protein, 242 aa, Desulfovibrio vulgaris; identical to SEQ ID NO: 37916
  misc_feature (1)..(242): sp|A1VB03|QUEC_DESVV 7-cyano-7-deazaguanine synthase OS =Desulfovibrio vulgaris subsp. vulgaris (strain DP4) OX =391774 GN=queC PE=3 SV=1

SEQ ID NO: 37918 - protein, 234 aa, Desulfovibrionaceae bacterium
  misc_feature (1)..(234): tr|A0A1J4SMD4|A0A1J4SMD4_9DELT 7-cyano-7-deazaguanine s ynthase OS=Desulfovibrionaceae bacterium CG1_02_65_16 O X=1805130 GN=queC PE=3 SV=1
MAQENSALVVFSGGQDSTTCLAWALSRFERVETIGFDYGQRHAVELSCRSVVLERLRALRPDWAGKLGGDALLSMDVFRQLGETALTHDVAISMNENGLPSTFVPGRNLVFLTLAGAQAYRRGIKRIVTGVCETDFSGYPDCRDDTMKALQVALNLGMQTRLVIDTPLMWRTKAQTWKLALKLGGAALVELILEHTHTCYRGERGERHTWGYGCGDCPACLLRAKGYAEYLRDE

SEQ ID NO: 37919 - protein, 239 aa, Desulfovibrionales bacterium
  misc_feature (1)..(239): tr|A0A1F9PYD2|A0A1F9PYD2_9DELT 7-cyano-7-deazaguanine s ynthase OS=Desulfovibrionales bacterium GWA2_65_9 OX=17 97915 GN=queC PE=3 SV=1
MEHTTDSALVVFSGGQDSATCLAWALSRFGRVETMGFDYGQRHAVELACRTEVLARLRALSPPWGTKLGPDTLLTLDAFQQLGETALTHDVEITMTASGLPSTFVPGRNLIFLTLAAAQAYRRGIKHIVTGVCETDFSGYPDCRDDTMKALQVAVNLGMQARLVIDTPLMWLTKAQTWGLAHDLGGQALVELILEHTHTCYQGSRGTRHAWGYGCGACPACELRAAGYAGYRERSASGG

SEQ ID NO: 37920 - protein, 238 aa, Desulfurella acetivorans
  misc_feature (1)..(238): tr|W0JEI5|W0JEI5_DESAE 7-cyano-7-deazaguanine synthase OS=Desulfurella acetivorans A63 OX=694431 GN=queC PE=3 SV=1
MKKCLLIFSGGLDSTTCLFWALDYYDEVHTITFDYHQRHVIEKKMALETIKLAKSIKQKDIDYFEFNIDLSKIGASALTDFSINVPKNRNIDNQIPITYVPFRNGIFLAISVAYAEKLDISNIIGGWNVLDYSGYPDCRPDFLESFRQAATLGTKIGQTKPFNIIAPLIGLKKSEIIKLGKKHNADYSYAYSCYEGNEIPCGQCDSCILRAKGFKEAGFVDDYMVRLATSSKETKSHP

SEQ ID NO: 37921 - protein, 235 aa, Desulfurella amilsii
  misc_feature (1)..(235): tr|A0A1X4XV35|A0A1X4XV35_9DELT 7-cyano-7-deazaguanine s ynthase OS=Desulfurella amilsii OX=1562698 GN=queC PE=3 SV=1
MLIFSGGLDSTTCLFWALDNYDKVYTITFDYNQRHIIEKEMAQKTIELVKSIKKKEISYFEFKIDLSTMGASALTDFSIDVPKNRDVNSNEIPITYVPFRNGIFLSVAVAYAETLDITDIIGGWNVIDYSGYPDCRPNFLKSFQQTATLGTKIGQKKPFNIIAPLIGLKKSQIIKLGKKHNADYSFAYSCYEGREEFCGECDSCILRAQGFKEAGYLDDYLVRVATSLKGTKLHP

SEQ ID NO: 37922 - protein, 238 aa, Desulfurella multipotens
  misc_feature (1)..(238): tr|A0A1G6MJ67|A0A1G6MJ67_9DELT 7-cyano-7-deazaguanine s ynthase OS=Desulfurella multipotens OX=79269 GN=queC PE =3 SV=1
MKKCLLIFSGGLDSTTCLFWALDYYDEVHTITFDYHQRHVIEKKMALETIKLAKSIKQKDIDYFEFNIDLSKIGASALTDFSINVPKNRNIDNQIPITYVPFRNGIFLAISVAYAEKLDISNIIGGWNVLDYSGYPDCRPDFLESFRQAATLGTKIGQTKPFNIIAPLIGLKKSEIIKLGKKHNADYSYAYSCYEGNEIPCGQCDSCILRAKGFEEAGFVDDYMVRLATSSKETKSHP

SEQ ID NO: 37923 - protein, 238 aa, Desulfurella sp.; identical to SEQ ID NO: 37922
  misc_feature (1)..(238): tr|A0A2N7PVV3|A0A2N7PVV3_9DELT 7-cyano-7-deazaguanine s ynthase OS=Desulfurella sp. OX=1962857 GN=queC PE=3 SV= 1

SEQ ID NO: 37924 - protein, 149 aa, Desulfurellales bacterium
  misc_feature (1)..(149): tr|A0A5C7Q9Q6|A0A5C7Q9Q6_9DELT 7-cyano-7-deazaguanine s ynthase (Fragment) OS=Desulfurellales bacterium OX=2482 794 GN=E6Q97_08630 PE=3 SV=1
MNENDRSVVVLSGGMDSTTALYVAIGESAPIALSFDYGQRHRKELKSAALICADLGIEHHIIDLTSLTQLIATSALTDPNHQVPEGHYADDNMKQTVVPNRNAIMANIAIGVAVARKARYVFLGVHAGDHAVYPDCRPEFIDSLQSLAE

SEQ ID NO: 37925 - protein, 89 aa, Desulfurellales bacterium
  misc_feature (1)..(89): tr|A0A5C7Q6C9|A0A5C7Q6C9_9DELT 7-cyano-7-deazaguanine s ynthase (Fragment) OS=Desulfurellales bacterium OX=2482 794 GN=E6Q97_10380 PE=3 SV=1
SLAEVANQGFIEPFFEIRTPFIYKTKADIVALGVKLGVPYEKTWTCYNGGDVHCGRCATCVERLEAFDLAGAVDPVTYEDSEVWKEFVK

SEQ ID NO: 37926 - protein, 241 aa, Desulfuribacillus alkaliarsenatis
  misc_feature (1)..(241): tr|A0A1E5G5Z2|A0A1E5G5Z2_9BACL 7-cyano-7-deazaguanine s ynthase OS=Desulfuribacillus alkaliarsenatis OX=766136 GN=queC PE=3 SV=1
MKQGQQSTEKSRLAVVLLSSGLDSVVSMAMALDQGYDVELTITVDYGQVAAKKEIEQAVLLTRHYGLKHKVIDIKSMMADITSGLLTGTIPAIDESELDNFEIASKTAEKVWVPNRNGLLINLAAMFAESLGCSRVITGFNVEEASTFPDNSVEFVQAINNSLKYSTANSVQVLSLTQELNKNEIIEQAIELHVPLELIWSCYYGGQRMCGTCESCKRLYRALKPHRDLTNVIKFSNGVTE

SEQ ID NO: 37927 - protein, 229 aa, Desulfuribacillus stibiiarsenatis
  misc_feature (1)..(229): tr|A0A1E5L7L1|A0A1E5L7L1_9BACL 7-cyano-7-deazaguanine s ynthase OS=Desulfuribacillus stibiiarsenatis OX=1390249 GN=queC PE=3 SV=1
MGQAAVILLSSGIDSFTSLAIAKEKGYEVQLALTVNYGQKAALREIMFAELICKHYGVPHKVLDVQGIMNGVTSGLTTNDVPNIAQDQLDDMDLTTRTAKKVWVPNRNGLLINIAATYAENLGCEWVITGFNREEAVTFPDNSDDFVHAINQSLYYSTSNHVQVISFTQSMTKQEIIDTAVNLQVPLEYVWSCYHGNELMCGTCESCQRLKRAISKYPMLVSSIKFTTE

SEQ ID NO: 37928 - protein, 216 aa, Desulfurispirillum indicum
  misc_feature (1)..(216): tr|E6W4G1|E6W4G1_DESIS 7-cyano-7-deazaguanine synthase OS=Desulfurispirillum indicum (strain ATCC BAA-1389 / S 5) OX=653733 GN=Selin_1200 PE=3 SV=1
MKPSAVALLSGGMDSTCALLKYLHDGGVVRHALTMAYGQLAQEKEIAAAAAICDHLGIPHETVELPFLARLSNSSLNRGTIPENIDINDTRQSEQSARSVWVPNRNGLFINIAAVFAESMGCQHIITGFNVEEAQTFPDNSRDFLMAANGALHFSTLDTLFVVSGTIDMDKKEIAGYLMRNAFPMELIWSCYKGEEVPCGTCESCLRMKRAIEEAQ

SEQ ID NO: 37929 - protein, 258 aa, Desulfurivibrio alkaliphilus
  misc_feature (1)..(258): tr|D6Z744|D6Z744_DESAT 7-cyano-7-deazaguanine synthase OS=Desulfurivibrio alkaliphilus (strain DSM 19089 / UNI QEM U267 / AHT2) OX=589865 GN=queC PE=3 SV=1
MTDGITNSVLPDAKGQPAVVLLSGGLDSTTVLALAKAAGYRCHCLSFRYGQRHTQELELARANARHWGAARHLILNIELDAIGGSALTGDELEVPKDNLSPLDSPDGAETDAPGMAGEVPVTYVPGRNTIFLAYAASWAEVLGARDIFIGVNAVDFSGYPDCRPDYLEALAAALNLGSQCGREGRPFRLQAPLLHLSKAEIIAKGLALGVDYARTHSCYDPDQQHRACGRCDACILRRRGFAAAGCPDPTTYQPARSE

SEQ ID NO: 37930 - protein, 231 aa, Desulfurivibrio sp.
  misc_feature (1)..(231): tr|A0A3A6PBU4|A0A3A6PBU4_9DELT 7-cyano-7-deazaguanine s ynthase OS=Desulfurivibrio sp. OX=2093369 GN=queC PE=3 SV=1
MSTEKEKAVVLLSGGLDSTTVLAMAIAEGYACYCLSFSYGQRQTVELARARENARLLGAMDHLVLHVDLDKIGGSALTGDLAVPKNRSAGEMAAAIPVTYVPGRNTIFLSHAMAWAEVLGAFHLFIGINVLDYSGYPDCRPEYLAAFEKVANLGTRAGVESGRSFKIHAPLMHSTKKEIILKGKALGVDYSRTHSCYDPDSEGRACGRCDACQLRLKGFQEAGLVDPVDYQ

SEQ ID NO: 37931 - protein, 235 aa, Desulfurobacterium atlanticum
  misc_feature (1)..(235): tr|A0A238ZLQ0|A0A238ZLQ0_9BACT 7-cyano-7-deazaguanine s ynthase OS=Desulfurobacterium atlanticum OX=240169 GN=q ueC PE=3 SV=1
MSKCVVILSGGLDSTTVLYWAKKRFDEIFAITFFYGQRHSIEVEMAKRIAEKARVKEHKLFKVDLSQFGGSALTDKNIEVPEAHSVKEVLEREIPVTYVPFRNGIFISLAAAYAETKLCTNIAGGWNAVDFSGYPDCRPSFLKAMEEALNQGTKLGAEGRRWKIYAPLINLTKGDIIKLGLELGADYSYSISCYRGEEVPCGTCDSCILRAKGWQEVGMEDHLIKRLKMEGKIKE

SEQ ID NO: 37932 - protein, 237 aa, Desulfurobacterium indicum
  misc_feature (1)..(237): tr|A0A1R1MLL1|A0A1R1MLL1_9BACT 7-cyano-7-deazaguanine s ynthase OS=Desulfurobacterium indicum OX=1914305 GN=que C PE=3 SV=1
MNSCVVILSGGLDSTTVLYWAKKHFDDVYAITFFYGQRHNIEVEMARKIAENARVKEHKIFEIDLSRIGGSALTDKSIDVPEAHTVEEIKDRGIPITYVPFRNGIFISIAAAYAETKGCTDIAGGWNAVDYSGYPDCRPEFLKSMEETLNRGTKIGVEGVRWHIHAPLINLTKGEIIKLGLSLGADYSYSVSCYRGGEIPCGRCDSCVLRAKGWEEVGEEDHLIRRLKREGKIQERI

SEQ ID NO: 37933 - protein, 235 aa, Desulfurobacterium sp.
  misc_feature (1)..(235): tr|A0A432QUS5|A0A432QUS5_9BACT 7-cyano-7-deazaguanine s ynthase OS=Desulfurobacterium sp. OX=2004706 GN=queC PE =3 SV=1
MASAVVVFSGGLDSTTALYWAKRKFDKVYAITFYYGQRHSLEVEMAKITAKNAGVEEHLLFEVDLSKFGASALTDMSIEVPETKSIEEIKERGIPVTYVPFRNGVFIALAAAYAEAKGTTHLVGGWNAVDYSGYPDCRPEFLKAMEEVLNRGTKLGAEGKEWHIHAPLIHLTKGEIIKLGLELGADYSYSLSCYRGGEIPCMKCDSCILRAKGWAEVGVTDHLIERLRKEGKIAE

SEQ ID NO: 37934 - protein, 51 aa, Desulfurobacterium sp.
  misc_feature (1)..(51): tr|A0A432QVC2|A0A432QVC2_9BACT 7-cyano-7-deazaguanine s ynthase (Fragment) OS=Desulfurobacterium sp. OX=2004706 GN=DSY35_05140 PE=4 SV=1
MNIPIRDEIDEVEIPSTYVPARNIIFLSFAASYAEAVGARAIFIGANAIDY

SEQ ID NO: 37935 - protein, 233 aa, Desulfurobacterium thermolithotrophum
  misc_feature (1)..(233): tr|F0S1L5|F0S1L5_DESTD 7-cyano-7-deazaguanine synthase OS=Desulfurobacterium thermolithotrophum (strain DSM 11 699 / BSA) OX=868864 GN=queC PE=3 SV=1
MSSAIVILSGGLDSTTALYWAKKNFNKVFAITFYYGQRHSLEVEMARIIAKKAKVEEHILFEVDISKFGGSALTDKNLEVPETQSIEEIKERGIPITYVPFRNGIFLSIAAAYAETKNTTNLVGGWNAVDYSGYPDCRPEFLAAMEEALNKGTKLGSEGKSWKIHAPLINLTKGEIIKLGLSLGADYSYSISCYRGTEVPCGKCDSCVLRAKGWMEVGKEDHLIERLKREGKV

SEQ ID NO: 37936 - protein, 227 aa, Desulfuromonadaceae bacterium
  misc_feature (1)..(227): tr|A0A1G2WI71|A0A1G2WI71_9DELT 7-cyano-7-deazaguanine s ynthase OS=Desulfuromonadaceae bacterium GWB2_53_15 OX= 1801895 GN=queC PE=3 SV=1
MERKAVILYSGGLDSSTCLAIARSEGYVPCAISFSYGQRHSYELEVAKANARQLGASEHLVVDFDLRLMGGSALTADIDVPKQGVGDDIPVTYVPARNTIFLSFALGWAEVLGAFDIFIGVNALDYSGYPDCRPEYIAAYERMANLATKAGVEGKGQFRIHTPLISLTKAETIKQGVSLGVDYALTHSCYDPTPEGLSCGQCDSCRLRLKGFAEAGLVDPLQYVPGS

SEQ ID NO: 37937 - protein, 227 aa, Desulfuromonadaceae bacterium
  misc_feature (1)..(227): tr|A0A1G2VVU9|A0A1G2VVU9_9DELT 7-cyano-7-deazaguanine s ynthase OS=Desulfuromonadaceae bacterium GWC2_58_13 OX= 1801896 GN=queC PE=3 SV=1
MSNPKKAVVLYSGGLDSTTCMAIARDRGFAPCAMSFAYGQRHSIELDKAKEYAPRIGAVKHHLVEIDLRRIGGSALTSDLAVPKDGVQEGEIPVTYVPARNTIFLSFALGWAEVLGAFDIFIGVNALDYSGYPDCRPEYIAAFEAMANLATRAAVEGIGRYRIHTPLIDLSKADIIRRGLALGVDYALTHSCYDPTPAGLACGQCDSCRLRLKGFAEVGISDPVAYQ

SEQ ID NO: 37938 - protein, 227 aa, Desulfuromonadales bacterium; identical to SEQ ID NO: 37936
  misc_feature (1)..(227): tr|A0A1F9P776|A0A1F9P776_9DELT 7-cyano-7-deazaguanine s ynthase OS=Desulfuromonadales bacterium GWD2_54_10 OX=1 797917 GN=queC PE=3 SV=1

SEQ ID NO: 37939 - protein, 228 aa, Desulfuromonadales bacterium
  misc_feature (1)..(228): tr|A0A1E7H0R2|A0A1E7H0R2_9DELT 7-cyano-7-deazaguanine s ynthase OS=Desulfuromonadales bacterium C00003096 OX=18 69311 GN=queC PE=3 SV=1
MSKKAIILYSGGLDSTTCLAIARAEGFAPYTMSFDYGQRHTVELTKAALYAPQLGAVEHQLVNIDLRRIGGSALTSDLAVPKNSVDEGIPITYVPARNTIFLSFALAWAEVLGAFDIFIGVNALDYSGYPDCRPEYIAAYETMANLATKAGVEGEGRYRIHTPLIDLTKAEIIRRGLDLGVDYALTHSCYDPTSDGQACGACDSCRLRLKGFREAGVEDPVPYLQKEP

SEQ ID NO: 37940 - protein, 230 aa, Desulfuromonas acetexigens
  misc_feature (1)..(230): tr|A0A550JB88|A0A550JB88_9DELT 7-cyano-7-deazaguanine s ynthase OS=Desulfuromonas acetexigens OX=38815 GN=queC PE=3 SV=1
MPNRKKAVVLYSGGLDSTTCMAIAQAEGFAPYAMSFAYGQRHTVELDQARRYAPRMGAVEHQLVEIDLRRIGGSALTSTLEVPKEGVQEGEIPVTYVPARNTIFLSFALGWAEVLGAFDIYIGVNALDYSGYPDCRPEYIAAFETLANLATRAGVEGSGRYRIHTPLISLTKAEIIRKGLDLGVDYALTHSCYDPTPDGLACGRCDSCRLRLKGFAEAGVPDPVRYVSKA

SEQ ID NO: 37941 - protein, 227 aa, Desulfuromonas acetoxidans
  misc_feature (1)..(227): tr|Q1JZH4|Q1JZH4_DESA6 7-cyano-7-deazaguanine synthase OS=Desulfuromonas acetoxidans (strain DSM 684 / 11070) OX=281689 GN=queC PE=3 SV=1
MSKKAIVLYSGGLDSTTCLAWAKAQGMTPYALSFRYGQRHSIELEKAESFAPQMGAEQHLIVDIDLRKIGGSALTADIEVPKDRQIDEAIPVTYVPARNTIFLSYGLAWAEALGAFDIVIGVNALDYSGYPDCRPEFIEAYQNMANLATKAAVEGSGQYQIHTPLLHLSKADIIRMGTDLGVDYALTHSCYDPAPDGRACGRCDSCVLRLNGFAQAGQTDPVPYVEK

SEQ ID NO: 37942 - protein, 226 aa, Desulfuromonas soudanensis
  misc_feature (1)..(226): tr|A0A0M4D4I6|A0A0M4D4I6_9DELT 7-cyano-7-deazaguanine s ynthase OS=Desulfuromonas soudanensis OX=1603606 GN=que C PE=3 SV=1
MSKKAVILYSGGLDSTTCLAIARAEGFTPYAMSFAYGQRHSIEIEKARHNAPLIGAAEHQLVEIDLRRIGGSALTSDAAVPKGRDIDASIPVTYVPARNTIFLSFALAWAEVLGAFDIYIGVNALDYSGYPDCRPEYIAAFEAMANLATKAAVEGEGRYLIHTPLIAQSKGEIIRRGLALGVDYALTHSCYDPTPEGLACGECDSCVLRLKGFAEIGMADPAAYLR

SEQ ID NO: 37943 - protein, 230 aa, Desulfuromonas sp.
  misc_feature (1)..(230): tr|A0A2N6FGN1|A0A2N6FGN1_9DELT 7-cyano-7-deazaguanine s ynthase OS=Desulfuromonas sp. OX=892 GN=queC PE=3 SV=1
MLRLKKAVVLYSGGLDSTTCLAIARSEGFSPCALSFSYGQRHSVELVKAKEYAPRIGAVEHRVVDIDLRQFGGSALTADVEVPKGRPIDDAIPVTYVPARNTIFLSYALAWAEVLGANDIFIGVNALDYSGYPDCRPEYIAAYEAMANLATKSGVEQKGLKIHTPLISLTKAETITLGTSLGVDYSLTHSCYDPTADDLACGTCDSCQLRLKGFREAGYKDPVAYAIEVE

SEQ ID NO: 37944 - protein, 230 aa, Desulfuromonas sp.
  misc_feature (1)..(230): tr|A0A357YCV0|A0A357YCV0_9DELT 7-cyano-7-deazaguanine s ynthase OS=Desulfuromonas sp. OX=892 GN=queC PE=3 SV=1
MPKKAVVLYSGGLDSTTCMAIAREEGFAPYAISFSYGQRHSVEIEKARLHAPRLGAIEHLVVDFDYRLIGGSALTADIAVPKAGVGTDIPVTYVPARNTVFLSFALGWAEVLGAFDIFIGVNALDYSGYPDCRPEYIAAFETMANLATRASTEGRGSFHIRTPLINLTKAEIIHQGMDLGVDYGLTHSCYDPGADGLACGVCDSCRLRLKGFAEAGVSDPIPYAVTGGTP

SEQ ID NO: 37945 - protein, 227 aa, Desulfuromonas thiophila
  misc_feature (1)..(227): tr|A0A1G7CL66|A0A1G7CL66_9DELT 7-cyano-7-deazaguanine s ynthase OS=Desulfuromonas thiophila OX=57664 GN=queC PE =3 SV=1
MKKAVVLYSGGLDSTTCVALAQAAGCRVHALSFAYGQRHQIELEQARRFAGRLGISEHRIVSIDLRQFGGSALTADLEVPKDCCDEPGIPVTYVPARNTIFLSYALAWAEVLGCFDIYIGVNALDYSGYPDCRPEFIAAFEQMANLATRAAVEGQGHFRIHAPLLQLTKREIIETGLRLGVDYSLTHSCYDPDASGAACGRCDSCLLRLKGFREAGLTDPVRYQARG

SEQ ID NO: 37946 - protein, 223 aa, Desulfuromusa kysingii
  misc_feature (1)..(223): tr|A0A1H4DEA5|A0A1H4DEA5_9DELT 7-cyano-7-deazaguanine s ynthase OS=Desulfuromusa kysingii OX=37625 GN=queC PE=3 SV=1
MKKAVVLYSGGLDSTTCMAIAREQGFQPYALSFAYGQRHTVELDKARKYAPLIGAEEHMVIDIDLRKMGGSALTADIDVPKSGVCADEIPVTYVPARNTIFLSFALGWAEVLGASDIYIGVNALDYSGYPDCRPEFIQAFQQMANLATKAGVEGHPYQIHAPLLNLTKAQIIQQGLSLGVDYQLTHSCYDPTPEGLSCGQCDSCRLRLKGFADAGQEDPVSYV

SEQ ID NO: 37947 - protein, 234 aa, Dethiosulfatarculus sandiegensis
  misc_feature (1)..(234): tr|A0A0D2JDI9|A0A0D2JDI9_9DELT 7-cyano-7-deazaguanine s ynthase OS=Dethiosulfatarculus sandiegensis OX=1429043 GN=queC PE=3 SV=1
MTAKNNKRQAVVLLSGGLDSTTCLAIANDMGFTCHALSFRYGQRNFVELKSAARVAKILGAETHRILDLDLRIIGGSALTDELEVPKDRTEAEMESQVPVTYVPARNTLFLSLALGLAEVVGALDIFIGVNALDYSGYPDCRPEFIKAFEEVARLGTCVGAEKGQKINIQTPLIDLTKAQIIKKGLSLGVDYGLTHTCYDPDEQGRACGRCDSCQLRLKGFAQAGIEDPVIYSS

SEQ ID NO: 37948 - protein, 221 aa, Dethiosulfatibacter aminovorans
  misc_feature (1)..(221): tr|A0A1M6AS06|A0A1M6AS06_9FIRM 7-cyano-7-deazaguanine s ynthase OS=Dethiosulfatibacter aminovorans DSM 17477 OX =1121476 GN=queC PE=3 SV=1
MNTEKAVVVFSGGQDSTTCLFWAMKEFGEVVAVSFDYSQKHVLELECAREICTKHNIEHHSLDLSLLNQLAPNALTRKDIDVDETAPEEGLPNTFVDGRNMIFLTYAAVIAKQKGINNIVTGVSQSDFSGYPDCRDVFIKSLNVTLNLAMDYQFDIHTPLMWIDKEATWRMAYELGILDVIENETLTCYNGIKGKGCGECPACHLRNKGYEKFKESLKKEN

SEQ ID NO: 37949 - protein, 232 aa, Devosia elaeis
  misc_feature (1)..(232): tr|A0A178I6P0|A0A178I6P0_9RHIZ 7-cyano-7-deazaguanine s ynthase OS=Devosia elaeis OX=1770058 GN=queC PE=3 SV=1
MKTLVICSGGLDSVSLAHKVAAEQTLTGLVSFDYGQRHSKELGFAAACAQRLGVPHQIIDIRDVGRQLSGSALTDDVAVPDGHYAEESMRITVVPNRNAIMLAIAFGVAAARQAEAVGVAVHGGDHFIYPDCRPDFIDAFQAMQNQALDGYANVRLYAPFVNVSKADIVTEGARHATPFDQTWSCYKGGETHCGRCGTCVERREAFDLARLPDPTLYADADFWRDAVEAKRA

SEQ ID NO: 37950 - protein, 232 aa, Devosia psychrophila
  misc_feature (1)..(232): tr|A0A0F5Q0C7|A0A0F5Q0C7_9RHIZ 7-cyano-7-deazaguanine s ynthase OS=Devosia psychrophila OX=728005 GN=queC PE=3 SV=1
MKTLVICSGGLDSVSLAYKVAAEQTLTGLVSFDYGQRHSKELGFAAACAQRLGVPHQIIDIRDVGRQLSGSALTDDVAVPDGHYAEESMRITVVLNRNAIMLAIAFGVAAARQSEAVGVAVHGGDHFIYPDCRPDFIDAFQAMQNRALDGYANVRLYAPFVHVSKADIVTEGARHATPFDQTWSCYKGGDVHCGRCGTCVERREAFDLARLQDPTDYADADFWHGAVRARSA

SEQ ID NO: 37951 - protein, 232 aa, Devosia riboflavina
  misc_feature (1)..(232): tr|A0A087LYJ8|A0A087LYJ8_9RHIZ 7-cyano-7-deazaguanine s ynthase OS=Devosia riboflavina OX=46914 GN=queC PE=3 SV =1
MKTLVICSGGLDSVSLAHKVASEQTLTGLVSFDYGQRHNKELGFAAACAQRLGVPHQIIDIRDVGRQLSGSALTDDVAVPDGHYAEVSMRITVVPNRNAIMLAIAFGVAAARQAEAVGVAVHGGDHFIYPDCRPDFIDAFQAMQNRALDGYANVRLYAPFVHVSKADIVTEGARHATPFDQTWSCYKGGEVHCGRCGTCVERREAFDLARLQDPTHYADADFWHAAVQGRSA

SEQ ID NO: 37952 - protein, 232 aa, Devosia sp.
  misc_feature (1)..(232): tr|A0A2L1S771|A0A2L1S771_9RHIZ 7-cyano-7-deazaguanine s ynthase OS=Devosia sp. I507 OX=2083786 GN=queC PE=3 SV= 1
MKTLVICSGGLDSVSLAHKVAAEQTLTGLVSFDYGQRHSKELGFAAACAQRLGVPHQVIDIRDIGRQLSGSALTDDVAVPDGHYAEESMRITVVPNRNAIMLAIAFGVAAARQDQAVGVAVHGGDHFIYPDCRPDFIGTFQAMQDRALDGYANVRLYAPFVNVSKANIVTEGARHATPFDQTWSCYKGGEMHCGRCGTCVERREAFDLARLPDPTPYADADFWRDAIEAKRA

SEQ ID NO: 37953 - protein, 193 aa, Devosia sp.
  misc_feature (1)..(193): tr|A0A1H9AZV0|A0A1H9AZV0_9RHIZ 7-cyano-7-deazaguanine s ynthase OS=Devosia sp. YR412 OX=1881030 GN=SAMN05428969 _1065 PE=3 SV=1
MEKQQGAGKPVAVEATILLSGGIDSAACAHLLMQQGATVRGVFFDYGQAAAVPEFQAAKRLAKTLGIPVKKFKFPSSTKLGAGELTGRNAFLIWASIFVARAHTGLVGIGIHSGTPYYDCSATFLERMRVLVEEHTEGGLTVVAPFVNWSKGQIFDYFIASKLRVDQTYSCEAGTNPPCGICASCGDRRALGC

SEQ ID NO: 37954 - protein, 233 aa, Dialister invisus
  misc_feature (1)..(233): tr|C9LPW7|C9LPW7_9FIRM 7-cyano-7-deazaguanine synthase OS=Dialister invisus DSM 15470 OX=592028 GN=queC PE=3 S V=1
MKKAIILSSGGVDSTTCLSVAVNALGAENVSTASIFYGQKHKKELDAARAVAAYYHVPHYEFDLAQIMQYSNCSLLSHSTESIVHKSYGEQIAEKGAGKVSTYVPFRNGLMISVAASLAAGIYEEEETDIYVGAHGDDAAGEAYADCSPQFLKAMGEAVAVGTYGKVHLVFPFADKNKTGVVAEGLKLGTPYELTWSCYEGGDTPCGECGTCIDRAKAFAENGVEDPWNGGKG

SEQ ID NO: 37955 - protein, 233 aa, Dialister invisus
  misc_feature (1)..(233): tr|R5SWW0|R5SWW0_9FIRM 7-cyano-7-deazaguanine synthase OS=Dialister invisus CAG:218 OX=1263072 GN=queC PE=3 SV =1
MKKAIILSSGGVDSTTCLSVAVNALGAENVSTASIFYGQKHKKELDAARAVAAYYHVPHYEFDLAQIMQYSNCSLLSHSTESIVHKSYGEQIAEKGAGKVSTYVPFRNGLMISVAASLAAGIYEEEETDIYVGVHGDDAAGEAYADCSPRFLKAMGEAVAVGTYGKVHLVFPFADKNKTGVVAEGLKLGTPYELTWSCYEGGDTPCGECGTCIDRAKAFAENGVEDPWNGGKG

SEQ ID NO: 37956 - protein, 230 aa, Dialister micraerophilus
  misc_feature (1)..(230): tr|F2BWC8|F2BWC8_9FIRM 7-cyano-7-deazaguanine synthase OS=Dialister micraerophilus DSM 19965 OX=888062 GN=exsB PE=3 SV=1
MKRAIILSSGGVDSTTCISVAVDKLGRENVATASIFYGQKHEKELECARKVAQFYNLKHYEFNLAQVLQYSNCPLLAKSTKEIEHASYEEQVRENSGKVATYVPFRNGLMLSVAASLAASIFENEETGIYIGAHADDAAGNAYADCSEEFLKSMNDAIMIGTYEKVKLVFPFANTNKAGVVATGLKLKTPYELTWSCYEGGEKPCGTCGTCIDRQKAFEENGVKDPALEA

SEQ ID NO: 37957 - protein, 230 aa, Dialister microaerophilus; identical to SEQ ID NO: 37956
  misc_feature (1)..(230): tr|E4L7B5|E4L7B5_9FIRM 7-cyano-7-deazaguanine synthase OS=Dialister microaerophilus UPII 345-E OX=910314 GN=qu eC PE=3 SV=1

SEQ ID NO: 37958 - protein, 235 aa, Dialister pneumosintes
  misc_feature (1)..(235): tr|A0A1B3WEU8|A0A1B3WEU8_9FIRM 7-cyano-7-deazaguanine s ynthase OS=Dialister pneumosintes OX=39950 GN=queC PE=3 SV=1
MKKAIILCSGGVDSTTCLSVAVHELGADNVCAASIFYGQKHEKELESARKIAAYYHVKHVELNLSSIFNHSKCALLSHSTKEIEHTSYEEQIQKTKDGKVSTYVPFRNGLMLSAAASLAAGLYEDDEVDIYIGAHADDAAGNAYADCSEKFLSSIANAISLGTYNKVHLVFPFADKNKAEIIKTGLALGTPYELTWSCYEGQEDPCGTCGTCIDRERAFAMNGIIDPLVRKVKGR

SEQ ID NO: 37959 - protein, 229 aa, Dialister sp.
  misc_feature (1)..(229): tr|A0A510GEV2|A0A510GEV2_9FIRM 7-cyano-7-deazaguanine s ynthase OS=Dialister sp. 5BBH33 OX=2582419 GN=queC PE=3 SV=1
MKKAIILSSGGVDSTTCVSLAVDRLGADNVVTASIFYGQKHKKEILAARKVAEYYHLRHYEFDLSSLFQYSNCSLLEGSTQEIVHESYAEQIEKNGEGKVSTYVPFRNGLMLSTAASLAASLFEDDDVDIYIGAHADDAAGDAYADCSEPFLKAMGDAVSIGTYGKVHLAFPFAKLNKAGVVAMGLKLKTPYELTWSCYEGGEKPCGTCGTCIDRAAAFAANGVKDPAL

SEQ ID NO: 37960 - protein, 235 aa, Dialister sp.
  misc_feature (1)..(235): tr|R7PRR1|R7PRR1_9FIRM 7-cyano-7-deazaguanine synthase OS=Dialister sp. CAG:588 OX=1262871 GN=queC PE=3 SV=1
MKKAIILCSGGVDSTTCLSVAVHELGADNVCAASIFYGQKHEKELESARKIAAYYHVKHVELNLSSIFNHSKCALLSHSTKEIEHTSYEEQIQKTKDGKVSTYVPFRNGLMLSAAASLAAGLYEDDEVDIYIGAHADDAAGNAYADCSEKFLSSIANAISLGTYNKVHLVFPFADKNKAEIIKAGLALGTPYELTWSCYEGQEEPCGTCGTCIDRERAFAMNGIIDPLVRKAKGR

SEQ ID NO: 37961 - protein, 230 aa, Dialister succinatiphilus
  misc_feature (1)..(230): tr|H1D0W3|H1D0W3_9FIRM 7-cyano-7-deazaguanine synthase OS=Dialister succinatiphilus YIT 11850 OX=742743 GN=que C PE=3 SV=1
MKKAIILSSGGVDSTTCVSLAVDRLGAENVVTASIFYGQKHKKEILAARKVAQYYHLKHYEFDLSQIFQYSNCSLLANSTEEIVHESYARQIAENGEGKVSTYVPFRNGLMLSTAASLAASLFEEEDVDIYIGAHADDAAGDAYADCSEPFLQHMGEAIRIGTYGKVHLVFPFAKMNKAGVVATGLKLKTPYELTWSCYEGGDKPCGTCGTCIDRAAAFAANGVKDPALN

SEQ ID NO: 37962 - protein, 239 aa, Diaphorobacter nitroreducens
  misc_feature (1)..(239): tr|A0A3N1ZAG6|A0A3N1ZAG6_9BURK 7-cyano-7-deazaguanine s ynthase OS=Diaphorobacter nitroreducens OX=164759 GN=qu eC PE=3 SV=1
MSRLPQRRALVLLSGGQDSATCLAWALARYGHVETLGFDYGQRHRVELDCRQRLIDGVRALPWPGQLGPDHMLTVDVLAQLGGSAMTEDVAIAMQADGLPNTFVPGRNLLFFTLAAALAYRRGLDVLVGGMSETDYSGYPDCRDSTLKALQVALSLGVDRPLTLETPLMWRSKADTWALAQRLGGDALVELIRCESHTCYLGQRGDLHAWGHGCGGCPACELRAQGWEQWTAQRSLNGA

SEQ ID NO: 37963 - protein, 239 aa, Diaphorobacter polyhydroxybutyrativorans; identical to SEQ ID NO: 37962
  misc_feature (1)..(239): tr|A0A2Z2LCY5|A0A2Z2LCY5_9BURK 7-cyano-7-deazaguanine s ynthase OS=Diaphorobacter polyhydroxybutyrativorans OX= 1546149 GN=queC PE=3 SV=1

SEQ ID NO: 37964 - protein, 177 aa, Diaphorobacter sp.
  misc_feature (1)..(177): tr|A0A4Y8ZCY4|A0A4Y8ZCY4_9BURK 7-cyano-7-deazaguanine s ynthase (Fragment) OS=Diaphorobacter sp. DS2 OX=1302548 GN=E4O93_08145 PE=3 SV=1
WPGRLGPDHLLTVDVLAQLGGSAMTEEVAIAMQQDGLPNTFVPGRNLLFFTLAAALAYRRGLQVLVGGMSETDYSGYPDCRDNTLKALQVALSLGLERPLTLETPLMWIDKAGTWALAHQLGGGALVELIRRDSHTCYLGQRDRLHGWGYGCGSCPACELRAQGWTQWAEKNRPACA

SEQ ID NO: 37965 - protein, 239 aa, Diaphorobacter sp.; identical to SEQ ID NO: 37962
  misc_feature (1)..(239): tr|A0A2S4KDG8|A0A2S4KDG8_9BURK 7-cyano-7-deazaguanine s ynthase OS=Diaphorobacter sp. LR2014-1 OX=1933219 GN=qu eC PE=3 SV=1

SEQ ID NO: 37966 - protein, 244 aa, Dichotomicrobium thermohalophilum
  misc_feature (1)..(244): tr|A0A397Q4U8|A0A397Q4U8_9RHIZ 7-cyano-7-deazaguanine s ynthase OS=Dichotomicrobium thermohalophilum OX=933063 GN=queC PE=3 SV=1
MNKSSQIGTTALVLFSGGQDSTVCLAWALERFARVETIGFDYSQRHSAELEARHDVRGEIARHFPDWAARLGEDHMLALPTLAQISDTALTRESEIFMTEAGLPSTFVPGRNILFFTYAAALGYRRGIADLVGGMCETDYSGYPDCRNETLQSLARTLSLGMDHDVAILTPLMWIDKAGTWALAHELGGDKLVDLIAEHTHTCYIGDRTQRHDWGYGCGQCPACELRANGWRQWRAGTETAATG

SEQ ID NO: 37967 - protein, 231 aa, Dickeya aquatica
  misc_feature (1)..(231): tr|A0A375ACZ3|A0A375ACZ3_9GAMM 7-cyano-7-deazaguanine s ynthase OS=Dickeya aquatica OX=1401087 GN=queC PE=3 SV= 1
MTSAVVVFSGGQDSTTCLIQALQQYDDVHCVTFDYGQRHRAEIDVAASLAQQLGAKAHKILNVSLLNELAVSSLTRDNIPVPEFDAEAKGLPSTFVPGRNILFLTLASIYAYQVGADTVITGVCETDFSGYPDCRDEFVKALNQAIVLGLAREVRFVTPLMWLNKAETWALADYYQQLETVKHHTLTCYNGIQGAGCGECAACHLRAKGLAEYQHAPAEIMASLKRKTGLK

SEQ ID NO: 37968 - protein, 231 aa, Dickeya chrysanthemi
  misc_feature (1)..(231): tr|C6CQU1|C6CQU1_DICC1 7-cyano-7-deazaguanine synthase OS=Dickeya chrysanthemi (strain Ech1591) OX=561229 GN=q ueC PE=3 SV=1
MTSAVVVFSGGQDSTTCLIQALQQYDDVHCVTFDYGQRHRAEIDVAAALAQTLGARAHKVLNVGLLNELAVSSLTRDNIPVPEFDATADGLPSTFVPGRNILFLTLASIYAYQVGADTVITGVCETDFSGYPDCRDEFVKALNQAVALGLAKDIRFVTPLMWLNKAETWALADYYQQLETVKNHTLTCYNGIKGTGCGQCAACHLRAKGLAEYQRNPAAIMAALKHKTGLK

SEQ ID NO: 37969 - protein, 231 aa, Dickeya dadantii
  misc_feature (1)..(231): tr|E0SD76|E0SD76_DICD3 7-cyano-7-deazaguanine synthase OS=Dickeya dadantii (strain 3937) OX=198628 GN=queC PE= 3 SV=1
MTSAVVVFSGGQDSTTCLIQALQQYDEVHCVTFDYGQRHRAEIDVAAELAQTLGARAHKVLNVGLLNELAVSSLTRDNIPVPEFDANADGLPSTFVPGRNILFLTLASIYAYQVGADTVITGVCETDFSGYPDCRDEFVKALNQAITLGLARDIRFVTPLMWLNKAETWALADYYQQLDTVKNHTLTCYNGIKGTGCGQCAACHLRAKGLAEYQHNPSAVMASLKHKTGLK

SEQ ID NO: 37970 - protein, 231 aa, Dickeya dianthicola
  misc_feature (1)..(231): tr|A0A385XUR6|A0A385XUR6_9GAMM 7-cyano-7-deazaguanine s ynthase OS=Dickeya dianthicola OX=204039 GN=queC PE=3 S V=1
MTSAVVVFSGGQDSTTCLIQALQQYDEVHCVTFNYGQRHRAEIDVAEELAQALGARSHKVLNVGLLNELAVSSLTRDNIPVPEFDANTDGLPSTFVPGRNILFLTLASIYAYQVGANTIITGVCETDFSGYPDCRDEFVKALNQAVTLGLARDIRFVTPLMWLNKAETWALADYYQQLDTVKNHTLTCYNGIKGTGCGQCAACHLRAKGLAEYQHDPLAVMTSLKHKTGLK

SEQ ID NO: 37971 - protein, 231 aa, Dickeya fangzhongdai
  misc_feature (1)..(231): tr|A0A2K8QJ98|A0A2K8QJ98_9GAMM 7-cyano-7-deazaguanine s ynthase OS=Dickeya fangzhongdai OX=1778540 GN=queC PE=3 SV=1
MTSAVVVFSGGQDSTTCLIQALQQYDEVHCVTFDYGQRHRAEIDVAAELAQTLGARAHKVLNVGLLNELAVSSLTRDNIPVPEFDANADGLPSTFVPGRNILFLTLASIYAYQVGADTVITGVCETDFSGYPDCRDEFVKALNQAVTLGLARDIRFVTPLMWLNKAETWALADYYQQLDTVRNHTLTCYNGIKGTGCGQCAACHLRAKGLAEYQHNPSAVMASLKHKTGLK

SEQ ID NO: 37972 - protein, 231 aa, Dickeya paradisiaca
  misc_feature (1)..(231): tr|C6CBB7|C6CBB7_DICP7 7-cyano-7-deazaguanine synthase OS=Dickeya paradisiaca (strain Ech703) OX=579405 GN=que C PE=3 SV=1
MSCAVVVFSGGQDSTTCLIQALQQYDEVHCVTFDYGQRHRAEIDAAAELTQRLGARAHKILNVELLNQLAVSSLTRDSIPVPEYDETSEGLPSTFVPGRNILFLTLASIYAYQVGAESVITGVCETDFSGYPDCRDEFVKALNQAVSLGLAREIRFVTPLMWLNKAETWALADYYHQLDTVKHHTLTCYNGIKGEGCGQCAACHLRAQGLTQYQQNRAAVIASLKSKTGLK

SEQ ID NO: 37973 - protein, 231 aa, Dickeya solani
  misc_feature (1)..(231): tr|A0A2K8W3J4|A0A2K8W3J4_9GAMM 7-cyano-7-deazaguanine s ynthase OS=Dickeya solani RNS 08.23.3.1.A OX=1240086 GN =queC PE=3 SV=1
MTSAVVVFSGGQDSTTCLIQALQQYDEVHCVTFDYGQRHRAEIDVAAELAQTLGARAHKVLNVGLLNELAVSSLTRDNIPVPEFDANADGLPSTFVPGRNILFLTLASIYAYQVGADTVITGVCETDFSGYPDCRDEFVKALNQAVTLGLARDIRFVTPLMWLNKAETWALADYYQQLDTVKNHTLTCYNGIKGTGCGQCAACHLRAKGLAEYQHNPSAVMASLKHKTGLK

SEQ ID NO: 37974 - protein, 231 aa, Dickeya sp.
  misc_feature (1)..(231): tr|A0A3N0G4Z3|A0A3N0G4Z3_9GAMM 7-cyano-7-deazaguanine s ynthase OS=Dickeya sp. FVG1-MFV-O17 OX=2487136 GN=queC PE=3 SV=1
MTSAVVVFSGGQDSTTCLIQALQQYDEVHCVTFDYGQRHRAEIDVAAELAQTLGARAHKVLNVSLLNELAVSSLTRDSIPVPEFDANADGLPSTFVPGRNILFLTLASIYAYQVGADTVITGVCETDFSGYPDCRDEFVKALNQAVTLGLARDIRFVTPLMWLNKAETWALADYYQQLDTVKNHTLTCYNGIKGSGCGQCAACHLRAKGLAEYQHNPSAVMASLKHKTCLK

SEQ ID NO: 37975 - protein, 231 aa, Dickeya sp.; identical to SEQ ID NO: 37974
  misc_feature (1)..(231): tr|A0A454UTZ9|A0A454UTZ9_9GAMM 7-cyano-7-deazaguanine s ynthase OS=Dickeya sp. FVG10-MFV-A16 OX=2487135 GN=queC PE=3 SV=1

SEQ ID NO: 37976 - protein, 231 aa, Dickeya zeae
  misc_feature (1)..(231): tr|A0A2K9QC82|A0A2K9QC82_9GAMM 7-cyano-7-deazaguanine s ynthase OS=Dickeya zeae OX=204042 GN=queC PE=3 SV=1
MTSAVVVFSGGQDSTTCLIQALQQYDEVHCVTFDYGQRHRAEIDVAAELAHTLGARAHKVLNVNLLNELAVSSLTRDNIPVPEFDATVDGLPSTFVPGRNILFLTLASIYAYQVGAETVITGVCETDFSGYPDCRDEFVKALNQAVTLGLAKDIRFVTPLMWLNKAETWALADYYQQLDTVQNHTLTCYNGIKGTGCGQCAACHLRAKGLAEYRQNPSAVMAAMKKKTGLK

SEQ ID NO: 37977 - protein, 231 aa, Dickeya zeae
  misc_feature (1)..(231): tr|A0A0A8FAP0|A0A0A8FAP0_9GAMM 7-cyano-7-deazaguanine s ynthase OS=Dickeya zeae EC1 OX=1427366 GN=queC PE=3 SV= 1
MTSAVVVFSGGQDSTTCLIQALQQYDEVHCVTFDYGQRHRAEIDVAAELAHTLGARAHKVLNVSLLNELAVSSLTRDNIPVPEFDATVDGLPSTFVPGRNILFLTLASIYAYQVGAETVITGVCETDFSGYPDCRDEFVKALNQAITLGLAKDIRFVTPLMWLNKAETWALADYYQQLDTVQNHTLTCYNGIKGTGCGQCAACHLRAKGLAEYRQNPSAVMAAMKKKTGLK

SEQ ID NO: 37978 - protein, 247 aa, Dictyobacter alpinus
  misc_feature (1)..(247): tr|A0A402BIS1|A0A402BIS1_9CHLR 7-cyano-7-deazaguanine s ynthase OS=Dictyobacter alpinus OX=2014873 GN=queC PE=3 SV=1
MPTNNRAVLIVSGGMDSCVLAHYYAAAGFHLHLLSFDYGQKHVKELTYAERYINDLRTRYSQLEIAHDTIDLPIASLLTNSDSALINTEREMPHGHYTDDSMKATVVPYRNPNMLLQAATVAWNEHASVVAYAAHQGDYSQYPDCRKIFVDAFNDMLAVAMEGQKIEVESPFMRFTKAQIAQLGASLKVPFELTWSCYEGGNSGLGDQHCGICGTCVERYEAFKIAGIPDPTTYANDPEQYLHIPGK

SEQ ID NO: 37979 - protein, 250 aa, Dictyobacter aurantiacus
  misc_feature (1)..(250): tr|A0A401ZQH9|A0A401ZQH9_9CHLR 7-cyano-7-deazaguanine s ynthase OS=Dictyobacter aurantiacus OX=1936993 GN=queC PE=3 SV=1
MPINNRAVLIVSGGMDSCVLAHYYAAAGFHLHLLSFDYGQKHVKELDYAERYIADLRARYSQLEIVHDTIDLPIAQLLTNSDSALINPERQMPHGHYTDDSMKATVVPYRNPNMLLQAATVAWNEHASVVAYAAHQGDYSQYPDCREEFVDAFNNLLAVAMEGQTIKVESPFMRFTKAQIARLGSNLHVPFEHTWSCYEGGSSGLDDRHCGICGTCVERYEAFKEAGVPDPTVYANDPEQYLHIPGRADA

SEQ ID NO: 37980 - protein, 222 aa, Dictyobacter kobayashii
  misc_feature (1)..(222): tr|A0A402AVU9|A0A402AVU9_9CHLR 7-cyano-7-deazaguanine s ynthase OS=Dictyobacter kobayashii OX=2014872 GN=queC P E=3 SV=1
MPTAIAIVSGGLDSVTLAYLLKAQGYDIHLLSFDYGQRHKKELDYARICAERLNGKHNIVDLSSLGKHLKGSALTDDIDVPDGHYADANMAITVVPNRNAIMLSIAYGIAVSEEAEVVAIGAHGGDHYIYPDCRPDFISSFEAMQKQAVEGFGNAKLHLAAPFLHIGKHQIVSLGDKLGVQFADTWSCYKGGAKHCGTCGTCVERKEAFELSGVPDPTPYEK

SEQ ID NO: 37981 - protein, 78 aa, Dictyobacter kobayashii
  misc_feature (1)..(78): tr|A0A402AWT8|A0A402AWT8_9CHLR 7-cyano-7-deazaguanine s ynthase OS=Dictyobacter kobayashii OX=2014872 GN=KDK_73 140 PE=3 SV=1
MRFSKAQIARLGANLNVPFELTWSCYEGGNEGLGDQHCGVCGTCVERYEAFKVAGVPDPTVYANDPEQYLHIPGQANA

SEQ ID NO: 37982 - protein, 250 aa, Dictyobacter sp.
  misc_feature (1)..(250): tr|A0A5A5T672|A0A5A5T672_9CHLR 7-cyano-7-deazaguanine s ynthase OS=Dictyobacter sp. Uno17 OX=2014874 GN=queC PE =3 SV=1
MPITNRAVLIVSGGMDSCVLAHYYAAAGFQLHLLSFDYGQKHVKELTYAERYITDLRARYSNLEIMHDTIDLPIARLLADSDSALINTNRQMPHGHYTDDSMKATVVPYRNPNMLLQAATVAWNDHASVVAYAAHQGDYSQYPDCRKIFVDAFNTLLSVSMEGQQIEVESPFMRFTKAQIARLGATLQVPFELTWSCYEGGSDGLDDRHCGVCGTCVERYEAFRVAGVPDPTAYANDPEQYLHIPGRADQ

SEQ ID NO: 37983 - protein, 250 aa, Dictyobacter sp.
  misc_feature (1)..(250): tr|A0A5J4KT14|A0A5J4KT14_9CHLR 7-cyano-7-deazaguanine s ynthase OS=Dictyobacter sp. W12 OX=2607529 GN=queC PE=4 SV=1
MPANNRAVLIVSGGMDSCVLAHYYAAAGFHLHLISFDYGQKHVKELTYAERYIADLRSRYSQLEIVHNTIDLPIASLLTNSDSALINTEKQMPHGHYTDDSMKATVVPYRNPNMLLQAATVAWNEHASVVAYAAHQGDHAQYPDCRKVFVDAFNDLLAVAMEGQKIEVESPFMRFTKAQIAQLGASLNVPFDLTWSCYEGGNSGLGDQHCGICGTCVERYEAFKLAGVPDPTSYANDPEQYLHIPGKRES

SEQ ID NO: 37984 - protein, 479 aa, Dinoroseobacter shibae
  misc_feature (1)..(479): tr|A8LMN3|A8LMN3_DINSH Uncharacterized protein OS=Dinor oseobacter shibae (strain DSM 16493 / NCIMB 14021 / DFL 12) OX=398580 GN=Dshi_3225 PE=4 SV=1
MFLTGDRFAFTFTEAPSAKAPRSPFFKFDKESSWQATRVLMFSGGLDSLSGAVEEIAEHGQRVALVSHFSATKIAPVQRYMQRSLADAFGANTCQHVPVQVQMMGRSLKEGTHRSRSFLFAALGAITAEAFDLNRVSFHENGVVSLNLPPVGNVLGTRATRTTHPQTLSRFTALLGQVFQGAMRVDNPYFWRTKKEVVETIARLNMAEQIAVSRSCADVHNQTRQHPHCGRCSQCIDRLEGSRTDVRDREIALSYVRNAQAFEYMTPEDLERSLPAVLDAVMHVQQPPETALDMIRGLLARHGSSVAGVMRKALDQRAAGSFPAHSLPRLYGEMQTQVLLPTVAVAAAPAGRAEPETIAVEIDGAARWVRVGPHITFQRDANADLLLVLAESWLSGAGQGLTPLDYPCISAPELARRLGLESEEALRRRVLRARNALQKKFASSGLDADATREIIENVPWQGYRLAPDRVTVRRRVDKG

SEQ ID NO: 37985 - protein, 236 aa, Dissulfuribacter thermophilus
  misc_feature (1)..(236): tr|A0A1B9F8H0|A0A1B9F8H0_9DELT 7-cyano-7-deazaguanine s ynthase OS=Dissulfuribacter thermophilus OX=1156395 GN= queC PE=3 SV=1
MENNKRPLAVCLVSGGLDSCVTAAFAKEECEVAFVHVNYGQRTQQRELEAFNKIADYYQVEKRLVVDIGYLKKIGGSALTDTSIDVPQDTLSTNGIPITYVPFRNAHLISIATSWAEVIGAQFIYIGATEVDFSGYPDCRRSFFDAMELAIHEGTRPETNIKIRTPIIHMGKKEVVEAGARLGAPLELTWSCYKDEDLACGRCDSCLLRLKGFKEAGLKDPIPYKADKENRGETSI

SEQ ID NO: 37986 - protein, 226 aa, Dokdonella fugitiva
  misc_feature (1)..(226): tr|A0A4V2S321|A0A4V2S321_9GAMM 7-cyano-7-deazaguanine s ynthase OS=Dokdonella fugitiva OX=328517 GN=queC PE=3 S V=1
MANENQRAVVLVSGGMDSAVTLAMARARGHACYALSVDYGQRHSSELDAARRVALALGAVEHKTVHVDLRSIGGSALTADDIAVPDEGGSGIPVTYVPARNTIMLSIALGWAEVLGARDIWCGVNAVDYSGYPDCRPAFIEAFGRLAEVATKAGVEGAHLAVHAPLLDMGKADIVRAGLGLGIDFAQTVSCYQADADGRACGHCDACRLRADGFRVAGVADPTRYR

SEQ ID NO: 37987 - protein, 226 aa, Dokdonella immobilis
  misc_feature (1)..(226): tr|A0A1I4XF57|A0A1I4XF57_9GAMM 7-cyano-7-deazaguanine s ynthase OS=Dokdonella immobilis OX=578942 GN=queC PE=3 SV=1
MSKENRKPAVVLVSGGMDSAVTLALAREGGFACHALSVAYGQRHSSELAAAAGLARSLGAVEHKTVSVDLRSIGGSALTADIDVPEQGGAGIPVTYVPARNTIMLSIALGWAEVLGASDIFCGVNAVDYSGYPDCRPAFIEAFERLANLATKSGVEGAGIRVHAPLMAMSKADIARAGARLGIDFSATVSCYQADAEGRACGHCDACRLRAEGFAAAGLDDPTRYR

SEQ ID NO: 37988 - protein, 221 aa, Dokdonella koreensis
  misc_feature (1)..(221): tr|A0A167H596|A0A167H596_9GAMM 7-cyano-7-deazaguanine s ynthase OS=Dokdonella koreensis DS-123 OX=1300342 GN=qu eC PE=3 SV=1
MKRAVVLVSGGMDSAVTLALARAEGFDCHALSVAYGQRHSSELAAAERLARDLGAHQHKTVHVDLRTIGGSALTADIDVPEQGGAGIPVTYVPARNTIMLSIALGWAEVLGAADIFCGVNAVDYSGYPDCRPAFIAAFETLANLATKAGVEGTPLRVHAPLIALGKADIVRAGLCLGVDFAQTVSCYQADADGRACGHCDACRLRADGFVAAGVADPTRYR

SEQ ID NO: 37989 - protein, 225 aa, Dokdonia sp.
  misc_feature (1)..(225): tr|A0A559RLC0|A0A559RLC0_9FLAO 7-cyano-7-deazaguanine s ynthase OS=Dokdonia sp. Hel1_53 OX=1566287 GN=OD90_0050 PE=4 SV=1
MSNSVHNVLWTSGWDSTFRVIQLYRNNCTIQPIYVRDHNRKSTQREFETIQSLTSSIQDHFSTSKGSILPLIIYERKKIPSNFRLKFAYNILRKRKNLGKQYYWLAFLAKKYNRLELSIHKGDLYRFFNLDELIVINQGASGENWVINKKKVDIFRKLLFGNMTFPIVNISKPEMKKIAEDYNFSNLMEQTWFCHRSGSKACGECSPCKQYRRDGFGYRIDQVNL

SEQ ID NO: 37990 - protein, 224 aa, Dolichospermum compactum
  misc_feature (1)..(224): tr|A0A1Z4V528|A0A1Z4V528_9CYAN 7-cyano-7-deazaguanine s ynthase OS=Dolichospermum compactum NIES-806 OX=1973481 GN=queC PE=3 SV=1
MKAVILLSGGLDSSTVLYQAKADGCECYAISFNYQQRHSKELHSAFMVAKAAGVVQHQVVNFDLRQWGGSALTDNKIDLPAGRSLDEMADNIPVTYVPARNTIFLSFALGYAEAIAAQRVYIGVNALDYSGYPDCRPDYIEAMQQVFQLGTKQGREGQPIEIITPLIDLKKTEIIQLGNQLGVPWEITWSCYAGGDSACGVCDSCQLRLAAFAALGLEDPIDYV

SEQ ID NO: 37991 - protein, 226 aa, Dolichospermum planctonicum
  misc_feature (1)..(226): tr|A0A480AE93|A0A480AE93_9CYAN 7-cyano-7-deazaguanine s ynthase OS=Dolichospermum planctonicum OX=136072 GN=que C PE=3 SV=1
MKAVILLSGGLDSSTVLYQAKADGCQCYAISFDYQQRHRKELNSALMLANTVGVIEHQVVNFDLRQWGGSALTDDKINLPQERSLAEMADHIPTTYVPARNTIFLSFALGYAEAIAAERVYIGVNALDYSGYPDCRPDYIQAIQEVFRLGTKQGRSGKPIKIIAPLIDLKKTEIIQLGNQLGVPWHLTWSCYAGNDIACGVCDSCQLRLAAFAELGLKDPVLYAGG

SEQ ID NO: 37992 - protein, 227 aa, Dolichospermum sp.
  misc_feature (1)..(227): tr|A0A5C0E1M2|A0A5C0E1M2_9CYAN 7-cyano-7-deazaguanine s ynthase OS=Dolichospermum sp. UHCC 0315A OX=1914871 GN= queC PE=3 SV=1
MKAVILLSGGLDSSTVLYKAKADGCECYAISFDYQQRHRKELNSALMIAKAAGVIQHQVVNFDLGQWGGSALTDQKIDLPTGRSLAEMGDNIPVTYVPARNTIFLSFALSYAEAIAAERVYIGVNILDYSGYPDCRPDYIEAMQEVFRLGTKQGREGEAMKIIAPLIDLKKTEIIQLGNQLGVPWDLTWSCYAGGESACGVCDSCQLRLAAFAELGLKDPIDYSEVG

SEQ ID NO: 37993 - protein, 220 aa, Domibacillus aminovorans
  misc_feature (1)..(220): tr|A0A177L7J9|A0A177L7J9_9BACI 7-cyano-7-deazaguanine s ynthase OS=Domibacillus aminovorans OX=29332 GN=queC PE =3 SV=1
MLKDEKAVVVFSGGQDSTTCLFWAKQTFKEVIAVTFDYGQRHDAEIDVAKEIAAHLNVPHHILNMGLLNQLAPNALTRTDIAIEEREGEPPSTFVEGRNLLFLSFAAILGKQYDARHIVTGVCETDFSGYPDCRDSFVKSLNVTLNLSMDHEFVIHTPLMWLNKKETWALADQLGAFEYVRENTLTCYNGVKGSGCGECPACKLRQNGLDQYVEQKGGDV

SEQ ID NO: 37994 - protein, 220 aa, Domibacillus aminovorans
  misc_feature (1)..(220): tr|A0A177KZ57|A0A177KZ57_9BACI 7-cyano-7-deazaguanine s ynthase OS=Domibacillus aminovorans OX=29332 GN=queC PE =3 SV=1
MLKDEKAVVVFSGGQDSTTCLFWAKQTFKEVIAVTFDYGQRHDAEIDVAKEIAAHLDVPHHILNMGLLNQLAPNALTRRDIAIEEREGEPPSTFVEGRNLLFLSFAAILGKQYDARHIVTGVCETDFSGYPDCRDSFVKSLNVTLNLSMDHEFVIHTPLMWLNKKETWALADQLGAFEYVRENTLTCYNGVKGSGCGECPACKLRQNGLDQYLEQKGGDV

SEQ ID NO: 37995 - protein, 221 aa, Domibacillus antri
  misc_feature (1)..(221): tr|A0A1Q8Q8Z7|A0A1Q8Q8Z7_9BACI 7-cyano-7-deazaguanine s ynthase OS=Domibacillus antri OX=1714264 GN=queC PE=3 S V=1
MIKNEKAVVVFSGGQDSTTCLFWAKKTFKEVVAVTFHYGQRHEAEIDAAKDIAAELNVPHHILDMGLLGQLAPNALTRNDIAIEEREGQPPTTFVEGRNLLFLSFAAILGKQYDARHIVTGVCETDFSGYPDCRDSFVKSLNVTLNLSMDYEFVIHTPLMWLDKKETWALADDLGAFDYVREHTLTCYNGIKGAGCGECPACKLRQNGLDQYLAEKGGDVR

SEQ ID NO: 37996 - protein, 221 aa, Domibacillus enclensis
  misc_feature (1)..(221): tr|A0A1N6YH60|A0A1N6YH60_9BACI 7-cyano-7-deazaguanine s ynthase OS=Domibacillus enclensis OX=1017273 GN=queC PE =3 SV=1
MLKNEKAVVVFSGGQDSTTCLFWAKQTFKEVIAVTFHYGQRHDAEIDVAKDIADDLNVPHHILDMGLLNQLAPSALTRSDIDIEVKEGELPSTFVEGRNLLFLSFAAIFGKQAGARHIVTGVCETDFSGYPDCRDAFVKSLNVTLNLSMDHEFVIHTPLMWLDKKETWKLADDLGAFDYVRERTLTCYNGVKGSGCGECPACELRQNGLDQYIEEKGGSMQ

SEQ ID NO: 37997 - protein, 221 aa, Domibacillus epiphyticus
  misc_feature (1)..(221): tr|A0A1V2A9V4|A0A1V2A9V4_9BACI 7-cyano-7-deazaguanine s ynthase OS=Domibacillus epiphyticus OX=1714355 GN=queC PE=3 SV=1
MIKNEKAVVVFSGGQDSTTCLFWAKQTFKDVIAVTFNYGQRHDAEIDVAKKIAADFNIPHHILDMGLLNQLAPSALTRDEILIKERDGQPPTTFVEGRNLLFLSFAAILGKQYDARHIVTGVCETDFSGYPDCRDSFVKSLNVTLNLSMDFDFVIHTPLMWLDKKQTWALADDLGAFDYVRENTLTCYNGIKGSGCGECPACKLRQNGLDQYKEDKRGDVQ

SEQ ID NO: 37998 - protein, 221 aa, Domibacillus iocasae
  misc_feature (1)..(221): tr|A0A1E7DU09|A0A1E7DU09_9BACI 7-cyano-7-deazaguanine s ynthase OS=Domibacillus iocasae OX=1714016 GN=queC PE=3 SV=1
MLKHEKAVVVFSGGQDSTTCLFWAKQTFKDVIAVTFNYGQRHSAEIEVAKEIAADLQVPHHVLDMGLLNQLAPSALTRSNIDIEIKEGELPSTFVEGRNLLFLSFAAILGKQAGARHIVTGVCETDFSGYPDCRDSFVKSLNVTLNLSMDHEFVIHTPLMWLDKKETWKLADELGAFDYVRERTLTCYNGLKGSGCGECPACTLRQNGLDQYIEEKGGSVQ

SEQ ID NO: 37999 - protein, 220 aa, Domibacillus mangrovi
  misc_feature (1)..(220): tr|A0A1Q5NZW4|A0A1Q5NZW4_9BACI 7-cyano-7-deazaguanine s ynthase OS=Domibacillus mangrovi OX=1714354 GN=queC PE= 3 SV=1
MLKDEKAVVVFSGGQDSTTCLFWAKQTFKDVIAVTFDYGQRHDAEINVAKEIAAHLDVPHHILNMGLLNQLAPSALTRTDIAIEEREGEPPSTFVEGRNLLFVSFAAILGKQFDARHIVTGVCETDFSGYPDCRDSFVKSLNVTLNLSMDYEFVIHTPLMWLDKKETWALADQLGAFAYVCENTLTCYNGVKGSGCGECPACKLRQNGLDQYLEQKGGNV

SEQ ID NO: 38000 - protein, 233 aa, Donghicola sp.
  misc_feature (1)..(233): tr|A0A1M4N1Z5|A0A1M4N1Z5_9RHOB 7-cyano-7-deazaguanine s ynthase OS=Donghicola sp. KarMa OX=1779855 GN=queC PE=3 SV=1
MKTIVICSGGLDSVSLAHMVADQHELTRLVSFDYGQRHRKELDYAALAATRLGVPHDIIDMRTIGAALTGSALTDDIDVPDGHYAEETMKITVVPNRNAIMLTIAFGVAAANGDQAVATAVHGGDHFIYPDCRPAFAEAFNTMQKAALDGYADVSLYTPFVHRTKADIVTEGAKHNTPFAETWSCYKGGAHHCGRCGTCVERREAFHLAGVADPTVYDDPDFWQAAISAHEGK

SEQ ID NO: 38001 - protein, 240 aa, Donghicola tyrosinivorans
  misc_feature (1)..(240): tr|A0A2T0WAS4|A0A2T0WAS4_9RHOB 7-cyano-7-deazaguanine s ynthase OS=Donghicola tyrosinivorans OX=1652492 GN=queC PE=3 SV=1
MSRSALVLFSGGQDSTTCLAWALSRFERVETIGFDYGQKHIVEMTCRDTILGRIGGLRANWSERLGEDHLIDLGILGQISETALTQDMAIAIAEDGLPNTFVPGRNLLFLTLAAAVAYRRGIRHLVGGMCETDFSGYPDCRDDTIKALQVTLNLGMDKRFVIDTPLMWLDKAATWQLAEEVGGTNLVDLILEGSHTCYTGDRSHLHDWGYGCGECPACRLRAKGYENFRSRNATFTGRRE

SEQ ID NO: 38002 - protein, 236 aa, Donghicola tyrosinivorans
  misc_feature (1)..(236): tr|A0A2T0WFY8|A0A2T0WFY8_9RHOB 7-cyano-7-deazaguanine s ynthase OS=Donghicola tyrosinivorans OX=1652492 GN=queC PE=3 SV=1
MKTIVICSGGLDSVSLAHMVADQHTLTRLVSFDYGQRHRKELDYAARAATRLGVPHDIIDMRPIGAALTGSALTDNIDVPDGHYAEETMKITVVPNRNAIMLAIAFGVAAANKDDAVATAVHGGDHFIYPDCRPAFTQAFEVMQKAALDGYADVSLYTPFVHRSKADIVTEGAKHNTPFADTWSCYKGGAHHCGRCGTCVERREAFHLAGVQDPTIYEDPDFWEKAVADAAAKGVK

SEQ ID NO: 38003 - protein, 227 aa, Dorea longicatena
  misc_feature (1)..(227): tr|A0A564UF02|A0A564UF02_9FIRM 7-cyano-7-deazaguanine s ynthase OS=Dorea longicatena OX=88431 GN=queC PE=3 SV=1
MKALVLFSGGIDSTTALGLAIKKYGKDQVIALSVSYGQKHDKEIKAAIAVAQYYGVEHLFLDLSKIFQYSNCSLLQQSTEDIPEESYAEQISKTNGDKPVSTYVPFRNGLFLSSAASIALSKDCEVIYYGAHADDSAGFAYPDCSSVFNQAMNEAIWEGSGHQLKIEAPFVNVSKAEVVRIGLELGVPYELTWSCYEGGEKPCGKCGTCIDRAAAFQANHMEDPALR

SEQ ID NO: 38004 - protein, 227 aa, Dorea longicatena
  misc_feature (1)..(227): tr|A0A3E5GDB2|A0A3E5GDB2_9FIRM 7-cyano-7-deazaguanine s ynthase OS=Dorea longicatena OX=88431 GN=queC PE=3 SV=1
MKALVLFSGGIDSTTALGLAIKKYGKDQVIALSVSYGQKHDKEIKAAIAVAQYYGVEHLFLDLSKIFQYSNCSLLQQSTEDIPEESYAEQISKTNGDKPVSTYVPFRNGLFLSSAASIALSKDCEVIYYGAHADDSAGFAYPDCSPVFNQAMNEAIWEGSGHQLKIEAPFVNVSKAEVVRIGLELGVPYELTWSCYEGGEKPCGKCGTCIDRAAAFQANQMEDPALR

SEQ ID NO: 38005 - protein, 230 aa, Dorea sp.
  misc_feature (1)..(230): tr|R9N8B3|R9N8B3_9FIRM 7-cyano-7-deazaguanine synthase OS=Dorea sp. 5-2 OX=1235798 GN=queC PE=3 SV=1
MKVLVLSSGGIDSTVCLALAVEKYGYENVLSLSVSYGQKHSNELKAAQRIAQHYHVRHKELDMGMIFAGSDCTLLEGRGEIPKGTYASQLQESTGKPVSTYVPFRNGLFLAAAASVALADGCEKIYYGAHADDSAGNAYPDTSEAFHDAISRAVYEGSGKQLEIEAPFLCSHKADVVRTGMRLQAPFAFTWSCYEGGEKPCGKCATCLDRRKAFELNEIQDPAEYEEEKK

SEQ ID NO: 38006 - protein, 223 aa, Draconibacterium sediminis
  misc_feature (1)..(223): tr|A0A0D8JB62|A0A0D8JB62_9BACT 7-cyano-7-deazaguanine s ynthase OS=Draconibacterium sediminis OX=1544798 GN=que C PE=3 SV=1
MTFIDKKKALVVFSGGQDSTTCLFWAKREFEEVYAIAFNYGQRHAVELESAKTIAETAGVPLQVFPMDLISQLSRNSLTYHSMQVDRNKPEDTPPNTLVEGRNMLFLTYAAIFAKVHNIHHLVTGVGQADFSGYPDCRNDFIVSLNETLNLSMDYPYQIHTPLMWKNKSEIWQLADELGVFDLVQNETVTCYNGIKGVGCGECPACELRNKGLEKYLEKKENT

SEQ ID NO: 38007 - protein, 252 aa, Drancourtella sp.
  misc_feature (1)..(252): tr|A0A1Z7M4Z5|A0A1Z7M4Z5_9FIRM TIGR00268 family protein OS=Drancourtella sp. An12 OX=1965548 GN=B5E64_07280 PE =4 SV=1
MTLEEFFCEVPKAAVAFSGGTDSAFLLWAAKQYGCDVHAYYMKTAFQPDFEMEDARRVVEELGIPMTVLEKDILSVQEAAANGPKRCYYCKRALFSQLWAAARKDGYFCLLDGTNASDDADDRPGMQAIRELEVRSPLRECGIPKSEVRRLSEEAGLFTSRKPAYACLATRIPTGTAITPELLKKAETAETALANLGFHDFRVRLMEDGGARLQITEEQMPLLFSKREEILTILRPFFSSILLDLEARAKSV

SEQ ID NO: 38008 - protein, 252 aa, Drancourtella sp.
  misc_feature (1)..(252): tr|A0A1Y3WIK1|A0A1Y3WIK1_9FIRM TIGR00268 family protein OS=Drancourtella sp. An57 OX=1965647 GN=B5G11_04725 PE =4 SV=1
MTLEEFFCEVPKAAVAFSGGTDSAFLLWAAKQYGCDVHAYYMKTAFQPEFEMEDARRVVEALNIPMTVLEKDILAVPEAAANGPKRCYYCKRALFTQLWAAARKDGYFCLLDGTNASDDADDRPGMQAIRELEVRSPLRECGISKSEVRRLSEEAGLFTSRKPAYACLATRIPTGTAITPELLKKAETAETALANLGFHDFRVRLMEDGGARLQITEEQMPLLFSKREEILTILRPLFSSILLDLEARAKSV

SEQ ID NO: 38009 - protein, 235 aa, Duganella phyllosphaerae
  misc_feature (1)..(235): tr|A0A1E7WYG0|A0A1E7WYG0_9BURK 7-cyano-7-deazaguanine s ynthase OS=Duganella phyllosphaerae OX=762836 GN=queC P E=3 SV=1
MLPTDSALVLFSGGQDSTTCLAWALKHYARVETIGFDYGQRHAVELTVRPQLIASLRALNPAWDARLGEDHMIDLSLISRISQTAMTHDIAIETQANGLPNTFVPGRNLLFMTVAATVAYRRGLTVLVGGMCETDFSGYPDCRDDTMKALQVALNLGMDTRTKLETPLMWRDKRQTWELAQDLGGTPLVDLIRSGTHTCYLGERGALHDWGYGCGTCPACELRARGYRQFTGTGN

SEQ ID NO: 38010 - protein, 235 aa, Duganella sacchari
  misc_feature (1)..(235): tr|A0A1M7QWN8|A0A1M7QWN8_9BURK 7-cyano-7-deazaguanine s ynthase OS=Duganella sacchari OX=551987 GN=queC PE=3 SV =1
MLPTDTALVLFSGGQDSTTCLAWALKHYARVETIGFDYGQRHAVELTVRPQLLQSLRGQSADWNARLGEDHMIDLSLISAISQTAMTHDIAIETQANGLPNTFVPGRNLLFMTVAATVAYRRGLTVLVGGMCETDFSGYPDCRDDTMKALQVALNLGMDTRIKLETPLMWRDKKQTWELAQELGGQQLVDLIRSGTHTCYLGERGALHDWGYGCGTCPACALRARGYHQFVGAEV

SEQ ID NO: 38011 - protein, 235 aa, Duganella sp.
  misc_feature (1)..(235): tr|A0A0Q5CLN7|A0A0Q5CLN7_9BURK 7-cyano-7-deazaguanine s ynthase OS=Duganella sp. Leaf126 OX=1736266 GN=queC PE= 3 SV=1
MLPTDSALVLFSGGQDSTTCLAWALKHYARVETIGFDYGQRHAVELTVRPQLLASLRALDPAWDAKLGEDHMIDLSLISRISQTAMTHDIAIETQANGLPNTFVPGRNLLFMTVAATVAYRRGLTVLVGGMCETDFSGYPDCRDDTMKALQVALNLGMDTRTKLETPLMWRDKRQTWELAQELGGAALVDLIRAGTHTCYLGERGALHDWGYGCGACPACELRARGYRQFVNAGH

SEQ ID NO: 38012 - protein, 235 aa, Duganella sp.
  misc_feature (1)..(235): tr|A0A1E7V1Y3|A0A1E7V1Y3_9BURK 7-cyano-7-deazaguanine s ynthase OS=Duganella sp. HH105 OX=1781067 GN=queC_2 PE= 3 SV=1
MLPTDSALVLFSGGQDSTTCLAWALKHYARVETIGFDYGQRHAVELTVRPSVIASLRAHSPEWNAKLGEDHMIDLSLISEISQTAMTHDIAIETQANGLPNTFVPGRNLLFMTVAATVAYRRGLTVLVGGMCETDFSGYPDCRDDTMKALQVALNLGMDTRLKLETPLMWRDKRQTWELAQELGGQALVDLIRDGTHTCYLGERGALHDWGYGCGTCPACALRARGYRQFAGSEV

SEQ ID NO: 38013 - protein, 215 aa, Duncaniella muris
  misc_feature (1)..(215): tr|A0A2V1IQT9|A0A2V1IQT9_9BACT 7-cyano-7-deazaguanine s ynthase OS=Duncaniella muris OX=2094150 GN=queC PE=3 SV =1
MAKDTLLVLSGGMDSTTMLWDYADTIAAAVTFQYGSNHNRREAECARWNCERLGIRWIEIDLEFMGRYFKSSLLSGADEIPEGHYADDNMRSTVVPFRNGIMLAVAAGLAESMELKKVMIANHSGDHAIYPDCRPEFVRSMGAAISDGTYEHLELLAPYTDMTKGEIALRGKNLGVDYSHTYSCYKGGEHHCGKCGTCVERREALEFAGIVLDND

SEQ ID NO: 38014 - protein, 215 aa, Duncaniella sp.; identical to SEQ ID NO: 38013
  misc_feature (1)..(215): tr|A0A4P7VZH5|A0A4P7VZH5_9BACT 7-cyano-7-deazaguanine s ynthase OS=Duncaniella sp. C9 OX=2530392 GN=queC PE=3 S V=1

SEQ ID NO: 38015 - protein, 216 aa, Duncaniella sp.
  misc_feature (1)..(216): tr|A0A4Z0V761|A0A4Z0V761_9BACT 7-cyano-7-deazaguanine s ynthase OS=Duncaniella sp. TLL-A3 OX=2530391 GN=queC PE =3 SV=1
MQGKEYLLVLSGGMDSVTMLYDYRERIAAAVTFQYGSNHNRREAHYARLNCERLGIEWIEIDLTFMASHFSSSLLEGADAIPEGSYDDENMKSTVVPFRNGIMLAVAAGLAESRGLAGVMIANHSGDHAIYPDCRPEFIRSMGAAIADGTYEHLELFAPYTSLSKGEIARRGKELGVDYSLTYSCYKGGEKHCGKCGTCVERAEALRYAGIVLNDD

SEQ ID NO: 38016 - protein, 228 aa, Dyella japonica
  misc_feature (1)..(228): tr|A0A075JZW4|A0A075JZW4_9GAMM 7-cyano-7-deazaguanine s ynthase OS=Dyella japonica A8 OX=1217721 GN=queC PE=3 S V=1
MTQTSPRKAVVLVSGGMDSAVTIAIAREQGYQVHSLSVAYGQRHSAELAASERVSRLLGAVEHKTVHVDLRTIGGSALTADIDVPLDQTGEQGIPVTYVPARNTIMLSIALGWAEVLGSNDIWCGVNAVDYSGYPDCRPAFIEAFEQLANVATKAGVEGAGIRIHAPLMRMSKADIAREGQRLGVDFSETVSCYQADAEGRACGHCDACRLRAQGFSAAGLPDPTRYA

SEQ ID NO: 38017 - protein, 228 aa, Dyella japonica
  misc_feature (1)..(228): tr|A0A0G9H681|A0A0G9H681_9GAMM 7-cyano-7-deazaguanine s ynthase OS=Dyella japonica DSM 16301 OX=1440762 GN=queC PE=3 SV=1
MSQATPRKAVVLVSGGMDSAVTIAIAREQGFQVHALSVAYGQRHSAELAASERVSGLLGAVEHKTVQVDLRTIGGSALTADIDVPLDQTGEQGIPVTYVPARNTIMLSIALGWAEVLGSTDIWCGVNAVDYSGYPDCRPAFIEAFEQLANVATKAGVEGAGIRIHAPLMRMGKADIAREGQRLGVDFSETVSCYQADAQGRACGHCDACVLRAQGFKAAGLPDPTRYA

SEQ ID NO: 38018 - protein, 228 aa, Dyella jiangningensis
  misc_feature (1)..(228): tr|A0A328P3R7|A0A328P3R7_9GAMM 7-cyano-7-deazaguanine s ynthase OS=Dyella jiangningensis OX=1379159 GN=queC PE= 3 SV=1
MSQSSPRKAVVLVSGGMDSAVTIAIAREQGYQVHALSVAYGQRHSAELAASERVSRMLGAVEHKTVQVDLRSIGGSALTADIDVPLDQTGDAGIPVTYVPARNTIMLSIALGWAEVLGSTDIWCGVNAVDYSGYPDCRPAFIESFEQLANVATKAGVEGAGIRIHAPLMRMSKADIAREGQRLGVDFSETVSCYQADAEGRACGHCDACHLRAQGFKTAGLPDPTRYI

SEQ ID NO: 38019 - protein, 228 aa, Dyella jiangningensis
  misc_feature (1)..(228): tr|A0A023NVN1|A0A023NVN1_9GAMM 7-cyano-7-deazaguanine s ynthase OS=Dyella jiangningensis OX=1379159 GN=queC PE= 3 SV=1
MSQSSPRKAVVLVSGGMDSAVTIAIAREQGYQVHALSVAYGQRHSAELAASERVSRMLGAVEHKTVQVDLRSIGGSALTADIDVPLDQTGDSGIPVTYVPARNTIMLSIALGWAEVLGSADIWCGVNAVDYSGYPDCRPAFIESFEQLANVATKAGVEGAGIRIHAPLMRMSKADIAREGQRLGVDFSETVSCYQADAEGRACGHCDACHLRAQGFKMAGLPDPTRYA

SEQ ID NO: 38020 - protein, 234 aa, Dyella marensis
  misc_feature (1)..(234): tr|A0A1I2FEY8|A0A1I2FEY8_9GAMM 7-cyano-7-deazaguanine s ynthase OS=Dyella marensis OX=500610 GN=queC PE=3 SV=1
MSPMSQTSLPRAVVLVSGGMDSAVTIAIAREQGYQVHALSVAYGQRHSSELEASARVSRLLGAVEHKTVQVDLRSIGGSALTADIDVPLDADLHGDSGGIPITYVPARNTIMLSIALGWAEVLGSSDIWCGVNAVDYSGYPDCRPAFIEAFESLANVATKAGVEGAGIRVHAPLMRMSKADIAREGARLGVDFSETVSCYQADAQGRACGHCDACRLRAQGFRDAGLADPTRYA

SEQ ID NO: 38021 - protein, 228 aa, Dyella soli
  misc_feature (1)..(228): tr|A0A4R0YFB4|A0A4R0YFB4_9GAMM 7-cyano-7-deazaguanine s ynthase OS=Dyella soli OX=522319 GN=queC PE=3 SV=1
MSQESPRKAVVLVSGGMDSAVTIALAREQGYQVHALSVAYGQRHSAELAASERVSRALGAVEHKTVQVDLRTIGGSALTADIDVPVDQAGDVGIPVTYVPARNTIMLSIALGWAEVLGSTDIWCGVNAVDYSGYPDCRPAFIEAFEQLANVATKAGVEGAGIRVHAPLMRMSKADIAREGQRLGVDFSITVSCYQADAEGLACGHCDACRLRAQGFVAAGLPDPTRYA

SEQ ID NO: 38022 - protein, 228 aa, Dyella soli
  misc_feature (1)..(228): tr|A0A4R0YS30|A0A4R0YS30_9GAMM 7-cyano-7-deazaguanine s ynthase OS=Dyella soli OX=522319 GN=queC PE=3 SV=1
MSDATPKKAVILVSGGMDSAVTIAIAREQGYQVHALSVAYGQRHSSELEASERVSRMLGAVEHKTVNVDLRSIGGSALTADIDVPEEGGEGIPVTYVPARNTIMLSIALGWAEVLGSTDIWCGVNAVDYSGYPDCRPAFVEAFEALANVATKAGVEGAGIRIHAPLMQMSKADIAREGLRLGVDFSQTVSCYQADAQGRACGHCDACRLRAEGFQRAGIPDPTHYVPA

SEQ ID NO: 38023 - protein, 226 aa, Dyella sp.
  misc_feature (1)..(226): tr|A0A370XAG6|A0A370XAG6_9GAMM 7-cyano-7-deazaguanine s ynthase OS=Dyella sp. 4MSK11 OX=1927960 GN=queC PE=3 SV =1
MSGPTSRKAVILVSGGMDSAVTLAIAREQGYQIHALSVNYGQRHSSELEAAARVAHMLGAVEHKTVHVDLRSIGGSALTADIDVPEEGGEGIPVTYVPARNTIMLSIALGWAEVLGSNDIWCGVNAVDYSGYPDCRPAFVEAFERLANLATKAGVEGAAIRVHAPLIAMSKADIAREGQRLGVDFSATVSCYQADAEGRACGHCDACRLRAQGFRQAGLPDPTRYV

SEQ ID NO: 38024 - protein, 228 aa, Dyella sp.
  misc_feature (1)..(228): tr|A0A370KDZ8|A0A370KDZ8_9GAMM 7-cyano-7-deazaguanine s ynthase OS=Dyella sp. DHG54 OX=1920168 GN=queC PE=3 SV= 1
MSPSSPRKAVVLVSGGMDSAVTIAIAREQGYQVHALSVAYGQRHSAELEASERVSRLLGAIEHKTVQVDLRTIGGSALTADIDVPLDRADEQGIPVTYVPARNTIMLSIALGWAEVLGSTDIWCGVNAVDYSGYPDCRPAFIEAFEQLANVATKAGVEGAGIRVHAPLMRMSKADIAREGQRLGVDFAETVSCYQADAQGRACGHCDACRLRAQGFAAAGLPDPTRYA

SEQ ID NO: 38025 - protein, 227 aa, Dyella thiooxydans
  misc_feature (1)..(227): tr|A0A160N289|A0A160N289_9GAMM 7-cyano-7-deazaguanine s ynthase OS=Dyella thiooxydans OX=445710 GN=queC PE=3 SV =1
MSDNTLPRAVVLVSGGMDSAVTIAIAREQGYQVHALSVAYGQRHSSELEASARVARMLGAVEHKTVHVDLRSIGGSALTADIDVPLDQESTGIPVTYVPARNTIMLSIALGWAEVLGSRDIWCGVNAVDYSGYPDCRPAFIEAFEKLANVATKAGVEGQGLRVHAPLMSMSKADIAREGQRLGVDFAETVSCYQADAQGRACGHCDACRLRAQGFRDAGLPDPTRYV

SEQ ID NO: 38026 - protein, 229 aa, Dysgonamonadaceae bacterium
  misc_feature (1)..(229): tr|A0A2N4S7A8|A0A2N4S7A8_9BACT 7-cyano-7-deazaguanine s ynthase OS=Dysgonamonadaceae bacterium OX=2065189 GN=qu eC PE=3 SV=1
MNEYKNEDALVLFSGGQDSTTCLFWAKQNFRNVHTLCFSYGQRHSQEVKNAECIAAMANVSFQVLDATIISHLAPNSLTDNTMVMDEEKPADSYPNTFVPGRNMLFLTFAATIAYARNIRHLVTGVSEADYSGYPDCRDTFIKSVNATLNLAMDRQFVIHTPLMWRNKKQVWQLADELGVFDLVRNETLTCYNGIIADGCGHCPACKLRNKGLQEYLAERKLQSNYSDH

SEQ ID NO: 38027 - protein, 222 aa, Dysgonomonas alginatilytica
  misc_feature (1)..(222): tr|A0A2V3PTC1|A0A2V3PTC1_9BACT 7-cyano-7-deazaguanine s ynthase OS=Dysgonomonas alginatilytica OX=1605892 GN=qu eC PE=3 SV=1
MKSTESALVLFSGGQDSTTCLFWALKHFSSVRTLCFTYGQRHSQEVEIAEGIAQRAGVPFQKLDASIISHLSTNSLTDNTVVMDKEKPADAYPNTFVPGRNLLFLTFAAVIARSHGIRHIVTGVSEADYSGYPDCRDTFIMSANTSINLAMDEHFQIHTPLMWRDKTAVWQLSDQLGVFDLIRNETLTCYNGIPADGCGECPSCQLRKQGLENYLKIRKQNH

SEQ ID NO: 38028 - protein, 221 aa, Dysgonomonas capnocytophagoides
  misc_feature (1)..(221): tr|A0A4Y8L1U9|A0A4Y8L1U9_9BACT 7-cyano-7-deazaguanine s ynthase OS=Dysgonomonas capnocytophagoides OX=45254 GN= queC PE=3 SV=1
MNSKEPALVLFSGGQDSTTCLFWALKHFSSVRTLCFTYGQRHSKEVEIAEGIASRAGVPFQKLDASIISQLSSNSLTDSNVVMDKEKPADAYPNTFVPGRNLLFLTFAAVIARSHGIRHIVTGVSEADYSGYPDCRDTFILSANASINLAMDEHFQIHTPLMWRDKTAVWQLADELGAFDLIRNETLTCYNGIPADGCGECPSCKLRKHGLDEYLKIRESK

SEQ ID NO: 38029 - protein, 221 aa, Dysgonomonas gadei
  misc_feature (1)..(221): tr|F5IZ44|F5IZ44_9BACT 7-cyano-7-deazaguanine synthase OS=Dysgonomonas gadei ATCC BAA-286 OX=742766 GN=queC PE =3 SV=1
MNKKEPALVLFSGGQDSTTCLYWAIENFSSVRTLCFTYGQRHSKEVEVAQSIAGHAGVPFQLLDASIISQLSVNSLTSDIVMDQEKPADSYPNTFVPGRNLLFLTFAAVIARSHGIRHIVTGVSEADYSGYPDCRDTFILSANASINLAMDEHFQIHTPLMWRDKTAVWQLADQLGVFDVVRTQTLTCYNGIIADGCGHCPACKLRKQGLENYLKIKGQWE

SEQ ID NO: 38030 - protein, 221 aa, Dysgonomonas macrotermitis
  misc_feature (1)..(221): tr|A0A1M4Y919|A0A1M4Y919_9BACT 7-cyano-7-deazaguanine s ynthase OS=Dysgonomonas macrotermitis OX=1346286 GN=que C PE=3 SV=1
MNSKESALVLFSGGQDSTTCLFWALKNFSSVRTLCFTYGQRHSLEVEIAEGIASRANVPFQKLDASIISRLSTNSLTDANVVMDKEKPADAYPNTFVPGRNLLFLTFAAVIARSHGIRHIVTGVSEADYSGYPDCRDTFIMSANTSINLAMDEHFEIHTPLMWRDKTAVWQLADELGVFDLIRNETLTCYNGIPADGCGECPSCKLRKQGLDNYLKIKENK

SEQ ID NO: 38031 - protein, 218 aa, Dysgonomonas mossii
  misc_feature (1)..(218): tr|F8X4P8|F8X4P8_9BACT 7-cyano-7-deazaguanine synthase OS=Dysgonomonas mossii DSM 22836 OX=742767 GN=queC PE=3 SV=1
MNKKESALVLFSGGQDSTTCLYWALENFSSVRTLCFTYGQRHSKEVEVAKSIAEKANVPFQLLDASIISQLSVNSLTSDIVMDQEKPADSYPNTFVPGRNLLFLTFAAVIARSHGIRHIVTGVSEADYSGYPDCRDTFILSANASINLAMDEHFQIHTPLMWRDKTAVWQLADELGVFDIIRTQTLTCYNGIIADGCGHCPSCKLRKQGLNNYLKTKL

SEQ ID NO: 38032 - protein, 218 aa, Dysgonomonas mossii
  misc_feature (1)..(218): tr|A0A4Y9IPK9|A0A4Y9IPK9_9BACT 7-cyano-7-deazaguanine s ynthase OS=Dysgonomonas mossii OX=163665 GN=queC PE=3 S V=1
MNKTESALVLFSGGQDSTTCLYWALENFSSVRTLCFTYGQRHSKEVEVAKAIAEKANVPFQLLDASIISQLSVNSLTSDIVMDQEKPADSYPNTFVPGRNLLFLTFAAVIARSHGIRHIVTGVSEADYSGYPDCRDTFILSANASINLAMDEHFQIHTPLMWRDKTAVWQLADELGVFDIIRTQTLTCYNGIIADGCGHCPSCKLRKQGLDNYLKTKL

SEQ ID NO: 38033 - protein, 221 aa, Dysgonomonas sp.
  misc_feature (1)..(221): tr|A0A3D3TFI3|A0A3D3TFI3_9BACT 7-cyano-7-deazaguanine s ynthase OS=Dysgonomonas sp. OX=1891233 GN=queC PE=3 SV= 1
MKSKESALVLFSGGQDSTTCLFWAIKEFESVRTLCFTYGQRHSKEVEIARNIAHQANVPFQMLDASIISQLSVNSLTDVNVVMDSEKPEDNYPNTFVPGRNLLFLTFAAVIARSHGIRHIVTGVSEADYSGYPDCRDTFIMSANTSINLAMDEHFQIHTPLMWRDKTAVWELADELGVFALIRDKTLTCYNGIIADGCGECPSCRLRKQGLDNYLKIKNHT

SEQ ID NO: 38034 - protein, 218 aa, Dysgonomonas sp.
  misc_feature (1)..(218): tr|A0A1M3L734|A0A1M3L734_9BACT 7-cyano-7-deazaguanine s ynthase OS=Dysgonomonas sp. 37-18 OX=1895907 GN=queC PE =3 SV=1
MNKTESALVLFSGGQDSTTCLYWALENFASVRTLCFTYGQRHSKEVEVANAIAEKANVPFQLLDASIISQLSVNSLTSDIVMDQEKPADSYPNTFVPGRNLLFLTFAAVIARSHGIRHIVTGVSEADYSGYPDCRDTFILSANASINLAMDEHFQIHTPLMWRDKTAVWQLADELGVFDIIRTQTLTCYNGIIADGCGHCPSCKLRKQGLDNYLKTKL

SEQ ID NO: 38035 - protein, 238 aa, Ectothiorhodosinus mongolicus
  misc_feature (1)..(238): tr|A0A1R3W2Z8|A0A1R3W2Z8_9GAMM 7-cyano-7-deazaguanine s ynthase OS=Ectothiorhodosinus mongolicus OX=233100 GN=q ueC PE=3 SV=1
MAAEALVAGAKPAVVLLSGGMDSATVLALAKAEGFACHCLSFRYGQRHSVELMAAQQLASELGAAEHRIVDLDLSLFGGSALTDASIAVPETPGEGIPVTYVPARNTIFLSIALAWAEVLGARDIFIGVNAVDYSGYPDCRPEFIRAFEAMAQLATRQGVEGAGPCFRTPLIDLSKAQIIRQGVALGVDFSKTVSCYQADHEGRACGVCDACRLRAKGFADVEMADNTRYRSQPPATS

SEQ ID NO: 38036 - protein, 225 aa, Ectothiorhodospira haloalkaliphila
  misc_feature (1)..(225): tr|W8KMT5|W8KMT5_9GAMM 7-cyano-7-deazaguanine synthase OS=Ectothiorhodospira haloalkaliphila OX=421628 GN=queC PE=3 SV=1
MTMKNAVVLLSGGMDSATVLALARAEGFDCHCLSFRYGQRHHAELVAAAELAQSLGAADHRVVDLNLGLFGGSALTDQAIQVPDAPSNGIPVTYVPARNTVFLSIALAWAEVLDARDIFIGVNAVDYSGYPDCRPEFIQAFETMANLATKAGVGGDHCHIRTPLIDLSKAEIIRQGVGAGVDFARTVSCYSADDQGRACGLCDACRLRARGFADAGLPDTTRYRL

SEQ ID NO: 38037 - protein, 223 aa, Ectothiorhodospira magna
  misc_feature (1)..(223): tr|A0A1H8ZB93|A0A1H8ZB93_9GAMM 7-cyano-7-deazaguanine s ynthase OS=Ectothiorhodospira magna OX=867345 GN=queC P E=3 SV=1
MKNALVLLSGGMDSATVLALARAEGFACHCLSVRYGQRHSAELAAAAELAHSLGAADHRVVDLNLGLFGGSALTDDSIQVPDQRSEGIPVTYVPARNTVFLAVALAWAEVLQARDLFIGVNAVDYSGYPDCRPEFIQAFETLANLATKAGVEGDRIRIRTPLIHLTKAEIIRRGIGAGVDFSRTVSCYSADSQGRACGTCDACHLRAKGFADAGIADVTRYQP

SEQ ID NO: 38038 - protein, 223 aa, Ectothiorhodospira marina
  misc_feature (1)..(223): tr|A0A1H7HKW5|A0A1H7HKW5_9GAMM 7-cyano-7-deazaguanine s ynthase OS=Ectothiorhodospira marina OX=1396821 GN=queC PE=3 SV=1
MKNAVVLLSGGMDSATVLALARAKGFDCHCLSFRYGQRHHAELVAAAELAQSLGAADHRVVDLNLGLFGGSALTDQAIQVPDAPSDGIPVTYVPARNTVFLSIALAWAEVLDARDIFIGVNAVDYSGYPDCRPEFIQAFEIMANLATKAGVGGDQCHIRTPLIDLTKAEIIRQGVEAGVDFARTVSCYSADDQGRACGVCDACRLRARGFAEAGLPDTTRYRP

SEQ ID NO: 38039 - protein, 222 aa, Ectothiorhodospira mobilis
  misc_feature (1)..(222): tr|A0A1I4RDH7|A0A1I4RDH7_ECTMO 7-cyano-7-deazaguanine s ynthase OS=Ectothiorhodospira mobilis OX=195064 GN=queC PE=3 SV=1
MKQAVVLLSGGMDSATVLALARAEGFACHCLSFRYGQRHQAELQAAADLARALGAVDHRVVDLNLALFGGSALTDEAIQVPETPGQGIPVTYVPARNTVFLSIALAWAEVLQARDLFIGVNAVDYSGYPDCRPAFIEAFETMANLATKAGVEGDRFHIRTPLMQLSKAEIIRRGTAAGVDFARTVSCYQADDQGRACGVCDACRLRARGFAEAGLPDPTRYR

SEQ ID NO: 38040 - protein, 223 aa, Ectothiorhodospira sp.
  misc_feature (1)..(223): tr|H1G0Y8|H1G0Y8_9GAMM 7-cyano-7-deazaguanine synthase OS=Ectothiorhodospira sp. PHS-1 OX=519989 GN=queC PE=3 SV=1
MNNAVVLLSGGMDSATVLALARAEGFTCHCLSFRYGQRHSAELAAAVELAHALGATDHRVVDLNLGLFGGSALTDETIQVPDQLSDGIPVTYVPARNTVFLAVALAWAEVLKARDLFIGVNAVDYSGYPDCRPEFIQAFETMANLATKAGVEGDRIRIRTPLIDLSKAEIIRRGVATGVDFSRTVSCYSADAEGRACGTCDACRLRAKGFADAGIPDMTRYRS

SEQ ID NO: 38041 - protein, 225 aa, Ectothiorhodospira sp.
  misc_feature (1)..(225): tr|A0A166ZZ43|A0A166ZZ43_9GAMM 7-cyano-7-deazaguanine s ynthase OS=Ectothiorhodospira sp. BSL-9 OX=1442136 GN=q ueC PE=3 SV=1
MTMKNAVVLLSGGMDSATVLALARAQGFDCHCLSFRYGQRHHAELVAAAELAQSLDAADHRVVDLNLGLFGGSALTDQAIQVPDAPSDGIPVTYVPARNTVFLSIALAWAEVLDARDIFIGVNAVDYSGYPDCRPEFIQAFETMANLATKAGVGGDHCHIRTPLIDLSKAEIIRQGVEAGVDFARTVSCYSADDQGRACGLCDACRLRARGFADAGLPDTTRYRS

SEQ ID NO: 38042 - protein, 230 aa, Ectothiorhodospiraceae bacterium
  misc_feature (1)..(230): tr|A0A2E0UMT1|A0A2E0UMT1_9GAMM 7-cyano-7-deazaguanine s ynthase OS=Ectothiorhodospiraceae bacterium OX=2026737 GN=queC PE=3 SV=1
MSAKPLAIVLASGGMDSCVTIAMAAKSYELALLHVNYGQRTQDRELHAFTAIADHYEVPEDRRLVISIEHLAKIGGSSLTDNTIEIPSADPGAVHAASSIPNTYVPFRNANMLSIAVSWAEVLGAEALFIGAVEEDSSGYPDCREEFYVAYQRVIESGTKYERPLKIHTPLIHLAKSEIISQGLELGAPLHLTWSCYRNSDTACGTCESCRLRLRGFEQAGVEDPVEYAW

SEQ ID NO: 38043 - protein, 243 aa, Ectothiorhodospiraceae bacterium
  misc_feature (1)..(243): tr|A0A2A4X8U3|A0A2A4X8U3_9GAMM 7-cyano-7-deazaguanine s ynthase OS=Ectothiorhodospiraceae bacterium OX=2026737 GN=queC PE=3 SV=1
MSTKKNAVVLLSGGLDSATTLVMAKAEGYSCYALSFDYGQRHRAELHAAAKLANKLGVVEYRVAPLDLRAIGGSALTDESIDVPTASTIIPSSGDSMEDGVGQGETSIIPVTYVPARNTIFLSYALAWAEVLEAEHIFIGVNAVDYSGYPDCRPEYIKAFQTMASLATKAGVEGHPTHIHTPLIQLSKADIIRKGLSLGLGYGDTISCYDADDQGRACGQCDSCHLRAAGFAEAGVNDPTLYR

SEQ ID NO: 38044 - protein, 222 aa, Edaphobacillus lindanitolerans
  misc_feature (1)..(222): tr|A0A1U7PPW5|A0A1U7PPW5_9BACI 7-cyano-7-deazaguanine s ynthase OS=Edaphobacillus lindanitolerans OX=550447 GN= queC PE=3 SV=1
MLQHEKALVVFSGGQDSTTCLLWARQQFAEVEAVTFDYGQRHELEIECAREIAGELGVRHHVLDMSLLGQLAPNALTDTGLEIQDGEDGGLPSTFVPGRNLLFLSFAGVLAGQIGAKHLVTGVSETDFSGYPDCRDAFIKSLNVTLNLAMDEPYAIHTPLMWLDKAGVWELADELGALEFVRVKTLTCYNGVKADGCGDCPACRLRRKGLQQYQAQKAQPAR

SEQ ID NO: 38045 - protein, 230 aa, Edaphobacter aggregans
  misc_feature (1)..(230): tr|A0A3R9QCM5|A0A3R9QCM5_9BACT 7-cyano-7-deazaguanine s ynthase OS=Edaphobacter aggregans OX=570835 GN=queC PE= 3 SV=1
MTDTALPRAVVSLSGGMDSVVCAALASRDFETYAVHFSYGQRTENRELLAAQDAVRILGIRELLHLKLDVFRRIGGSALTDKSIPVPNAPAHESDIGTDIPVTYVPFRNAHFLSAAVSWAEVLGAKTVFIGAVEQDSSGYPDCRPAYYDAFNQLIREGTKEGDIQVVTPLIHLKKHEIVRLGVELGAPFHVSWSCYSGETEACGVCESCVLRLRAFREAGAVDPILYATP

SEQ ID NO: 38046 - protein, 238 aa, Edaphobacter dinghuensis
  misc_feature (1)..(238): tr|A0A495BWD1|A0A495BWD1_9BACT 7-cyano-7-deazaguanine s ynthase OS=Edaphobacter dinghuensis OX=1560005 GN=queC PE=3 SV=1
MTKMTTTEITTDSVRPRAVVCLSGGMDSCVCAALAARDYDVYALHFSYGQRTEGRELRSAEEVARIVGARELLPLRIDLFRKIGGSALTDPNIAVPVAGDEASIGQEVPVTYVPFRNAHFLSAAVSWAEVLGAKTVFIGAVEQDSSGYPDCRPAYYEAFNKLIEMGTKEGDIRIATPLIELRKSEIVRLGVELGAPFHVSWSCYSNETVACGVCESCILRLRAFRDAGAVDPIPYVIA

SEQ ID NO: 38047 - protein, 240 aa, Edaphobacter modestus
  misc_feature (1)..(240): tr|A0A4Q7YUN8|A0A4Q7YUN8_9BACT 7-cyano-7-deazaguanine s ynthase OS=Edaphobacter modestus OX=388466 GN=queC PE=3 SV=1
MITPADGAHQRPKAVLCLSGGMDSTVCASLATREFDVYALHFSYGQRTEAKELASAKEIARLTGAKEFLPLKMDLFRRIGGSALTDETIAVPDAPAEEAIGAEIPVTYVPFRNAHFLSAAVSWAEVVGAKKIFIGAVEQDSSGYPDCRPSYYEAFNELIRQGTKEGDIRVETPLISMRKSEIVRLGVELGAPFHVSWSCYSGEREACGVCESCVLRLRAFREIGTLDPIPYAGLKAASNS

SEQ ID NO: 38048 - protein, 229 aa, Edwardsiella anguillarum
  misc_feature (1)..(229): tr|A0A076LRT2|A0A076LRT2_9GAMM 7-cyano-7-deazaguanine s ynthase OS=Edwardsiella anguillarum ET080813 OX=667120 GN=queC PE=3 SV=1
MKRAVVVFSGGQDSTTCLIQALHRYDDVHCITFDYGQRHRAEIDVARRLAEQLGASAHKVLNVGLLNELAISSLTRDNIPVPTQSEGGIPNTFVPGRNVLFLTLAAIYAYQVEAEAVITGVCETDFSGYPDCRDQFVQALNHAVCLGMARDIRFETPLMWLNKAETWALADYYGQLARVRHDTLTCYNGIQGDGCGHCAACHLRAHGLQQYLADPAAVMAALKHKSGLQ

SEQ ID NO: 38049 - protein, 229 aa, Edwardsiella hoshinae
  misc_feature (1)..(229): tr|A0A376DJ09|A0A376DJ09_9GAMM 7-cyano-7-deazaguanine s ynthase OS=Edwardsiella hoshinae OX=93378 GN=queC PE=3 SV=1
MKRAVVVFSGGQDSTTCLIQALQRYDDVHCITFDYGQRHRAEIDVARNLAQQLGASAHKVLDVGLLNELAISSLTRDNIPVPTQSESGIPNTFVPGRNILFLTLAAIYAYQVEAEAVITGVCETDFSGYPDCRDQFVKALNHAVSLGMARDIRFETPLMWLNKAETWALADYYGQLERVRHDTLTCYNGIQGDGCGHCAACHLRAHGLQQYQADPAGVMAALRQKSGLA

SEQ ID NO: 38050 - protein, 229 aa, Edwardsiella ictaluri
  misc_feature (1)..(229): sp|C5BCK3|QUEC_EDWI9 7-cyano-7-deazaguanine synthase OS =Edwardsiella ictaluri (strain 93-146) OX=634503 GN=que C PE=3 SV=1
MKRAVVVFSGGQDSTTCLIQALHHYDDVHCITFDYGQRHRAEIDVARRLAGQLGASAHKVLDVGLLNELAISSLTRDNIPVPTQSEDGIPNTFVPGRNVLFLTLAAIYAYQVEAEAVITGVCETDFSGYPDCRDQFVQALNHAVCLGMARDIRFETPLMWLNKAETWALADYYGQLARVRHDTLTCYNGVQGDGCGHCAACHLRAHGLQQYLANPAAVMAALKRKSGLQ

SEQ ID NO: 38051 - protein, 229 aa, Edwardsiella piscicida
  misc_feature (1)..(229): tr|A0A411GZX2|A0A411GZX2_9GAMM 7-cyano-7-deazaguanine s ynthase OS=Edwardsiella piscicida OX=1263550 GN=queC PE =3 SV=1
MKRAVVVFSGGQDSTTCLIQALHRYDDVHCITFDYGQRHRAEIDVARRLAEQLGASAHKVLDVGLLNELAISSLTRDNIPVPTQSEDGIPNTFVPGRNVLFLTLAAIYAYQVEAEAVITGVCETDFSGYPDCRDQFVQALNHAVCLGMARDIRFETPLMWLNKAETWALADYYGQLERVRHDTLTCYNGIQGDGCGHCAACHLRAHGLQQYLADPAAVMAALKQKSGLQ

SEQ ID NO: 38052 - protein, 229 aa, Edwardsiella piscicida; identical to SEQ ID NO: 38048
  misc_feature (1)..(229): tr|A0A034T1E4|A0A034T1E4_9GAMM 7-cyano-7-deazaguanine s ynthase OS=Edwardsiella piscicida OX=1263550 GN=queC PE =3 SV=1

SEQ ID NO: 38053 - protein, 229 aa, Edwardsiella tarda
  misc_feature (1)..(229): tr|D4F307|D4F307_EDWTA 7-cyano-7-deazaguanine synthase OS=Edwardsiella tarda ATCC 23685 OX=500638 GN=queC PE=3 SV=1
MKRAVVVFSGGQDSTTCLIQALQRYDDVHCITFDYGQRHRAEIDVARNLAHQLGASAHKVLDVGLLNELAISSLTRDNIPVPTQSETGIPNTFVPGRNILFLTLAAIYAYQVEAEAVITGVCETDFSGYPDCRDAFVKALHHAVSLGMARDIRFETPLMWLNKAETWALADYYGQLERVRHDTLTCYNGIQGDGCGHCAACHLRAHGLQQYQADPAGVMASLRQKSGLA

SEQ ID NO: 38054 - protein, 229 aa, Edwardsiella tarda
  misc_feature (1)..(229): tr|A0A0H3DR61|A0A0H3DR61_EDWTF 7-cyano-7-deazaguanine s ynthase OS=Edwardsiella tarda (strain FL6-60) OX=718251 GN=queC PE=3 SV=1
MKRAVVVFSGGQDSTTCLIQALHRYDDVHCITFDYGQRHRAEIDVARRLAKQLGASAHKVLDVGLLNELAISSLTRDNIPVPTQSEDGIPNTFVPGRNVLFLTLAAIYAYQVEAEAVITGVCETDFSGYPDCRDQFVQALNHAVCLGMARDIRFETPLMWLNKAETWALADYYGQLERVRHDTLTCYNGIQGDGCGHCAACHLRAHGLQQYLADPAAVMAALKQKSGLQ

SEQ ID NO: 38055 - protein, 235 aa, Effusibacillus lacus
  misc_feature (1)..(235): tr|A0A292YJI4|A0A292YJI4_9BACL 7-cyano-7-deazaguanine s ynthase OS=Effusibacillus lacus OX=1348429 GN=queC PE=3 SV=1
MADAKKSVVVLSGGLDSTTCMAVAREAGYDVWPLTFFYGQKHSIELESARKVAEYYGYKDRHFIADLNGIIRGSALTDADKEIPVGRSEEEMTSEIPVTYVPARNIIFLSIALSYAESIGAEAIYIGVNALDYSGYPDCRPEFIQAFQEVINKGTVAGAHGQGIRIEAPLQNLTKAEIARLGLRLGAPLQFTHSCYLGTDPACGVCDSCQLRIKGFKEAGVPDPVPYAIQIDWEN

SEQ ID NO: 38056 - protein, 210 aa, Eggerthella lenta
  misc_feature (1)..(210): tr|A0A369NGB6|A0A369NGB6_EGGLN ExsB family transcriptio nal regulator OS=Eggerthella lenta OX=84112 GN=C1859_15 440 PE=4 SV=1
MTATGPGQDVGVEALDAFFARTPRLAVAFSGGCDSSFLLVAALRAGCDVKAYGVRTAFQPAFEIDDAKRLAAELGADFELVDADVLAQGEICANGPDRCYRCKTFIFSTILARMAEDGFEVLADGTNVTDDPANRPGFRALAELGVVSPLRRAGMAKDDVRAASRELGLFTADKPSFSCIAVHVGAGRPVTAQTLAETAERLGVTGGKRP

SEQ ID NO: 38057 - protein, 210 aa, Eggerthella lenta
  misc_feature (1)..(210): tr|A0A369N4M0|A0A369N4M0_EGGLN ExsB family transcriptio nal regulator OS=Eggerthella lenta OX=84112 GN=C1853_14 660 PE=4 SV=1
MTLTGSGQDVGVEALDAFFARTPRLAVAFSGGCDSSFLLAAALRAGCDVRAYGVRTAFQPAFEIEDAQRLAAELGADFELVDADVLAQGEICANGPDRCYRCKTFIFSTILARMAEDGFEVLADGTNVTDDPANRPGFQALAELGVVSPLRRAGMTKDDVRAASRELGLFTADKPSFSCIAVHVGEGRPITAAALAETAERLGVADGRRP

SEQ ID NO: 38058 - protein, 279 aa, Eggerthella sp.
  misc_feature (1)..(279): tr|A0A415XT75|A0A415XT75_9ACTN 7-cyano-7-deazaguanine s ynthase OS=Eggerthella sp. AM16-19 OX=2292042 GN=queC P E=3 SV=1
MGIFEGQAFSSFAAAAANACENLRVHGTLGEDPASRDENGKVCGENPQKALVLSSGGVDSSTLLALAVKRFGAENVFALSISYGQRHEKEIESAKAVAAHYGVEQRFLDLSAIFADSDCSLLEHSSQDVPEESYADQIDEADGSPVSTYVPFRNGLFLSSAASMALSLGASVLFYGAHHDDWAGDAYPDCSIEFVNAMNLAITQGTAGQLHMEAPFVSWSKADIVKCGLELDVPYELTWSCYEGGERPCGKCGTCIDRNRAFEANGMRDPLLDKLDAQG

SEQ ID NO: 38059 - protein, 226 aa, Eggerthella sp.
  misc_feature (1)..(226): tr|R5G0Q2|R5G0Q2_9ACTN 7-cyano-7-deazaguanine synthase OS=Eggerthella sp. CAG:1427 OX=1262874 GN=queC PE=3 SV= 1
MRALVLCSGGVDSTTLLAMAVDRYGSENVVALSISYGQRHEKELKAARDVARYYHVEQRFLDLAAIFADSSCSLLAHSEKDIPRESYAEQLEQADTKLVSTYVPFRNGLFLSSAASMALSLECSVLYYGAHHDDWAGNAYPDCSREFVAAMNNAIREGTGGELHMEAPFVEWSKADIVKKGLELNVPYELTWSCYEGGDKPCGVCATCIDRKRAFELNGSIDPLLK

SEQ ID NO: 38060 - protein, 438 aa, Eikenella corrodens
  misc_feature (1)..(438): tr|A0A3S9SMY9|A0A3S9SMY9_EIKCO 7-cyano-7-deazaguanine s ynthase OS=Eikenella corrodens OX=539 GN=ELB75_11810 PE =3 SV=1
MNQLFFHHDIEQLKNLPNGVLPIRLYGTGNKSLQIAHIGNMVLDRVRRLGVELNNQVMDFLTIAMAVTAADTFILRKDTANGWCRSFSITLPLCQPDIWQANKVHLEQILHFLSGDIWQFDFQAGGQLPPQPYKLSGRTKLVDLRNKDCVCLFSGGLDSAIGVIDLLEQGHSPVLVSHSYKGDKSRQQAIIQQLNQNGYINQFSQFDAIAQPHLNNEKSTEITMRTRSLNFLAFAIVSAYALQEVAQKKIDILVPENGVISINAPLTVRRVGALSTRTTHPYFIQEIQKFFTAVNIPFTLRNPYQFKTKGQMIAECKNLLLLRQIIPDTVSCSHWKRKNQQCGVCVPCLIRRASLHYAGITNDTQYEFNDIRQILINQDRRDDLFALMSAIRQKDYRNINQWVLQSGPLPIQQLNQFANVFMTGLDEVEQLLIENQIL

SEQ ID NO: 38061 - protein, 239 aa, Eilatimonas milleporae
  misc_feature (1)..(239): tr|A0A3M0C996|A0A3M0C996_9PROT 7-cyano-7-deazaguanine s ynthase OS=Eilatimonas milleporae OX=911205 GN=queC PE= 3 SV=1
MKQSGKKAVVLLSGGLDSATVVAMAHDQGYHVHALSFRYGQRHSVELTAAEAVAKQLGVAEHKIAELDLRLFGGSALTADIAVPKDRTEDAMTADIPITYVPARNTIFLSFALAYAEVSGAGDIFIGVNALDYSGYPDCRAEYIRAYETMANLATKAGVSGERPLRIQAPLIDMTKADIIKTGTALGVDYGLTISCYDPDDAGRACGHCDSCLLRKKGFREAGVDDPTRYQKRHDSFQR

SEQ ID NO: 38062 - protein, 196 aa, Elizabethkingia bruuniana
  misc_feature (1)..(196): tr|A0A5E8D5W3|A0A5E8D5W3_9FLAO 7-cyano-7-deazaguanine s ynthase OS=Elizabethkingia bruuniana OX=1756149 GN=AYC6 5_09055 PE=3 SV=1
MKQAVLLSGGIDSICLTYGIKPDIAYTIDYGQRVAGREIYVSKYICQKLGIEHKIIHINCSSLGTGSLAGTENINIAPSEEWWPYRNQLLITFASMQAIKDKVSSLFLASVKSDNFHKDGTSIFYQLIHNLVSYQEGSINIYCPTLEYYSHELVTKYNVPIDLLTIAHSCHISNLACGKCSGCLKQLKVRYEIGIE

SEQ ID NO: 38063 - protein, 241 aa, Elstera cyanobacteriorum
  misc_feature (1)..(241): tr|A0A255XKB0|A0A255XKB0_9PROT 7-cyano-7-deazaguanine s ynthase OS=Elstera cyanobacteriorum OX=2022747 GN=queC PE=3 SV=1
MSIPETALVLFSGGQDSATCLAWALDRFDRVETIGFDYGQRHKIELECRATIRDELAAQFPQWRGKLGPDHLLDLSVVGAIGETAMTADTVITYAENGLPNTFVPGRNILMFTVAAALAYRRGARHLVGGMCETDYSGYPDCRDDTIKALQVALGLGMDKRFVLHTPLMWLDKAATWKLAETLGGVDLIELIRRESHSCYLGDRTHLHPWGHGCGTCPACQLRSRGWEAYRADPPDLATTP

SEQ ID NO: 38064 - protein, 241 aa, Elstera litoralis
  misc_feature (1)..(241): tr|A0A0F3IXX5|A0A0F3IXX5_9PROT 7-cyano-7-deazaguanine s ynthase OS=Elstera litoralis OX=552518 GN=queC PE=3 SV= 1
MAIPETALVLFSGGQDSATCLAWALDRFDHVETIGFDYGQRHRIELDCRDTLRAEIAAQFPQWRGKLGPDHLLDLGVVGTISDTALTSDAAIQFSDTGLPNTFVPGRNILMFTVAAALAYRRGARHLVGGMCETDYSGYPDCRDDTIKALQVALGLGMDKRFVLHTPLMWLDKAATWELAEDLGGVDLVELIRRESHSCYLGDRDHLHPWGFGCGTCPACQLRSKGWEAYRANPPDLATTP

SEQ ID NO: 38065 - protein, 213 aa, Elusimicrobia bacterium
  misc_feature (1)..(213): tr|A0A2M7S2X9|A0A2M7S2X9_9BACT 7-cyano-7-deazaguanine s ynthase OS=Elusimicrobia bacterium CG_4_10_14_0_8_um_fi lter_37_32 OX=2014301 GN=queC PE=3 SV=1
MINKAVVLLSGGLDSTTTLYYAKKQKYDCYCLIFDYGQRHKKEIISAKKIAKLNSCHYYIIKFTLPWRGSSLIDGGLQIPFHKANQIGKTGVPSTYVPARNTIFISFALSLAETIGAESIFIGANAIDFSGYPDCRPEYYRQFNKLVSTAIPGKKIKIHTPLIDKTKAEIIRLGKKLNVPFELTWSCYSGGRLPCGKCDSCILRSKGFQEANS

SEQ ID NO: 38066 - protein, 227 aa, Elusimicrobia bacterium
  misc_feature (1)..(227): tr|A0A355E417|A0A355E417_9BACT 7-cyano-7-deazaguanine s ynthase OS=Elusimicrobia bacterium OX=2030800 GN=queC P E=3 SV=1
MSRSEAPAVVVLLSGGLDSATCLYWARARGWRLHALAVGYGQRHVRELRSARRLARAAGAELHELRLRLPWLGVSSLVGRGTALPDVPLARIGKQGIPSTYVPGRNTVFLALAVSLADSLGAEGVVIGANAMDSSGYPDCRPDFISAFERTARLGTRKGRETGRLKVYAPLLRDGKGAIVRKAFRLGVPLELTWSCYRGGRRPCGSCDSCKLRAKGFAEAGRKDPAL

SEQ ID NO: 38067 - protein, 484 aa, Elusimicrobium minutum
  misc_feature (1)..(484): tr|B2KDX5|B2KDX5_ELUMP 7-cyano-7-deazaguanine synthase OS=Elusimicrobium minutum (strain Pei191) OX=445932 GN= queC PE=3 SV=1
MNIVVANSVFDCENWEGNALVIDVLRSSTTVCALVNRGKEDIRVYGDKDLAAHYKNTRSEVELFSELIIEGVNKEDNSPFLAGKSNPKKPGAIVTTAGTPAVMSLENAKEIFMGGYCNIYTLSSYLKSLKEDLLIVPSNLFGHSSDIEDAVCAESYMQMFSGLGNTEQDIQTIKNTARYEDFIKNGPKTAVKDAALCLTVNSIPVIPIIKIMGGYGVVCTPFNKEKVLKREEESGMKAVNNNIDSSVMPSITQRREIPAKVEENKTSKKKAVVLFSGGLDSTVCLYWALKEGYECYALSVAYGQKHLKEIEVAQRLAKQAGVTHKHIEINLPWLAEATSLVGGAEIPATPMEQIGKSIPSTYVPARNLIFVSLGASWADSIGAEAVVLGPNAVDYSGYPDCTPQFYKPLSEAVRVGTRLGKKFEILTPIIKLNKAEIVKLGRKLGAPLEQTWTCYNGGEKPCGVCESCKLRRKGFEDAGEREEY

SEQ ID NO: 38068 - protein, 636 aa, Elusimicrobium sp.
  misc_feature (1)..(636): tr|A0A1Y4DB96|A0A1Y4DB96_9BACT 7-cyano-7-deazaguanine s ynthase OS=Elusimicrobium sp. An273 OX=1965617 GN=queC PE=3 SV=1
MNVLIARTIEECEQWTDVAVVVDVLCASTTVCALLKRGKKDVLAFGDAAQAAAFVQAHGDFEVYSDVDFALPHENNSPSLAAKSNARKPALVLTSAGTKALEHLKQASLVLMGGFCNFYALAEALAAQPKDILLVSGSLFDMADDVEDGLCVSALKDYIQGIGNPQDAIVEFNNTMRFGEFLHSGSKTAEKDLKTAFKVNGIAVVPQVSFAPDGYGVCHVFGQPAPQEWMGKQPSSAAPEPAPQAAAPAEETPAPATVPQQPAPVQESTPAADTLQTPAAENTLRKEVKTAEKNLQAAAQQATTRLKGFFSGILKAVKEEKAELEGDLGMAQKQAESPKTAPQNQFEDPLDRVLKKSERAPAPQENHPARPAEPEAPAAPEQEAAPQPSPVQAAVPAGEVTFSREAAAGLSNKKRKKAIVLFSGGLDSTTCLYWALAHGYECEALTVSYGQRHEREVQSAQAIARKLGIKHHLITLDLPWLSCCSLVDKNKQLPDIAVEDIPKEGIPSTYVPGRNLMFLAIAGSLLDAVGADAIIAGPNAVDFSGYPDCTPAFFKAAAEALNRGTKTGVSEGIEVLAPLMRLSKAQIVKLAANLKVPFELTWSCYAGGKKPCGHCDSCKLRAKGFEEAGVHDTSLD

SEQ ID NO: 38069 - protein, 238 aa, Emcibacter congregatus
  misc_feature (1)..(238): tr|A0A2G4YM83|A0A2G4YM83_9PROT 7-cyano-7-deazaguanine s ynthase OS=Emcibacter congregatus OX=2043170 GN=queC PE =3 SV=1
MTEKKKAVVLLSGGLDSTTCVAIAKAEGFEVYGLSFDYGQRHTIELDAAARVAETMGLAKHVIAKIDLRVFGGSALTADIDVPKGRDEDHMGDDIPVTYVPARNTIFLSFALAFAETQGANDIFIGVNALDFSGYPDCRPDYIAAYQKMANLATRSGVEGAKTESSLTIHTPLIDLTKADIVRTGLSLGVDYSITTSCYDPLPDGTSCGQCDACHLRLKGFREAGERDPVAYKNDLDR

SEQ ID NO: 38070 - protein, 235 aa, Emcibacter nanhaiensis
  misc_feature (1)..(235): tr|A0A501PSI1|A0A501PSI1_9PROT 7-cyano-7-deazaguanine s ynthase OS=Emcibacter nanhaiensis OX=1505037 GN=queC PE =3 SV=1
MSESTAEPKKAVVLLSGGLDSSTCVAIAQKEGYEVYGLSFSYGQRHTIELDAAKRVAQAMGIRKHVIANIDLAAFGGSALTDDIPVPKDRSHEDMGADVPVTYVPARNTIFLSFALGWAEVLGADDIFIGVNAMDYSGYPDCRPEFIKAYEVMANLATRAGTQDARHLTIHTPLIDMTKGEIVKTGLALGVDYSQTISCYDPDEQGRACGHCDACQLRLKGFAEAGTTDPVAYQD

SEQ ID NO: 38071 - protein, 234 aa, Empedobacter haloabium
  misc_feature (1)..(234): tr|A0A5C7BTG7|A0A5C7BTG7_9FLAO 7-cyano-7-deazaguanine s ynthase OS=Empedobacter haloabium OX=592317 GN=queC PE= 3 SV=1
MKSDAALVLFSGGQDSTTCLAWALDRYARVETIGFDYGQRHAIELTMRPELLGKLRAQRPDWAARLGEDHMIDLGLIKQLSHTAMTEDIEITMQANGLPNTFVPGRNLMFMMVAATLAYRRGLNVLVGGMCETDFSGYPDCRDDTMKALQVALNLGMDTRVKLETPLMWLDKAETWELAERLGGQALVDLIRADTHTCYKGERGALHDWGYGCGECPACALRARGYREYAARRA

SEQ ID NO: 38072 - protein, 217 aa, Endomicrobium proavitum
  misc_feature (1)..(217): tr|A0A0G3WGA8|A0A0G3WGA8_9BACT 7-cyano-7-deazaguanine s ynthase OS=Endomicrobium proavitum OX=1408281 GN=queC P E=3 SV=1
MKIRQKQNAVILFSSGLDSTTALYYALSKGYKCYCLIFDYGQRHKREIKSAQKIAKLVKADFTVIKLSLPWSKDVLTNKNKKVPTHKVIKDIIPATYVPGRNTLFLSYGLSYAESINARSIFIGANALDYSGYPDCRPEFIKAYNGLLKSLGLKITVQAPLVNMTKAQIIKLGGKLKVPYQYTWSCYNGLKKPCGTCDSCKLRAKGFKEAELNDPAI

SEQ ID NO: 38073 - protein, 226 aa, Escarpia spicata
  misc_feature (1)..(226): tr|A0A370DMY5|A0A370DMY5_9GAMM 7-cyano-7-deazaguanine s ynthase OS=endosymbiont of Escarpia spicata OX=2200908 GN=queC PE=3 SV=1
MLKTKKAVILLSGGLDSATVLAMAQQQGYVCHALSMEYGQRHMAELSAARRVAQSLNTAEHKMVRIGLETIGGSALTDSAIPVPDHAEEGIPVTYVPARNTVFLSLALGWAEVLGAQDIFIGVNAVDYSGYPDCRPEFIHSFERLANIATKAGVEGERFKVHTPLIDMSKAEIISTGIRLGVDYSLTISCYQADPEGRACGVCDSCRLRAKGFQDAAIDDPTSYRC

SEQ ID NO: 38074 - protein, 226 aa, Unknown
  misc_feature (1)..(226): tr|S6BTY1|S6BTY1_9GAMM 7-cyano-7-deazaguanine synthase OS=endosymbiont of unidentified scaly snail isolate Mon ju OX=1248727 GN=queC PE=3 SV=1
MSDQPKAVVLLSGGLDSATTLAIAREQGFACHALSFDYGQRHAAELNAARRVAAALGVLEHKVLPLSLDAIGGSALTDQAIAVPEEGGEGIPVTYVPARNTVFLSLALGWAEVLGARDLFVGVNAVDYSGYPDCRPEFIAAFEQLANLATRAGVEGERFRIHAPLIEMSKAEIVRTGSRLGLDYGLTVSCYQADAEGRACGRCDSCRFRAQGFAEAGLPDPTHYQD

SEQ ID NO: 38075 - protein, 265 aa, Endozoicomonadaceae bacterium
  misc_feature (1)..(265): tr|A0A444GPU4|A0A444GPU4_9GAMM 7-cyano-7-deazaguanine s ynthase OS=Endozoicomonadaceae bacterium GTF-13 OX=2506 149 GN=queC PE=3 SV=1
MRTSRNRRSLCPHRFSGADRIKCGHFCSPHRTPYPRERHALSSRSLMNKKVVVIYSGGMDSFTVLHRAIEEGLEVHALSFNYGQRHQRELDYARRVCSRLGVPHLVSDITSINALLQGSSLTSSEIEVAEGHYTAENMKSTVVPNRNMILLSLAVGYAVSIGADRVFYGAHSGDHTIYPDCRPEFVEAMNSVTRIANFEPVEIVSPFLEQDKIEILRWGLARGLDYADTWTCYNGREKACGKCGSCCERLEAFSLNQATDPLPYE

SEQ ID NO: 38076 - protein, 239 aa, Endozoicomonas elysicola
  misc_feature (1)..(239): tr|A0A081KE30|A0A081KE30_9GAMM 7-cyano-7-deazaguanine s ynthase OS=Endozoicomonas elysicola OX=305900 GN=queC P E=3 SV=1
MRKAVVLLSGGLDSATVLALAAEQGYETYSVSFDYGQRHRAELEASRRLADAMGVREHKVLKLGLTEIGGSALTDEDIPVPDFGEHPKETLKDVPRDNLSSIPVTYVPARNTVFLSLALGWAEVLGARDIFIGANVVDYSNYPDCRPEYLKAFEDMANLATRAGVEGDHFRIRAPLLNLTKAEIISEGVRLGVDYGMTISCYQADDQGAACGVCDSCSFRRKGFLEAAVPDPTPYRTAV

SEQ ID NO: 38077 - protein, 227 aa, Endozoicomonas montiporae
  misc_feature (1)..(227): tr|A0A081N9X7|A0A081N9X7_9GAMM 7-cyano-7-deazaguanine s ynthase OS=Endozoicomonas montiporae OX=1027273 GN=queC PE=3 SV=1
MCMSKKAVILLSGGLDSTTVLAMAKDQGYECYTVSFDYGQRHRAELRASKIVSEVLGAKDHKTLKMDFRDIGGSALTDDDIAVPEELDEGIPVTYVPARNTVFLSLALGWAEVLGARDIFIGANDVDYSGYPDCRPEFLEAFQNMANLATKAGVEGDHFHIRAPLLRLTKAEIVQAGDRLGVDYGLTVSCYQADDEGRACGVCDSCRYRKKGFEEAGLVDPTRYQSS

SEQ ID NO: 38078 - protein, 225 aa, Endozoicomonas montiporae
  misc_feature (1)..(225): tr|A0A142BEA8|A0A142BEA8_9GAMM 7-cyano-7-deazaguanine s ynthase OS=Endozoicomonas montiporae CL-33 OX=570277 GN =queC PE=3 SV=1
MSKKAVILLSGGLDSTTVLAMAKDQGYECYTVSFDYGQRHRAELRASKIVSEVLGAKDHKTLKMDFRDIGGSALTDDDIAVPEELDEGIPVTYVPARNTVFLSLALGWAEVLGARDIFIGANDVDYSGYPDCRPEFLEAFQNMANLATKAGVEGDHFHIRAPLLRLTKAEIVQAGDRLGVDYGLTVSCYQADDEGRACGVCDSCRYRKKGFEEAGLVDPTRYQSS

SEQ ID NO: 38079 - protein, 227 aa, Endozoicomonas numazuensis
  misc_feature (1)..(227): tr|A0A081NE16|A0A081NE16_9GAMM 7-cyano-7-deazaguanine s ynthase OS=Endozoicomonas numazuensis OX=1137799 GN=que C PE=3 SV=1
MSMTKKAVILLSGGLDSSTVLAIARGQGYECYTVSFDYGQRHRVELKASARVSKELGAKDHKTLKLDLRDLGGSALTDDEIDVPEELGEGIPVTYVPARNTVFLSLALGWAEILGARDIFIGANDVDYSGYPDCRPAYLEAFEKMANLATKAGIEGDHFHIRAPLLELTKAEIIKEGSRLGVDYGITVSCYQADGQGRACGVCDSCRYRSKGFEEAGVADPTPYIES

SEQ ID NO: 38080 - protein, 224 aa, Endozoicomonas sp.
  misc_feature (1)..(224): tr|A0A1D2X4Z2|A0A1D2X4Z2_9GAMM 7-cyano-7-deazaguanine s ynthase OS=Endozoicomonas sp. (ex Bugula neritina AB1) OX=1868284 GN=queC PE=3 SV=1
MNDKRAVVLVSGGLDSATVLAIARKKNYKCFTMSFDYGQKHRSELAASEVVSNRLGAQVHKIIKLDLREIGGSALTDDGMDVPNFGGEGIPATYVPARNTVFLSLALGWAEVLGARDIFIGANNIDYSGYPDCRPEYLQAFQTMANLATKAGVEGDHFTIQAPLLEMTKAEVIREGNRLGVDYGITISCYQADDYGRACGECDSCHYRKKGFIEAGIEDPTHYQ

SEQ ID NO: 38081 - protein, 265 aa, Endozoicomonas sp.; identical to SEQ ID NO: 38075
  misc_feature (1)..(265): tr|A0A3P3VKM5|A0A3P3VKM5_9GAMM 7-cyano-7-deazaguanine s ynthase OS=Endozoicomonas sp. GTF13 OX=2528527 GN=queC PE=3 SV=1

SEQ ID NO: 38082 - protein, 235 aa, Enhydrobacter aerosaccus
  misc_feature (1)..(235): tr|A0A1T4RAX8|A0A1T4RAX8_9PROT 7-cyano-7-deazaguanine s ynthase OS=Enhydrobacter aerosaccus OX=225324 GN=queC P E=3 SV=1
MDDSRSALVLFSGGQDSTTCLAWALNRFQRVETVAFDYRQRHRVELDQRLVVLDRIRAGFPQWADRLGEDHFVDMAVLGQISETSLTRDVAFAMQQDGLPNTFVPGRNLLFFTFAAAIAWRRNIRHLIGGMCETDYSGYPDCRDNTIKALQVALNLGMDRNFALHTPLMWRDKAETWALAQELGGEALIEIIREHTHTCYRSERDQRHDWGYGCGECPACVLRKHGYESWNARAA

SEQ ID NO: 38083 - protein, 235 aa, Enhydrobacter sp.
  misc_feature (1)..(235): tr|A0A5C8PWB9|A0A5C8PWB9_9PROT 7-cyano-7-deazaguanine s ynthase OS=Enhydrobacter sp. CC-CFT640 OX=2586908 GN=qu eC PE=3 SV=1
MTDRALVLFSGGQDSTVCLAWALDRYDHVETVGFDYGQRHAIEMACREAVRFALRRGFPRWASRLGADHVLDLRTLAAIGDTALTSNAAIAFEQNGLPNTFVPGRNILFFTYAAAVAYRRDLRRLVGGMCETDYSGYPDCRDDTLKALQVALTLGLDRRLVIDTPLMWLDKAATWQLAEALGGTALVDLVVAETHTCYLGDRATRHAWGYGCGTCPACALRAQGWARYRQSAGSR

SEQ ID NO: 38084 - protein, 236 aa, Enhydrobacter sp.
  misc_feature (1)..(236): tr|A0A1V2GML6|A0A1V2GML6_9PROT 7-cyano-7-deazaguanine s ynthase OS=Enhydrobacter sp. H5 OX=1907940 GN=queC PE=3 SV=1
MSTSTTPQNAVVLLSGGLDSVTCLYWAKANYANVTAVSFNYGQRHNSELNAAKKIAATAQVNHRIIDIDLAQLGGSALTDASLVVPDAKQTDFSDNQHNDSIPITYVPARNTIFLSYALALAEVTQSNAIVIGVNAVDYSGYPDCRPEYIAAFEKMANLATKAGVMGNHLHIATPLLHLSKAEIIKLGVSLGVDYALTVSCYRADSEGRACGHCDSCYLRQQGFLQAEIDDPTIYQ

SEQ ID NO: 38085 - protein, 244 aa, Enhygromyxa salina
  misc_feature (1)..(244): tr|A0A2S9XXV4|A0A2S9XXV4_9DELT 7-cyano-7-deazaguanine s ynthase OS=Enhygromyxa salina OX=215803 GN=queC PE=3 SV =1
MSVREPKDAPAIVLLSGGLDSTTVLAIAAREAGQRVHALSFAYGQRHAIELRQAARQAARFGVVAHEVVDLGHLGKLVASASSLVAASELDVPSASARAGHDDIPSTYVPARNTVFLSYALAWAEVVGARDIWLGVNAVDYSGYPDCRPEFIAAFETTANLATKLGVSAGGAEGIQIHAPLIELHKHEIIARGLALGVDYAETVSCYDPVEREGVALACGRCESCTLRRAGFEQAGVADPTRYV

SEQ ID NO: 38086 - protein, 240 aa, Enhygromyxa salina
  misc_feature (1)..(240): tr|A0A2S9XLB9|A0A2S9XLB9_9DELT 7-cyano-7-deazaguanine s ynthase OS=Enhygromyxa salina OX=215803 GN=queC PE=3 SV =1
MPQREPTPGAAAIVLLSGGLDSSTVLAIAAREAKQRIHALSFSYGQRHGHELSCAATQAASFGAVAHQVLDLGQLGQLVAPATSLVAGSELAVPSAASREGHDDIPSTYVPARNTVFLSYALAWAEVVGAHDIWLGVNAVDYSGYPDCRPEFIESFERTANLATKFGAGPDRLRIHAPLIELHKHEIIQRGVSLGVDYAQTTSCYDPAHGLACGQCESCALRRAGFEQAGVADPTRYRQS

SEQ ID NO: 38087 - protein, 236 aa, Ensifer adhaerens
  misc_feature (1)..(236): tr|A0A4S2TS02|A0A4S2TS02_ENSAD 7-cyano-7-deazaguanine s ynthase OS=Ensifer adhaerens OX=106592 GN=queC PE=3 SV= 1
MKTIVICSGGLDSVSLAHKVAAEHELIGLLSFDYGQRHRKELDFAAACAKRLGVPHQVIDISAIGAHLTGSALTDDVDVPDGHYAEETMKATVVPNRNAIMLAIGFGLAAAQKADAVAVAVHGGDHFIYPDCRPGFIDAFQAMQNHALDGYADITLYAPYVTISKADIVTDGASHQTPFEATWSCYKGGARHCGRCGTCVERREAFHLAGVADPTDYEDPDFWVAATSAFAAEEVK

SEQ ID NO: 38088 - protein, 236 aa, Ensifer adhaerens
  misc_feature (1)..(236): tr|W8I696|W8I696_ENSAD 7-cyano-7-deazaguanine synthase OS=Ensifer adhaerens OV14 OX=1416753 GN=exsB PE=3 SV=1
MRTIVICSGGLDSVSLAHRIAAEHELVGILSFDYGQRHRKELDFAAACAHRLGVPHQIIDITGVGRHLTGSALTDDVDVPDGHYAEETMKATVVPNRNAIMLAIAFGLASAQKADAVAVAVHGGDHFIYPDCRPGFIDAFQKMQDEALEGYGTVQLLAPYVNVPKAAIVTDGAKHGTPFGETWSCYKGGARHCGRCGTCVERREAFHLAGVDDPTEYADPDFWRAATSRFSAEEVR

SEQ ID NO: 38089 - protein, 236 aa, Ensifer alkalisoli
  misc_feature (1)..(236): tr|A0A1E3V7I5|A0A1E3V7I5_9RHIZ 7-cyano-7-deazaguanine s ynthase OS=Ensifer alkalisoli OX=1752398 GN=queC PE=3 S V=1
MKTIVICSGGLDSVTLAHKVAAQHELVRLVSFDYGQRHRKELDFAAACARRLGVPHQLIDISEIGRHLTGSALTDDVEVPDGHYAEETMKTTVVPNRNAIMLAIAFGVAAARNAEAVATAVHGGDHFIYPDCRPGFINAFQSMQDHALEGYAEVRLYAPYVNVSKADIVADGAKHDTPFAETWSCYKGGVRHCGRCGTCVERREAFHLAGIADPTDYEDPEFWTKAIGAFAAEEVK

SEQ ID NO: 38090 - protein, 236 aa, Ensifer glycinis
  misc_feature (1)..(236): tr|A0A178XX86|A0A178XX86_9RHIZ 7-cyano-7-deazaguanine s ynthase OS=Ensifer glycinis OX=1472378 GN=queC PE=3 SV= 1
MKTIVICSGGLDSVSLAHRIAAEHQLLGLLSFDYGQRHRKELDFAAACARRLGVPHQIIDIREIGRHLTGSALTDDVDVPDGHYAEETMKATVVPNRNAIMLAIAFGVAAARKADAVAAAVHGGDHFIYPDCRPGFIDAFQAMQNHALEGYADVTLHTPYVNVSKADIVADGAKHDTPFAETWSCYKGGARHCGRCGTCVERREAFHLAGVADPTEYEDPDFWVAATRAFAAEEVK

SEQ ID NO: 38091 - protein, 236 aa, Ensifer sojae
  misc_feature (1)..(236): tr|A0A249PIU0|A0A249PIU0_9RHIZ 7-cyano-7-deazaguanine s ynthase OS=Ensifer sojae CCBAU 05684 OX=716928 GN=queC PE=3 SV=1
MKTIVICSGGLDSVSLAHKVAAEHELALLVSFDYGQRHRKELDFAAACARRLGVPHQVIDLTEVGRHLTGSALTDDVEVPDGHYAEETMKTTVVPNRNAIMLAIAFGIAAAHKAEAVATAVHGGDHFIYPDCRPGFINAFQAMQNHALEGYADVRLYAPYVNVSKADIVADGAKHDTPFAETWSCYKGGSRHCGRCGTCVERREAFHLAGVADPTDYEDPDFWVEATGAFVAEEVK

SEQ ID NO: 38092 - protein, 236 aa, Ensifer sp.
  misc_feature (1)..(236): tr|A0A0Q9D6U8|A0A0Q9D6U8_9RHIZ 7-cyano-7-deazaguanine s ynthase OS=Ensifer sp. Root278 OX=1736509 GN=queC PE=3 SV=1
MKTIVICSGGLDSVSLAHKVAAEQELIGLLSFDYGQRHRKELDFAAACARRLGVPHQIIDIRAIGAHLTGSALTDDVDVPDGHYAEETMKATVVPNRNAIMLAIAFGLAAAQKADAVAVAVHGGDHFIYPDCRPGFIDAFQAMQNQALDGYANVALYAPYVTVSKADIVTDGASHATPFEETWSCYKGGARHCGRCGTCVERREAFHLAGVADPTDYEDPDFWVAATSAFSAEEVK

SEQ ID NO: 38093 - protein, 236 aa, Ensifer sp.
  misc_feature (1)..(236): tr|A0A1C0SH44|A0A1C0SH44_9RHIZ 7-cyano-7-deazaguanine s ynthase OS=Ensifer sp. LC14 OX=1873714 GN=queC PE=3 SV= 1
MKTIVICSGGLDSVSLAHKVAAEHELIGLLSFDYGQRHRKELDFAAACARRLNVPHQIIDIRAIGAHLTGSALTDDVDVPDGHYAEDTMKATVVPNRNAIMLAIAFGLAAAQKADAVAVAVHGGDHFIYPDCRPGFIDAFQTMQNHALDGYANVRLYAPYVTISKADIVTDGASHATPFAETWSCYKGGARHCGRCGTCVERREAFHLAGVADPTDYEDSDFWVAATSAFAAEEVK

SEQ ID NO: 38094 - protein, 229 aa, Enterobacillus tribolii
  misc_feature (1)..(229): tr|A0A370QNH8|A0A370QNH8_9ENTR 7-cyano-7-deazaguanine s ynthase OS=Enterobacillus tribolii OX=1487935 GN=queC P E=3 SV=1
MKRAVVVFSGGQDSTTCLIQALEQYDEVHCVTFDYGQRHRAEIDVARELAQTLGAAAHKTLDVGLLNELAVSSLTRDNIPVPDQSEDGIPNTFVPGRNILFLTLAAIYAYQVGAEAVITGVCETDFSGYPDCRDEFVKALNHAVTLGMARDVRFETPLMWLNKAETWALAAYYHRLELVRNETLTCYNGVRGDGCGHCAACHLRANGLQQYLAQPDAVMAALKSKTGLR

SEQ ID NO: 38095 - protein, 231 aa, Enterobacter agglomerans; identical to SEQ ID NO: 37699
  misc_feature (1)..(231): tr|A0A379AJI4|A0A379AJI4_ENTAG 7-cyano-7-deazaguanine s ynthase OS=Enterobacter agglomerans OX=549 GN=queC PE=3 SV=1

SEQ ID NO: 38096 - protein, 198 aa, Enterobacter agglomerans
  misc_feature (1)..(198): tr|A0A379AF52|A0A379AF52_ENTAG 7-cyano-7-deazaguanine s ynthase OS=Enterobacter agglomerans OX=549 GN=NCTC9381_ 01754 PE=3 SV=1
MHKRTGLILSGGMDSLTIAWWKKPEVAFTVDYGQKAANAEIQASSQICKILNIEHHILRVDCSSLGSGDMAGKASDKNAPETDWWPYRNQMLVTLIAMKAIGQDVDKLLIGTVCSDSNHKDGTLEFIKLMSNLLAFQEGHLILEAPAIGMTTHELITKSNIPHGYLLWAHSCHTSNIPCGKCRGCNKFHNVIHELNIL

SEQ ID NO: 38097 - protein, 231 aa, Enterobacter asburiae
  misc_feature (1)..(231): tr|A0A0H0ADS8|A0A0H0ADS8_ENTAS 7-cyano-7-deazaguanine s ynthase OS=Enterobacter asburiae OX=61645 GN=queC PE=3 SV=1
MKRAVVVFSGGQDSTTCLVQALHQYDEVHCVTFDYGQRHRAEIDVARELALKLGARAHKVLDVTLLNELAVSSLTRDSIPVPDYEPDASGIPNTFVPGRNILFLTLTAIYAYQVKAEAVITGVCETDFSGYPDCRDEFVKALNHAVNLGMAKETRFETPLMWLDKAETWALADYWGKLDLVRSETLTCYNGIKGDGCGQCAACNLRANGLNHYLADKSGVMAAMQKKTGLK

SEQ ID NO: 38098 - protein, 231 aa, Enterobacter asburiae
  misc_feature (1)..(231): tr|A0A5A9A1S3|A0A5A9A1S3_ENTAS 7-cyano-7-deazaguanine s ynthase OS=Enterobacter asburiae OX=61645 GN=queC PE=3 SV=1
MKRAVVVFSGGQDSTTCLVQALHQYDEVHCVTFDYGQRHRAEIDVARELALKLGARAHKVLDVTLLNELAVSSLTRDSIPVPDYEPDASGIPNTFVPGRNILFLTLTAIYAYQVKAEAVITGVCETDFSGYPDCRDEFVKALNHAVNLGMAKETRFETPLMWLDKAETWALADYWGKLDLVRSETLTCYNGIKGDGCGQCAACNLRANGLNHYLADKAGVMAAMQKKTGLK

SEQ ID NO: 38099 - protein, 231 aa, Enterobacter bugandensis; identical to SEQ ID NO: 38098
  misc_feature (1)..(231): tr|A0A2J7RUY1|A0A2J7RUY1_9ENTR 7-cyano-7-deazaguanine s ynthase OS=Enterobacter bugandensis OX=881260 GN=queC P E=3 SV=1

SEQ ID NO: 38100 - protein, 231 aa, Enterobacter bugandensis
  misc_feature (1)..(231): tr|A0A4S3T2G6|A0A4S3T2G6_9ENTR 7-cyano-7-deazaguanine s ynthase OS=Enterobacter bugandensis OX=881260 GN=queC P E=3 SV=1
MKRAVVVFSGGQDSTTCLVQALHQYDEVHCVTFDYGQRHRAEIDVARELALKLGARAHKVLDVTLLNELAVSSLTRDSIPVPDYEPDASGIPNTFVPGRNILFLTLTAIYAYQVKAEAVITGVCETDFSGYPDCRDEFVKALNHAVSLGMAKETRFETPLMWLDKAETWALADYWGKLDLVRSETLTCYNGIKGDGCGQCAACNLRANGLNHYLADKVGVMAAMQKKTGLK

SEQ ID NO: 38101 - protein, 231 aa, Enterobacter cancerogenus
  misc_feature (1)..(231): tr|D2ZG30|D2ZG30_9ENTR 7-cyano-7-deazaguanine synthase OS=Enterobacter cancerogenus ATCC 35316 OX=500639 GN=qu eC PE=3 SV=1
MKRAVVVFSGGQDSTTCLIQALHQYDEVHCVTFDYGQRHRAEIDVARELALNLGARAHKVLDVNLLNELAVSSLTRDSIPVPDYEPDASGIPNTFVPGRNILFLTLTAIYAYQVKAEAVITGVCETDFSGYPDCRDEFVKALNHAVNLGMAKETRFETPLMWLDKAETWALADYWGKLDLVRSETLTCYNGIKGDGCGQCAACNLRANGLNHYLADKPGVMAAMKQKTGLK

SEQ ID NO: 38102 - protein, 231 aa, Enterobacter cancerogenus; identical to SEQ ID NO: 38101
  misc_feature (1)..(231): tr|A0A2J7P6S6|A0A2J7P6S6_9ENTR 7-cyano-7-deazaguanine s ynthase OS=Enterobacter cancerogenus OX=69218 GN=queC P E=3 SV=1

SEQ ID NO: 38103 - protein, 231 aa, Enterobacter chengduensis
  misc_feature (1)..(231): tr|A0A0F4BS96|A0A0F4BS96_9ENTR 7-cyano-7-deazaguanine s ynthase OS=Enterobacter chengduensis OX=2494701 GN=queC PE=3 SV=1
MKRAVVVFSGGQDSTTCLVQALHQYDEVHCVTFDYGQRHRAEIDVARELALKLGARAHKVLDVTLLNELAVSSLTRDSIPVPDYEPDASGIPNTFVPGRNILFLTLTAIYAYQVKAEAVITGVCETDFSGYPDCRDEFVKALNHAVNLGMAKETRFETPLMWLDKAETWALADYWGKLDLVRSETLTCYNGIKGDGCGQCAACNLRANGLNHYFADKVGVMAAMKKKTGLK

SEQ ID NO: 38104 - protein, 231 aa, Enterobacter chuandaensis
  misc_feature (1)..(231): tr|A0A3A3ZK68|A0A3A3ZK68_9ENTR 7-cyano-7-deazaguanine s ynthase OS=Enterobacter chuandaensis OX=2497875 GN=queC PE=3 SV=1
MKRAVVVFSGGQDSTTCLVQALHQYDEVHCVTFDYGQRHRAEIDVARELALKLGARAHKVLDVTLLNELAVSSLTRDSIPVPDYEPDASGIPNTFVPGRNILFLTLTAIYAYQVKAEAVITGVCETDFSGYPDCRDEFVKALNHAVNLGMAKETRFETPLMWLDKAETWALADYWGKLDLVRSETLTCYNGLKGDGCGQCAACNLRANGLNHYLSDKVGVMAAMQKKTGLK

SEQ ID NO: 38105 - protein, 231 aa, Enterobacter cloacae
  misc_feature (1)..(231): tr|A0A144XRJ6|A0A144XRJ6_ENTCL 7-cyano-7-deazaguanine s ynthase OS=Enterobacter cloacae OX=550 GN=queC PE=3 SV= 1
MKRAVVVFSGGQDSTTCLIQALHQYDEVHCVTFDYGQRHRAEIDVARELALKLGARAHKVLDVTLLNELAVSSLTRDSIPVPDYEPDASGIPNTFVPGRNILFLTLTAIYAYQVKAEAVITGVCETDFSGYPDCRDEFVKALNHAVDLGMAKETRFETPLMWLDKAETWALADYWGKLDVVRNETLTCYNGIKGDGCGQCAACNLRANGLNHYFADKAGVMAAMQKKTGLK

SEQ ID NO: 38106 - protein, 231 aa, Enterobacter cloacae
  misc_feature (1)..(231): tr|A0A5E3W216|A0A5E3W216_ENTCL 7-cyano-7-deazaguanine s ynthase OS=Enterobacter cloacae OX=550 GN=queC PE=3 SV= 1
MKRAVVVFSGGQDSTTCLVQALHQYDEVHCVTFDYGQRHRAEIDVARELALKLGARAHKVLDVTLLNELAVSSLTRDSIPVPDYTPDASGIPNTFVPGRNILFLTLTAIYAYQVQAEAVITGVCETDFSGYPDCRDEFVKALNHAVNLGMAKETRFETPLMWLDKAETWALADYWGKLDLVRSETLTCYNGIKGDGCGQCAACNLRANGLNHYLADKAGVMAAMQKKTGLK

SEQ ID NO: 38107 - protein, 231 aa, Enterobacter genomosp.
  misc_feature (1)..(231): tr|A0A0X4EQP0|A0A0X4EQP0_9ENTR 7-cyano-7-deazaguanine s ynthase OS=Enterobacter genomosp. O OX=2364150 GN=queC PE=3 SV=1
MKRAVVVFSGGQDSTTCLVQALHQYDEVHCVTFDYGQRHRAEIDVARELALKLGARAHKVLDVTLLNELAVSSLTRDSIPVPDYEPDASGIPNTFVPGRNILFLTLTAIYAYQVKAEAVITGVCETDFSGYPDCRDEFVKALNHAVNLGMAKETRFETPLMWLDKAETWALADYWGKLDLVRSETLTCYNGIKGDGCGQCAACNLRANGLNHYLADKVGVMAAMQKKTGLK

SEQ ID NO: 38108 - protein, 231 aa, Enterobacter hormaechei
  misc_feature (1)..(231): tr|F5RUZ3|F5RUZ3_9ENTR 7-cyano-7-deazaguanine synthase OS=Enterobacter hormaechei ATCC 49162 OX=888063 GN=exsB PE=3 SV=1
MKRAVVVFSGGQDSTTCLIQALHQYDEVHCVTFDYGQRHRAEIDVARELALKLGARAHKVLDVTLLNELAVSSLTRDSIPVPDYEPDASGIPNTFVPGRNILFLTLTAIYAYQVKAEAVITGVCETDFSGYPDCRDEFVKALNHAVDLGMAKETCFETPLMWLDKAETWALADYWGKLDVVRNETLTCYNGIKGDGCGQCAACNLRANGLNHYLADKAGVMAAMQKKTGLK

SEQ ID NO: 38109 - protein, 231 aa, Enterobacter hormaechei
  misc_feature (1)..(231): tr|A0A5A9FRE8|A0A5A9FRE8_9ENTR 7-cyano-7-deazaguanine s ynthase OS=Enterobacter hormaechei OX=158836 GN=queC PE =3 SV=1
MKRAVVVFSGGQDSTTCLIQALHQYDEVHCVTFDYGQRHRAEIDVARELALKLGARAHKVLDVTLLNELAVSSLTRDSIPVPDYEPDASGIPSTFVPGRNILFLTLTAIYAYQVKAEAVITGVCETDFSGYPDCRDEFVKALNHAVDLGMAKETRFETPLMWLDKAETWALADYWGKLDVVRNETLTCYNGIKGDGCGQCAACNLRANGLNHYFADKAGVMAAMQKKTGLK

SEQ ID NO: 38110 - protein, 231 aa, Enterobacter huaxiensis
  misc_feature (1)..(231): tr|A0A3R9Q2S5|A0A3R9Q2S5_9ENTR 7-cyano-7-deazaguanine s ynthase OS=Enterobacter huaxiensis OX=2494702 GN=queC P E=3 SV=1
MKRAVVVFSGGQDSTTCLVQALHQYDEVHCVTFDYGQRHRAEIDVARDLALKLGARAHKVLDVTLLNELAVSSLTRDSIPVPDYEPDASGIPNTFVPGRNILFLTLTAIYAYQVKAEAVITGVCETDFSGYPDCRDEFVKALNHAVNLGMAKETRFETPLMWLDKAETWALADYWGKLDLVRSETLTCYNGIKGDGCGQCAACNLRANGLNHYLADKVGVMAAMQKKTGLK

SEQ ID NO: 38111 - protein, 231 aa, Enterobacter kobei
  misc_feature (1)..(231): tr|A0A5E1A1W8|A0A5E1A1W8_9ENTR 7-cyano-7-deazaguanine s ynthase OS=Enterobacter kobei OX=208224 GN=queC PE=3 SV =1
MKRAVVVFSGGQDSTTCLVQALHQYDEVHCVTFDYGQRHRAEIDVARELALKLGARAHKVLDVTLLNELAVSSLTRDSIPVPDYKPDASGIPNTFVPGRNILFLTLTAIYAYQVQAEAVITGVCETDFSGYPDCRDEFVKALNHAVNLGMAKETRFETPLMWLDKAETWALADYWGKLDLVRSETLTCYNGIKGDGCGQCAACNLRANGLNHYLADKAGVMAAMQKKTGLK

SEQ ID NO: 38112 - protein, 231 aa, Enterobacter kobei
  misc_feature (1)..(231): tr|A0A5A9BBR0|A0A5A9BBR0_9ENTR 7-cyano-7-deazaguanine s ynthase OS=Enterobacter kobei OX=208224 GN=queC PE=3 SV =1
MKRAVVVFSGGQDSTTCLVQALHQYDEVHCVTFDYGQRHRAEIDVARELALKLGARAHKVLDVTLLNELAVSSLTRDSIPVPDYEPDASGIPNTFVPGRNILFLTLTAIYAYQVKAEAVITGVCETDFSGYPDCRDEFVKALNHAVNLGMAKETRFETPLMWLDKAETWALADYWGKLDLVRSETLTCYNGIKGDGCGQCAACNLRANGLNHYLADKVGVMAAMKQKTGLK

SEQ ID NO: 38113 - protein, 231 aa, Enterobacter lignolyticus
  misc_feature (1)..(231): tr|E3G6W1|E3G6W1_ENTLS 7-cyano-7-deazaguanine synthase OS=Enterobacter lignolyticus (strain SCF1) OX=701347 GN =queC PE=3 SV=1
MKRAVVVFSGGQDSTTCLVQALQQYDEVHCVTFDYGQRHRAEIDVARTLALQLGARAHKVLDVTLLNELAVSSLTRDSIPVPDYEPDADGIPNTFVPGRNILFLTLTAIYAYQVKAEAVITGVCETDFSGYPDCRDEFVKALNHAVNLGMAKDIRFETPLMWLDKAQTWALADYWGKLDLVRNETLTCYNGVKGDGCGQCAACNLRSNGLSHYFADKPAVMAAMKAKTGLK

SEQ ID NO: 38114 - protein, 231 aa, Enterobacter ludwigii
  misc_feature (1)..(231): tr|G8LPV4|G8LPV4_9ENTR 7-cyano-7-deazaguanine synthase OS=Enterobacter ludwigii OX=299767 GN=queC PE=3 SV=1
MKRAVVVFSGGQDSTTCLVQALHQYDEVHCVTFDYGQRHRAEIDVARELALKLGARAHKVLDVTLLNELAVSSLTRDSIPVPDYEPDASGIPNTFVPGRNILFLTLTAIYAYQVKAEAVITGVCETDFSGYPDCRDEFVKALNHAVNLGMAKETRFETPLMWLDKAETWALADYWGKLDMVRSETLTCYNGIKGDGCGQCAACNLRANGLNHYLADKAGVMSAMKKKTGLK

SEQ ID NO: 38115 - protein, 77 aa, Enterobacter mori
  misc_feature (1)..(77): tr|A0A2U2NG19|A0A2U2NG19_9ENTR 7-cyano-7-deazaguanine s ynthase (Fragment) OS=Enterobacter mori OX=539813 GN=DE M28_26135 PE=3 SV=1
MTQHTLNYNKEIVVFTGGQDSTTCLFWAKKHFDEVELVTFEYGQRHDTEIEVAKQIAQEQNLKHHVLDMSLLSQLTP

SEQ ID NO: 38116 - protein, 231 aa, Enterobacter mori
  misc_feature (1)..(231): tr|A0A2J0NBK5|A0A2J0NBK5_9ENTR 7-cyano-7-deazaguanine s ynthase OS=Enterobacter mori OX=539813 GN=queC PE=3 SV= 1
MKRAVVVFSGGQDSTTCLVQALHQYDEVHCVTFDYGQRHRAEIDVARELALKLGARAHKVLDVTLLNELAVSSLTRDSIPVPDYEPDASGIPNTFVPGRNILFLTLTAIYAYQVQAEAVITGVCETDFSGYPDCRDEFVKALNHAVNLGMAKETRFETPLMWLDKAETWALADYWGKLDLVRSETLTCYNGIKGDGCGQCAACNLRANGLNHYLADKAGVMTAMQKKTGLK

SEQ ID NO: 38117 - protein, 231 aa, Enterobacter roggenkampii
  misc_feature (1)..(231): tr|A0A1S2AVE7|A0A1S2AVE7_9ENTR 7-cyano-7-deazaguanine s ynthase OS=Enterobacter roggenkampii OX=1812935 GN=queC PE=3 SV=1
MKRAVVVFSGGQDSTTCLVQALHQYDEVHCVTFDYGQRHRAEIDVARELALKLGVRAHKVLDVTLLNELAVSSLTRDSIPVPDYEPDASGIPNTFVPGRNILFLTLTAIYAYQVKAEAVITGVCETDFSGYPDCRDEFVKALNHAVNLGMAKETRFETPLMWLDKAETWALADYWGKLDLVRSETLTCYNGIKGDGCGQCAACNLRANGLNHYLADKAGVMAAMQKKTGLK

SEQ ID NO: 38118 - protein, 231 aa, Enterobacter roggenkampii
  misc_feature (1)..(231): tr|A0A5D1UCX8|A0A5D1UCX8_9ENTR 7-cyano-7-deazaguanine s ynthase OS=Enterobacter roggenkampii OX=1812935 GN=queC PE=3 SV=1
MKRAVVVFSGGQDSTTCLVQALHQYDEVHCVTFDYGQRHRAEIDVARELALKLGARAHKVLDVTLLNELAVSSLTRDSIPVPDYEPDASGIPNTFVPGRNILFLTLTAIYAYQVKAEAVITGVCETDFSGYPDCRDEFVKALNHAVNLGMAKETRFETPLMWLDKAETWALADYWGKLDLVRSETLTCYNGIKGDGCGQCAACNLRANGLNHYLANKAGVMAAMQKKTGLK

SEQ ID NO: 38119 - protein, 231 aa, Enterobacter sichuanensis
  misc_feature (1)..(231): tr|A0A0F1B333|A0A0F1B333_9ENTR 7-cyano-7-deazaguanine s ynthase OS=Enterobacter sichuanensis OX=2071710 GN=queC PE=3 SV=1
MKRAVVVFSGGQDSTTCLVQALHQYDEVHCVTFDYGQRHRAEIDVARELALKLGARAHKVLDVTLLNELAVSSLTRDSIPVPDYQPDASGIPNTFVPGRNILFLTLTAIYAYQVQAEAVITGVCETDFSGYPDCRDEFVKALNHAVNLGMAKETRFETPLMWLDKAETWALADYWGKLDLVRSETLTCYNGIKGDGCGQCAACNLRANGLNHYLADKAGVMAAMQKKTGLK

SEQ ID NO: 38120 - protein, 231 aa, Enterobacter soli
  misc_feature (1)..(231): tr|A0A198GQT4|A0A198GQT4_9ENTR 7-cyano-7-deazaguanine s ynthase OS=Enterobacter soli ATCC BAA-2102 OX=1354262 G N=queC PE=3 SV=1
MKRAVVVFSGGQDSTTCLVQALHQYDEVHCVTFDYGQRHRAEIDVARELALKLGARAHKVLDVTLLNELAVSSLTRDSIPVPDYEPDASGIPNTFVPGRNILFLTLTAIYAYQVKAEAVITGVCETDFSGYPDCRDEFVKALNHAVNLGMAKDIRFETPLMWLDKAETWALADYWGKLDMVRSETLTCYNGIKGDGCGQCAACNLRANGLNHYLADKAGVMAALQKKTGLK

SEQ ID NO: 38121 - protein, 231 aa, Enterobacter sp.
  misc_feature (1)..(231): sp|A4W7B5|QUEC_ENT38 7-cyano-7-deazaguanine synthase OS =Enterobacter sp. (strain 638) OX=399742 GN=queC PE=3 S V=2
MKRAVVVFSGGQDSTTCLIQALHQYDEVHCVTFDYGQRHRAEIDVARELALKLGARAHKVLDVTLLNELAVSSLTRDSIPVPDYEPDADGIPNTFVPGRNILFLTLTAIYAYQVKAEAIITGVCETDFSGYPDCRDEFVKALNHAVDLGMAKEIRFETPLMWLDKAETWALADYWEKLELVRTETLTCYNGIKGDGCGQCAACNLRSNGLNHYLANKPAVMSAMKAKTGLK

SEQ ID NO: 38122 - protein, 231 aa, Enterobacter sp.; identical to SEQ ID NO: 38098
  misc_feature (1)..(231): tr|A0A4S3ENT9|A0A4S3ENT9_9ENTR 7-cyano-7-deazaguanine s ynthase OS=Enterobacter sp. AD2-3 OX=2547834 GN=queC PE =3 SV=1

SEQ ID NO: 38123 - protein, 232 aa, Enterobacterales bacterium
  misc_feature (1)..(232): tr|A0A389M936|A0A389M936_9GAMM 7-cyano-7-deazaguanine s ynthase OS=Enterobacterales bacterium OX=1993870 GN=que C PE=3 SV=1
MKRAVVVFSGGQDSTTCLIQALTQYDEVHCITFDYGQRHRAEIDIARTLSVELGAKAHKVLDVGLLNELAVSSLTRDNIPVPALGETEDNGLPSTFVPGRNILFLTLAAIYAYQIQAEAVITGVCETDFSGYPDCRDEFVKALNHAVSLGIARDIRFETPLMWLNKAETWALADYYQQLDLVRQQTLTCYNGIAGDGCGECAACHLRANGLQQYQQDRDAVNASLKKKIGLR

SEQ ID NO: 38124 - protein, 231 aa, Enterobacterales bacterium
  misc_feature (1)..(231): tr|A0A2I0FST9|A0A2I0FST9_9GAMM 7-cyano-7-deazaguanine s ynthase OS=Enterobacterales bacterium CwR94 OX=2025587 GN=queC PE=3 SV=1
MKRAVVVFSGGQDSTTCLVQALQQYDEVHCVTFDYGQRHREEIIVAAELANKLGAVAHKVLDVTLLNELAISSLTRDSIPVPHYTPDASGLPSTFVPGRNILFLTLASIYAYQVDAEAVITGVCETDFSGYPDCRDAFVKALNHAVELGMARQVRFETPLMWLNKAETWALADHWQSLTLIREETLTCYNGKRGDGCGECAACHLRARGLAEYQQDADTVKASLYKKTGLR

SEQ ID NO: 38125 - protein, 231 aa, Enterobacteriaceae bacterium
  misc_feature (1)..(231): tr|A0A3C2BDW1|A0A3C2BDW1_9ENTR 7-cyano-7-deazaguanine s ynthase OS=Enterobacteriaceae bacterium OX=1849603 GN=q ueC PE=3 SV=1
MKRAVVVFSGGQDSTTCLIQALNQYDEVHCVTFDYGQRHRAEIDIAKDLAHKLGARAHKVLDVGLLNELAVSSLTRDSIPVPDYDPDASGIPSTFVPGRNILFLTLTAIYAYQVQAEAIITGVCETDFSGYPDCRDEFVKALHHAVNLGMASNIRFETPLMWLNKAETWALADRWGKLDLVRNETLTCYNGIKGDGCGECAACHLRANGLNQYLADKPGVMAQLKRKMDLP

SEQ ID NO: 38126 - protein, 231 aa, Enterobacteriaceae bacterium
  misc_feature (1)..(231): tr|A0A427BW11|A0A427BW11_9ENTR 7-cyano-7-deazaguanine s ynthase OS=Enterobacteriaceae bacterium CCUG 66741 OX=1 851514 GN=queC PE=3 SV=1
MKRAVVVFSGGQDSTTCLVQALQQYDEVDCVTFDYGQRHRVEIDVARELALKLGARAHKVLDVTLLNELAVSSLTRDSIPVPDYEPEANGIPNTFVPGRNILFLTLTAIYAYQVKAEAVITGVCETDFSGYPDCRDEFVKALNHAVNLGMAKEIRFETPLMWIDKAETWALADYWGHLDMVRSETLTCYNGIKGDGCGHCAACTLRANGLNHYLADKTGVMAALKAKTGLQ

SEQ ID NO: 38127 - protein, 425 aa, Enterococcus casseliflavus
  misc_feature (1)..(425): tr|A0A4V0APR7|A0A4V0APR7_ENTCA Uncharacterized protein OS=Enterococcus casseliflavus OX=37734 GN=NCTC4725_0328 0 PE=4 SV=1
MKQLVGKANFNNELFEIDLEDNKIQKNNFWDRFLKNELFSYPSTEAIDLMYLSEFVYFCDRNFMRELNDDGWKRDISLSIPVLNIKKFEDKKDIIQDLLNFLSGDTWNLSFFKRKETDNEKRYRSKCADRDQNYISNVCMFSGGLDSFIGAIDLLEKEEKQIFVSHYGGSKGTLKYQDLLREQLMGKYPSLNENDFFQFYIAPQIQHKDRNEDTTRSRSLLFFSHAISIATSVGANKLIIPENGFISLNVPLTPARIGSSSTRTTHPYYFLLFENLLEGLGINIEIYNPFKYLTKGQMIKNCKNRNFLEKNIVNTMSCSKPDHARWNGYNEPIHCGYCIPCTIRRASILEGKFIDKTEYFVTDYSTNESKSNLNAFRLAIANNMEKDPLFTIQSNGPILNNFEEYGKIYLNGLIELKNFLERLKL

SEQ ID NO: 38128 - protein, 246 aa, Enterococcus casseliflavus
  misc_feature (1)..(246): tr|S4B2R4|S4B2R4_ENTCA Uncharacterized protein OS=Enter ococcus casseliflavus 14-MB-W-14 OX=1259825 GN=D932_005 80 PE=4 SV=1
MKKVLWTGGWDSTFRVLDLVINKKEMVQPYYVVDRNRASNKIELKTMKEIKNKINSNFPDSKGLIKETIFIEKNEIPVNQSITDKFNRLLNESYMGTQYDWLGRYAEANNLENLELNIHKDDKAEFFVRPLVEKTDDGPGSYSYVLKNSALGTDYDLFKYYSFPVLDLTKTQMSEISKKSGFDSLMEMTWFCFNPTWRKTPCGYCNPCKYTRNEGLGRRVPSEGIAKYNKLENKIYYKMKQIMGSN

SEQ ID NO: 38129 - protein, 83 aa, Enterococcus faecium
  misc_feature (1)..(83): tr|A0A2V2L2Z3|A0A2V2L2Z3_ENTFC 7-cyano-7-deazaguanine s ynthase (Fragment) OS=Enterococcus faecium OX=1352 GN=D KX15_19785 PE=3 SV=1
VEIDAARRIAASLECACHVILPLDLRQFGGSALTDDLDVPTGGVGDGIPVTYVPARNIVFLSLTLAWAEAIGAQDIFIGVNAL

SEQ ID NO: 38130 - protein, 237 aa, Enterorhabdus caecimuris
  misc_feature (1)..(237): tr|A0A4S4G7E0|A0A4S4G7E0_9ACTN 7-cyano-7-deazaguanine s ynthase OS=Enterorhabdus caecimuris OX=671266 GN=queC P E=3 SV=1
MTANRKALVLCSGGVDSTTLLAQAVAKYGAENVYALSISYGQKHGCEIEAARAVAAHYGVQQRFLDLGAIFADSACSLLAHSDTAVPAGTYAEQQAEGGEGAPVSTYVPFRNGLFLSSAASMALSLGCEVVLYGAHHDDAAGNAYPDCSMEFVEAMNRAIVEGTGGELVLEAPFVALAKADIVREGLALGVPYELTWSCYEGGEVPCGVCATCLDRAAAFAANGVEDPALATGITRG

SEQ ID NO: 38131 - protein, 240 aa, Enterorhabdus caecimuris
  misc_feature (1)..(240): tr|R9L0B4|R9L0B4_9ACTN Uncharacterized protein OS=Enter orhabdus caecimuris B7 OX=1235794 GN=C811_00255 PE=4 SV =1
MGVPMDVRKAGSLEENRTAADYEAHIAEDTEDVGPGQHLFGEPLEMYLLREPRLAVAFSGGCDSSLLLAAAKLAGCEVRAYLVKTAFQPDFELDDARRVAEALGVPLTVVEADVLAQAEICENQLDRCYRCKRFIFQKVREAAATDGFTVIVDGTNASDDPARRPGFKALAEAGIVSPLRRAGMTKANVRAVLAHLERSFGLEAGALMSAKPSFPCLAVYVPEGEPITQSALDAAQMRGL

SEQ ID NO: 38132 - protein, 229 aa, Enterorhabdus sp.
  misc_feature (1)..(229): tr|A0A4V3RS85|A0A4V3RS85_9ACTN 7-cyano-7-deazaguanine s ynthase OS=Enterorhabdus sp. NM05_H27 OX=2516956 GN=que C PE=3 SV=1
MQEKALVLCSGGVDSTTLLAGAVARFGAENVYALSISYGQRHIREIEAARAVAAHYGVEQRFLDLEAIFADSACSLLAHSDEAVPTGAYGEQQEAAEGGVVSTCVPFRNGLFLSSAASMALSLGCSVVLYGAHHDDWAGAAYPDCSPAFVEAMAAAIAEGTGGELRLEAPFVTWSKADIVAEGLTLGVPYELTWSCYEGGAAPCGACATCIDRAAAFAANHVEDPALKG

SEQ ID NO: 38133 - protein, 226 aa, Enterovibrio coralii
  misc_feature (1)..(226): tr|A0A135I396|A0A135I396_9GAMM 7-cyano-7-deazaguanine s ynthase OS=Enterovibrio coralii OX=294935 GN=queC PE=3 SV=1
MKKAVVVFSGGQDSTTCLIQALSEFDEVHCITFDYNQRHKQEIDVARDVANALGATSHKVMDVGLLNELAISSLTRDNIPVSHELQENGLPNSFVPGRNILFLTLAGIYAYQLGAEAVITGVCETDFSGYPDCRNDFVQAMNNALVLGMDRQLDIRTPLMWLNKAETWALADKFGKLDFVRDQTLTCYNGVIGSGCGDCPACDLRQKGLVSYLNDKENVMASLNSK

SEQ ID NO: 38134 - protein, 228 aa, Enterovibrio nigricans
  misc_feature (1)..(228): tr|A0A1T4UMD3|A0A1T4UMD3_9GAMM 7-cyano-7-deazaguanine s ynthase OS=Enterovibrio nigricans DSM 22720 OX=1121868 GN=queC PE=3 SV=1
MKKAVVVFSGGQDSTTCLIQALSEFDEVHCITFDYNQRHKQEIDVACDVAKALGATSHKVMDVGLLNELAISSLTRDNIPVSHELQENGLPNSFVPGRNILFLTLAGIYAYQLGAETVITGVCETDFSGYPDCRNDFVQAMNNALVLGMDRQLEIRTPLMWLNKAETWALADKYGKLDFVRDQTLTCYNGVIGSGCGDCPACDLRQKGLDSYLHDKDCVMADLNSKIQ

SEQ ID NO: 38135 - protein, 228 aa, Enterovibrio norvegicus
  misc_feature (1)..(228): tr|A0A4U1XYL2|A0A4U1XYL2_9GAMM 7-cyano-7-deazaguanine s ynthase OS=Enterovibrio norvegicus OX=188144 GN=queC PE =3 SV=1
MKKAVVVFSGGQDSTTCLIQALSEFDEVHCITFDYGQRHKQEIEVAADVAKALGATSHKVMDVSLLNELAISSLTRDNIPVSHELQENGLPNSFVPGRNILFLTLSGIYAYQLGAETVITGVCETDFSGYPDCRNDFVQAMNKALVLGMDRELELRTPLMWLNKAETWALADTFGKLEYVRDNTLTCYNGVIGSGCGDCPACDLRQKGLDSYINDKDNVMASLDSKRH

SEQ ID NO: 38136 - protein, 228 aa, Enterovibrio norvegicus
  misc_feature (1)..(228): tr|A0A4U1Z696|A0A4U1Z696_9GAMM 7-cyano-7-deazaguanine s ynthase OS=Enterovibrio norvegicus OX=188144 GN=queC PE =3 SV=1
MKKAVVVFSGGQDSTTCLIQALSEFDEVHCITFDYGQRHKQEIEVAADVAKALGATSHKVMDVSLLNELAISSLTRDNIPVSHELQENGLPNSFVPGRNILFLTLSGIYAYQLGAETVITGVCETDFSGYPDCRNDFVQAMNKALVLGMDRELELRTPLMWLNKAETWALADKYGKLDYVRDNTLTCYNGVIGKGCGDCPACDLRQKGLDSYLEDKENVMASLDSKRH

SEQ ID NO: 38137 - protein, 228 aa, Enterovibrio pacificus
  misc_feature (1)..(228): tr|A0A1C3E689|A0A1C3E689_9GAMM 7-cyano-7-deazaguanine s ynthase OS=Enterovibrio pacificus OX=1080227 GN=queC PE =3 SV=1
MNKAVVVFSGGQDSTTCLIQALSEFDEVHCITFDYNQRHAEEIEVAKKVANTLGVSSHKIMDVGLLNELAISSLTRDNIAVSHELQDNGLPNTFVPGRNILFLTLAGIYAYQLGANTLITGVCETDFSGYPDCRDNFVKAMNNALVLGMDKALEIKTPLMWLNKAETWALADKFNKLDFVRENTLTCYNGLIGPGCGDCPACDLRQRGLDDYLADTGAVMAALESKTA

SEQ ID NO: 38138 - protein, 228 aa, Enterovibrio sp.
  misc_feature (1)..(228): tr|A0A4Q0YRU6|A0A4Q0YRU6_9GAMM 7-cyano-7-deazaguanine s ynthase OS=Enterovibrio sp. CAIM 600 OX=1278244 GN=queC PE=3 SV=1
MNKAVVVFSGGQDSTTCLIQALAEFDEVHCITFDYNQRHQEEIDVAKKLAASLGATSHKIMDVGLLNELAASSLTRDNIEVSHELQENGLPNTFVPGRNILFLTLAGIFAYQLGANTVITGVCETDFSGYPDCRDDFVKAMNSALVQGMDKPLDIKTPLMWLNKAETWALADKYSKLDVVREETLTCYNGVIGSGCGDCPACTLRQRGLDDYLAEKKAVMASLDSKTA

SEQ ID NO: 38139 - protein, 235 aa, Enterovirga rhinocerotis
  misc_feature (1)..(235): tr|A0A4R7C5Y1|A0A4R7C5Y1_9RHIZ 7-cyano-7-deazaguanine s ynthase OS=Enterovirga rhinocerotis OX=1339210 GN=queC PE=3 SV=1
MITLSDTRALVLFSGGQDSTTCLAWALRRFAEVETIGFDYGQRHSVELAVRPGLRDGLAALALGGALGPDHLVPIEGLGQISETALTRDVEIGMAETGLPTTFVPGRNLLFLTFAAALAYRRGCRHIVLGVCETDYSGYPDCRDDTIKAMQVALNLGLEARLVLHTPLMWRDKAATFAMAEEIGGPDLLRLVVEETHSCYLGDRTHRHEWGFGCGTCPACELRAAGWRRWCAAAA

SEQ ID NO: 38140 - protein, 233 aa, Epibacterium mobile
  misc_feature (1)..(233): tr|A0A1B1A2W3|A0A1B1A2W3_9RHOB 7-cyano-7-deazaguanine s ynthase OS=Epibacterium mobile F1926 OX=1265309 GN=queC PE=3 SV=1
MKTLVICSGGLDSVSLAHITANEHQLTRLVSFDYGQRHRKEVDFAEAAAKRLGVPFHLIDMRGIGGALTGSALTDDIDVPDGHYAEETMKITVVPNRNAIMLSIGFGIAAAQGDAAVATAVHGGDHFIYPDCRPGFTRAFDAMQQAALEGYADVRLHTPFVEHSKAEIVRQGARHGTPFAETWSCYKGGAFHCGRCGTCVERREAFHLAGVSDPTTYADPEYWTTALATRGES

SEQ ID NO: 38141 - protein, 233 aa, Epibacterium mobile
  misc_feature (1)..(233): tr|A0A1H3DH78|A0A1H3DH78_9RHOB 7-cyano-7-deazaguanine s ynthase OS=Epibacterium mobile OX=379347 GN=queC PE=3 S V=1
MKTLVICSGGLDSVSLAHITANEHQLTRLVSFDYGQRHRKEVDFAEAAAKRLGVPFHLIDMRGIGGALTGSALTDDIDVPDAHYAEETMKITVVPNRNAIMLSIGFGIAAAQGDAAVATAVHGGDHFIYPDCRPGFTRAFDAMQQAALEGYADVRLHTPFVEHSKAEIVRQGAQHGTPFAETWSCYKGGAFHCGRCGTCVERREAFHLAGVNDPTTYADPEYWITALATRGES

SEQ ID NO: 38142 - protein, 234 aa, Epibacterium multivorans
  misc_feature (1)..(234): tr|A0A0P1GVP7|A0A0P1GVP7_9RHOB 7-cyano-7-deazaguanine s ynthase OS=Epibacterium multivorans OX=928856 GN=queC P E=3 SV=1
MKTIVICSGGLDSVSLAHSIAAKGELSRLVSFDYGQRHAKEIDYAAACAQRLGVPHHIIDMRTIGASLTGSALTDDIDVPDGHYAEDTMKVTVVPNRNAIMLTIAYGIAAANGDTGVATAVHGGDHFIYPDCRPAFTEAFDTMQRAALDGYADVSLVTPFVHKSKADIVTEGARVNTPFADTWSCYKGGEHHCGRCGTCVERREAFHLAGIEDPTTYEDPDFWRAATGTAEESA

SEQ ID NO: 38143 - protein, 236 aa, Epibacterium ulvae
  misc_feature (1)..(236): tr|A0A1G5PJM2|A0A1G5PJM2_9RHOB 7-cyano-7-deazaguanine s ynthase OS=Epibacterium ulvae OX=1156985 GN=queC PE=3 S V=1
MKTIVICSGGMDSVSLAYMVAEQHELTRLVSFDYGQRHRKELDFAALAAKRLGVPHDIIDMRGIGASLTGSALTDDIDVPDGHYAEETMKVTVVPNRNAIMLSVAFGVAAANGDDAVATAVHGGDHFIYPDCRPAFTEAFNTMQQAALDGYAEVKLYTPFVHRSKADIAVEGAKVNTPFAETWSCYKGGEDHCGRCGTCVERREAFHLAGLTDPTIYEDPDFWRNATGVTATEETI

SEQ ID NO: 38144 - protein, 438 aa, Epibacterium ulvae
  misc_feature (1)..(438): tr|A0A1G5RIN8|A0A1G5RIN8_9RHOB 7-cyano-7-deazaguanine s ynthase (Queuosine biosynthesis) OS=Epibacterium ulvae OX=1156985 GN=SAMN04488118_1205 PE=4 SV=1
MTKCVAHFQTEEIQRTKNIADNCRVVRLYDTCHHIANAGFIGKTVPDKVERLGAPTSTAAYDFLTISMAVTAADTFFRREDVSQNGWARDFELHVPLVQPAKWAAVEPLLRKILNFLTGDSWAFTFLPNGPSKPNAVGGRLRKKSNLTNVDSVCLYSGGLDSWLGAKHLTAGGKNPILVSHSYPQDARRQNYLYDRLGYPLQRFSLNASPRQSGSANDTTMRGRSFNFLAMGAVCADAVAELNGLNQVPLYIPENGFIALNAPLTPRRVGSHSTRTAHPNYLSQLQELFSRVGIRANIGNPFWTLTKGEMMKNAALTADDQRHACQTVSCGKWKRKSEQCGRCLPCLIRRASFHKAGIVDSTPYTYSIPQNFAERDGTKKDDLMAVIRSVRQTTKKQRLVNALKSGPLPIDSTERRAWLSVYERGLEEMGDFLTSQGV

SEQ ID NO: 38145 - protein, 230 aa, Epsilonproteobacteria bacterium
  misc_feature (1)..(230): tr|A0A496XSZ0|A0A496XSZ0_9PROT 7-cyano-7-deazaguanine s ynthase OS=Epsilonproteobacteria bacterium OX=2026809 G N=queC PE=3 SV=1
MNNLAVVLVSGGMDSLVSAAIANEKHDKLAFLHLNYGQNTENKELECFEKIANFYHVDINLRKVIDISFLKQIGGSSLTDEKIEVKKYHGDSADIPDSYVPFRNTHIVSMAVSWSEIIGAKKIYIGAVEEDSSGYPDCRPSYYKALNNLIKEGTKEGDIEVITPVIHMKKFEIVKKALDLKAPLEFTWSCYAREDKACGECDSCALRLRGFQMAGAVDPIEYVKRPDYSA

SEQ ID NO: 38146 - protein, 222 aa, Epsilonproteobacteria bacterium
  misc_feature (1)..(222): tr|A0A426VV57|A0A426VV57_9PROT 7-cyano-7-deazaguanine s ynthase OS=Epsilonproteobacteria bacterium (ex Lamellib rachia satsuma) OX=2496635 GN=queC PE=3 SV=1
MSKKAVCIISGGMDSALSAKIAQKDGYEIIALHFNYGQRTQEKELKCFRKIAAAVEARETYEIDLPFFEQIGASALTDKNIDVPTGGLEDGVPVTYVPFRNGIFLSIAAAIAEKHGAEALYIGVVEEDSSGYPDCRESYIEQMQKAINLGTKDETNIEIKMPLVTLKKSEIVQKALDLGVPLEDTWSCYQAEEKACGICDSCRLRLKGFKEAGRVDLIPYNI

SEQ ID NO: 38147 - protein, 214 aa, Epulopiscium sp.
  misc_feature (1)..(214): tr|A0A1V2YHR7|A0A1V2YHR7_9FIRM 7-cyano-7-deazaguanine s ynthase OS=Epulopiscium sp. Nuni2H_MBin001 OX=1884656 G N=queC PE=3 SV=1
MTKAIVVFSGGQDSTTCLFWALQQFDKVITVAFDYGQKHKAELECAASIANDLNVEHHVLDLMLINQLSANALTRDDIDINAGTNDSLPSTFVEGRNMLFLTFAAIFAKTHDIKNIITGVCQTDFSGYPDCRDIFIKSLNVTLNLAMDYEFVVHTPLMWIDKQQAWQLADELGKLDYIRNNTLTCYNGIKGDGCGQCPACVLRANGLNKYLEFR

SEQ ID NO: 38148 - protein, 273 aa, Epulopiscium sp.
  misc_feature (1)..(273): tr|A0A1V2M7A9|A0A1V2M7A9_9FIRM TIGR00268 family protein OS=Epulopiscium sp. SCG-C07WGA-EpuloA2 OX=1712378 GN=A N641_07625 PE=4 SV=1
MEQLENFIRRLIPKGVVIAFSGGVDSSLLLKVASIEGKKIGADVYAVTFETKLHPQADLEIAKQIAKNTEVIHDIIFIDELTKTEILKNPIDRCYHCKRFLFEELIKYAKQHNLKYIIDGTNVDDLSQYRPGIKALNELGIISPLAQLKIDKATVRKYAKKLGLNVHNRPSAPCLATRIPYNIKLDMEILKNIDKAETFLKELGFVKNRVRLHKNIIRIEVDRKDIYAIMECSDKIIKYFKGLGFLYITLDLEGFRSGSMDIHLLNGDKNGYK

SEQ ID NO: 38149 - protein, 422 aa, Ereboglobus luteus
  misc_feature (1)..(422): tr|A0A2U8E3P4|A0A2U8E3P4_9BACT Uncharacterized protein OS=Ereboglobus luteus OX=1796921 GN=CKA38_09890 PE=4 SV =1
MEAFCFKELTVRDEELVCLAGIVAFADRLVRRKASLGWSRNLEIVMPVAEPRFWQQPEIVDTLLEALRYLTGDAWRFKFIKRAGRLPRVRQAEMDLGQGEFQVIPFSNGMDSFAQSRLLRKERPHISPIRVTAWNHGLAGSRTWLTDADGTRYRRVAVPIKFSFKGNADQTYRTRGFLFSVLAGLAAHMSGAKSIVIPEAGQGALGPSLVPVGAESPHRGSHPGFSRRMAAFFRAFWQKTISFEHPQLWHTKGEVLTMLKKENLHEGWEKTFSCSRGQRDIRTERHKKIHCGICSGCMLRRLAVFSADLPEPADTYMWPDLSASSLEESLCEDARRPVSTNDWDIAVHAVMAMEDLARLANTPITHPKMENALFDAFGNNPQQLAGGAEPLRRLLLAHQTEWRKFTQQLGPESWVNQQIAHL

SEQ ID NO: 38150 - protein, 231 aa, Erwinia amylovora
  misc_feature (1)..(231): tr|D4HY29|D4HY29_ERWAC 7-cyano-7-deazaguanine synthase OS=Erwinia amylovora (strain CFBP1430) OX=665029 GN=yba X PE=3 SV=1
MKRAVVVFSGGQDSTTCLIQALQQYDEVHCVTFDYGQRHRAEIDVARQLSTLLGVRAHKVLDVTMLNELAVSSLTRDNIPVPAYNPAASGLPSTFVPGRNLVFFTFASIYAYQIEAQAIVTGACETDFSGYPDCRNEFVNALNQAINLGMARELRIETPLMWLNKAETWALADYWHQLPLIRHQTLTCYNGIIGDGCGDCAACHLRARGLSEYQQNPAAVTLELKRKTGLV

SEQ ID NO: 38151 - protein, 231 aa, Erwinia amylovora
  misc_feature (1)..(231): tr|E5B352|E5B352_ERWAM 7-cyano-7-deazaguanine synthase OS=Erwinia amylovora ATCC BAA-2158 OX=889211 GN=ybaX PE =3 SV=1
MKRAVVVFSGGQDSTTCLIQALQQYDEVHCVTFDYGQRHRAEIDVARQLSTSLGVRAHKVLDVTMLNELAVSSLTRDNIPVPAYNPAASGLPSTFVPGRNIVFFTFASIYAYQIEAQAIVTGACETDFSGYPDCRNEFVNALNQAINLGMARELRIETPLMWLNKAETWALADYWHQLPLIRHQTLTCYNGIIGDGCGDCAACHLRARGLSEYQQNPAAVTLELKRKTGLV

SEQ ID NO: 38152 - protein, 231 aa, Erwinia aphidicola; identical to SEQ ID NO: 36388
  misc_feature (1)..(231): tr|A0A4R6PGB4|A0A4R6PGB4_ERWAP 7-cyano-7-deazaguanine s ynthase OS=Erwinia aphidicola OX=68334 GN=queC PE=3 SV= 1

SEQ ID NO: 38153 - protein, 231 aa, Erwinia billingiae
  misc_feature (1)..(231): tr|D8MNY9|D8MNY9_ERWBE 7-cyano-7-deazaguanine synthase OS=Erwinia billingiae (strain Eb661) OX=634500 GN=queC PE=3 SV=1
MRRAVVVFSGGQDSTTCLIQALQQYDEVHCITFDYGQRHRAEIDIARELSLSLGARAHKVLDVTMLNELAVSSLTRESIPVPAYDPDASGLPSTFVPGRNILFLTLASIYAYQVEAEAVITGVCETDFSGYPDCRDEFVKALNHAIELGMARSVRFETPLMWLNKAETWALADYWQQLPLVRNETLTCYNGEKGDGCGECAACHLRAKGLNEYQANGHAVMAEMKRKTGLR

SEQ ID NO: 38154 - protein, 231 aa, Erwinia billingiae; identical to SEQ ID NO: 38153
  misc_feature (1)..(231): tr|A0A5J6M3N9|A0A5J6M3N9_9GAMM 7-cyano-7-deazaguanine s ynthase QueC OS=Erwinia billingiae OX=182337 GN=queC PE =4 SV=1

SEQ ID NO: 38155 - protein, 231 aa, Erwinia citreus
  misc_feature (1)..(231): tr|A0A358L931|A0A358L931_ERWCI 7-cyano-7-deazaguanine s ynthase OS=Erwinia citreus OX=558 GN=queC PE=3 SV=1
MKRAVVVFSGGQDSTTCLIQALQQYDEVHCLTFDYGQRHRAEIEVARELAQSLGARAHKVLDVTLLNELAVSSLTRDSIPVPAWDPDASGLPSTFVPGRNILFLTLASIYAYQVEAEAVITGVCETDFSGYPDCRDEFVKALNHAVELGMARAVRFETPLMWLNKAETWALADYWQQLARVRNDTLTCYNGIKGDGCGECAACHLRANGLRDYQLNSAAVMQEMQHKTGLR

SEQ ID NO: 38156 - protein, 231 aa, Erwinia gerundensis
  misc_feature (1)..(231): tr|A0A0U5GK15|A0A0U5GK15_9GAMM 7-cyano-7-deazaguanine s ynthase OS=Erwinia gerundensis OX=1619313 GN=queC PE=3 SV=1
MKRAVVVFSGGQDSTTCLIQALQQYDEVHCVTFDYGQRHREEITVAQQLAKKLGARAHKVLDVNLLNELAISSLTRDNIPVPQWDPNASGLPSTFVPGRNILFLTLASVYAWQVEAEAVITGVCETDFSGYPDCRDEFVKALNHAITLGMARDIRFETPLMWLNKAETWALADYWQQLPLIRNETLTCYNGIQGDGCGECAACHLRARGLQEYQANQSTVMQTLKQKTGLQ

SEQ ID NO: 38157 - protein, 231 aa, Erwinia iniecta
  misc_feature (1)..(231): tr|A0A0L7T3Z5|A0A0L7T3Z5_9GAMM 7-cyano-7-deazaguanine s ynthase OS=Erwinia iniecta OX=1560201 GN=queC PE=3 SV=1
MKRAVVVFSGGQDSTTCLIQALQQYDEVHCVTFDYGQRHREEIEVAQTLSLQLGARAHKVLDVTLLNELAVSSLTRDNIPVPAFDPNASGLPSTFVPGRNILFLTLASIYAYQVEAEAVITGVCETDFSGYPDCRDEFVKALNHAIELGMARSVRFETPLMWLNKAETWALADYWQQLPLVRQQTLTCYNGIKGDGCGECAACHLRANGLNQYQADAAAVMASMQQKTGLI

SEQ ID NO: 38158 - protein, 231 aa, Erwinia mallotivora
  misc_feature (1)..(231): tr|A0A014NSZ4|A0A014NSZ4_9GAMM 7-cyano-7-deazaguanine s ynthase OS=Erwinia mallotivora OX=69222 GN=queC PE=3 SV =1
MKRAVMVFSGGQDSTTCLIQAVQQYEEVHCVTFDYGQRHRAEIEIAQQLSQKLGARAHKVLDVTLLNELAISSLTRDSIPVPAWNPDASGLPSTFVPGRNILFLTLASIYAYQVEAESVITGVCETDFSGYPDCRDEFVKALNQAVTLGMARQLRFETPLMWLNKAETWALADYWQQLPLVRDETLTCYNGIKGSGCGKCAACNLRANGLREYQNNTAAIMQSMQSKSGLD

SEQ ID NO: 38159 - protein, 231 aa, Erwinia persicina
  misc_feature (1)..(231): tr|A0A3S7S5Y6|A0A3S7S5Y6_9GAMM 7-cyano-7-deazaguanine s ynthase OS=Erwinia persicina OX=55211 GN=queC PE=3 SV=1
MKRAVVVFSGGQDSTTCLIQALQQYDEVHCVTFDYGQRHRAEIDVARELSHALGARAHKVLDVTMLNELAVSSLTRDNIPVPAYEPDASGLPSTFVPGRNILFLTLAAIYAWQIEAEAVITGVCETDFSGYPDCRDEFVKALNHAVSLGMARDIRFETPLMWLNKAETWALADYWQQLPLIRHQTLTCYNGIQGDGCGTCAACHLRANGLQAYQQHPATVMQAMKTKTGLV

SEQ ID NO: 38160 - protein, 231 aa, Erwinia piriflorinigrans
  misc_feature (1)..(231): tr|V5Z516|V5Z516_9GAMM 7-cyano-7-deazaguanine synthase OS=Erwinia piriflorinigrans CFBP 5888 OX=1161919 GN=yba X PE=3 SV=1
MKRAVVVFSGGQDSTTCLIQALQQYDEVHCVTFDYGQRHRAEIDVAQQLSASLGARAHKVLDVTMLNELAVSSLTRDNIPVPAYDPAASGLPSTFVPGRNIVFFTFASIYAWQIEAEAIITGACETDFSGYPDCRDEFVKALNRAINLGMAREMRIETPLMWLNKAETWALADYWQQLPLIRHKTLTCYNGIIGDGCGDCAACHLRARGLNEYQQNLAAVMLEMKRKTGLM

SEQ ID NO: 38161 - protein, 231 aa, Erwinia psidii
  misc_feature (1)..(231): tr|A0A3N6S1I7|A0A3N6S1I7_9GAMM 7-cyano-7-deazaguanine s ynthase OS=Erwinia psidii OX=69224 GN=queC PE=3 SV=1
MKRAVVVFSGGQDSTTCLVQALQQYNEVDCITFDYGQRHRAEIDIARQLSQSLGARAHKTLDVTMLNELAISSLTRDSIPVPAYDPSASGLPSTFVPGRNILFLTLASIYAYQIEAEAVITGVCETDFSGYPDCRDEFVKSLNQAIVLGMAREVRFETPLMWLNKAETWALADYWHRLSLVRDETLTCYNGIKGEGCGECAACNLRANGLREYQSNPVDVMQSMQRKTGLS

SEQ ID NO: 38162 - protein, 231 aa, Erwinia pyrifoliae
  misc_feature (1)..(231): tr|D2T4J1|D2T4J1_ERWP6 7-cyano-7-deazaguanine synthase OS=Erwinia pyrifoliae (strain DSM 12163 / CIP 106111 / Ep16/96) OX=644651 GN=ybaX PE=3 SV=1
MKRAVVVFSGGQDSTTCLIQALQQYDEVHCVTFDYGQRHRAEIEVAQQLSTSLGVRAHKVLDVTMLNELAVSSLTRDNIPVPAYNPAASGLPSTFVPGRNIVFFTFASIYAYQIEAEAIVTGACETDFSGYPDCRDEFVKALNQAINLGMARELRIETPLMWLNKAETWALADYWQQLPLIRHQTLTCYNGIIGDGCGDCAACHLRARGLSEYQQNPAAITLELKRKTGLV

SEQ ID NO: 38163 - protein, 231 aa, Erwinia rhapontici
  misc_feature (1)..(231): tr|A0A4R7GLD8|A0A4R7GLD8_ERWRD 7-cyano-7-deazaguanine s ynthase OS=Erwinia rhapontici OX=55212 GN=queC PE=3 SV= 1
MKRAVVVFSGGQDSTTCLIQALQQYDEVHCVTFDYGQRHRAEIDVARTLSLSLGARAHKVLDVTMLNELAVSSLTRDNIPVPAYDPTASGLPSTFVPGRNILFLTFAAIYAYQIEAEAVITGVCETDFSGYPDCRDEFVKALNHAVNLGMARDIRFETPLMWLNKAETWALADYWQQLPLIRHQTLTCYNGIQGDGCGECAACHLRANGLHDYQQNTAAVMQAMKTKTGLV

SEQ ID NO: 38164 - protein, 231 aa, Erwinia sp.
  misc_feature (1)..(231): tr|A0A3N1W3E4|A0A3N1W3E4_9GAMM 7-cyano-7-deazaguanine s ynthase OS=Erwinia sp. JUb26 OX=2485126 GN=queC PE=3 SV =1
MKRAVVVFSGGQDSTTCLIQALKQYDEVHCVTFDYGQRHRAEIDVAQQLSVSLGARAHKVLDVTLLNELAVSSLTRDNIPVPTWDPASSGLPSTFVPGRNILFLTLAAIYAYQVEAEAVITGVCETDFSGYPDCRDEFVKALNQAVSLGMARDIRFETPLMWLNKAETWALADYWQQLKLVREQTLTCYNGIQGDGCGECAACHLRANGLQEYQHNATAVMQAMKTKTGLV

SEQ ID NO: 38165 - protein, 234 aa, Erwinia sp.
  misc_feature (1)..(234): tr|A0A0Q4MVQ4|A0A0Q4MVQ4_9GAMM 7-cyano-7-deazaguanine s ynthase OS=Erwinia sp. Leaf53 OX=1736225 GN=queC PE=3 S V=1
MKRAVVVFSGGQDSTTCLIQALQQYDEVHCVTFDYGQRHRAEIDVAQQLSLQLGARAHKVLDVTLLNELAVSSLTRDNIPVPAYDPNASGLPSTFVPGRNILFLTLAAVYAYQVEAEAVITGVCETDFSGYPDCRDEFVKALNHAVTLGMARKVRFETPLMWLNKAETWALADYWQQLPLVRNETLTCYNAVKGDGCGECAACHLRANGLREYQQNPTAVMQAMKAKSASSDKT

SEQ ID NO: 38166 - protein, 231 aa, Erwinia tasmaniensis
  misc_feature (1)..(231): sp|B2VIU4|QUEC_ERWT9 7-cyano-7-deazaguanine synthase OS =Erwinia tasmaniensis (strain DSM 17950 / CIP 109463 / Et1/99) OX=465817 GN=queC PE=3 SV=1
MKRAVVVFSGGQDSTTCLIQALEQYDEVHCVTFDYGQRHRAEIDVAQQLSASLGVRAHKVLDVTMLNELAASSLTRDNIPVPAYDPSASGLPSTFVPGRNIVFFTFASIYAFQIEAEAIITGACETDFSGYPDCRDEFVKALNRAVNLGMARELRIETPLMWLNKAETWALADYWQQLPLIRHQTLTCYNGIIGDGCGDCAACHLRARGLDQYQQNPTSVMLEMERKTGLA

SEQ ID NO: 38167 - protein, 231 aa, Erwinia tracheiphila
  misc_feature (1)..(231): tr|A0A0M2KBF7|A0A0M2KBF7_9GAMM 7-cyano-7-deazaguanine s ynthase OS=Erwinia tracheiphila OX=65700 GN=queC PE=3 S V=1
MKRAVVVFSGGQDSTTCLIQALQQYDEVHCVTFDYGQRHRAEIDIACHLSKLLGASAHKTLDVTLLNELAISSLTRDNIPVPAYNPAANGLPSTFVPGRNILFLTLASICAYQVEAETVITGVCETDFSGYPDCRDEFVKALNQAVTLGMAHPVRFVTPLMWLNKAEIWALADYWHQLSLVRNETLTCYNGIKGDGCGTCAACNLRANGLREYQSNAAGVMKNMQQKTGLT

SEQ ID NO: 38168 - protein, 231 aa, Erwinia tracheiphila
  misc_feature (1)..(231): tr|A0A345CZ08|A0A345CZ08_9GAMM 7-cyano-7-deazaguanine s ynthase OS=Erwinia tracheiphila OX=65700 GN=queC PE=3 S V=1
MKRAVVVFSGGQDSTTCLIQALQQYDEVHCVTFDYGQRHRAEIDIACHLSKLLGASAHKTLDVTLLNELAISSLTRDNIPVPAYNPAANGLPSTFVPGRNILFLTLASIYAYQVEAETVITGVCETDFSGYPDCRDEFVKALNQAVTLGMAHPVRFVTPLMWLNKAEIWALADYWHQLSLVRNETLTCYNGIKGDGCGTCAACNLRANGLREYQSNAAGVMKNMQQKTGLA

SEQ ID NO: 38169 - protein, 231 aa, Erwinia typographi
  misc_feature (1)..(231): tr|A0A0A3Z7V4|A0A0A3Z7V4_9GAMM 7-cyano-7-deazaguanine s ynthase OS=Erwinia typographi OX=371042 GN=queC PE=3 SV =1
MKRAVVVFSGGQDSTTCLIQALQQYDEVHCITFDYGQRHHAEIDVARQLSLSLGARAHKVLDVTLLNELAVSSLTRDSIPVPAYDANASGLPSTFVPGRNILFLTLASIYAYQVEAEAVITGVCETDFSGYPDCRDEFVKALNHAVALGMAREVRFETPLMWLNKAETWALADYWQQLPLVRNETLTCYNGIKGDGCGECAACHLRANGLTGYQADSDVVMAEMKRKTGLR

SEQ ID NO: 38170 - protein, 231 aa, Erwiniaceae bacterium
  misc_feature (1)..(231): tr|A0A3D5MBA1|A0A3D5MBA1_9GAMM 7-cyano-7-deazaguanine s ynthase OS=Erwiniaceae bacterium OX=2053552 GN=queC PE= 3 SV=1
MKRAVVVFSGGQDSTTCLIQALAQYDEVHCVTFDYGQRHRQEIDVARKLSAQLGARAHKVLDVTLLNELAISSLTRDNIPVPDYDANATGLPSTFVPGRNILFLTLASIYAYQVEAEAVITGVCETDFSGYPDCRDEFVKALNHAVELGMARAVRFETPLMWLNKAETWALADYWQQLPLVRQQTLTCYNGIQGDGCGECAACHLRANGLKSYQDDMPGVMQSMKQKTGLR

SEQ ID NO: 38171 - protein, 227 aa, Erysipelatoclostridium ramosum; identical to SEQ ID NO: 37609
  misc_feature (1)..(227): tr|A0A3E3EI01|A0A3E3EI01_9FIRM 7-cyano-7-deazaguanine s ynthase OS=Erysipelatoclostridium ramosum OX=1547 GN=qu eC PE=3 SV=1

SEQ ID NO: 38172 - protein, 227 aa, Erysipelatoclostridium ramosum
  misc_feature (1)..(227): tr|B0N7Y1|B0N7Y1_9FIRM 7-cyano-7-deazaguanine synthase OS=Erysipelatoclostridium ramosum DSM 1402 OX=445974 GN =queC PE=3 SV=1
MKVLVLFSGGVDSTTALALAIQEHGKDNVVALSISYGQKHTKEIEVANKIAQFYQVEHLYLDLAKIFTYSNCSLLQHSDNEIPHESYNEQLNKTDGNPVSTYVPFRNGLFLSSAASIALSKGCNIIYYGAHSDDAAGSAYPDCSKVFNNAMNQAIYEGSGHQLEIKAPFVEMTKADIVKIGLSLGVPYQLTWSCYEGNDTPCGTCGTCIDRQNAFLKNGIKDPLLGE

SEQ ID NO: 38173 - protein, 230 aa, Erysipelatoclostridium sp.
  misc_feature (1)..(230): tr|A0A1Y4MZH4|A0A1Y4MZH4_9FIRM 7-cyano-7-deazaguanine s ynthase OS=Erysipelatoclostridium sp. An173 OX=1965571 GN=queC PE=3 SV=1
MRVLVLFSGGVDSTTALALAINQYGHENVVALSISYGQKHDKEIQAANQIAKYYQVEHIFLDLAKIFEYSDCSLLNHSSKEIPHETYAKQLSKTDGKPVTTYVPFRNGLFLSSAASIALSKNCNLIYYGAHKDDAAGNAYPDCSEIFNNAMNQAIYEGSGHQLQIEAPFVNKSKADIVKIGLDLNVPYHLTWSCYEGNDKPCGKCGTCLDRQEAFLKNGVIDPLLGGNNG

SEQ ID NO: 38174 - protein, 230 aa, Erysipelatoclostridium sp.; identical to SEQ ID NO: 38173
  misc_feature (1)..(230): tr|A0A1Y4QQJ9|A0A1Y4QQJ9_9FIRM 7-cyano-7-deazaguanine s ynthase OS=Erysipelatoclostridium sp. An15 OX=1965566 G N=queC PE=3 SV=1

SEQ ID NO: 38175 - protein, 228 aa, Erysipelotrichaceae bacterium
  misc_feature (1)..(228): tr|A0A3G9J4U1|A0A3G9J4U1_9FIRM 7-cyano-7-deazaguanine s ynthase OS=Erysipelotrichaceae bacterium SG0102 OX=2487 118 GN=queC PE=3 SV=1
MDNALVLVSGGVDSSTCLALAVEKYGHDHVKGLCLYYGQRHVKEMESAHKICDYYQVPLYECDLSRIFTYSSCNLLAHNEDTIPHRAYSEQVAESEGPVSTYVPFRNGLFLSTAASFALSLNCQVIYYGAHADDAAGNAYPDCSSVFNDAMNQAIVEGSGHQVRIEAPFVGVNKAEVVRQVLALKVPYELTWSCYEGGDTPCGVCGTCRDRALAFEKNGVTDPLLVKE

SEQ ID NO: 38176 - protein, 48 aa, Erysipelotrichaceae bacterium
  misc_feature (1)..(48): tr|A0A3C1N095|A0A3C1N095_9FIRM 7-cyano-7-deazaguanine s ynthase QueC (Fragment) OS=Erysipelotrichaceae bacteriu m OX=2049044 GN=DCQ45_01275 PE=4 SV=1
MDNALVLVSGGVDSSTCLALAVEKYGHDHVKGLCLYYGQRHVKEMESA

SEQ ID NO: 38177 - protein, 234 aa, Erythrobacter aquimixticola
  misc_feature (1)..(234): tr|A0A419RV74|A0A419RV74_9SPHN 7-cyano-7-deazaguanine s ynthase OS=Erythrobacter aquimixticola OX=1958945 GN=qu eC PE=3 SV=1
MAQRMSTEKSIATILLSGGLDSMVSAALAREQGFRLHALTIDYGQRHVRELQSAKAIAERMGVERHVELPLDLRQFGGSALTDDIEVPKDGVGEDIPVTYVPARNLLFLALTTAFAESSGSTDLFIGVNALDYSGYPDCRPEFIASFAETARLGTKQGVEGQPFVIHAPLQHMTKAEIASECARLELDPAWSWSCYDPTDEGMACGRCDSCRLRRKGFAEAGVTDTAPYAADPD

SEQ ID NO: 38178 - protein, 233 aa, Erythrobacter atlanticus
  misc_feature (1)..(233): tr|A0A0H4VEG0|A0A0H4VEG0_9SPHN 7-cyano-7-deazaguanine s ynthase OS=Erythrobacter atlanticus OX=1648404 GN=queC PE=3 SV=1
MTQTDKIAVVLLSGGLDSMVTAAIARENGYRLQALSINYGQRHFCELNSASTIADKLGVERHVVLPLDLRQFGGSALTDDIDVPKAGVAQDEIPVTYVPARNLLFLALTTAFAESAGASDIFIGVNALDYSGYPDCRPEFIASFAETARLGTRQGVEGTPFVIHAPLQHFTKADIARECARLDLDPAWSWSCYDPTADGIACGLCDSCRLRRKGFAEAGVMDTTAYAAPFAAD

SEQ ID NO: 38179 - protein, 232 aa, Erythrobacter citreus
  misc_feature (1)..(232): tr|A0A0L1KG44|A0A0L1KG44_9SPHN 7-cyano-7-deazaguanine s ynthase OS=Erythrobacter citreus LAMA 915 OX=1306953 GN =queC PE=3 SV=1
MIADEKALVLFSGGQDSATCLAWALESFSAVETVGFDYGQRHRVELECRNELLSRIVEINPVWRERLGSDHTLDLSVLGQISETGLTRDAEIALREDGLPNTFVPGRNLLFFTLAAALAFRRKARHMVGGMCETDFSGYPDCRDDTLKALQVTLNLGMGSRSVIHTPLMWIDKAGTWALAQDLGGDPLVELITEHSHTCYLGERTIRHEWGFGCGTCPACELRIKGWEVFCA

SEQ ID NO: 38180 - protein, 233 aa, Erythrobacter flavus
  misc_feature (1)..(233): tr|A0A222ESG5|A0A222ESG5_9SPHN 7-cyano-7-deazaguanine s ynthase OS=Erythrobacter flavus OX=192812 GN=queC PE=3 SV=1
MSEAEIPRPAVILLSGGLDSMVSAALARERGHSLHALTIDYGQRHIRELQSARAIAEKLGVERHVELPLDLRQFGGSALTADIDVPKDGVAETIPVTYVPARNLVFLALTTAFAETSASRDIFIGVNALDYSGYPDCRPEFIASFAETARLGTKQGVEGDPFTIHAPLQNMTKADIARECHRLGLDPAWSWSCYDPTPDGFACGVCDSCRLRRKGFAEAELVDTTPYARDIDD

SEQ ID NO: 38181 - protein, 233 aa, Erythrobacter flavus
  misc_feature (1)..(233): tr|A0A3T1CEH8|A0A3T1CEH8_9SPHN 7-cyano-7-deazaguanine s ynthase OS=Erythrobacter flavus OX=192812 GN=queC PE=3 SV=1
MSEAEIPRPAVILLSGGLDSMVSAALARERGHSLHALTIDYGQRHIRELQSARAIAEKLGVERHVELPLDLRQFGGSALTADIDVPKDGVAETIPVTYVPARNLVFLALTTAFAETSASRDIFIGVNALDYSGYPDCRPEFIASFAETARLGTKQGVEGDPFAIHAPLQNMTKADIARECHRLGLDPAWSWSCYDPTPDGLACGVCDSCRLRRKGFAEAELVDTTPYARDIDD

SEQ ID NO: 38182 - protein, 232 aa, Erythrobacter gangjinensis
  misc_feature (1)..(232): tr|A0A0G9MQW1|A0A0G9MQW1_9SPHN 7-cyano-7-deazaguanine s ynthase OS=Erythrobacter gangjinensis OX=502682 GN=queC PE=3 SV=1
MTELAKIGVILLSGGLDSMVTAALAKEQGYRLHALTIDYGQRHVRELQSARAIADKLGVERHVSLPLDLRQFGKSALTDDIDVPKSGVGNDIPVTYVPARNLLFLALTTAFAESAGSSDIFIGVNALDYSGYPDCRPEFIASFAETARLGTKQGVEGSPFEIHAPLQHMTKAEIARECARLGLDASWSWSCYDPTADGLACGLCDSCRLRRKGLAEAGVVDSTRYAATPDRA

SEQ ID NO: 38183 - protein, 232 aa, Erythrobacter litoralis
  misc_feature (1)..(232): tr|A0A074MC65|A0A074MC65_9SPHN 7-cyano-7-deazaguanine s ynthase OS=Erythrobacter litoralis OX=39960 GN=queC PE= 3 SV=1
MTIQQGEDTARRAVVLLSGGLDSMVTAAIARERGFAIHALTVDYGQRHRRELESARLIARRLQLTDQVEIQLDLRKFGGSALTDSIDVPKDGVGSDIPVTYVPARNLVFLALTTAFAEARRSSDIFIGVNALDYSGYPDCRPEFISAFTQAARLGTKAGVEGQGFTVHAPLQHMTKADIARECVRLGLDPAWSWSCYDPTEEGLACGACDSCRLRKKGFAEAGLVDSTRYAT

SEQ ID NO: 38184 - protein, 239 aa, Erythrobacter litoralis
  misc_feature (1)..(239): sp|Q2N612|QUEC_ERYLH 7-cyano-7-deazaguanine synthase OS =Erythrobacter litoralis (strain HTCC2594) OX=314225 GN =queC PE=3 SV=1
MAANSRKAAAILLSGGLDSMVTAAIAQEQGYAVHALTIDYGQRHKVELQSARLIAAKIGAERHVEIEADLRALGGSALTDDIDVPKCGVGNDIPVTYVPARNLVFLSLTTAFAEASGARDIFIGVNALDYSGYPDCRPEFIESFAVTANLATKAGVEESAPFKIHAPLQHMTKADIARECARLGLESAWSWSCYDPLPGLKPCGACDSCRLRRKGFAEAGLADGLDYPADAPPIQGENA

SEQ ID NO: 38185 - protein, 232 aa, Erythrobacter longus
  misc_feature (1)..(232): tr|A0A074M000|A0A074M000_ERYLO 7-cyano-7-deazaguanine s ynthase OS=Erythrobacter longus OX=1044 GN=queC PE=3 SV =1
MSCARMASSKPSAIVLLSGGLDSMVSAAIALENGFAVHALTVNYGQRHRIELDRAKAIASKLQLESQTEIALDLRAFGGSALTDEIAVPKDGVGDDIPVTYVPARNLVFLALTTACAEAKSARDIFIGVNALDYSGYPDCRPEFIESFAETARLGTKAGVEGSPLKIHTPLQHMTKADIAIECARLGLDPSWSWSCYDPTVEGLPCGKCDSCRLRKKGFAEAGIVDSTSYAE

SEQ ID NO: 38186 - protein, 229 aa, Erythrobacter luteus
  misc_feature (1)..(229): tr|A0A0G9MYU6|A0A0G9MYU6_9SPHN 7-cyano-7-deazaguanine s ynthase OS=Erythrobacter luteus OX=1581420 GN=queC PE=3 SV=1
MSTTMPIAVVLLSGGLDSMVTAGLASEQGFALHALSIDYGQRHARELESAKAIADLLGVVRHVTLPLDLRQFGGSALTDDIAVPKTGVGDDIPVTYVPARNLLFLALTTAFAESSGSSDIFIGVNALDYSGYPDCRPEFIASFAETARLGTKQGVEGRPFTIHAPLQHMSKADIARECARLGFDPAWSWSCYDPAPGGEACGLCDSCRLRRQGFADAGVVDTTPYAADA

SEQ ID NO: 38187 - protein, 231 aa, Erythrobacter lutimaris
  misc_feature (1)..(231): tr|A0A395LI10|A0A395LI10_9SPHN 7-cyano-7-deazaguanine s ynthase OS=Erythrobacter lutimaris OX=1538146 GN=queC P E=3 SV=1
MPENSQEKAAVLLSGGLDSMVAAALAREKGHDVHALTIDYGQRHKRELEAARAIARALGLAGHSEIALDLRQFGGSALTADIDVPKDGVGETIPVTYVPARNLVFLALTTAFAESIGAGRIVIGVNALDYSGYPDCRPEFIAAFAEAARLGTKAGIEGQGFAIDAPLQFLSKADIAREADRLGLDTGLSWSCYDPRGDGLPCGLCDSCRLRMGGFAAAGLTDGLTYPPETE

SEQ ID NO: 38188 - protein, 231 aa, Erythrobacter marinus
  misc_feature (1)..(231): tr|A0A0H0XQJ7|A0A0H0XQJ7_9SPHN 7-cyano-7-deazaguanine s ynthase OS=Erythrobacter marinus OX=874156 GN=queC PE=3 SV=1
MSESGKIATVLLSGGLDSMVTAAIARESGFRLHALTIDYGQRHVRELKSASSIAKKLGVERHVTLPLDLREFGGSALTADIDVPKTGVADDIPVTYVPARNLLFLALTTAFAESSGSSDLFIGVNALDYSGYPDCRPEFIASFAETARLGTKQGVEGVPFQIHAPLQHMTKGDIARECIRLSLDPAWSWSCYDPSPQGIACGLCDSCRLRRKGFAEARVADSTPYAADTDD

SEQ ID NO: 38189 - protein, 238 aa, Erythrobacter nanhaisediminis
  misc_feature (1)..(238): tr|A0A1I5L2H3|A0A1I5L2H3_9SPHN 7-cyano-7-deazaguanine s ynthase OS=Erythrobacter nanhaisediminis OX=604088 GN=q ueC PE=3 SV=1
MNEVNNADSPPAVVLLSGGLDSMVSAALAREAGYAVHALTIDYGQRHIRELQSARKIAKLLGVSRHVELPLDLRRFGGSALTDDIDVPKEGVGDDIPVTYVPARNLVFLALTTAFAESVHSRDIFIGVNALDYSGYPDCRPEFIASFAETARLGTKQGVEGEPFSIHAPLQHMSKADIARECYRLDLDPSWSWSCYDPTEDGTACGACDSCRLRRKGFDEAGLIDTTAYAPGAPDLRE

SEQ ID NO: 38190 - protein, 232 aa, Erythrobacter sp.
  misc_feature (1)..(232): tr|A0A1E4AYB6|A0A1E4AYB6_9SPHN 7-cyano-7-deazaguanine s ynthase OS=Erythrobacter sp. SCN 62-14 OX=1660099 GN=qu eC PE=3 SV=1
MTVAEGVVTRPIAVVLLSGGLDSMVTAALAQEQGYAVHALSVDYGQRHRLELESARRIANKLGVARHVEIALDLRAFGGSALTDNIDVPKGGVTDHIPVTYVPARNLVFLALTTAFAEGSGARDVFIGVNALDYSGYPDCRPEFIASFAETARLGTKAGIEGSPFTIHAPLQHLTKADIARECARLRLDPAWSWSCYDPTPDGMACGLCDSCRLRKKGFAEAGIVDSTPYRA

SEQ ID NO: 38191 - protein, 232 aa, Erythrobacter sp.
  misc_feature (1)..(232): tr|A0A2Z4JWB3|A0A2Z4JWB3_9SPHN 7-cyano-7-deazaguanine s ynthase OS=Erythrobacter sp. KY5 OX=2011159 GN=queC PE= 3 SV=1
MTNQETQGGRAKAVVLLSGGLDSMVSAAIALEEGFAVHALTIDYGQRHRRELAAARAIAEKLELSSQTELALDLTAFGGSALTDEIDVPKDGVGDDIPVTYVPARNLVFLALTTACAEAAGASDIFIGVNALDYSGYPDCRTEFIASFAETARLGTKAGVEGKPFSIHAPLQHMTKADIARQCSRLGLDPSWSWSCYDPTSEGVACGLCDSCRLRRKGFEEAGLTDTTPYAS

SEQ ID NO: 38192 - protein, 234 aa, Erythrobacter xanthus
  misc_feature (1)..(234): tr|A0A3A1P7D2|A0A3A1P7D2_9SPHN 7-cyano-7-deazaguanine s ynthase OS=Erythrobacter xanthus OX=1784712 GN=queC PE= 3 SV=1
MTSTTSDTGQKQAIVLLSGGLDSSLSAALAKEQGFAINALTIDYNQRHRRELDAARAVAQSLGAERHIILPLDLSQFGGSALTADIDVPKGGVAEEGIPITYVPARNLVFLSLTLAWAEVVGANDIFIGVNALDYSGYPDCRPEFIASFEETARLATREGQEGEGFRIQAPLQYWDKARIVSEALRVGLDLSLTWSCYDPQPDGTPCGLCDSCRLRAKGFAEAGALDPVASSAA

SEQ ID NO: 38193 - protein, 230 aa, Erythrobacter zhengii
  misc_feature (1)..(230): tr|A0A418NTE2|A0A418NTE2_9SPHN 7-cyano-7-deazaguanine s ynthase OS=Erythrobacter zhengii OX=2307003 GN=queC PE= 3 SV=1
MTETAKIAVVLLSGGLDSMVTGALAREQGFRLHALSIDYGQRHRRELQSARAIAEKLEVERHVQLPLDLRQFGASALTADIDVPKDGVGDDIPVTYVPARNLLFLALTTAFAESAGASDIFIGVNALDYSGYPDCRPEFIASFAETARLGTRQGVEGRPFDIHAPLQHMTKADIARQCHRLGLDPAWSWSCYDPTPEGLACGLCDSCRLRLKGFAEAGVEDTTRYASKPS

SEQ ID NO: 38194 - protein, 238 aa, Erythrobacteraceae bacterium
  misc_feature (1)..(238): tr|A0A2D9P8M6|A0A2D9P8M6_9SPHN 7-cyano-7-deazaguanine s ynthase OS=Erythrobacteraceae bacterium OX=2026738 GN=q ueC PE=3 SV=1
  misc_feature (109)..(109): Xaa can be any naturally occurring amino acid
  misc_feature (124)..(124): Xaa can be any naturally occurring amino acid
MNETDTSGPAVVLLSGGLDSMVTAAIARERGMAVHALTIDYGQRHIRELQSARSIAEKLGVKRHVELPLDLRQFGGSALTDDIDVPKGGIGEGEDIPVTYVPARNLVFXALTTAFAETSNSRDXFIGVNALDYSGYPDCRPEFIASFAETARLGTKQGVAGRPFTIHAPLQHMSKADIARECDRLGLDPSWSWSCYDPTAEGEACGACDSCRLRRKGFAEAGLADTTTYSRDAPALTE

SEQ ID NO: 38195 - protein, 232 aa, Erythrobacteraceae bacterium
  misc_feature (1)..(232): tr|A0A0P7YYE5|A0A0P7YYE5_9SPHN 7-cyano-7-deazaguanine s ynthase OS=Erythrobacteraceae bacterium HL-111 OX=16669 08 GN=queC PE=3 SV=1
MTKSGGDQERPAAVVLLSGGLDSMVTAAIARERGFAVHALTVDYGQRHRLELQSARRIAARLELAEQVEIALDLRKFGGSALTDAIEVPKDGVGSAIPVTYVPARNLVFLALTTAFAEARGSRDIFIGVNALDYSGYPDCRPEFIASFTETARLGTKAGVEGRPFTVHAPLQHLTKADIARECARLGLDPAWSWSCYDPTEEGLACGACDSCRLRKKGFAEAGLVDTTRYAT

SEQ ID NO: 38196 - protein, 231 aa, Escherichia albertii
  misc_feature (1)..(231): tr|A0A4Q9IYA9|A0A4Q9IYA9_9ESCH 7-cyano-7-deazaguanine s ynthase OS=Escherichia albertii OX=208962 GN=queC PE=3 SV=1
MKRAVVVFSGGQDSTTCLVQALQQYDEVHCVTFDYGQRHRAEIDVARELALKLGARAHKVLDVTLLNQLAVSSLTRDSIPVPDYEPDADGIPNTFVPGRNILFLTLAAIYAYQVKAEAVITGVCETDFSGYPDCRDEFVKALNHAVSLGMAKDIRFVTPLMWIDKAETWALADYYGKLDLVRSETLTCYNGVKGDGCGHCAACNLRANGLNHYLADKPAVMAAMKQKTGLK

SEQ ID NO: 38197 - protein, 231 aa, Escherichia albertii
  misc_feature (1)..(231): tr|A0A3W6DNW0|A0A3W6DNW0_9ESCH 7-cyano-7-deazaguanine s ynthase OS=Escherichia albertii OX=208962 GN=queC PE=3 SV=1
MKRAVVVFSGGQDSTTCLVQALQQYDEVHCVTFDYGQRHRAEIDVARELALKLGARAHKVLDVTLLNQLAVSSLTRDSIPVPDYEPDADGIPNTFVPGRNILFLTLAAIYAYQVKAEAVITGVCETDFSGYPDCRDEFVKALNHAVSLGMAKDIRFETPLMWIDKAETWALADYYGKLDLVRSETLTCYNGVKGDGCGHCAACNLRANGLNHYLVDKPAVMAAMKQKTGLK

SEQ ID NO: 38198 - protein, 231 aa, Escherichia fergusonii
  misc_feature (1)..(231): tr|F0JMB4|F0JMB4_ESCFE 7-cyano-7-deazaguanine synthase OS=Escherichia fergusonii ECD227 OX=981367 GN=queC PE=3 SV=1
MKRAVVVFSGGQDSTTCLVQALQQYDEVHCVTFDYGQRHRAEIDVARELALKLGARAHKVLDVTLLNELAVSSLTRDSIPVPDYEPEADGIPNTFVPGRNILFLTLAAIYAYQVKAEAVITGVCETDFSGYPDCRDEFVKALNHAVSLGMAKDIRFETPLMWIDKAETWALADYYGKLDLVRNETLTCYNGIKGDGCGHCAACNLRSNGLHHYLADKPTVMAAMKQKTGLK

SEQ ID NO: 38199 - protein, 231 aa, Escherichia fergusonii
  misc_feature (1)..(231): tr|A0A564SQE6|A0A564SQE6_ESCFE 7-cyano-7-deazaguanine s ynthase OS=Escherichia fergusonii OX=564 GN=queC PE=3 S V=1
MKRAVVVFSGGQDSTTCLVQALQQYDEVHCVTFDYGQRHRAEIDVARELALKLGARAHKVLDVTLLNELAVSSLTRDSIPVPDYEPEADGIPNTFVPGRNILFLTLAAIYAYQVKAEAVITGVCETDFSGYPDCRDEFVKALNHAVSLGMAKDIRFETPLMWIDKAETWALADYYGKLDLVRNETLTCYNGMKGDGCGHCAACNLRTNGLNHYLADKPTVMAAMKQKTGLK

SEQ ID NO: 38200 - protein, 231 aa, Escherichia marmotae
  misc_feature (1)..(231): tr|A0A2B7LX58|A0A2B7LX58_9ESCH 7-cyano-7-deazaguanine s ynthase OS=Escherichia marmotae OX=1499973 GN=queC PE=3 SV=1
MKRAVVVFSGGQDSTTCLVQALQQYDEVHCVTFDYGQRHRAEIDVARELALKLGARAHKVLDVTLLNELAVSSLTRDSIPVPDYEPEADGIPNTFVPGRNILFLTLAAIYAYQVKAEAVITGVCETDFSGYPDCRDEFVKALNHAVSLGMAKDIRFETPLMWIDKAETWALADYYGKLDLVRNETLTCYNGIKGDGCGHCAACNLRANGLNHYLADKSAVMTAMKQKTGLK

SEQ ID NO: 38201 - protein, 231 aa, Escherichia sp.
  misc_feature (1)..(231): tr|A0A4U6CMC0|A0A4U6CMC0_9ESCH 7-cyano-7-deazaguanine s ynthase OS=Escherichia sp. MR OX=2575922 GN=queC PE=3 S V=1
MRRAVVVFSGGQDSTTCLVQALQQYDEVHCVTFDYGQRHRAEIDVARELALKLGARAHKVLDVTLLNELAVSSLTRDSIPVPDYEPEADGIPNTFVPGRNILFLTLAAIYAYQVKAEAVITGVCETDFSGYPDCRDEFVKALNHAVSLGMAKDIRFETPLMWIDKAETWALADYYGKLDLVRNETLTCYNGIKGDGCGHCAACNLRANGLNHYLADKPTVMAAMKQKTGLK

SEQ ID NO: 38202 - protein, 231 aa, Escherichia sp.
  misc_feature (1)..(231): tr|A0A4Q9JTH7|A0A4Q9JTH7_9ESCH 7-cyano-7-deazaguanine s ynthase OS=Escherichia sp. E10V4 OX=2478971 GN=queC PE= 3 SV=1
MKRAVVVFSGGQDSTTCLVQALQQYDEVHCVTFDYGQRHRAEIDVARDLALKLGARAHKVLDVTLLNELAVSSLTRDSIPVPDYEPEADGIPNTFVPGRNILFLTLAAIYAYQVKAEAVITGVCETDFSGYPDCRDEFVKALNHAVSLGMAKEIRFETPLMWIDKAETWALADYYGKLDLVRNETLTCYNGIKGDGCGQCAACNLRSNGLNHYLSDKPAVMAAMKQKTGLK

SEQ ID NO: 38203 - protein, 918 aa, Estrella lausannensis
  misc_feature (1)..(918): tr|A0A0H5DRC2|A0A0H5DRC2_9BACT 7-cyano-7-deazaguanine s ynthase OS=Estrella lausannensis OX=483423 GN=queC PE=4 SV=1
MNITFPSANRSTIANLDNSRAIRMYENYATLPEAMEVPPGQLEYAKALCQHHGLPTENIIEGREMDATPRVVPLIKNRVIIPFSGGTDSTAALIWAKRQGMHIYPLHVYMLNPASGAREMTAVENICNALGLRDRLIVVKHPVNCRKIKGYREKIKNLQENPAKNQYIWLISLPYMQKHECGTILFAADKSPQAIHFSDTITAFNLFKQYAEKLIGPHNLCIPFDTKKQYVAELLSSEQAALSKLVSSCFASMQHFKHWQNTNRKKGEDTPDNECGSCQKCRTLKEIRAELLAPGPQKKQENSNPREVPPTVPYEKQNQINSHPREIPPTVAFEKQNQENTYPREIPPPVLQKRFVSTIGKSSLPAGAVPIFQNLLPPLRIYPYPTMMEICSPPLPARVRERDFAEEERASPLKRQKFDFSAAMHSECIEPRKFSAPIPRISSNALENQLPLRGFASLNLPQTQPLMGGMGPWRGLNPTALAGINPPPKTREVAQVFNSVEEKIEAMVKGFTFPKTKGDGVYSLDFDALKSWMQKKLNETLDVTQEEKEAFYERIGELLSDEITKHQYKLPHLHNGQCRSNPVITADVAAESFKLLLNLGNYDFTRTYTGMQAGLKMSAFYMNEERIKASTGIDKSPSKKWEDEKLRWKKITKIFKYHAQGKAPYLCLGLPLITNDFLMNAPGQFRPAAVFDVLNYLKQSNVAGNITRILDLCTGWGDRLVGAMAAAKQFKVVRYIGTDPNKDLTPRYKNIFDACLKVLDREMGEPYQFTCKLYDKPMEDLSEEELIVDGVPSDLMITSPPFFDYEKYKDHGNTQSTARYPEIDEWVNNFLYKLVDQAKKGVRNQGIVAIQFSTTKIGDKKICDLLKANMQSKLKHITDLSYVSKAIRGKRHGYEGEKFYIYQKVEASDNDEMDVDVG

SEQ ID NO: 38204 - protein, 220 aa, Estrella lausannensis
  misc_feature (1)..(220): tr|A0A0H5E506|A0A0H5E506_9BACT 7-cyano-7-deazaguanine s ynthase OS=Estrella lausannensis OX=483423 GN=queC1 PE= 3 SV=1
MRAIVLLSGGLDSCVSLAYALQKQREVIALSFSYGQKHQIELTHAERIARHYGIRHKIIRFPDNLFTASSLVGDGEIPKGRTQEEISTGGIPSTYVPARNTVFLAHALSLAESEGAQEIYFGCNKQDRNGYPDCRPEFVEAFQHLISKATKVSTESHPPIIVTPLADLDKREIVELGAQLKAPIELSISCYSPNGKGEPCLACDACCLREEAFSAVFGKR

SEQ ID NO: 38205 - protein, 224 aa, Eubacteriaceae bacterium
  misc_feature (1)..(224): tr|A0A143XZG5|A0A143XZG5_9FIRM 7-cyano-7-deazaguanine s ynthase OS=Eubacteriaceae bacterium CHKCI004 OX=1780380 GN=queC PE=3 SV=1
MQELKNKKAAVVVFSGGQDSTTCLFWAIKRYETVIALSFDYHQKHALELECAKKICQDHGIEHHIMDMSLLNQLAPNSLTRSDIPVDEDAPSEGTPNSFVDGRNHLFLSYAAVFAKQRGITDIITGVSQSDFSGYPDCRDIFIKSLNTTLSLAMDYPFDIITPLMWLDKKETWALADELGVFDIIRYETLTCYNGVIGDGCGHCPSCKLRRKGLEEYLASKSVR

SEQ ID NO: 38206 - protein, 240 aa, Eubacteriaceae bacterium
  misc_feature (1)..(240): tr|A0A425W6L6|A0A425W6L6_9FIRM 7-cyano-7-deazaguanine s ynthase OS=Eubacteriaceae bacterium OX=2049045 GN=queC PE=3 SV=1
MKQLFDQYKKAMVLTSGGVDSTTALGLAVDRLGAENVIALSIQYGQKHDKEIEAAKAVAAHYGVEQLFLDLTPIFQYSDCALLKGSDQAIPEESYAEQIAATGGEKPVSTYVPFRNGLFLSSAASVALSKDCDVILYGAHADDSAGFAYPDCSPAFADAMNRAVYEGSGHQLEIAAPFVDIDKAAVVKLGLELGVPYELTWSCYEGGDRPCGKCGTCLDRAAAFAANGVADPAMAQYEKA

SEQ ID NO: 38207 - protein, 227 aa, [Eubacterium] cellulosolvens
  misc_feature (1)..(227): tr|I5AU67|I5AU67_EUBCE 7-cyano-7-deazaguanine synthase OS=[Eubacterium] cellulosolvens 6 OX=633697 GN=queC PE= 3 SV=1
MKAMVLSSGGVDSTTALGLAIKKYGKENVIALSVSYGQKHDKEIQAARAVAEYYGIEQLFLDLSKIFSYSNCSLLKQSTEEIPEESYAEQIRETGGEKPVSTYVPFRNGLFLSSAASLALSKGCSVIYYGAHADDSAGFAYPDCSPVFNKAMNDAIWEGSGHQLRIEAPFVNMNKAGVVKMGLELGVPYELTWSCYEGGETPCGKCGTCIDRAAAFAANGVKDPALD

SEQ ID NO: 38208 - protein, 430 aa, [Eubacterium] cellulosolvens
  misc_feature (1)..(430): tr|I5AWU2|I5AWU2_EUBCE Putative PP-loop superfamily ATP ase OS=[Eubacterium] cellulosolvens 6 OX=633697 GN=Eubc eDRAFT1_2547 PE=4 SV=1
MILNVKVNSDDDFSLDGQENKELELYNSNSFSYTFWQDKKIYKNIYNTNAIDLLNISFAVFACDRLELRDAADDCWSREFIIYMPVVNVEIWDTNKETLENMLSFLSGDSWKFIFRTRHLSKNEDEYKKLHARKEKEACDYDRLCMFSGGMDSYIGAINLLEENLGRTLFVSHYGGGKGTKEYQDYIKEKLIEKYSVEDRDFCQFYAKVVNGVEDTTRSRSFMFFSHAVALASALNKSVEVIIPENGLISLNIPLSYSRIGTSSTRTTHPYYMSLFQKLVDNLGLNVQFRNPYQFKTKGEMLLECKNQEFMKNHVHHTMSCSHPDAGRMQGEKTARHCGYCVPCVIRQAALKKAGINDISSYRDSTFSNMKVSKQIRNSYLLAIEKFNPKYAFMSIQLSGKITDHIDDYTDLYVRGMNEFKDYIEGIVNV

SEQ ID NO: 38209 - protein, 227 aa, [Eubacterium] eligens
  misc_feature (1)..(227): tr|A0A415PET2|A0A415PET2_9FIRM 7-cyano-7-deazaguanine s ynthase OS=[Eubacterium] eligens OX=39485 GN=queC PE=3 SV=1
MKALVLSSGGVDSTTALALAVSRYGKDNVIALSVSYGQKHDKEIQAAKAVSAFYGVEQLFLDLSKIFQYSNCSLLQQSTEEIPEESYARQIEKTEGEKPVSTYVPFRNGLFLSSAASIALSKDCSVILYGAHADDSAGFAYPDCSPMFNDAMNQAIFEGSGHQLKVEAPFVNMTKAEVVKMGLELNAPYELTWSCYEGKDVPCGKCGTCIDRAAVFAANGVSDPAIK

SEQ ID NO: 38210 - protein, 227 aa, [Eubacterium] eligens
  misc_feature (1)..(227): tr|A0A174ZWG1|A0A174ZWG1_9FIRM 7-cyano-7-deazaguanine s ynthase OS=[Eubacterium] eligens OX=39485 GN=queC PE=3 SV=1
MKALVLSSGGVDSTTALALAVSRYGKDNVIALSVSYGQKHDKEIQAAKAVSAFYGVEQLFLDLSKIFQYSNCSLLQQSTEEIPEESYAMQIEKTEGEKPVSTYVPFRNGLFLSSAASIALSKDCSVILYGAHADDSAGFAYPDCSPMFNDAMNQAIFEGSGHQLKVEAPFVNMTKAEVVKMGLELNAPYELTWSCYEGKDVPCGKCGTCIDRAAAFAANGVSDPAIK

SEQ ID NO: 38211 - protein, 227 aa, Eubacterium eligens
  misc_feature (1)..(227): tr|C4Z7K4|C4Z7K4_EUBE2 7-cyano-7-deazaguanine synthase OS=Eubacterium eligens (strain ATCC 27750 / VPI C15-48) OX=515620 GN=queC PE=3 SV=1
MKALVLSSGGVDSTTALALAVSRYGKDNVIALSVSYGQKHDKEIQAAKAVSAFYGVEQLFLDLSKIFQYSNCSLLQQSTEEIPEESYARQIEKTEGEKPVSTYVPFRNGLFLSSAASIALSKDCSVILYGAHADDSAGFAYPDCSPMFNDAMNQAIFEGSGHQLKVEAPFVNMTKAEVVKMGLELNAPYELTWSCYEGKDVPCGKCGTCIDRAAAFAANGVSDPAIK

SEQ ID NO: 38212 - protein, 227 aa, Eubacterium eligens; identical to SEQ ID NO: 38210
  misc_feature (1)..(227): tr|R5ZWW6|R5ZWW6_9FIRM 7-cyano-7-deazaguanine synthase OS=Eubacterium eligens CAG:72 OX=1263077 GN=queC PE=3 S V=1

SEQ ID NO: 38213 - protein, 221 aa, Eubacterium hallii; identical to SEQ ID NO: 35955
  misc_feature (1)..(221): tr|R6GWY2|R6GWY2_9FIRM 7-cyano-7-deazaguanine synthase OS=Eubacterium hallii CAG:12 OX=1263078 GN=queC PE=3 SV =1

SEQ ID NO: 38214 - protein, 228 aa, Eubacterium oxidoreducens
  misc_feature (1)..(228): tr|A0A1G6A5D4|A0A1G6A5D4_EUBOX 7-cyano-7-deazaguanine s ynthase OS=Eubacterium oxidoreducens OX=1732 GN=queC PE =3 SV=1
MKAMVLFSGGVDSTTALGMAVDKYGADNVIALSMSYGQKHDKEIQSSIAVANHYGVEHLFLDLSKIFQYSDCSLLKHSTQEVPKESYDEQIEETNGNQPVSTYVPFRNGLFLSTAASIALSKECGVIYYGVHADDAAGFAYPDCSDVFNNAMKEAIWEGSGHQVKIEAPFVNASKAQVVKKGLELKVPYELTWSCYEGGDVPCGKCGTCIDRAAAFAANHVKDPALKG

SEQ ID NO: 38215 - protein, 230 aa, Eubacterium plexicaudatum
  misc_feature (1)..(230): tr|N2AIT3|N2AIT3_9FIRM 7-cyano-7-deazaguanine synthase OS=Eubacterium plexicaudatum ASF492 OX=1235802 GN=queC PE=3 SV=1
MKILVLSSGGIDSTVCLALAVEKYGYENVLSLSVSYGQKHSNELKAARRIAQHYHVRHKELDMGMIFAGSDCTLLEGRGEIPKGTYASQLQESTGKPVSTYVPFRNGLFLAAAASVALADGCEKIYYGAHADDSAGNAYPDTSEAFHEAISRAVYEGSGKQLEIEAPFLYSHKADVVRTGIGLQVPFAFTWSCYEGGEKPCGKCATCMDRRKAFERNEIRDPAEYEEEKK

SEQ ID NO: 38216 - protein, 229 aa, Eubacterium pyruvativorans
  misc_feature (1)..(229): tr|A0A1I7FDP9|A0A1I7FDP9_9FIRM 7-cyano-7-deazaguanine s ynthase OS=Eubacterium pyruvativorans OX=155865 GN=queC PE=3 SV=1
MKKALVLSSGGVDSSTCVSVAVDELGAENVSTVSVFYGQKHRKELEAARQVAAFYGVQHYELDLSNVLQYSDCSLLAHSDQEIEHKSYAEQVKENGEGKVSTYVPFRNGLMLSAAASLAQSLYPDDLCDIYLGAHADDAAGNAYADCSVEFTDAMEQAISIGTYGNVHLRAPFVGLNKAGVVRRGLELGTPYELTWSCYEGGDKPCGTCGTCIDRAAAFAANGVKDPAL

SEQ ID NO: 38217 - protein, 228 aa, Eubacterium ramulus
  misc_feature (1)..(228): tr|U2PT13|U2PT13_EUBRA 7-cyano-7-deazaguanine synthase OS=Eubacterium ramulus ATCC 29099 OX=1256908 GN=queC PE =3 SV=1
MAEKALVLFSGGVDSTTCLGLAIERYGKENVIALSVSYGQKHEKEIEASKKIAQHYGVEHLYLDLGAIFQYSNCSLLSHSTEEIPEEAYVEQLTKTDGKPVSTYVPFRNGLFLSSAASIALSKDCNVIFYGAHSDDAAGSAYPDCSDAFNQAMKDAIYLGSGNQVTIEAPFVNWTKADVVKKGLELNVPYELTWSCYEGGEKPCGKCGTCIDRAAAFEKNGVKDPALD

SEQ ID NO: 38218 - protein, 228 aa, Eubacterium ramulus
  misc_feature (1)..(228): tr|A0A2V1JW70|A0A2V1JW70_EUBRA 7-cyano-7-deazaguanine s ynthase OS=Eubacterium ramulus OX=39490 GN=queC PE=3 SV =1
MSEKALVLFSGGVDSTTCLGLAIDRYGKENVIALSVSYGQKHEKEIEASRKIAEYYGVEHLYLDLGEIFQYSNCSLLSHSTDEIPEEAYAEQLSKTDGKPVSTYVPFRNGLFLSSAASIALSKECSVIYYGAHSDDAAGSAYPDCSDAFNNAMKDAIYLGSGKQVTIEAPFVNWTKADVVKTGLQLKVPYELTWSCYEGGEKPCGKCGTCIDRAAAFEKNGVKDPALD

SEQ ID NO: 38219 - protein, 220 aa, Eubacterium ruminantium
  misc_feature (1)..(220): tr|A0A1H5Y8K1|A0A1H5Y8K1_9FIRM 7-cyano-7-deazaguanine s ynthase OS=Eubacterium ruminantium OX=42322 GN=queC PE= 3 SV=1
MKNRDTALVVLSGGQDSTTCLLWALKRYKTVEAVSFDYNQRHKKELECAAEICKKFGVRQKIMDMSLLSELAPNSLTRAEIKVDEEAPESGTPNSFVEGRNLLFLTYAAIYAKGLGINDIITGVSQSDFSGYPDCRNVFIKSLNTTLNLAMDYEFDLITPLMWIDKEETWELADSLGGLEIIRDMTLTCYNGIMGEGCGNCPACKLRKRGYDRYMARRKV

SEQ ID NO: 38220 - protein, 222 aa, Eubacterium ruminantium
  misc_feature (1)..(222): tr|A0A1T4Q8B8|A0A1T4Q8B8_9FIRM 7-cyano-7-deazaguanine s ynthase OS=Eubacterium ruminantium OX=42322 GN=queC PE= 3 SV=1
MKNKDAALVVLSGGQDSTTCLLWALKNYKRVEAVSFDYNQRHVKELECAAKICEKFGVRQKIMDMSLLSELAPNSLTRAEIKVDEEAPKEGTPNSFVEGRNLLFLTYAAIYAKGLGINDIITGVSQSDFSGYPDCRNVFIKSLNATLNLAMDYEFEVITPLMWLDKEETWALADSLGGLEIIRDMTLTCYNGIMGEGCGHCPACKLRKRGYDRYMERRSQSK

SEQ ID NO: 38221 - protein, 226 aa, Eubacterium sp.
  misc_feature (1)..(226): tr|A0A413PAY8|A0A413PAY8_9FIRM 7-cyano-7-deazaguanine s ynthase OS=Eubacterium sp. AM49-13BH OX=2292351 GN=queC PE=3 SV=1
MKAMVLFSGGIDSTTCLGMAVEKYGPENVIALSISYGQKHTKEIEASDKIVKYYNVEHIYLDLAKIFQYSDCSLLSHSDKEIPKESYDEQIKSTNGSPVSTYVPFRNGLFLSSAASIAISKGCSEIYYGAHADDAAGSAYPDCSSDFNNAINEAIYLGSGKQIKVVAPFINATKDQVVKKGLELNVPYKYTWSCYEGSEKPCGKCGTCIDRARAFELNGINDPAME

SEQ ID NO: 38222 - protein, 227 aa, Eubacterium sp.; identical to SEQ ID NO: 38211
  misc_feature (1)..(227): tr|A0A351RGW8|A0A351RGW8_9FIRM 7-cyano-7-deazaguanine s ynthase OS=Eubacterium sp. OX=142586 GN=queC PE=3 SV=1

SEQ ID NO: 38223 - protein, 226 aa, Eubacterium ventriosum; identical to SEQ ID NO: 36677
  misc_feature (1)..(226): tr|A0A413S6I1|A0A413S6I1_9FIRM 7-cyano-7-deazaguanine s ynthase OS=Eubacterium ventriosum OX=39496 GN=queC PE=3 SV=1

SEQ ID NO: 38224 - protein, 228 aa, Euhalothece natronophila
  misc_feature (1)..(228): tr|A0A5B8NT07|A0A5B8NT07_9CHRO 7-cyano-7-deazaguanine s ynthase OS=Euhalothece natronophila Z-M001 OX=522448 GN =queC PE=3 SV=1
MKAVVLLSGGLDSSTVLYQAKADGCHCYALSFDYQQRHQRELEAAKAIALSAGVIQHQVINFDLGLWGGSALTDQQLEVPRDRDPSEMANSIPITYVPARNTIFLSFALAYAEALEAERVYMGANALDYSGYPDCRPDYIQAMQEVFKLGTKQGREGNPIKIITPLLDLKKTEIIELGNQLNVPWEKTWSCYQGGEKACGVCDACQLRLKAFQALGLTDPISYQESNE

SEQ ID NO: 38225 - protein, 225 aa, Euhalothece sp.
  misc_feature (1)..(225): tr|A0A2K3AH07|A0A2K3AH07_9CHRO 7-cyano-7-deazaguanine s ynthase OS=Euhalothece sp. KZN 001 OX=1884791 GN=queC P E=3 SV=1
MTDKAVVLLSGGLDSSTVLYQGKADGYECYALSFNYQQRHQRELDAARDIAAAAGVTQQVINFDLGLWGGSALTDATINVPRDRAPEEMATEIPVTYVPARNTIFLSFGLAYAEALEAKRVYLGVNALDYSGYPDCRPDYINAMQQVFKLGTKQGREGRSIEIISPLIELKKTEIIQLGNQLNVPWEKTWSCYQGGEKACGVCDSCQLRLKAFQELGLTDPIPYV

SEQ ID NO: 38226 - protein, 236 aa, Euzebya sp.
  misc_feature (1)..(236): tr|A0A346XS55|A0A346XS55_9ACTN 7-cyano-7-deazaguanine s ynthase OS=Euzebya sp. DY32-46 OX=1608957 GN=queC PE=3 SV=1
MDNMSYAVTVLSGGMDSTVLAHLSKGLNEKVDLVSVDYGQRHRTELEFAARTADKLGCRHDVVSLPIGEALSSALTDTDVDVPHGHYAEDNMAVTVVPNRNAILISVAYGIAVARGATTVQVGVHAGDHFVYPDCRPAFVDQLGVALKTGNEGFGQVELVAPFVHQSKTDICRLGDVLGVDWTDTWSCYEGGAVHCGRCGTCVERREAFRDAGVEDPTEYADPDYAFEVLARGSGS

SEQ ID NO: 38227 - protein, 1375 aa, Euzebyella marina
  misc_feature (1)..(1375): tr|A0A3G2L822|A0A3G2L822_9FLAO Amino acid adenylation d omain-containing protein OS=Euzebyella marina OX=176145 3 GN=D1013_14065 PE=4 SV=1
MNNSNKTRLPLTQSQLSLWAGQRIYSEVPLHNVVYTFEIQGDIDVVIFKRSFEQLVEETDILRMTFSEIAGEPFQEINSTVPFQFECLDFTEKSQEEIDQWVRVNTRSPINLAEIVFDSRLLKCDESKFIWFLKIHHLVTDAVTYQLLFHRLSDIYQARLNNNDSKNVLYAYRSYLEYEREQVAEQELNSNREYWDKKTSEVNSRPALYGEKWSKNSTEAKRIEIALTPTQTEKLNNLCQKTAVRSWTKSATLYNLFVTVFATYLHRISGLSKFNIGSPAHNRSTLDFSKTAGLFIEVLPLTIEIDDDETFISLLDKIKLEGNSFLKNVHPSMVGCLNGEPPSNILNFINVEFKDFNGWPTQVRWVHNGHIDASHDIRCHVYDFKGESNYTVAFDINTSVCPQKDYDKVALHFNSILDSLLENLENAIDKKGLDPISQSTFLSGTHTPITDSFLKKFEEFAAKTPNKVAVQSSEQTLTYANLNKKANQLARYLAERGLENQSRVAVFLHRSPDYLISILAIMKLGGVFVPIASDQPVERVQYILRKADCSLIITEEKLSVGLDFEKENIVRTSHFSELENQNEFSSSGHEVENLCYIIFTSGSTGKPKGVGISNKSLNNYLNWARTAYSIDQNSVFPLFTSIGFDLTLTSVFLPLLCGGRIIVYQENPSGPDTSVLNVFSDNLVNKIKLTPSHLDLVKEHDFNPSILETMILGGEDLKTTSVSKIQSQFSEKIEIFNEYGPTEATVGCIVSKYDAKEHKGVSVPIGLPIDNTQLLLLDTHKNLVPQGVVGEIYLSGTCLANGYINDQELTNEKFLENPFSNQSKIYRTGDLGRLNSKGELEYHGRIDSQIKLRGYRIELNDIEANLSEFEGIDSCAVMLVDNKDQKTEEEVFNCTNCGLPSNYPSTDFDKNGVCHLCKAFENYEEKVHQYFKRDEELVRLLTSKRDINPNYDCISLLSGGKDSTYVLARLAGMGLRVLAFTMDNGYISEQAKENIDRIVKRLGVDHVYGKTPHMNAIFVDSLQRHHNVCNGCFKTIYTLSTKIAVEKQIPFIVTGLSRGQFFETRLTEELFWDQQLDSEKIDNTILEARKLYHQENDAVKELLDVSMFDSDEVFDQVQFVDFYRFSDVSLEEMLVYLKKHVGWKRPTDTGRSTNCLINQVGIYVHKKDLGYSNYSFPYSWDVRLGHKTRDESLEEINEVIDETEVKKIMNEIGYNPSAQQENDKKLVAYFTGAEGLSIEKLRKFMNQRVPSYMVPTLFHFVAEMPLTNNGKIDRAKLSENKIKPIPTDCPYVASSNEIEELVQKIWMDVLLLDRIGIKEDFISLGGHSLAAIRVTARINEEIETNFPLNKIFEYPTIESYSKYIEETLIELMNKN

SEQ ID NO: 38228 - protein, 236 aa, Ewingella americana
  misc_feature (1)..(236): tr|A0A085G783|A0A085G783_9GAMM 7-cyano-7-deazaguanine s ynthase OS=Ewingella americana ATCC 33852 OX=910964 GN= queC PE=3 SV=1
MDKNMKRAVVVFSGGQDSTTCLIQALTQYDEVHCITFDYGQRHRAEIDIAQKLSVELGAKAHKVLDVGLLNELAVSSLTRDNIPVPALGETEENGLPSTFVPGRNILFLTLAAIYAYQVQAEAVITGVCETDFSGYPDCRDEFVKALKHAVSLGIARDIRFDTPLMWLNKAETWALADYYQQLDLIRHHTLTCYNGIAGDGCGECAACNLRANGLQQYQQDKVGVMASLKQKTGLK

SEQ ID NO: 38229 - protein, 401 aa, Ewingella americana
  misc_feature (1)..(401): tr|A0A502GDA9|A0A502GDA9_9GAMM 7-cyano-7-deazaguanine s ynthase OS=Ewingella americana OX=41202 GN=EAH77_15220 PE=3 SV=1
MISKDKFMSLKRQINEIRSPLNLAYSALFSSCFPGGYLQALQKSSNETMYDIEERQILRHMDTQVEYLPKGFDLFVPDLTKNVDMLTRADDFFHREIVKAEHVVLDYILEPECGDILPQLKANPLNTAASFIRGVENEKTIVVCWSGGMDSLSAALHAITHKRAEKLVLIHTNYNGPYSPKESGRAYQTYEALIDLASNLRNNPKTKVALRKITYMELKIGIESMAESLLPLGYIMPGRNGFIATSILDVLQGLDVLHTLPEIYMTGHYRSVEGQYTGAVDKNYHFFGEMSNIYFWNKRFSSHVTSPFLSISKEEMLSYGYTYLMGKTQFSKEVEQAFFKCIDSTVSCYDPVYDRCGNCSSCYKRWQALKTLPAYKEVYNIPVEQAPRYQEFAARENKKGR

SEQ ID NO: 38230 - protein, 218 aa, Exiguobacterium antarcticum
  misc_feature (1)..(218): tr|K0AG32|K0AG32_EXIAB 7-cyano-7-deazaguanine synthase OS=Exiguobacterium antarcticum (strain B7) OX=1087448 G N=queC PE=3 SV=1
MKNERALVVFSGGQDSTTCLFQAIKDYSEVEVVTFNYGQRHAAELDVARTIAAELGVKHHELDLSLLSQLTSNSLTDHSQSITTNEDGLPSTFVDGRNHLFLSFAAVLAKGRGIRHIITGVCETDFSGYPDCRDAFIKSLNVTLNLAMDYPFVIHTPLMWLDKKETWALADSLGAFDFVRERTLTCYNGIIGDGCGDCPACELRKKGLDAYIEEVQHT

SEQ ID NO: 38231 - protein, 214 aa, Exiguobacterium aurantiacum
  misc_feature (1)..(214): tr|A0A377FY84|A0A377FY84_9BACL 7-cyano-7-deazaguanine s ynthase OS=Exiguobacterium aurantiacum OX=33987 GN=queC PE=3 SV=1
MQHEKALVVFSGGQDSTTCLFWAKQQFSHVEAVTFAYGQRHDAEIEVAKEIAAELDVPHHILDLSLLGQLTSNALTRHDLDIDNADVPNTFVDGRNHLFLSFAAVMAKQLGMHHIVTGVCETDFSGYPDCRDQFIKSLNVTLNLAMDYPFVIDTPLMWLDKKQTWELADRLGAFDYVKERTLTCYNGILGSGCGECPACVLRQNGLEAYEGVRV

SEQ ID NO: 38232 - protein, 214 aa, Exiguobacterium chiriqhucha
  misc_feature (1)..(214): tr|U1LTL9|U1LTL9_9BACL 7-cyano-7-deazaguanine synthase OS=Exiguobacterium chiriqhucha RW-2 OX=1345023 GN=queC PE=3 SV=1
MQHEKALVVFSGGQDSTTCLFWAKQQFSHVEAVTFAYGQRHDAEIEVAKEIAAELDVPHHILDLSLLGQLTSNALTRHDLDIDNADVPNTFVDGRNHLFLSFAAVMAKQLGMHHIVTGVCETDFSGYPDCRDQFVKSLNVTLNLAMDYPFVIDTPLMWLDKKQTWELADQLGAFDYVKERTLTCYNGILGSGCGECPACVLRQNGLAAYEEVRV

SEQ ID NO: 38233 - protein, 218 aa, Exiguobacterium enclense
  misc_feature (1)..(218): tr|A0A0V8GDL1|A0A0V8GDL1_9BACL 7-cyano-7-deazaguanine s ynthase OS=Exiguobacterium enclense OX=1017277 GN=queC PE=3 SV=1
MKNERALVVFSGGQDSTTCLFQALKQYEEVEVVTFNYGQRHAQELEVARDIASELGVKHHELDLSLLSQLTSNALTDHSQTITTNEDGLPSTFVDGRNHLFLSFAAVLAKGRGIRHIVTGVCETDFSGYPDCRDAFIKSLNVTLNLAMDYPFVLHTPLMWLDKKETWALADSLGAFDFVRNRTLTCYNGVIGDGCGECPACELRKNGLDAYIKEVQHT

SEQ ID NO: 38234 - protein, 214 aa, Exiguobacterium mexicanum
  misc_feature (1)..(214): tr|A0A099DEU6|A0A099DEU6_9BACL 7-cyano-7-deazaguanine s ynthase OS=Exiguobacterium mexicanum OX=340146 GN=queC PE=3 SV=1
MQHEKALVVFSGGQDSTTCLFWAKQQFSHVEAVTFAYGQRHDAEIEVAKEIAAELDVPHHILDLSLLGQLTSNALTRHDLDIDNADVPNTFVDGRNHLFLSFAAVMAKQLGMHHIVTGVCETDFSGYPDCRDQFVKSLNVTLNLAMDYPFVIDTPLMWLDKKQTWELADRLGAFDYVKERTLTCYNGILGSGCGECPACVLRQNGLAAYEEVRV

SEQ ID NO: 38235 - protein, 218 aa, Exiguobacterium sibiricum
  misc_feature (1)..(218): sp|B1YFM6|QUEC_EXIS2 7-cyano-7-deazaguanine synthase OS =Exiguobacterium sibiricum (strain DSM 17290 / JCM 1349 0 / 255-15) OX=262543 GN=queC PE=3 SV=1
MKNERALVVFSGGQDSTTCLFQALADYSEVEVVTFNYGQRHAAELDVAREITSELGVKHHELDLSLLSQLTSNSLTDHSQSITTNEDGLPSTFVDGRNHLFLSFAAVLAKGRGIRHIITGVCETDFSGYPDCRDSFIKSLNVTLNLAMDYPFVIHTPLMWLDKKETWALADSLGAFDFVRKRTLTCYNGIIGDGCGDCPACELRKKGLDAYIEEVQHT

SEQ ID NO: 38236 - protein, 214 aa, Exiguobacterium sp.
  misc_feature (1)..(214): sp|C4L0V4|QUEC_EXISA 7-cyano-7-deazaguanine synthase OS =Exiguobacterium sp. (strain ATCC BAA-1283 / AT1b) OX=3 60911 GN=queC PE=3 SV=1
MQHEKALVVFSGGQDSTTCLFWAKQQFSHVEAVTFAYGQRHDAEIEVAKEIAAELDVPHHILDLSLLGQLTSNALTRHDLDIDNADVPNTFVDGRNHLFLSFAAVMAKQLGMHHIVTGVCETDFSGYPDCRDQFIKSLNVTLNLAMDYPFVIDTPLMWLDKKETWALADELGAFDYVKERTLTCYNGVIGSGCGECPACKLRQNGLTAYEEVRV

SEQ ID NO: 38237 - protein, 218 aa, Exiguobacterium sp.
  misc_feature (1)..(218): tr|A0A419DN77|A0A419DN77_9BACL 7-cyano-7-deazaguanine s ynthase OS=Exiguobacterium sp. RIT452 OX=2315552 GN=que C PE=3 SV=1
MKNERALVVFSGGQDSTTCLFQALADYSQVEVVTFNYGQRHAAELDVARTIASELGVKHHELDLSLLSQLTSNSLTDHSQSITTNEDGLPSTFVDGRNHLFLSFAAVLAKGRGIRHIITGVCETDFSGYPDCRDSFIKSLNVTLNLAMDYPFVIHTPLMWLDKKETWALADSLGAFDFVRERTLTCYNGIIGDGCGDCPACELRKKGLDAYIEEVQHT

SEQ ID NO: 38238 - protein, 234 aa, Extensimonas vulgaris
  misc_feature (1)..(234): tr|A0A369AHB1|A0A369AHB1_9BURK 7-cyano-7-deazaguanine s ynthase OS=Extensimonas vulgaris OX=1031594 GN=queC PE= 3 SV=1
MRTGHALVLFSGGQDSTTCLAWALERFALVETVGFNYGQRHHVEMHARTQVLGALRAQFPVWGARLGQDHVIDLSVLGRISDTALTRDVAIQMDAAGLPNTFVPGRNLLFFQLAAALGYRRGLHTLVGGMCETDYSGYPDCRDDTIKALQVAVSLGMGQHFTFDTPLMWLDKAQTWELAHALGGQALVDIVIEHTHTCYLGERGVRHAWGYGCGHCPACALRQAGYERWREQVA

SEQ ID NO: 38239 - protein, 221 aa, Falsibacillus pallidus
  misc_feature (1)..(221): tr|A0A370GIX2|A0A370GIX2_9BACI 7-cyano-7-deazaguanine s ynthase OS=Falsibacillus pallidus OX=493781 GN=queC PE= 3 SV=1
MINQKAIVVFSGGQDSTTCLFWAMKRFEEVIAVTFDYGQRHNLELQCAKEIAQELNIEHHILDMSLLNQLAPNALTRTDIEIKESDGELPSTFVDGRNHLFLSFAAVLAKQKGAKHIITGVCETDFSGYPDCRDVFVKSLNVTLNLAMDYQFVLDTPLMWLDKAETWELADELGAFDYIREKTLTCYNGIKGDGCGECPACKLRARGLEQYLEKRQGGDAR

SEQ ID NO: 38240 - protein, 221 aa, Falsibacillus sp.
  misc_feature (1)..(221): tr|A0A3L7K0T1|A0A3L7K0T1_9BACI 7-cyano-7-deazaguanine s ynthase OS=Falsibacillus sp. GY 10110 OX=2478915 GN=que C PE=3 SV=1
MKKGKAIVVFSGGQDSTTCLFWALQRFEEVIAVTFDYGQRHNLELQCASEIAKDLNIEHHVLDMSLLNQLAPNALTRKDMEIKQDEGELPTTFVDGRNLLFLSFAAVLAKQKGAKHIVTGVCETDFSGYPDCRDVFVKSLNVTLNLAMDYEFVIDTPLMWLDKAETWQLSDQLDAFDYVRENTLTCYNGIKGDGCGECPACHLRKRGLDQYLAAKEGGMDS

SEQ ID NO: 38241 - protein, 196 aa, Falsochrobactrum sp.
  misc_feature (1)..(196): tr|A0A316JM47|A0A316JM47_9RHIZ 7-cyano-7-deazaguanine s ynthase OS=Falsochrobactrum sp. HN4 OX=2201899 GN=DKP76 _18360 PE=3 SV=1
MSIVTLVSGGLDSTLVAKLAQEEGLSIHPLFIDYGQRSRDRELAACRGIMKRLGLPEPKIADLSGYGALIRSGLTDRSLHIVDDAFTPGRNMLFLLTAAAYAFQRNADAVSIGLLHEETSLFPDQTSAFLRDAEQMIARCLGRSIRVLAPLSQFHKIDVVELARQKGIVGTYSCHEGSEEACGVCIACNEFKFERA

SEQ ID NO: 38242 - protein, 232 aa, Falsochrobactrum sp.
  misc_feature (1)..(232): tr|A0A316JEG4|A0A316JEG4_9RHIZ 7-cyano-7-deazaguanine s ynthase OS=Falsochrobactrum sp. HN4 OX=2201899 GN=queC PE=3 SV=1
MKTLVICSGGLDSVSLAHKIAAEQTLTGLISFDYGQRHKKELDFAQACARRLEVPHQIIDISAIGASLTGSALTDNVAVPDGHYAEDTMKITVVPNRNAIMLAIAFGVAAAQKAEAVALAVHGGDHFIYPDCRPGFIDAFQTMQNHALEGYADIDLLAPYVHCSKSDIVVDGAKYRTPFAATWSCYKGGEQHCGRCGTCVERREAFHLAGIEDPTPYEDATFWRTAIEGRNR

SEQ ID NO: 38243 - protein, 220 aa, Fermentimonas caenicola
  misc_feature (1)..(220): tr|A0A098C0G7|A0A098C0G7_9PORP 7-cyano-7-deazaguanine s ynthase OS=Fermentimonas caenicola OX=1562970 GN=queC P E=3 SV=1
MKDYSNEDALVLFSGGQDSTTCLYWAKHNFRNVYALCFSYGQRHSQEIKNAERIAKMSDTPFQLLDTEIISQLAPNSLTNLSMQMDSEKPADSYPNTFVPGRNLLFLTFAATIAYAKNIRHIVTGVSEADYSGYPDCRDTFIRSANATLNLAMDKQFVIHTPLMWRNKKEVWQLADELGVFEIVRDETLTCYNGIIAEGCGHCPSCVLRNKGLKEYLEER

SEQ ID NO: 38244 - protein, 232 aa, Ferrimicrobium acidiphilum
  misc_feature (1)..(232): tr|A0A0D8FWP0|A0A0D8FWP0_9ACTN 7-cyano-7-deazaguanine s ynthase OS=Ferrimicrobium acidiphilum DSM 19497 OX=1121 877 GN=queC PE=3 SV=1
MGNPPAVVLLSGGLDSTTVLAIAKHQGFEPHALSFDYGQRHGIELKAAQRVARSMGVSNHIVTTINLRSFGGSALTADIAVPHHESIEELSEAIPITYVPARNTIFLSFALALAETLGSGDIFIGVNALDYSGYPDCRPEYIRAYEAMANLATKAGVEGQHRLHIHTPLIELSKAEIIRLGLSLKVDYALTHSCYDPSPAGEPCGTCDSCLLREKGFREAGVDDPASKHWPT

SEQ ID NO: 38245 - protein, 220 aa, Ferrimonas balearica
  misc_feature (1)..(220): tr|E1SVZ3|E1SVZ3_FERBD 7-cyano-7-deazaguanine synthase OS=Ferrimonas balearica (strain DSM 9799 / CCM 4581 / P AT) OX=550540 GN=queC PE=3 SV=1
MEKKAVVIYSGGMDSFTVLHKVITEGYTPYAITFDYGQRHDKEVEYAKVVCSELGINHKIIDITAINQLISGSSLTRDSESDIPEGHYAEDNMKSTVVPNRNMILISLATGYAASIGAGKVFYGAHSGDHAIYPDCRPEFVEKINAATMIANYEPIEVVSPYLYQSKIEILKDGLEMGLDYGKTWTCYNGREKACGRCGSCVERLESFEMNGVSDPLLYE

SEQ ID NO: 38246 - protein, 233 aa, Ferrimonas balearica
  misc_feature (1)..(233): tr|E1SWF0|E1SWF0_FERBD 7-cyano-7-deazaguanine synthase OS=Ferrimonas balearica (strain DSM 9799 / CCM 4581 / P AT) OX=550540 GN=queC PE=3 SV=1
MSDKRIAVVVFSGGQDSTTCLVQALTHYDEVHAITFDYGQRHAQEIEVAKTLATELGVKAHKVMDVSLLGELAISALTRDNIAVANELMDNGLPNTFVPGRNILFLTLAGIYAYQVGAQTVITGVCETDFSGYPDCRNEFVQALEKALVLGMDRPLTLATPLMWLDKAQTWALADHYGTLELVRDRTLTCYNGVLGAGCGTCPACQLRARGLEQYLANRDTILDDVRGQCGLD

SEQ ID NO: 38247 - protein, 233 aa, Ferrimonas marina
  misc_feature (1)..(233): tr|A0A1M5Z6E1|A0A1M5Z6E1_9GAMM 7-cyano-7-deazaguanine s ynthase OS=Ferrimonas marina OX=299255 GN=queC PE=3 SV= 1
MSKPSVAVVVFSGGQDSTTCLVQALKQFDEVHAITFDYGQRHSEEIAVAQTLAKQLGVKAHKVLDVGLLGELAISALTRDSIPVANELMDNGLPNTFVPGRNILFLTLAGIYAYQIGASTVITGVCETDYSGYPDCRNEFVQALQQALELGMDRPLTLSTPLMWLDKAETWALADHYDALALVRDHTLTCYNGVIGAGCGECPACQLRANGLNQYLGQQDHYQAQLRDRCQLD

SEQ ID NO: 38248 - protein, 232 aa, Ferrimonas sediminum
  misc_feature (1)..(232): tr|A0A1G9BR83|A0A1G9BR83_9GAMM 7-cyano-7-deazaguanine s ynthase OS=Ferrimonas sediminum OX=718193 GN=queC PE=3 SV=1
MSTTKAVVVFSGGQDSTTCLVQALQQYDEVHAITFDYGQRHRQEIDVAQELANQLGVTAHKILDVGLLNELAISALTRDEIQVDHALMDNGLPNTFVPGRNILFLTLAGIYAYQIGAEAVITGVCETDFSGYPDCRNDFVKAMESALVQGMDRPLKLVTPLMWLNKAETWAMADHYHSLELVRDHTLTCYNGIKGSGCGDCPACHLRSRGLEDYLSHRDTVLSDARQKAHLD

SEQ ID NO: 38249 - protein, 234 aa, Ferrimonas sp.
  misc_feature (1)..(234): tr|A0A4U1B657|A0A4U1B657_9GAMM 7-cyano-7-deazaguanine s ynthase OS=Ferrimonas sp. IMCC35001 OX=2569538 GN=queC PE=3 SV=1
MTAVVRKAVVVFSGGQDSTTCLVQALKKYDEVHAITFDYGQRHRLEIEIAQELGTRLGVAAHKVLDVGVLNELAISALTRDEIPVDHGLADNGLPNTFVPGRNILFLTLAGIYAYQIGAEAVITGVCETDFSGYPDCRNEFIQAMESALVKGMDRPLKLVTPLMWLNKAETWAMADHYGALELVRDDTLTCYNGLKGSGCGDCPACHLRSRGLQEYLANRDTILCGTREKAQLV

SEQ ID NO: 38250 - protein, 233 aa, Ferrimonas sp.
  misc_feature (1)..(233): tr|A0A4U1BMA8|A0A4U1BMA8_9GAMM 7-cyano-7-deazaguanine s ynthase OS=Ferrimonas sp. IMCC35002 OX=2569539 GN=queC PE=3 SV=1
MTKAKGTAVVVFSGGQDSTTCLVQALEQFEQVHAITFDYGQRHVKEIEIAQALTKKLGVTHKVMDVSLLNELAISSLTRDDIEVDGTLSEKGVPNTFVPGRNILFLTLAGIYAYQVGASTVITGVCETDYSGYPDCRNDFVKALEKALVLGMDRELTLSTPLMWLDKAETWALADHYNALELVRDHTLTCYNGIQGFGCGECPACELRSRGLENYLNDRDAILATTREKAQLG

SEQ ID NO: 38251 - protein, 226 aa, Ferriphaselus amnicola
  misc_feature (1)..(226): tr|A0A2Z6GB15|A0A2Z6GB15_9PROT 7-cyano-7-deazaguanine s ynthase OS=Ferriphaselus amnicola OX=1188319 GN=queC PE =3 SV=1
MRKALVLLSGGLDSATVLAIARAQGFSCYALSVDYGQRHHAELAAAQRVAQTLGASEHRIIHIDLTSFGGSALTDDTIAVPEHPSAGIPLTYVPARNTIMLSLALAWAEVLGSQDIFVGVNAVDYSGYPDCRPEYIKAFEDMANLATKAAVEGHRLTVHAPLIALSKAEIIQQGIALGVDYGTTVSCYQADEQGRACGVCDSCRLRAAGFQQAGVADATRYCSKSQ

SEQ ID NO: 38252 - protein, 225 aa, Ferrithrix thermotolerans
  misc_feature (1)..(225): tr|A0A1M4UL65|A0A1M4UL65_9ACTN 7-cyano-7-deazaguanine s ynthase OS=Ferrithrix thermotolerans DSM 19514 OX=11218 81 GN=queC PE=3 SV=1
MSKAVVLLSGGLDSATVMALVGSEGYEIYALSFDYGQRHRVEIESARKLAQSYGALHVVVPLPSVSFQGSSLTTKELSVPKREKLGEGIPNTYVPARNTVFLSFALGFGETVGAFDIFIGANSIDYSGYPDCRYEYLTAYEQMANLALKETVEGRAKVKIHAPLLSLTKAEIVALGLSLGVDYSITHSCYDPDEEGRACARCDSCAIRLRAFAENNVVDPAPYRY

SEQ ID NO: 38253 - protein, 238 aa, Ferrovibrio sp.
  misc_feature (1)..(238): tr|A0A2M8UBW6|A0A2M8UBW6_9PROT 7-cyano-7-deazaguanine s ynthase OS=Ferrovibrio sp. OX=1917215 GN=queC PE=3 SV=1
MTGVVVLCSGGIDSATLAYKVAVERKLDRLISFDYGQRHRREIEHAARIAAALDVRHDVIDITALGQFLTSSSLISGGEAVPDGHYAQDNMKSTVVPNRNAIMLSIAFGIAAGAKADAVGIAVHGGDHFIYPDCRPGFIDAFRAMQDRALEDLWNVELYSPFTATDKAGIVAEGARLGVPFDLTWSCYKGGEMHCGRCGTCVERREAFHLSGIPDPTQYEDADYWLKAIQEMKAGKEK

SEQ ID NO: 38254 - protein, 238 aa, Ferrovibrio sp.
  misc_feature (1)..(238): tr|A0A516GXM0|A0A516GXM0_9PROT 7-cyano-7-deazaguanine s ynthase OS=Ferrovibrio sp. K5 OX=2594003 GN=queC PE=3 S V=1
MSLTVVLCSGGIDSATLAYKVAVERKLDRLISFDYGQRHRREIEHAARIAAALGARHDVVDITALGKFLTSSSLISGGDAIPDGHYAQDNMKSTVVPNRNAIMLSIAFGIAAGAKADAVGIAVHSGDHFIYPDCRPAFIDAFRTMQQRALEDLWEVELYSPFTTTDKAGIVAEGARLGVPFHLTWSCYKGGEMHCGRCGTCVERREAFHLSGVPDPTQYEDADYWLQAIAEMKKTKGG

SEQ ID NO: 38255 - protein, 244 aa, Ferrovum sp.
  misc_feature (1)..(244): tr|A0A149VWR1|A0A149VWR1_9PROT 7-cyano-7-deazaguanine s ynthase OS=Ferrovum sp. Z-31 OX=1789004 GN=queC PE=3 SV =1
MSGRSGTGTRLMAGRNAVILLSGGLDSATVLAMARQQGFGVYAMSFAYGQRHAHELDCARRLALQPGVIHHSVVNIDLRGIGGSALTTTQEVPKDRNLDQEQAIPVTYVPARNTIFLSFALAWAEVLEVSDLFIGVNALDYSGYPDCRPEYLSAFERMANLATRRAVEGAPLTLHAPLLNLTKADIIRQGLVLGVDYGLTTSCYDPGPEGKPCGHCDACLLRARGFAQVGVPDPLMVRYGSVTA

SEQ ID NO: 38256 - protein, 228 aa, Ferrovum sp.
  misc_feature (1)..(228): tr|A0A149VTK4|A0A149VTK4_9PROT 7-cyano-7-deazaguanine s ynthase OS=Ferrovum sp. PN-J185 OX=1356306 GN=queC PE=3 SV=1
MKKPAVILLSGGLDSTTVLAIAKHQGYTPYAMSFDYGQRHKVELEAAKRIAQHFSVAQHSIVQFDLRQIGGSALTSNEPVPKHRSVEDIGEGIPVTYVPARNTIFLSFALAWAEVLGAQDIFIGVNALDYSGYPDCRPEYIKSYENMANLATRAGVEGSTRLTIHAPLIAMSKKQIIETGLSLGVDYSLTTSCYDPGVQGQPCGQCDACILRQKGFAELNMNDPVVNR

SEQ ID NO: 38257 - protein, 226 aa, Fervidicella metallireducens
  misc_feature (1)..(226): tr|A0A017RTR2|A0A017RTR2_9CLOT 7-cyano-7-deazaguanine s ynthase OS=Fervidicella metallireducens AeB OX=1403537 GN=queC PE=3 SV=1
MKKAVVLLSGGLDSTTAVYLAKSQGYEVYAISFDYGQRQKKELESAQKVALAAGVKEHIVVKTNMNAWGGSALTDTNIDVPLGDENRKEIPVTYVPARNMIFLSFAASYAEVIGAQDIFIGVSEVDYSGYVDCRKEFIVAMEAAINLGTVCAAEHGKNIKIHAPFMNMTKADEIRLGMDLGVDYSLTWTCYRGEESACGECDSCILRLKAFKEAGYIDPIPYAKKA

SEQ ID NO: 38258 - protein, 206 aa, Fibrisoma sp.
  misc_feature (1)..(206): tr|A0A418ME73|A0A418ME73_9BACT 7-cyano-7-deazaguanine s ynthase OS=Fibrisoma sp. HYT19 OX=2305895 GN=DYU11_0731 5 PE=3 SV=1
MALNNSILLASGGLDSTTLAYWLRSNEIDFLPVFINYGQHCASTELETLRQVLPGKLAKKIEVIDVSAVYKYSQSLLIREPDLWNDKVDYKRLYLPYRSLLLLTVGASFAQSINCNNVYAAFINSNHAQEIDCSAQFFNSLETVFEDYGGVSIIMPFRYMSKYEVAQLGIELKAPIGKSFSCQASSDIPCGACPNCVDRLEAIQSL

SEQ ID NO: 38259 - protein, 217 aa, Fibrobacter sp.
  misc_feature (1)..(217): tr|A0A1M5GYW1|A0A1M5GYW1_9BACT 7-cyano-7-deazaguanine s ynthase OS=Fibrobacter sp. UWB8 OX=1896207 GN=queC PE=3 SV=1
MKNALLVLSGGMDSTTLLYERADEIALAVSFDYGSNHNDQEIPFAKYHCEKLGIPHLTIPLKFMHDYFKSSLLEGADAIPEGSYDSENMKSTVVPFRNGIMLSVAAGLAESRDLTKVMMANHFGDHAIYPDCREEFVKNMSAAIAAGTYASITIDAPYTNISKADIARKGKALGIDYSQTWSCYKGGKIHCGKCGTCLERKEALVEAGIEDTTEYGA

SEQ ID NO: 38260 - protein, 219 aa, Fibrobacter sp.
  misc_feature (1)..(219): tr|A0A254T2F3|A0A254T2F3_9BACT 7-cyano-7-deazaguanine s ynthase OS=Fibrobacter sp. UWB1 OX=1964355 GN=B7988_029 40 PE=3 SV=1
MQKSRCDAILLLSGGIDSTTVLEQLTKQGKKVFCLIFDYKQSLHKEIAVAASNAKRLKQPYKIVSIDLGFTGSKCSLISKSRISENRSFEQIDSATPTSYVEFRNGILLSYAVMFAEVNGINDIYGGFNGLASGQYYDDTLAFIKSFEKAANVGTSPNFKVRIHAPFSTVSKAEIVKIGRKLGIDYERNTWSCYKNGSTHCGKCDSCKQRERALAQGGK

SEQ ID NO: 38261 - protein, 217 aa, Fibrobacter succinogenes
  misc_feature (1)..(217): tr|C9RPK1|C9RPK1_FIBSS 7-cyano-7-deazaguanine synthase OS=Fibrobacter succinogenes (strain ATCC 19169 / S85) O X=59374 GN=queC PE=3 SV=1
MKDALLVLSGGMDSVTLLYDRAADIALAVSFDYGSNHNDKEIPFARMHCEKLGIPHITIPLKFMHDYFTSSLLSGADAIPEGTYADENMKSTVVPFRNGIMLSVAAGLAESRDLKRVMMANHFGDHAIYPDCREEFVKNMSAAISAGTYANITIDAPYTNISKADIARKGKALGLDYSETWSCYKGGKIHCGKCATCLERKAALAEAGINDTTEYEA

SEQ ID NO: 38262 - protein, 217 aa, Fibrobacter succinogenes; identical to SEQ ID NO: 38261
  misc_feature (1)..(217): tr|A0A380RUV3|A0A380RUV3_FIBSU 7-cyano-7-deazaguanine s ynthase OS=Fibrobacter succinogenes OX=833 GN=queC PE=3 SV=1

SEQ ID NO: 38263 - protein, 36 aa, Fibrobacteres bacterium
  misc_feature (1)..(36): tr|A0A3C1WGW1|A0A3C1WGW1_9BACT 7-cyano-7-deazaguanine s ynthase (Fragment) OS=Fibrobacteres bacterium OX=205216 0 GN=DCQ83_05190 PE=4 SV=1
MDSPKTKLNRPSLVVFSGGQDSTTCLHWALRTFTAV

SEQ ID NO: 38264 - protein, 222 aa, Fictibacillus aquaticus
  misc_feature (1)..(222): tr|A0A235FAC4|A0A235FAC4_9BACI 7-cyano-7-deazaguanine s ynthase OS=Fictibacillus aquaticus OX=2021314 GN=queC P E=3 SV=1
MSKKAVIVLSGGLDSTTCMGIAKDAGYELYPITFHYGQRHNREVEQAVKVAEFYGVADHRIVDLDFLKQIGGSALTDEKIDVPETAEEGIPSTYVPARNMIFLSLASAYAEVIGAEAVYTGVSAVDYSGYPDCRPEFIASMESTVNLATKAGVTGARIQIATPLIDKTKKETIEWGLTLGVPYELTTSCYNGLEEACGVCDSCQLRLKGFREAGSEDPIIYR

SEQ ID NO: 38265 - protein, 223 aa, Fictibacillus arsenicus
  misc_feature (1)..(223): tr|A0A1B1Z799|A0A1B1Z799_9BACI 7-cyano-7-deazaguanine s ynthase OS=Fictibacillus arsenicus OX=255247 GN=queC PE =3 SV=1
MSKKAVIVLSGGLDSTTCMGIAKAEGYDLYPITFHYGQRHNREVEQAIEVGKYYGVADHRIVDLTFLKDIGGSALTDETLDVPTETEEGIPVTYVPARNMIFLALASAYAEVIGATAVYTGVSAVDYSGYPDCRPEFIHSMEETINLATKAGVTGKNILVKTPLINLSKKETIEAGLSLNVPYELTTSCYNGKESACGKCDSCLLRLKGFKEAGSFDPIAYEN

SEQ ID NO: 38266 - protein, 223 aa, Fictibacillus arsenicus
  misc_feature (1)..(223): tr|A0A1V3GAQ4|A0A1V3GAQ4_9BACI 7-cyano-7-deazaguanine s ynthase OS=Fictibacillus arsenicus OX=255247 GN=queC PE =3 SV=1
MSKKAVIVLSGGLDSTTCMGIAKAEGYDLYPITFHYGQRHNREVEQAIEVGKYYKVADHRIVDLTFLKDIGGSALTDETLDVPTEAEEGIPVTYVPARNMIFLALASAYAEVIGATAVYTGVSAVDYSGYPDCRPEFIHSMEETINLATKAGVTGKNILVKTPLINLSKKETIEAGLSLNVPYELTTSCYNGKESACGKCDSCLLRLKGFKEAGSFDPIVYEN

SEQ ID NO: 38267 - protein, 223 aa, Fictibacillus enclensis
  misc_feature (1)..(223): tr|A0A0V8J9R3|A0A0V8J9R3_9BACI 7-cyano-7-deazaguanine s ynthase OS=Fictibacillus enclensis OX=1017270 GN=queC P E=3 SV=1
MKKAVIVLSGGLDSTTCMGIAKHEGYELYPLTFNYGQRHSREVNQAKKVAEYFDVKEHRIVDIAFLNQIGGSALTDASIDVPTEKEDKEEIPSTYVPARNMIFLSLASAYAEVIGAEAVFIGVSAVDYSGYPDCRPEFIKSMNETINLATKAGTTGEQIAICAPLMHLTKKETIQKGLELEVPYHLTTSCYNGEEEACGECDSCKLRLKGFEEAGAKDPIPYK

SEQ ID NO: 38268 - protein, 225 aa, Fictibacillus macauensis
  misc_feature (1)..(225): tr|I8AJ43|I8AJ43_9BACI 7-cyano-7-deazaguanine synthase OS=Fictibacillus macauensis ZFHKF-1 OX=1196324 GN=queC PE=3 SV=1
MKKAVIVLSGGLDSTTCMGIAAEQGYALYPLTFHYGQKHNREVEQAKKVAAHYQVSEHRIVDIAFLNQIGGSALTDSSIAVPSEQDDKEEIPATYVPARNMIFLSLASAYAEVIGAQAVFIGVSAVDYSGYPDCRPEFIQSMDETINLATKAGTTGERISIVAPLMHLTKKETIEEGLALGVPYELTTSCYNGEEEACGTCDSCLLRLKGFEEAGGRDPIAYASR

SEQ ID NO: 38269 - protein, 223 aa, Fictibacillus phosphorivorans
  misc_feature (1)..(223): tr|A0A160IP65|A0A160IP65_9BACI 7-cyano-7-deazaguanine s ynthase OS=Fictibacillus phosphorivorans OX=1221500 GN= queC PE=3 SV=1
MNKKAVIVLSGGLDSTTCMGIAKAEGYDLYPITFHYGQRHNREVEQAIEVGKYYGVADHRIVDLTFLKDIGGSALTDEKVEVPTEAEEGIPVTYVPARNMIFLSLASAYAEVIGATAVYTGVSAVDYSGYPDCRPEFIQSMEETINLATKAGVTGKNISVETPLISLSKKETIEKGLSLEVPYDLTTSCYNGKEAACGKCDSCVLRLKGFNEAGAVDPIAYEI

SEQ ID NO: 38270 - protein, 223 aa, Fictibacillus phosphorivorans
  misc_feature (1)..(223): tr|A0A163Q6C9|A0A163Q6C9_9BACI 7-cyano-7-deazaguanine s ynthase OS=Fictibacillus phosphorivorans OX=1221500 GN= queC PE=3 SV=1
MSKKAVIVLSGGLDSTTCMGIAKGEGYDLYPITFHYGQRHNREVEQAIEVGKFYNVEDHRIVDLTFLKDIGGSALTDEKVEVPTEAEEGIPVTYVPARNMIFLSLASAYAEVIGATAVYTGVSAVDFSGYPDCRPEFIKSMEETINLATKAGVTGKNISVETPLIHLSKKETIEKGLSLDVPYELTTSCYNGKETACGKCDSCVLRLKGFKEAGSADPIPYEV

SEQ ID NO: 38271 - protein, 223 aa, Fictibacillus solisalsi
  misc_feature (1)..(223): tr|A0A1G9X1Y7|A0A1G9X1Y7_9BACI 7-cyano-7-deazaguanine s ynthase OS=Fictibacillus solisalsi OX=459525 GN=queC PE =3 SV=1
MKKAVIVLSGGLDSTTCMGIAKHEGYELYPLTFNYGQRHSREVNQAKKVAEYFGVNEHRIVDIAFLNQIGGSALTDASIDVPTEKEDKEEIPSTYVPARNMIFLSLASAYAEVIGAEAVFIGVSAVDYSGYPDCRPEFIKSMNETINLATKAGTTGERIAICAPLMHLTKKETIEKGLELKVPYHLTTSCYNGEEEACGECDSCQLRLKGFEEAGAKDPIPYK

SEQ ID NO: 38272 - protein, 223 aa, Fictibacillus sp.
  misc_feature (1)..(223): tr|A0A4Q2I1J6|A0A4Q2I1J6_9BACI 7-cyano-7-deazaguanine s ynthase OS=Fictibacillus sp. S7 OX=2212476 GN=queC PE=3 SV=1
MKKAVIVLSGGLDSTTCMGIAKHEGYELYPLTFNYGQRHSREVNQAKKVAEYFEVKEHRIVDIAFLNQIGGSALTDASIDVPTEKEDKEEIPSTYVPARNMIFLSLASAYAEVIGAEAVFIGVSAVDYSGYPDCRPEFIKSMNETINLATKAGTTGEQIAICAPLMHLTKKETIQKGLELEVPYHLTTSCYNGEEEACGECDSCKLRLKGFEEAGAKDPIPYK

SEQ ID NO: 38273 - protein, 223 aa, Fictibacillus sp.
  misc_feature (1)..(223): tr|A0A4Q7QPK7|A0A4Q7QPK7_9BACI 7-cyano-7-deazaguanine s ynthase OS=Fictibacillus sp. BK138 OX=2512121 GN=queC P E=3 SV=1
MSKKAVIVLSGGLDSTTCMGIAKAEGYDLYPITFHYGQRHNREVEQAIEVGKYYDVADHRIVDLTFLKDIGGSALTDETLDVPTEAEDGIPVTYVPARNMIFLALASAYAEVIGATAVYTGVSAVDYSGYPDCRPEFIQSMEETINLATKAGVTGKNILVKTPLINLSKKETIEAGLSLNVPYELTTSCYNGKESACGKCDSCLLRLKGFKEAGSFDPIVYEN

SEQ ID NO: 38274 - protein, 261 aa, Unknown
  misc_feature (1)..(261): tr|A0A2T1DPE0|A0A2T1DPE0_9CYAN 7-cyano-7-deazaguanine s ynthase OS=filamentous cyanobacterium CCP2 OX=2107700 G N=queC PE=3 SV=1
MNSGSPNSGGVNPGGVNPGSPNSKGKNAKAVVLLSGGLDSATAAAQAIADGYDLIALSFRYGQRHERELQAAQQVAQHLGIAEHHTIAVNLAQWGGSTLTEDSGEIPLDGVKPNQIPSTYVPGRNTVFIAIALSLAEAKQAEAIYLGINAVDYSGYPDCRPEYLEAFQHLASLSSKAGLNGQAPVLVAPLVTDSKVDIVHRALRLNVPIPLTWSCYQGQAEPCGLCDSCRIRDRALIEAGKPEWATSIGRDLYFRETQYTT

SEQ ID NO: 38275 - protein, 223 aa, Unknown
  misc_feature (1)..(223): tr|A0A2P8VRU7|A0A2P8VRU7_9CYAN 7-cyano-7-deazaguanine s ynthase OS=filamentous cyanobacterium CCT1 OX=2107702 G N=queC PE=3 SV=1
MSQPRAIVLLSGGLDSATAAAQAIADGYDLVALSFNYGQRHQRELEAAKSVAEHLAIADHHFIDVNLAQWGASSLTDLAQPLPQDGIEAGIPSTYVPGRNTVFIALALALAEAKGAEAVYLGINAVDYSGYPDCRPEYLAAFQQLAQLSSKVGLEGHAPKLVAPLVLDSKVDIVRRAVALGVPIAQTWSCYQGGAVPCGRCDSCRIRDRALVEAGYPELATAN

SEQ ID NO: 38276 - protein, 221 aa, Filibacter sp.
  misc_feature (1)..(221): tr|A0A3P5X4R4|A0A3P5X4R4_9BACL 7-cyano-7-deazaguanine s ynthase OS=Filibacter sp. TB-66 OX=2483811 GN=queC PE=3 SV=1
MKQEKAVVVFSGGQDSTTCLFWALKNFKGVATVTFDYGQRHHAEIECARQIASELDVSFKVLDMQLINQLSANALTRDDIEVSEKEGQLPSTFVPGRNHLFLSFAAVYAQAIGSRHLITGVSETDFSGYPDCRDTFIKSLNVTVNLAMDAQFVIHTPLMWLDKAEVWALADELGAFNFVQEKTLTCYNGIPSTGCEECPACLLRNKGLASYLDSKVVSINN

SEQ ID NO: 38277 - protein, 222 aa, Filobacillus milosensis
  misc_feature (1)..(222): tr|A0A4Y8IF66|A0A4Y8IF66_9BACI 7-cyano-7-deazaguanine s ynthase OS=Filobacillus milosensis OX=94137 GN=queC PE= 3 SV=1
MEKNNKAVVVFSGGQDSTTCLFWALKKYDDVEVVTFNYGQRHDEEIEVAKEIANDLNIRHHILDMSLLNQLAPNALTRDDIEVTDGEDGELPSTFVPGRNLLFVSFATILAKQIGAKHIITGVCETDYSGYPDCRDVFIKSLNVSLNLSMDDDFVVHTPLMWLDKAETWKLADQLGAFDYVREKTLSCYHGVRGDGCGECPACHLRQNGLETYLKQLKEVKA

SEQ ID NO: 38278 - protein, 579 aa, Fimbriiglobus ruber
  misc_feature (1)..(579): tr|A0A225DWS0|A0A225DWS0_9BACT Uncharacterized protein OS=Fimbriiglobus ruber OX=1908690 GN=FRUB_03623 PE=4 SV =1
MTRSTVSTLSSALSFASDDDYRFKFVSLRKEQPLQPSLDFDSTMYDGLVEEVVMFSGGLDSLAGAVQESVLGRRRVLLVNHRSTPKVSNRYKDLLAGLKRHAGDASPLNIYVRVNKDSDLGNEYTQRTRSFLFAAIGSLFAAMIGLDRLRFYENGVVSLNLPMSAQVVGARASRTTHPRVLSEYSEILSAVAGRPFRIENPFLWRTKTDMVRLVAQAGCAELIRLSSSCAHTWAQTIEHPHCGDCSQCIDRRFAVLAAGQEEHDPRMGYGVDLLTGQRSDGVSRGLLSAYLETANQVGRMSPTQFFGKFGEAARVFRHIDGRADVAANNIYDLYQRHARDVNAVVDHAIADNATAIRQRELPPSCLVRLVSDSGERPDRLDNPSATAFDPRPPFEVTDYTFRKWDSVWLLRFAGGSNIVLRPSIGAAYLNILLSRPNSPISAVDLFCKVSRRSQDFAIESKGKRADGDAVAAYMARLSELKADREKATKDNDTVVLEELDKEYQEIEKEIRRVVTPKGRIRREVGISEKIRKSVGIAIRRAVADIRRYVGTEAADHIKSRIRGGQRVMYTATQGIEWQT

SEQ ID NO: 38279 - protein, 692 aa, Fimbriiglobus ruber
  misc_feature (1)..(692): tr|A0A225DIK6|A0A225DIK6_9BACT Uncharacterized protein OS=Fimbriiglobus ruber OX=1908690 GN=FRUB_04644 PE=4 SV =1
MPPELHVICGPSFEADRRTDPSALRLNRTGPDSNVFLTIEDMRQRMYQDPPDRFLDLLDIAAYVYAADQATPRKGGRVEDFEQHWRRHFLFHIPVRDPDFWRSASTCDRLASVLNFASDDDFRFEFVPLRTSPLLRNCIQFDGTMYDGVVDEVVMFSGGLDSLAGAVQESVLDQRKVLLVNHRSTPKVAQRYRNLLAGLRTHAGDANPLNLYVRVNKDSDLGREYTQRTRSFLFAALGATFAAMIGLNRLRFYENGVISLNLPLSAQVLGARASRTTHPRVLRGYAELMSAVAGRPFAIENPFLWRTKTDVVRLIADAGCGDLLRLSTSCAHTWAQTKDHPHCGDCSQCIDRRFATLAAGQEALDPGSEYGVDLLTGERADGISRGLLAGYLETANQVGRMSPIQFFSKFGEATRVFRHVEGGAETVAHQVYDLYQRHAREVNGVVDRAIAANATAIRQRELPQSCLVRLVSDSGERPDRVDPPSATAFDPRPPFEETDYVFRRWNSVWAVRFAGGPYILLRPSRGAAYLNILLSRPNTPVSAIELFCTVSRRGTEFAIETTGPRADKDAVAAYKARLIELQAIREKAEEENDTLVLEEVDRDFRDIESEIKRVMTPRGRIRQDAGTWEKIRKSVGIAIRRVVEEIRVNRGSEVAEHLRSSIRGGQRVIYAASPRIEWQAGNNEKSFPLHEK

SEQ ID NO: 38280 - protein, 205 aa, Fimbriimonas ginsengisoli
  misc_feature (1)..(205): tr|A0A068NTT9|A0A068NTT9_9BACT 7-cyano-7-deazaguanine s ynthase OS=Fimbriimonas ginsengisoli Gsoil 348 OX=66147 8 GN=queC PE=3 SV=1
MAIARGDGTEPYALTVLYGQRHLEEVEASKRVAAQLGAVEHKFVRVELDAIGGSALTDAIEVPKDRDESKMTDIPVTYVPARNTVMLSLALGYAEVVGAEAIYAGVNAVDYSGYPDCRPEYIAAFQTLARLATKAGVEGRPIEIRTPLIQLTKPQIIQRGLELGVDYALTHSCYDPADGRPCGHCDACLIRLKAFESLGMKDPAL

SEQ ID NO: 38281 - protein, 430 aa, Finegoldia magna
  misc_feature (1)..(430): tr|A0A010NKS3|A0A010NKS3_FINMA 7-cyano-7-deazaguanine s ynthase OS=Finegoldia magna ALB8 OX=1459804 GN=BA93_042 30 PE=3 SV=1
MRIYCTNESIDNIPEGFDEKLDITNKKDIGFNFWDNYIKLEKEFSKLAIDLLYLSIFVFVADRIVKRDTQNDGWTRTIKLNIPVSDIDFWNSQKVLVTDMLNFLSGDNWTFEFRPKTVYQEQIYYSSKKYKELNKRSYDKICMFSGGLDSFIGAIDLLEDSTSSILLVSHYGGGKGTKSYQDDIFKAVKNKYKLDDRDQVQSYVVAKNGKEDTTRTRSFMFFSHAIVYASAFGRKTQLYIPENGYISLNVPLSGSRFGSSSTRTTHPYYMKKLQTLINNMNLDIRIINPYQFKTKGEMMKECKNSSFLKEQYVNTMSCSHPDNGRFKKEKTSKHCGDCIPCIVRKAAIISAYGKDETEYRHKNLEKSEAGILNRNAFLQMLEKHNPKKAVFEIQKSGPLTDNLFEFADVYNRSIEELNKIFNEVDMNEVD

SEQ ID NO: 38282 - protein, 226 aa, Firmicutes bacterium
  misc_feature (1)..(226): tr|A0A2N2A822|A0A2N2A822_9FIRM 7-cyano-7-deazaguanine s ynthase OS=Firmicutes bacterium HGW-Firmicutes-8 OX=201 3789 GN=queC PE=3 SV=1
MKAVVLLSGGLDSTVCMSVAEAAGYELFPMSFKYGQRHDREIVSAQNIANYYGVKKHLIITTNMDDIGGSALTADIDVPAGDENRGDIPVTYVPARNLIFLSYALGYAEVLDARKIYIGVNALDYSGYPDCRPEFIERFQHLADYTTKAAVQDKRVIKVETPLINMTKADIIQLGQKNNAPLHLTTSCYRGGEQACGTCDSCLLRLRGFKQAGCKDPIEYGVRSTE

SEQ ID NO: 38283 - protein, 219 aa, Firmicutes bacterium
  misc_feature (1)..(219): tr|A0A2N2EHZ1|A0A2N2EHZ1_9FIRM 7-cyano-7-deazaguanine s ynthase OS=Firmicutes bacterium HGW-Firmicutes-1 OX=201 3770 GN=queC PE=3 SV=1
MKKENAVIIFSGGQDSTTCLFWAKERFHEVIAISFDYGQKHSLELNCATDICREQGIEHHILDMSLLNQLAPNSLTRSDIKVDTDAPDVGTPNTFVDGRNLLFITFGAIFAKQRDIHHIVTGVSQSDYSGYPDCRDIFIKSLNVTLELSMNYQFVIHTPLMWIDKAETWEMAYDLGVLDIIKDETLTCYNGIKGQGCGECPACKLRSKGYHLFMEGLNK

SEQ ID NO: 38284 - protein, 226 aa, Fischerella major
  misc_feature (1)..(226): tr|A0A1U7H027|A0A1U7H027_9CYAN 7-cyano-7-deazaguanine s ynthase OS=Fischerella major NIES-592 OX=210994 GN=queC PE=3 SV=1
MKAVILLSGGLDSSTVLYQALADGCECYTISFDYQQRHKRELRSALAIAKTAGVVQNQIVTFDLRQWGGSALTDDTIDLPQMRSLEEMSQNIPITYVPARNTIFLSFALAYAETITAECVYIGINALDYSGYPDCRPDYIQAMQEVFRLGTKQGREGKTINIVAPLLHLKKTEIIQLGNKLGVPWELTWSCYAGDDVACGVCDACQLRLAAFAELGLKDPLAYSQK

SEQ ID NO: 38285 - protein, 224 aa, Fischerella muscicola
  misc_feature (1)..(224): tr|A0A2N6JW19|A0A2N6JW19_FISMU 7-cyano-7-deazaguanine s ynthase OS=Fischerella muscicola CCMEE 5323 OX=2019572 GN=queC PE=3 SV=1
MKAVILLSGGLDSSTVLYQALADGCECYAISFDYQQRHKRELHSALAIAKTAGVVQNQIVTFDLRQWGGSALTDDTIDLPQKRSLEDMSQNIPVTYVPARNTIFLSFALAYAETIAAERVYIGINALDYSGYPDCRPDYIQAMQEVFRLGTKQGREGKTITIVAPLLHLKKTEIIQLGNKLGVPWELTWSCYAGGDIACGVCDACQLRLAAFVELGLKDPLAYR

SEQ ID NO: 38286 - protein, 234 aa, Fischerella sp.
  misc_feature (1)..(234): tr|A0A0S3TRT6|A0A0S3TRT6_9CYAN 7-cyano-7-deazaguanine s ynthase OS=Fischerella sp. NIES-3754 OX=1752063 GN=queC PE=3 SV=1
MSLHPSVNMKAVILLSGGLDSSTVLYQALADGCECYTISFDYQQRHKRELRSALAIAKTAGVVQNQIVTFDLRQWGGSALTDDTIDLPQMRSLEEMSQNIPITYVPARNTIFLSFALAYAETITAECVYIGINALDYSGYPDCRPDYIQAMQEVFRLGTKQGREGKTINIVAPLLHLKKTEIIQLGNKLGVPWELTWSCYAGDDVACGVCDACQLRLAAFAELGLKDPLAYSQK

SEQ ID NO: 38287 - protein, 227 aa, Fischerella sp.
  misc_feature (1)..(227): tr|A0A1Z4TSF5|A0A1Z4TSF5_9CYAN 7-cyano-7-deazaguanine s ynthase OS=Fischerella sp. NIES-4106 OX=2005456 GN=queC PE=3 SV=1
MKAVILLSGGLDSSTVLYQALVDGCECYAISFDYQQRHRRELHSALAIAQKAGIVQNQIVTFDLRQWGGSALTDDTIDLPQKRSLEEMSQNIPVTYVPARNTIFLSFALAYAETIAAERVYIGVNALDYSGYPDCRPDYIQAMQEVFRLGTKQGREGKPITIVAPLLELKKTDIIQLGNKLGVPWELTWSCYAGDEMACGVCDSCRLRLAAFAELGLKDPLNYASPC

SEQ ID NO: 38288 - protein, 83 aa, Fischerella thermalis
  misc_feature (1)..(83): tr|A0A2N6LU94|A0A2N6LU94_9CYAN 7-cyano-7-deazaguanine s ynthase (Fragment) OS=Fischerella thermalis CCMEE 5319 OX=2019665 GN=CEN47_07210 PE=3 SV=1
MKAVILLSGGLDSSTVLYQALADGCECYTISFDYQQRHKRELRSALAIAKTAGVVQNQIVTFDLRQWGGSALTDDTIDLPQMR

SEQ ID NO: 38289 - protein, 226 aa, Fischerella thermalis
  misc_feature (1)..(226): tr|A0A2N6N2P4|A0A2N6N2P4_9CYAN 7-cyano-7-deazaguanine s ynthase OS=Fischerella thermalis CCMEE 5201 OX=2019672 GN=queC PE=3 SV=1
MKAVILLSGGLDSSTVLYQALADGCECYAISFDYQQRHKRELHSALAIAKTAGVVQNQIVTFDLRQWGGSALTDDTIDLPQMRSLEEMSQNIPVTYVPARNTIFLSFALAYAETITAERVYIGINALDYSGYPDCRPDYIQAMQEVFRLGTKQGREGKTINIVAPLLHLKKTEIIQLGNKLGVPWELTWSCYAGDDVACGVCDACQLRLAAFAELGLKDPLAYSQK

SEQ ID NO: 38290 - protein, 221 aa, Flammeovirgaceae bacterium
  misc_feature (1)..(221): tr|A0A3R7UYU4|A0A3R7UYU4_9BACT 7-cyano-7-deazaguanine s ynthase OS=Flammeovirgaceae bacterium TMED290 OX=198670 0 GN=queC PE=3 SV=1
MKKALVLLSGGQDSTTCLYWALENFSYVEAVGFDYGQRHSLELKFAKKTALIANVNFEIILINNLFKNSALINKTQDLNASHPNNKKLPSSFVPGRNILFISLASSIAYNKKIDNIVTGVCETDYSGYPDCRKEFINSMKKSISIGLDYNIDIHAPLMNLDKAKIWKLAQELGCVEIIINNTMTDYNGSLKKNEWGYGELDNPASKIRSQGYYTAKKNKWI

SEQ ID NO: 38291 - protein, 221 aa, Flammeovirgaceae bacterium
  misc_feature (1)..(221): tr|A0A1Z9SE91|A0A1Z9SE91_9BACT 7-cyano-7-deazaguanine s ynthase OS=Flammeovirgaceae bacterium TMED262 OX=198669 9 GN=queC PE=3 SV=1
MRKALVLLSGGQDSTTCLYWAKNKFDYVEAIGFDYGQRHGSELEFAKKTALISNINFEIISINNIFKNSALINKSEDLNAVHPNNKNLPSSFVPGRNILFISLASSYAYNKKIDNIVTGVCETDYSGYPDCRKEFINSMKKSVSIGLDYNIDIHTPLMNLDKAKIWKLAKELGCIEIIINNTMTDYNGSQKKNEWGFGKLDNPASKLRSQGYYTAKKNKWI

SEQ ID NO: 38292 - protein, 389 aa, Flaviaesturariibacter sp.
  misc_feature (1)..(389): tr|A0A4R4E2K9|A0A4R4E2K9_9BACT N-acetyl sugar amidotran sferase OS=Flaviaesturariibacter sp. 17J68-15 OX=254576 1 GN=E0486_07175 PE=4 SV=1
MFHWSYNEENLRQNPVVNGGRPYQQCTKTVMDTIMDPDITFDEDGVCNYYHNYMNQVDKVVFKGAEGDRRIEEMVRTLKANQKGKYDSIIGLSGGVDSTYMVYKAKEWGINPLVVHFDYGWNLELAVQNIEQTLKHAGLELYTYVMNWEDFKHLQRAYFKAGVLDLDVPADHLIFAALNMVAKKFNIKYLLKGYNFQSEAILPRTWNYNRKFDLKNLQDINRQFGERKLKDLPKLGLWQQIYYERIYNLKSFSPLNNFDYNKEACKKELIEKIGWVDYGGKHFENVFTRFYQGYILPTRFAIDKRKAHLSTLICSGQATREEALTELQRPPYDLKVMQEDYVYVSKKLGFSEAEFDQCLTGPIRRHDEFKEEVKLQNFLSKAAKLIIRK

SEQ ID NO: 38293 - protein, 617 aa, Flavimaricola marinus
  misc_feature (1)..(617): tr|A0A238LBQ4|A0A238LBQ4_9RHOB 7-cyano-7-deazaguanine s ynthase OS=Flavimaricola marinus OX=1819565 GN=queC PE= 4 SV=1
MAGAAPPSEHIVTCFAPLADRDGDEQLRFEIDGKVKSVSIRIGQLSRQLVAQLPEMAIDLIELAAFVYAIDSSVSRGGLADQQMGAKWHRRFCVEVPVRELDRWSDPDLKRELEEALMFLSGDRFEFSFVPMDGDDRGQTKYFEFGPEGSWVPDSLLMFSGGLDSFAGALEEIIERKHKVGLISHFSATKIAPIQRDLQKHLALKLGSQTLRHIPMRVQLRGGTNAEGTHRARSFLFAALGMATAVAFGKDRVSFYENGVVSLNLPSVGNVLGTRATRTTHPQTLRRFQSLFSRIFETPLRVDNPFFWRTKTDVIETIARLGMADQIAFTRSCADVHNQTKQFAHCGLCSQCIDRRFAVLAAGLERFDPPEAYRVDLMTGIRARVQDKEAALSYVRAALGYEMIAGADLLTRYPAILNAVDHLGEPSDSSLRRIAGLLQRHGQAVVSVMRKELGVRRPDEFPADSLPHLFGRIQNAQAWPEGPSLSPEHDPVETKEAFELVIDRKRQLVVINGIISIKGAAYRLLSVLADEHLVGAGQGLDPLDYPTLSGGVLADRLGLLDDAAVRQSVNRSRSQLAQRFGSADFEAEDGKVLIENIPWSGYRLAPDRVTVRVQSPK

SEQ ID NO: 38294 - protein, 227 aa, Flavisolibacter tropicus
  misc_feature (1)..(227): tr|A0A172TWB3|A0A172TWB3_9BACT 7-cyano-7-deazaguanine s ynthase OS=Flavisolibacter tropicus OX=1492898 GN=queC PE=3 SV=1
MTESPLSALVLFSGGQDSTTCLFWAKQQFEKVVALGFRYGQKHDVELKQASLIAEKANVPFHVIDITGMLKGSALTEHNKDVSAQHELNPELPASFVPGRNAVFLTIATSYAYTHGITDIVGGMCQADYSGYPDCRRVFVDSLQTSMTLALDNDVRIHTPLMYKSKAEAWKLAYELGVLEIVRDLSHTDYNGDRTTYNEWGYGRLDNPASILRAKGYEEAKQKGWLG

SEQ ID NO: 38295 - protein, 264 aa, Flavobacteriaceae bacterium
  misc_feature (1)..(264): tr|A0A349NVR8|A0A349NVR8_9FLAO 7-cyano-7-deazaguanine s ynthase OS=Flavobacteriaceae bacterium OX=1871037 GN=DC S66_20210 PE=3 SV=1
MSNKNKSVMIFSGGMDSAAMLRMAQFNSGELHCITFDYGQRHKREIECAKIQIEHAKLVSFSHNFEDTEIYHKIIDVTFLKELITTSSLTNEEIDNPDVKDMVGEAQPVSYVPFRNQIFLSIACAHAESIGADTVYHGATQVDSLAGYWDGSEQFREQFQALIDLNRKEQIKLMCPLLAMDKKAIVEFGASSRVDYKYTYTCYSGDEIADVTTPSSSLRIKGFADAGYIDPQPYNQDLTEFWKENKCVPFPEEVFLNKEGTRGP

SEQ ID NO: 38296 - protein, 199 aa, Flavobacteriaceae bacterium
  misc_feature (1)..(199): tr|A0A5K0USR9|A0A5K0USR9_9FLAO 7-cyano-7-deazaguanine s ynthase OS=Flavobacteriaceae bacterium OX=1871037 GN=qu eC PE=4 SV=1
MQKNNLAILLSGGMDSIALAYWKKPAHSITIDYGQKAANAEIKAAAQISKYLNIEHHILKVDCSALGSGDMNGSKSLGISPITEWWPYRNQLLVTLACMKGVSIGIKELIIGSVSTDNAHKDGTRTFYDYLSKLIEYQEGQIKITCPGIEMSTVDLIKKAKLPISLLYWAHSCHTANEPCMNCNGCKKYLYTLQMLGLD

SEQ ID NO: 38297 - protein, 356 aa, Flavobacteriales bacterium
  misc_feature (1)..(356): tr|A0A0F2NYB7|A0A0F2NYB7_9FLAO Uncharacterized protein OS=Flavobacteriales bacterium BRH_c54 OX=1629721 GN=VR7 7_02290 PE=4 SV=1
MDTSDSEITFDENGFCNHCTNFLEHTAKQMFQGTSSDQQLNEIIEKIKSAGKNLKYDCVVGISGGIDSCYVAYKAKALGLKPLAVHLDNGWNSELAVSNIEKILHKLDIDLHTHVLDWEEFKDLQLSFLRASVPEIETPTDIAILAVLHKVAAKHNIKYILSGGNFATEGILPKSWHYDAKDEKYLYAIQKQFGNKPLKTFPTFGFLKEMYYKFFKGIKIIYFLNYLPYSKKEAVALLENELNWKYYGGKHYESRYTRFVQSYILPEKFNIDYRKSTSSSLICSGEITREEALEELKGKSYDINLVNEDKEYLCKKLELSITEFDAIMDTPPKTHNDYPNNKKLLEFIYNAYRKFF

SEQ ID NO: 38298 - protein, 369 aa, Flavobacteriales bacterium
  misc_feature (1)..(369): tr|A0A2A5HP38|A0A2A5HP38_9FLAO N-acetyl sugar amidotran sferase OS=Flavobacteriales bacterium OX=2021391 GN=COA 31_03125 PE=4 SV=1
MKKDIYQQCNRCVMDTSDSEITFDENGFCNHCTNFLEHTAKQMYQGTSSDQQLNEIIEKIKSVGKNLKYDCVVGISGGIDSCYVAYKAKALGLKPLAVHLDNGWNSELAVSNIEKILHKLDIDLHTHVLDWEEFKDLQLSFLRASVPEIETPTDIAILAILHKVAAKHNIKYILSGGNFATEGILPKSWHYDAKDEKYLYAIQKQFGNKPLKTFPTFGFLKEMYYKFFKGIKIIYFLNYLPYSKKEAVALLENELNWKYYGGKHYESRYTRFVQSYILPEKFNIDYRKSTSSSLICSGEITREEALEELKGKSYDINLVNEDKEYLCKKLELSITEFDAIMDTPPKTHNDYPNNKKLLEFIYNAYRKFF

SEQ ID NO: 38299 - protein, 196 aa, Flavobacteriia bacterium
  misc_feature (1)..(196): tr|A0A1Q3ZHK2|A0A1Q3ZHK2_9BACT 7-cyano-7-deazaguanine s ynthase OS=Flavobacteriia bacterium 40-80 OX=1895763 GN =BGO87_07515 PE=3 SV=1
MKKAVLLSGGIDSICLTYGIKPQIAYTIDYGQTVAEREIYVSEFICKELGIQHKCIKVDCRNLGTGTLANSKEHKLSPSVEWWPYRNQLLITLACMQGIKDEVQEIYLASVKSDCFHKDGTQEFYNFINTLVEYQEGKIKIFCPTLEFYSHELASIYDVPIELLTIAHSCHISNIACGRCSGCTKQLKVRHELKME

SEQ ID NO: 38300 - protein, 383 aa, Flavobacterium branchiophilum
  misc_feature (1)..(383): tr|A0A2H3KKH8|A0A2H3KKH8_9FLAO N-acetyl sugar amidotran sferase OS=Flavobacterium branchiophilum OX=55197 GN=B0 A77_11585 PE=4 SV=1
MQNFKYQADKICSRCIMDDTVEGITFNEKGECTFCEIHDELEMQFALNDHSKKELEKIVAKIKQDGKGKPYDCIVGVSGGRDSTYTLYETVKLGLRPLAVHFDNGWNTEHAVNNIKNVCKKLNVDLYTHVAVWEEFKDLQRAFLEASVPDAEVPTDWVIFSVLFKEAAKENLKYIIHGHSFRTEGTTPISWTYMDGRYVNDIHKKFGKLKIKSFPIMNMSDYLYYSFIRKIKQVRLLYYLPYDEQEVLKSLTSEVDWHNYGGKHHESKYTGFFQSYILTRKFNIDKRKLHYSALLRNGQITRNEALLIVKKDPFTEGIETINYCQKKLGYSAEEFDSIMKSPVKSYKDYNSYFNIIKKLKKPIFWATKLGIVPDTVYRKFFKF

SEQ ID NO: 38301 - protein, 383 aa, Flavobacterium branchiophilum; identical to SEQ ID NO: 38300
  misc_feature (1)..(383): tr|G2Z7L8|G2Z7L8_FLABF Probable LPS biosynthesis protei n WbpG OS=Flavobacterium branchiophilum (strain FL-15) OX=1034807 GN=wbpG PE=4 SV=1

SEQ ID NO: 38302 - protein, 199 aa, Flavobacterium sp.
  misc_feature (1)..(199): tr|A0A0Q4SUF7|A0A0Q4SUF7_9FLAO 7-cyano-7-deazaguanine s ynthase OS=Flavobacterium sp. Leaf82 OX=1736238 GN=ASF1 0_19090 PE=3 SV=1
MESVKKAILLSGGIDSICLTYDLKPDIAYTIDYGQTVAEREIYVSDFVCQKLKIQHKVIRVDCKSLGSGTLANSENLSISPSEEWWPFRNQLLITLASMQAIKDGISEIYLASVKSDNFHKDGTKDFYKLSDELVSYQEGKIRILCPTLEYFSHELVSKFNVPLELLSIAHSCHISNIACGKCSGCRKQLKVRHEINLE

SEQ ID NO: 38303 - protein, 196 aa, Flavobacterium sp.
  misc_feature (1)..(196): tr|A0A4V6N0D0|A0A4V6N0D0_9FLAO 7-cyano-7-deazaguanine s ynthase OS=Flavobacterium sp. RD-2-33 OX=2529433 GN=EZL 74_07010 PE=3 SV=1
MKKGVLLSGGIDSICLTYGIRPEIAYTIDYGQTVAEREIYVSKYICKELNIQHKIIKVDCKNLGSGTLANSENLSFSPSEEWWPYRNQLIITLALMQGIKDNIKELHLATVKSDEFHKDGTKQFYEYINKLVSFQEGEISVKCETTDYFSHELANKYSVPLELLSIAHSCHVSNIACGNCSGCIKQMRVRFELNID

SEQ ID NO: 38304 - protein, 196 aa, Flavobacterium spartansii
  misc_feature (1)..(196): tr|A0A1S1J8Y8|A0A1S1J8Y8_9FLAO 7-cyano-7-deazaguanine s ynthase OS=Flavobacterium spartansii OX=1278819 GN=BHE1 9_07410 PE=3 SV=1
MKKALLLSGGIDSICLAYDLKPDIAYTIDYGQTVAEREIYVSDFVCQKLGIQHKVIRVDCRNLGTGTLANSENLSISPSEEWWPFRNQLLITLASMQGIKDGISELYLASVKSDNFHKDGTEDFYKLSDKLVSFQEGKIRVLCPTLDFFSHELVNKFNVPLELLSIAHSCHISNIACGKCSGCIKQLKVRYEINLE

SEQ ID NO: 38305 - protein, 223 aa, [Flavobacterium] thermophilum
  misc_feature (1)..(223): tr|A0A377FYG1|A0A377FYG1_9BACL 7-cyano-7-deazaguanine s ynthase OS=[Flavobacterium] thermophilum OX=1414643 GN= queC PE=3 SV=1
MKMKEEKAVVVFSGGQDSTTCLFWAKKQFGEVEAVTFDYGQRHRREIDVAQAIAAELGVRHTVLDLSLLGQLAPNALTRRDIAIEQKKGELPTTFVDGRNLLFLSFAAVFAKQRGARHIVTGVCETDFSGYPDCRDVFIKSLNVTLNLAMDYEFVIHTPLMWLTKAETWKLADELGAFEFIRTKTLTCYNGIIADGCGECPACVLRKRGLDDYLREKAGVERP

SEQ ID NO: 38306 - protein, 243 aa, Flavobacterium tibetense
  misc_feature (1)..(243): tr|A0A365P0P7|A0A365P0P7_9FLAO Uncharacterized protein OS=Flavobacterium tibetense OX=2233533 GN=DPN68_09035 P E=4 SV=1
MEIDKKNVNLLLWTSGWDSTFRLLQIILMEKKSVQPIYIVDKNRKSLKNELEAIQKIQDKIKDEFPEAIDLIQPIWFVEKENLTENDEIGFAFQQLSSMRKIGSQYEWLAQFSHHYDLKNVEISVEKNLDLNSFGNFIKQNYLEVNPSECSDKKLYYTIDTVFKYFHFPVIYLLKTKMLSIAKENNWLNIMNLTWFCHKPKNNLPCGKCNPCMATIEKGLSYRVPLTNRILGYIKIYKNKLKG

SEQ ID NO: 38307 - protein, 348 aa, Flavonifractor sp.
  misc_feature (1)..(348): tr|A0A1Y4WMW0|A0A1Y4WMW0_9FIRM 7-cyano-7-deazaguanine s ynthase OS=Flavonifractor sp. An10 OX=1965537 GN=B5E42_ 03905 PE=3 SV=1
MKNITTKLRSSGLLLKAPIYNAENIHAKNRKNAIVMFSGGMDSTVSLWWALDNYENVEILIVDYNQPHSIEIDKAIKIAKMVGAKYQKIKVDFPTSFWGIENHLTRGQACLMTSLAALNISHDGADIVMGILSTDNYGDCDRDFLDHIASVLFHPNDWSDIGIATPLRAVKNKSDVIALGYQYGAPLSLSWTCRDPINDKPCHNCMQCRQRDEALVSFYREYGISKDQYDKWSLVCASPYHPYFRDVSYDIHIVVEAFLQAGGFKHGKRCYVYTSPDGKQRVSTHISSIESLEEAGTGSFMDLIHIHGYLHNNYRWELCVSPNGAIAATDVLPNVSVIEEELIKKAEF

SEQ ID NO: 38308 - protein, 247 aa, Flavonifractor sp.
  misc_feature (1)..(247): tr|A0A1Y4BYR5|A0A1Y4BYR5_9FIRM TIGR00268 family protein OS=Flavonifractor sp. An306 OX=1965629 GN=B5F88_13205 PE=4 SV=1
MTLEEFFTQHPRTAVAFSGGTDSALVLWAAGRYGREVRAYYVHTVFQPAFELADAKRLAEELEVPLTVVEADVLAVPEAAANGPRRCYYCKKALFTTLWQRARADGYTVLLDGTNASDDAGDRPGMQALRELEVRSPLRECGITKAEVRRMSKEAGLFTWDKPAYACLATRVPTGTAITREALEKVERGENALFRLGFSDFRVRLMGDAARIQVPADQMERALALRGEINQALEADFSAVLLDLAGR

SEQ ID NO: 38309 - protein, 228 aa, Flexistipes sinusarabici
  misc_feature (1)..(228): tr|F8E633|F8E633_FLESM 7-cyano-7-deazaguanine synthase OS=Flexistipes sinusarabici (strain DSM 4947 / MAS 10) OX=717231 GN=queC PE=3 SV=1
MKKAVVLMSGGLDSCVTAGIASLDYELYFLHVNYGQKTEKRELKSFNDLYKHFNGRDKLIVDIGYLKKIGGSSLVDDKENIEAGNVERKDIPRTYVPFRNGNILSIGVSWAEVIGAQKIFIGAVAEDSSGYPDCRKEFYDAFNEVLKVGLKPETELSIETPIIDMTKSEIVKIGSELNVPFHLTWSCYKNETKACGVCDSCLLRLRGFEKAGIKDPIPYDKVNSSVED

SEQ ID NO: 38310 - protein, 228 aa, Flexistipes sinusarabici
  misc_feature (1)..(228): tr|A0A3D5QDT5|A0A3D5QDT5_FLESI 7-cyano-7-deazaguanine s ynthase OS=Flexistipes sinusarabici OX=2352 GN=queC PE= 3 SV=1
MKKAVVLMSGGLDSCVTAGIASLDYELYFLHVNYGQKTEKRELKSFNDLYKHFNGRDKLTVDIGYLKKIGGSSLVDDKENIEAGNVERKDIPRTYVPFRNGNILSIGVSWAEVIGAQKIFIGAVAEDSSGYPDCRKEFYDAFNEVLKVGLKPETELSIETPIIDMTKSEIVKIGSELNVPFHLTWSCYKNETKACGVCDSCLLRLRGFEKAGIKDPIPYDKVNSSVED

SEQ ID NO: 38311 - protein, 227 aa, Fluoribacter bozemanae
  misc_feature (1)..(227): tr|A0A0W0RYP2|A0A0W0RYP2_FLUBO 7-cyano-7-deazaguanine s ynthase OS=Fluoribacter bozemanae OX=447 GN=queC PE=3 S V=1
MKKAVVLLSGGLDSTTCLALARSKGFSCYTISFSYGQRHSAELLAAQRIAQYYNVATHHIVTLDTALFRNSALTDSNIEVPSFQGGSDIPVTYVPARNTIFLAMALGFAESIGAREIFIGASSVDYSHYPDCRPEFIQSFQNLANLATKAGISGDQFTIHAPLQHLSKIETIQLGVSLGVDYSLTVSCYQANDAGEACGQCDSCTFRKRGFLGAGIDDPTLYRRSDH

SEQ ID NO: 38312 - protein, 228 aa, Fluoribacter dumoffii
  misc_feature (1)..(228): tr|A0A377G5L1|A0A377G5L1_9GAMM 7-cyano-7-deazaguanine s ynthase OS=Fluoribacter dumoffii OX=463 GN=queC PE=3 SV =1
MKKAVVLLSGGLDSTTCLAFAAAKGFSCYALSFSYGQRHSFELNAAQRIAKHYNVVKHHIATLDTELFQNSALTDSTIEVPAFEGSTEIPVTYVPARNTIFLAMALGLAESIGARDIFIGASSIDYSHYPDCRPEFIEAFQKLANLATKAGVMGNRFSIHAPLQHLSKAQTIQLGVSLGVDYSLTVSCYQANEAGAACGECDSCTFRRRGFKEAGVADPTLYYPSTRK

SEQ ID NO: 38313 - protein, 229 aa, Fluoribacter gormanii
  misc_feature (1)..(229): tr|A0A377GEW1|A0A377GEW1_9GAMM 7-cyano-7-deazaguanine s ynthase OS=Fluoribacter gormanii OX=464 GN=queC PE=3 SV =1
MKKKAVVLLSGGLDSTTCLALAASKGFSCYAMSFSYGQRHSAELLAAERIAQHYNVVKHQIVSLDTELFRNSALTDSTLEVPAFQGGADIPVTYVPARNTIFLAMALGFAESIGAREIFIGASSVDYSHYPDCRPEFIDAFQTLANLATKAGVTGDRFTIHAPLQHLSKVQTIQLGVSLGVDYSLTVSCYQANDTGEACGQCDSCTFRRRGFIGAGVDDPTLYRSSESK

SEQ ID NO: 38314 - protein, 616 aa, Fluviibacterium aquatile
  misc_feature (1)..(616): tr|A0A4R6B4K5|A0A4R6B4K5_9RHOB Uncharacterized protein OS=Fluviibacterium aquatile OX=2552766 GN=E2L05_00205 P E=4 SV=1
MGGGAIPFEHRVRCLPPLTKSGGDAQLCLEIDGQPVGVKVCISHLNAQLVAELPDRTLDLLEVAAVVYGADAGVSRGGTADQHMGARWNRHFEVEMPVRDHDFWNCTEVVSALEEMLMFLSGDRFAFRFVAKEDGEAERSLFFKFDEGSAWRATRVMMFSGGLDSFAGALEEVAEQGERVALVSHFSASKIAPVQRQLHKALASRFGENSCRHIPVQVQMVGRGLKEGTHRARSFLFAALGAVTAKAFGLNRVSFYENGVVSLNLSPVGNVLGTRATRTTHPQTLSRFSDFLSRVFTSETRIDNPFFWRTKREVVEAVARLGMSELIAQTRSCADVHNQTKQHIHCGRCSQCIDRRFAVLAAGLTRFDPEEAYRVALMDDARNDLRDREIALSYLRSAHAYEHVTPSELERALPAVVSAVAHLEQPTETALEMIARLLKRHGTGVSDVMRATLKAKDAVDFPDGSLPRLYGEAQRPELLPHMPVPSRPIAKPSNLMVMEVNTKRRRVVIDERIFVERNATADLLIALADKWLEGAGQGMTPLDYPLASSAFLANALKLEGDEAVRQRVNRAKTVLKKKMASSGREQQEAEAIIENVPWHGYRLTPDRVAVRKVKSE

SEQ ID NO: 38315 - protein, 206 aa, Fluviicoccus keumensis
  misc_feature (1)..(206): tr|A0A4Q7ZDF6|A0A4Q7ZDF6_9GAMM 7-cyano-7-deazaguanine s ynthase OS=Fluviicoccus keumensis OX=1435465 GN=EV700_0 887 PE=3 SV=1
MKKALLLASGGLDSTTVGYKLMAAGVEVVPIFFDYGQHCADIEWGRVNEVLPSNMQRPERFNISDIFRGSQSRLIREADLWTEEVKDDDLYIPYRTMLFFAVAAARAQTVGILDVYTGFINSNHAKEIDCTAAFMNSLDGLTENIGPVRFHSPFRNSSKADVARSAAELGVPIGRTYSCQASAKFPCGACPNCVERLNALKEANLV

SEQ ID NO: 38316 - protein, 229 aa, Fluviicoccus keumensis
  misc_feature (1)..(229): tr|A0A4Q7ZBB5|A0A4Q7ZBB5_9GAMM 7-cyano-7-deazaguanine s ynthase OS=Fluviicoccus keumensis OX=1435465 GN=queC PE =3 SV=1
MSRHTRPRAVVLLSGGLDSATCLAMASEKYDCYALSFAYGQRHSSELLAAARLAAAMKAVEHRVIRLDLGMIGGSALTDSSIAVPEEESVGIPVTYVPARNTVFLAFALGYAEVTDADAIVIGVNAVDYSGYPDCRPEFIEAFAKMAALATKGGVEGHPVRIEAPLLHLTKGEIIHAGLALGVDYGLTVSCYQADEDGRACGKCDSCRLRAAGFRAAGVPDPTRYATSP

SEQ ID NO: 38317 - protein, 374 aa, Fluviicola sp.
  misc_feature (1)..(374): tr|A0A1G0CIJ4|A0A1G0CIJ4_9FLAO Uncharacterized protein OS=Fluviicola sp. RIFCSPHIGHO2_12_FULL_43_24 OX=1798019 GN=A3E30_06485 PE=4 SV=1
MQDNENRPYQQCTRCIMDTTDPEISFDEKGQCNHCTEYFRLAPLYIYNGEETDRAREALIAKIKEAGKNSDYDCMVGVSGGVDSTYVAYMAKKFGLRILAFHFDNGWNSELAVKNVENIVKKLDIDYQTWVVDWEEFRDLQISFLKASVANAEIPSDHAFLAATYHLCSKYNIKYFLSGSNFATEGILPKSWGYNAKDVKHLKGIHKLFGKTKFKTYPLLGFNREFYYTYVKKIKMVRLLNYIPYVKEDAMKVIQDELGWVYYGGKHYESVFTRFFQAYYLPHKFGYDKRLAHLSTLICSGQMTREQALEEMKKDTYPPELLAEDKEYVIKKLGMNAEEFEAILNAPPKSYKEYPNDEKRLKFIYKVYNKLRGR

SEQ ID NO: 38318 - protein, 223 aa, Fontibacillus panacisegetis
  misc_feature (1)..(223): tr|A0A1G7Q0J8|A0A1G7Q0J8_9BACL 7-cyano-7-deazaguanine s ynthase OS=Fontibacillus panacisegetis OX=670482 GN=que C PE=3 SV=1
MLKNETAVVVFSGGQDSTTCLFWAMKQFKEVEAVTFDYGQRHRLEIECAKSIANDLGIKLTVLDMSLLGQLTQNALTRSDIPIVHEEGSLPSTFVEGRNHLFLSFAAVLAKGVGARHLVTGVCETDFSGYPDCRDAFVKSLNVTLNLAMDYDFVIHTPLMWIDKAETWKLADDLGAFDFVRERTLTCYNGIIGDGCGECPACNLRRAGMETFLQKYRNKEVQS

SEQ ID NO: 38319 - protein, 227 aa, Fontibacillus panacisegetis
  misc_feature (1)..(227): tr|A0A1G7GVH6|A0A1G7GVH6_9BACL 7-cyano-7-deazaguanine s ynthase OS=Fontibacillus panacisegetis OX=670482 GN=que C PE=3 SV=1
MGKIMEQKNRKAVVVFSGGQDSTTCLFWAMKHFDEVEAITFNYGQRHALEIECAKKIADELGVKWTLLDMSLLGQLTQNALTRNDLQIVHNDGELPSTFVEGRNHLFLSFAAVFAKGVDARHIVTGVCETDFSGYPDCRDDFIKSLNVTLNLAMDHNFIIHTPLMWIDKAETWEMADQLGAFEFVRQKTLTCYNGIIGDGCGTCPACQLRKAGLDRFLQGRNPEQML

SEQ ID NO: 38320 - protein, 231 aa, Fontibacillus phaseoli
  misc_feature (1)..(231): tr|A0A369BFM4|A0A369BFM4_9BACL 7-cyano-7-deazaguanine s ynthase OS=Fontibacillus phaseoli OX=1416533 GN=queC PE =3 SV=1
MLKNEKAVVVFSGGQDSTTCLFWALKLFREVEAVTFDYGQRHSLEIECAKGIAAELGVQLTVLDMSLLGQLTQNALTRTDIPIVHVEGELPSTFVDGRNHLFLSFAAVLAKGVGARHLVTGVCETDFSGYPDCRDAFVKSLNVTLNLAMDYEFVIHTPLMWIDKAQTWQMADELGAFDFVRERTLTCYNGIIGDGCGECPACKLRRAGMESYLHMRGEAGDSQASGMEGQE

SEQ ID NO: 38321 - protein, 112 aa, Fonticella tunisiensis
  misc_feature (1)..(112): tr|A0A4R7KV14|A0A4R7KV14_9CLOT 7-cyano-7-deazaguanine s ynthase OS=Fonticella tunisiensis OX=1096341 GN=EDD71_1 0118 PE=3 SV=1
MKKAVVLLSGGLDSSAALYLAKSEGYEVYAISFDYGQRHNKELLCAAKLAEKTGVKQHIIVKTNMDAWGGSALTDKNIDVPEGDENRKDIPITYVPARNMISFRMQHLMPRQ

SEQ ID NO: 38322 - protein, 88 aa, Fonticella tunisiensis
  misc_feature (1)..(88): tr|A0A4R7KU57|A0A4R7KU57_9CLOT 7-cyano-7-deazaguanine s ynthase OS=Fonticella tunisiensis OX=1096341 GN=EDD71_1 0117 PE=3 SV=1
MENAINMGTVFAVEHGKKIKIHAPFIHMKKSEEIKLGMKLGVDYSLTWSCYRGEELACGVCDSCLLRLRAFHEAGYEDPIKYEVNNNG

SEQ ID NO: 38323 - protein, 232 aa, Fontimonas thermophila
  misc_feature (1)..(232): tr|A0A1I2HRQ0|A0A1I2HRQ0_9GAMM 7-cyano-7-deazaguanine s ynthase OS=Fontimonas thermophila OX=1076937 GN=queC PE =3 SV=1
MTMSTTSGDKAVVLLSGGLDSATVLAIARAQGFEVFALSVAYGQRHDAELAAAARMAAAFGVRRHQRVSVNLDAFGGSALTDHAIAVPEAPSAGIPVTYVPARNTLFLSLALGWAEVIGARDIFIGVNAVDYSGYPDCRPAFIEAFERLAMVATKAGVEGARLRIHAPLLYMSKAEIIREGVRLGVDYSLTVSCYQADADGRACGRCDACRLRREGFKAAGLADPTRYVMTR

SEQ ID NO: 38324 - protein, 224 aa, Formivibrio citricus
  misc_feature (1)..(224): tr|A0A1I4ZIF4|A0A1I4ZIF4_9NEIS 7-cyano-7-deazaguanine s ynthase OS=Formivibrio citricus OX=83765 GN=queC PE=3 S V=1
MKKAVILLSGGLDSATCLAIAKSKGFELYCMSFDYGQRHNAELEAAARLAKSMGAVEHRIVNIDLAAFGGSALTDKRIAVPTGGVKDDAIPVTYVPARNTILLSYALAWAEVLGASDIFIGVNSVDYSGYPDCRPEFISSFQVMARLATRAGVEGAPMHIHTPLIFLTKAQIIERGVALGVDYGMTVSCYQADDQGRACGVCDSCRLRKSGFEAAGVPDPTHYR

SEQ ID NO: 38325 - protein, 223 aa, Formosa sp.
  misc_feature (1)..(223): tr|A0A5D0G4U2|A0A5D0G4U2_9FLAO Uncharacterized protein OS=Formosa sp. 1494 OX=2592046 GN=FVF61_09710 PE=4 SV=1
MKKINYVLWTGGWDSTFRVIQLYRLGANIQPIYIHDQCRKSSKKELELIHNLSIEIPSRFKQSKGKILPIIIINRKEIPYNLFLKLIIKVLKIKINLGKQYYWLATVAKKYKNLELSAHKEDRDRLFYEDQLIEIKDEQIGLNWRINPKKLDFFRRHLFKNMTFPLITISKPEMKNIAEENNFIDLMEKTWFCHKSNIKPCGKCVPCKQYIRDGFGYRLENYE

SEQ ID NO: 38326 - protein, 258 aa, Francisella adeliensis
  misc_feature (1)..(258): tr|A0A2Z4XW34|A0A2Z4XW34_9GAMM 7-cyano-7-deazaguanine s ynthase OS=Francisella adeliensis OX=2007306 GN=CDH04_0 0830 PE=3 SV=1
MNAVLSLSGGLDSSTVLLDLIDKGYNITCFTFNYGQKHYQEIQKACNLIEFLNSKGHEISHKVLDMSFMQDILYSSLITGNSEVPEGRYDEANMRDTVVPNRNKVFASIIQAAALSIYEKTRVKTVIALGIHAGDHAVYRDCTPEFRQKDYDAFIEGNYDAENVSYYTPFINTPKDELLAKGLDILNKMGVDYKDYYYHTLTSYKPMEIDSVVYSDYKSASSIERIESFVKNNAVDPIKYADGQKEVSWDFVKKEVCK

SEQ ID NO: 38327 - protein, 226 aa, Francisella sp.
  misc_feature (1)..(226): tr|A0A2W6RW21|A0A2W6RW21_9GAMM 7-cyano-7-deazaguanine s ynthase OS=Francisella sp. OX=2047875 GN=queC PE=3 SV=1
MSSKTLDQQSAVVIFSGGQDSTTCLVQAIAQYGLEQVHAVSFRYGQRHEIELRCSLNICQKLGIKYHRMIILEELSGLTENALMNQEIKISQSQEADYPNTFVPGRNALFILYTAIYAYQMNITNIIIGVSQADYSGYPDCREGFIRSINTSINLAMDQAFTIQTPLMYLDKAAVWELSDRLGYMEFVRKYSHSCYEGKEGGCKRCPSCLLREQGLKKYLAKKLNK

SEQ ID NO: 38328 - protein, 231 aa, Franconibacter pulveris
  misc_feature (1)..(231): tr|A0A0J8VRZ4|A0A0J8VRZ4_9ENTR 7-cyano-7-deazaguanine s ynthase OS=Franconibacter pulveris OX=435910 GN=queC PE =3 SV=1
MKRAVVVFSGGQDSTTCLIQALQQYDEVHCVTFDYGQRHRAEIDIARELASRLGARAHKVLDVTLLNELAVSSLTRDSIPVPDYDPQASGIPSTFVPGRNILFLTLAAIYAYQVQAEAVITGVCETDFSGYPDCRDEFVKALNHAVSLGMARDVRFETPLMWLDKAETWALADYWGKLELVRHDTLTCYNGIKGEGCGECAACNLRANGLNRYLGDKAGIMAALKQKTGLR

SEQ ID NO: 38329 - protein, 236 aa, Frankia casuarinae
  misc_feature (1)..(236): sp|Q2J7K8|QUEC_FRACC 7-cyano-7-deazaguanine synthase OS =Frankia casuarinae (strain DSM 45818 / CECT 9043 / CcI 3) OX=106370 GN=queC PE=3 SV=1
MNPTRGAVGGTDPRPAAVVLLSGGLDSATVLAIANQQGFACHALSFRYGQRHEVELAAARRVASALGVVRHVVVDIDLGVFGGSALTDPTIAVPAAGTAEEIPVTYVPARNTIFLSFGLALAETAGAWDVFIGASSVDYSGYPDCRPEYLAAYQAMANLATKATVSGERTLSVHAPLMHLSKADTIRLGLSLGVDYGLTHSCYDPGPDGRPCGRCDSCSLRERGFTEVGVPDPAGG

SEQ ID NO: 38330 - protein, 194 aa, Frankia casuarinae
  misc_feature (1)..(194): tr|A0A1X1PXZ3|A0A1X1PXZ3_FRACC 7-cyano-7-deazaguanine s ynthase (Fragment) OS=Frankia casuarinae (strain DSM 45 818 / CECT 9043 / CcI3) OX=106370 GN=UK99_08875 PE=3 SV =1
MNPTRGAVGGTDPRPAAVVLLSGGLDSATVLAIANQQGFACHALSFRYGQRHEVELAAARRVASALGVVRHVVVDIDLGVFGGSALTDPTIAVPAAGTAEEIPVTYVPARNTIFLSFGLALAETAGAWDVFIGASSVDYSGYPDCRPEYLAAYQAMANLATKATVSGERTLSVHAPLMHLSKADTIRLGLSLGV

SEQ ID NO: 38331 - protein, 233 aa, Frankia sp.
  misc_feature (1)..(233): tr|A0A0N8HCH1|A0A0N8HCH1_9ACTN 7-cyano-7-deazaguanine s ynthase OS=Frankia sp. R43 OX=269536 GN=queC PE=3 SV=1
MPRDLVLLSGGLDSSTLLAERAKENTARLALSVDYGQRHARELRAAAEVAAHYAVPHLVLDLTAWGSLLVGSALTDPAVGVPNGHYAAESMRATVVPNRNATLLMAAAGVALAHGCDRVLTAVHTGDHPIYPDCRPEFIAAASEATQRGTDSAVTVEAPYVHTSKADIARIAGLVGLPVALTWSCYEGGERHCGRCGTCVERAEALHLAGVLDPTEYADPNFWRSAVGAAEGR

SEQ ID NO: 38332 - protein, 238 aa, Frankia sp.
  misc_feature (1)..(238): tr|A0A062WR29|A0A062WR29_9ACTN 7-cyano-7-deazaguanine s ynthase OS=Frankia sp. BMG5.23 OX=683305 GN=queC PE=3 S V=1
MTVNPTRGAVGGTDPRPAAVVLLSGGLDSATVLAIANQQGFACHALSFRYGQRHEVELAAARRVASALGVVRHVVVDIDLGVFGGSALTDPTIAVPAAGTAEEIPVTYVPARNTIFLSFGLALAETAGAWDVFIGASSVDYSGYPDCRPEYLAAYQAMANLATKATVSGERTLSIHAPLMRLSKADTIRLGLSLGVDYGLTHSCYDPGPDGRPCGRCDSCSLRERGFTEVGVPDPAGG

SEQ ID NO: 38333 - protein, 227 aa, Frateuria aurantia
  misc_feature (1)..(227): tr|H8L143|H8L143_FRAAD 7-cyano-7-deazaguanine synthase OS=Frateuria aurantia (strain ATCC 33424 / DSM 6220 / N BRC 3245 / NCIMB 13370) OX=767434 GN=queC PE=3 SV=1
MNDIRADKKAVILVSGGMDSAVTIALAREQGYRVYALSVAYGQRHSSELEASARVARDLGAEVHKTVHVDLRSIGGSALTDDIGVPEQADDGIPVTYVPARNTIMLSIALGWAEVLGAREIWCGVNAVDYSGYPDCRPAFVESFQQLANVATKAGVEGLGLSVKAPLMAMSKADIAREGQRLGVDFATTVSCYQADEEGRACGRCDACRLRAQGFHDAGLPDPTRYR

SEQ ID NO: 38334 - protein, 229 aa, Frateuria sp.
  misc_feature (1)..(229): tr|A0A0Q9PDB6|A0A0Q9PDB6_9GAMM 7-cyano-7-deazaguanine s ynthase OS=Frateuria sp. Soil773 OX=1736407 GN=queC PE= 3 SV=1
MSDTSPRKAVVLVSGGMDSAVTIAIAREQGYQVHALSVAYGQRHNSELEAAARVADMLGAAEHKTVHVDLRSIGGSALTADIDVPLDAGQDEGAIPVTYVPARNTIMLSIALGWAEVLGSADIWCGVNAVDYSGYPDCRPAFVEAFGQLANVATKAGVEGAGIRIHAPLMQMSKADIAREGQRLGIDFAATVSCYQADAQGRACGHCDACRLRAQGFREAGLADPTRYA

SEQ ID NO: 38335 - protein, 201 aa, Frateuria sp.
  misc_feature (1)..(201): tr|A0A0Q9QCE0|A0A0Q9QCE0_9GAMM 7-cyano-7-deazaguanine s ynthase OS=Frateuria sp. Soil773 OX=1736407 GN=ASG87_12 985 PE=3 SV=1
MKTALLLSGGMDSIALAWWKRPELAFTVDYGQLAATAEISASAAICSALDIPHTVLRFDAKALGSGDMAGTAADPNAPASDWWPYRNQLLVTLVAMKAVATGVQRLWLGTVASDGIHKDGTPEFFENINRLLSHQEGGIVVEAPAIGLRTVDLIRQSDIPRSMLAWAHSCHKADVPCCNCRGCNKHFETLQELDTDVATGD

SEQ ID NO: 38336 - protein, 226 aa, Frateuria terrea
  misc_feature (1)..(226): tr|A0A1H6YQ06|A0A1H6YQ06_9GAMM 7-cyano-7-deazaguanine s ynthase OS=Frateuria terrea OX=529704 GN=queC PE=3 SV=1
MSQTPSRKAVVLVSGGMDSAVTLAIAREQGFAIHALSVAYGQRHGSELEAAARVARTLGALEHKTVQVDLRSIGGSALTADIDVPEQGGAGIPVTYVPARNTIMLSIALGWAEVLGASDIFCGVNAVDYSGYPDCRPAFIDAFEQLANVATKAGVEGAGLRIHAPLMRMSKADIAREGQRLGVDFAQTVSCYQADAQGRACGHCDACHLRAEGFRAAGLPDPTHYA

SEQ ID NO: 38337 - protein, 219 aa, Frederiksenia canicola
  misc_feature (1)..(219): tr|A0A3N4WG50|A0A3N4WG50_9PAST 7-cyano-7-deazaguanine s ynthase OS=Frederiksenia canicola OX=123824 GN=queC PE= 3 SV=1
MTNQAKAAVIFSGGQDSTTCLFLAIQEFGRENVEVVTFQYGQRHAIELDKAKWIADDLGVKQTLIDTSVIKAITTNALMDAQAEIEQNGSTPNTFVDGRNALFLLYTAIYSKSQGIQTIFTGVCETDFSGYPDCRDVFVKSMNVTLNLAMDYNFNIRTPLMYLTKKETWKLADDLGAFDYIRQHTHTCYLGVEGGCHRCPSCVLREKGLNEYLAERENV

SEQ ID NO: 38338 - protein, 249 aa, Fremyella diplosiphon
  misc_feature (1)..(249): tr|A0A1Z4MKM2|A0A1Z4MKM2_MICDP 7-cyano-7-deazaguanine s ynthase OS=Fremyella diplosiphon NIES-3275 OX=1973485 G N=queC PE=3 SV=1
MRSPTGVQRLKQSDLAIENLKIKSTMKAVILLSGGLDSSTILYQAKADGYECHALSFDYQQRHQRELESARLVAQKAGVAKHQVVNFDLRQWGGSALTDSSIDLPEERSLDEMSQSIPVTYVPARNTIFLSFALAYAEAIAAERVYIGVNALDYSGYPDCRPDYIQAMQEVFRLGTKQGREGEPITIAAPLINLKKTEIIQLGNQLGVPWELTWSCYAGADIACGVCDSCRLRLAAFAELGLKDPVAYV

SEQ ID NO: 38339 - protein, 221 aa, Frischella perrara
  misc_feature (1)..(221): tr|A0A0A7RZ70|A0A0A7RZ70_FRIPE 7-cyano-7-deazaguanine s ynthase OS=Frischella perrara OX=1267021 GN=queC PE=3 S V=1
MQKINKALVIFSGGQDSTTCLIQAINRYGVENVETISFNYGQRHAIELEKAKFIAEDLGVLHTIVDTSVIKQTTHNALIDSTMAVEFAKDSQSYPNTFVDGRNALFLLLAGCYAKSRGIKDIITGVCETDFSGYPDCRDVFIKSMNVTMNLAMDYAFNIITPLMYLTKAETWALADELGCLDYIRQYTHTCYNGVEKGCGECPSCVLREKGLNEYLTNKKC

SEQ ID NO: 38340 - protein, 230 aa, Fuerstia marisgermanicae
  misc_feature (1)..(230): tr|A0A1P8WNK5|A0A1P8WNK5_9PLAN 7-cyano-7-deazaguanine s ynthase OS=Fuerstia marisgermanicae OX=1891926 GN=queC PE=3 SV=1
MSSRKKAVVLISGGLDSATIMAFARSEGYELHGISFDYGQRHHFELQAAEKVCAANNVASHVVFPVDTAIFRGSALTNDIDVPHNRSDDEMSGSIPVTYVPARNTIFLSIALGLAESLGAHDLFIGVNAVDYSGYPDCRPEFVAAFEAMANLATKAGVEGQKIKVHAPLITMTKAQIIQRGVELGVDYSLTHSCYDPSPDGISCGECDSCLLRLKGFADAGAIDPIAYQN

SEQ ID NO: 38341 - protein, 232 aa, Fulvimarina manganoxydans
  misc_feature (1)..(232): tr|A0A1W2AD39|A0A1W2AD39_9RHIZ 7-cyano-7-deazaguanine s ynthase OS=Fulvimarina manganoxydans OX=937218 GN=queC PE=3 SV=1
MNTALVCSGGLDSVSLAHILASKGTLARIVSFDYGQRHRKELEFARAAAERLDVPFHLVDLSGLGAALTGSALTDEIDVPDGHYAEETMRVTVVPNRNAIMLTIGFAIAAAQGDEAVAAAVHGGDHFIYPDCRPAFTDAFAAMQRAALDGYANVALHVPFVHRTKADIVLEGARLGTPFAETWSCYKGGDRHCGRCGTCVERREAFHLAGVDDPTAYEDPDYWRSALKAHGS

SEQ ID NO: 38342 - protein, 239 aa, Fulvimarina sp.
  misc_feature (1)..(239): tr|A0A2E1HA83|A0A2E1HA83_9RHIZ 7-cyano-7-deazaguanine s ynthase OS=Fulvimarina sp. OX=1969479 GN=queC PE=3 SV=1
MTADDSALVLFSGGQDSTTCLAVALERFARVETIGFDYGQRHRVELDVRPRILAALRASFPHWAERLGPDHMIDMGVLGQISDTALTGDAAIAMQDDGLPNTFVPGRNLLFLGFAGALAYRRGLKHILTGVCETDYSGYPDCRDDTIKAMQLALNLGMEARFVVDTPLMFIDKAATFALAETLGGEALVDLVVEETHSCYEGDRTHRHPFGYGCGTCPACELRAKGFERYRAAKAAGAG

SEQ ID NO: 38343 - protein, 246 aa, Fulvimarina sp.
  misc_feature (1)..(246): tr|A0A371WYI5|A0A371WYI5_9RHIZ 7-cyano-7-deazaguanine s ynthase OS=Fulvimarina sp. 85 OX=2293836 GN=queC PE=3 S V=1
MTSSEGALVLFSGGQDSTTSLAWALDRFSRVETIGFNYGQRHAIELAVRPLVRDRLSAAFPHWAERLGEDHLLDMGLLGQISETALTGEMEIAMQENGLPNTFVPGRNLVFLAFAATIAYRRGLKHIVTGVCETDYSGYPDCRDDTMKAMQLALNLGMEARYVIETPLMFIDKAETWEMAERLGGEALVDLVREETHTCYHGDRDHRHAWGYGCGACPACDLRARGYEAYLDRRARGTGDTKAGPT

SEQ ID NO: 38344 - protein, 227 aa, Fulvimonas soli
  misc_feature (1)..(227): tr|A0A316I6P2|A0A316I6P2_9GAMM 7-cyano-7-deazaguanine s ynthase OS=Fulvimonas soli OX=155197 GN=queC PE=3 SV=1
MSETSPRKAVVLVSGGMDSAVTIAIAREQGYAVHALSVAYGQRHDSELDAAARVARMLGAAEHKTVRVDLRSIGGSALTADIDVPLDGAGQGIPVTYVPARNTIMLSIALGWAEVLGSADIWCGVNAVDYSGYPDCRPAFVEAFERLANVATKAGVEGAGIRIHAPLMRMSKADIAREGARLGVDFAATVSCYQADAEGRACGHCDACRLRAEGFRAAGLPDPTRYA

SEQ ID NO: 38345 - protein, 221 aa, Fusibacter sp.
  misc_feature (1)..(221): tr|A0A1B6BAH1|A0A1B6BAH1_9FIRM 7-cyano-7-deazaguanine s ynthase OS=Fusibacter sp. 3D3 OX=1048380 GN=queC PE=3 S V=1
MNEKLKRKAVVVFSGGQDSTTCLFWALKAYDEVIAISFDYGQKHIFELTCAEKICKNNNVEFHVLDMSLLNQLAPNSLTRRDIEVCKEKPEGELPNSFVDGRNLIFLTFAAVFAKQRDIHHIITGVSQSDFSGYPDCRDVFIKSTHVTLNLAMDYPFVIHTPLMWLDKAQTWKMAYDLGVLETIKNETLTCYNGIIGEGCGACPSCELRNKGYREFEANYL

SEQ ID NO: 38346 - protein, 284 aa, Fusibacter sp.
  misc_feature (1)..(284): tr|A0A1B6BER3|A0A1B6BER3_9FIRM ATP-utilizing enzyme of the PP-loop superfamily OS=Fusibacter sp. 3D3 OX=104838 0 GN=F3D3_2779 PE=4 SV=1
MNIEESTMNINQAIEKLRKVEPKFEILCKTLEETPSIVVAFSGGVDSTFLVAVASVVARRVMALTVRSPYIATWEIEEAVDLTKVLNLEHHILEATIPETIKYNPSDRCYLCKREIFSKIKKIAEKAHYNTVCDGSNYDDLGDYRPGMRALKELEIKSPLLECQVTKAEIRSWSKTLGLETWDKPPYACLLTRMPYDTLVEPEALKMIEKAEAFIIDMGIRAIRVRKHNDLARIEVDAKEMSKMLNLKVISKVVEALKSYGFNYVTLDLAGYKMGSFNDTLEKE

SEQ ID NO: 38347 - protein, 225 aa, Fusobacteriia bacterium
  misc_feature (1)..(225): tr|A0A1W9W0P6|A0A1W9W0P6_9BACT 7-cyano-7-deazaguanine s ynthase OS=Fusobacteriia bacterium 4572_74 OX=1972457 G N=queC PE=3 SV=1
MKDKINKNSCVLVFSGGQDSTTLLFRAKKLYKEVIAISFDYGQKHSLELECAKELCKKNEVEHHILDMGLLNQLAPNSLTRSDLEVAKGEVTKGEVPNTFVDGRNMIFLTFAGIFAKQRDINIIMTGVSQSDFSGYPDCRDVFIKSLNTTLNLAMDYTFVLETPLMWLDKAETWNMAYELGVLDIIKNETLTCYNGIVGNGCGECPACTLRKNGYLEFKEKFLKL

SEQ ID NO: 38348 - protein, 223 aa, Fusobacteriia bacterium
  misc_feature (1)..(223): tr|A0A1W9TLM2|A0A1W9TLM2_9BACT 7-cyano-7-deazaguanine s ynthase OS=Fusobacteriia bacterium 4572_132 OX=1971640 GN=queC PE=3 SV=1
MNKKAVILLSGGLDSTTAVYLAKSRGYEVYTLAFDYGQRHDKELNLAKEISKKVGAKEHKVVKLNMNAWGGSALTDENIEVPDFAGEGEIPVTYVPARNMIFLSIAASYAEALGAQSIFIGVSEVDYSGYVDCRQEFLEAMEVAINKGTVMGAEKGKKIKIEAPFIDMTKTEEIELGIKLGVNYGMTWSCYKGGEKACGVCDSCQLRLNAFKKAGLEDPIEYE

SEQ ID NO: 38349 - protein, 231 aa, Fusobacterium equinum
  misc_feature (1)..(231): tr|A0A133N8A3|A0A133N8A3_9FUSO 7-cyano-7-deazaguanine s ynthase OS=Fusobacterium equinum OX=134605 GN=queC PE=3 SV=1
MKVLVLLSGGLDSTTCLAIAVDKYGADQVVALSASYGQKHTKEILSARAIAKYYQVELLELNLSKIFSYSNCSLLSHSTEEVPHHSYAEQLNQQEEEILSTYVPFRNGLFLSTAASIALSKECSIILYGAHSDDAAGNAYPDCSPAFNEAMNTAIYEGSGRQVKVEAPFIGLHKKDIVKLGLTLQVPYELTWSCYEGKEHSCGECGTCIDREKAFEENGTIDPLVKIRGGK

SEQ ID NO: 38350 - protein, 435 aa, Fusobacterium equinum
  misc_feature (1)..(435): tr|A0A133NK34|A0A133NK34_9FUSO Uncharacterized protein OS=Fusobacterium equinum OX=134605 GN=HMPREF3206_00401 PE=4 SV=1
MLRNNGGIKMRIFCSNDRKSNLPEGYDEHIDIKCRSDIGFNFWDKDFKFDGEFSSLAIDLLYISIFVFVMDRKVLRNKQNDNWSRTFELNIPVWDVEFWNSQKDLLHDMVSFLSGDSWQFTFRKKEILDENDYYKSSKYKKAETKSYDTVCMLSGGLDSYIGAIDLLEKRKNKILFVSHYGGGKGTKEYQDMVFESLKKEYLLEDRDYIQFYATCKNGMEDTTRTRSFMFFSHAIALASAFNTDTEMYIPENGFISLNIPLTGARFGSSSTRTTHPYYMKMLRRLIKNMKLEISILNPYQLKTKGEMVSECKNLSLLKANYINTMSCSHPDVGRYEKESEPMHCGSCIPCIIRRAAIFKGLGVDETKFRDNKLNKTETAKLNKSAFLQKLRRFNENSAILEIQKSGTIEENLDEISEMYCRGMVEIEKFFKEVIR

SEQ ID NO: 38351 - protein, 231 aa, Fusobacterium gonidiaformans; identical to SEQ ID NO: 38349
  misc_feature (1)..(231): tr|E5BED7|E5BED7_9FUSO 7-cyano-7-deazaguanine synthase OS=Fusobacterium gonidiaformans 3-1-5R OX=469605 GN=que C PE=3 SV=1

SEQ ID NO: 38352 - protein, 232 aa, Fusobacterium mortiferum
  misc_feature (1)..(232): tr|C3WEG0|C3WEG0_FUSMR 7-cyano-7-deazaguanine synthase OS=Fusobacterium mortiferum ATCC 9817 OX=469616 GN=queC PE=3 SV=1
MRVLVLLSGGVDSSTCLAMAVDRYGKDNVVALSASYGQKHTKELESARKIASYYQIELIEINLGKIFSFSNCSLLSHSDKEIPQGSYDEQLRNIDGEKLSTYVPFRNGLFLSTAASIALSKNCQVIYYGAHSDDSAGDAYPDCSPEFNEAMNRAIYLGSGKELKIEAPFVNMHKSDIVKKGLELNLPYELTWSCYEGGEYPCGKCGTCIDREKAFEINNSIDPLVKLRKGDK

SEQ ID NO: 38353 - protein, 232 aa, Fusobacterium mortiferum; identical to SEQ ID NO: 38352
  misc_feature (1)..(232): tr|A0A414PUU9|A0A414PUU9_FUSMR 7-cyano-7-deazaguanine s ynthase OS=Fusobacterium mortiferum OX=850 GN=queC PE=3 SV=1

SEQ ID NO: 38354 - protein, 232 aa, Fusobacterium necrogenes
  misc_feature (1)..(232): tr|A0A377GWP5|A0A377GWP5_9FUSO 7-cyano-7-deazaguanine s ynthase OS=Fusobacterium necrogenes OX=858 GN=queC PE=3 SV=1
MRVLVLLSGGVDSSTCLAMAVDRYGKDNVVALSASYGQKHTKELESARKIADYYQVELIEINLGKIFSFSNCSLLSHSDKEIPQGSYDEQLKNIDGEKLSTYVPFRNGLFLSTAASIALSKNCQVIYYGAHSDDSVGDAYPDCSPEFNEAMNRAIYLGSGKELKIEAPFVNMHKSDIVKKGLELNLPYELTWSCYEGGEYPCGKCGTCIDREKAFEINNSIDPLVKLRKGDK

SEQ ID NO: 38355 - protein, 231 aa, Fusobacterium necrophorum
  misc_feature (1)..(231): tr|A0A0E2UZY8|A0A0E2UZY8_9FUSO 7-cyano-7-deazaguanine s ynthase OS=Fusobacterium necrophorum DJ-2 OX=1441737 GN =queC PE=3 SV=1
MKVLVLLSGGIDSTTCLAMAIEKYGVEQVVALSAFYGQKHNKELQAARNIANYYRVELIELNLSKIFAYSNSSLLKHSGKEIPHCSYVEQLAERKEKTLSTYIPFRNGLFLSTAASIAISKNCSIIFYGAHSDDAAGNAYPDCSPAFHEAMNTAIYEGSGRQVRVEAPFLKLHKKEIVKLGLDLKLPYELTWSCYEGGEYPCGQCGTCIDREKAFEENGHIDPLVIGRGGN

SEQ ID NO: 38356 - protein, 231 aa, Fusobacterium necrophorum
  misc_feature (1)..(231): tr|A0A017H4E0|A0A017H4E0_9FUSO 7-cyano-7-deazaguanine s ynthase OS=Fusobacterium necrophorum subsp. funduliform e B35 OX=1226633 GN=queC PE=3 SV=1
MKVLVLLSGGIDSTTCLAMAIEKYGVEQVVALSAFYGQKHNKELQAARNIANYYRVELIELNLSKIFAYSNSSLLEHSGKEIPHCSYVEQLAERKEKTLSTYIPFRNGLFLSTAASIAISKNCSIIFYGAHSDDAAGNAYPDCSPAFHEAMNTAIYEGSGRQVRVEAPFLKLHKKEIVKLGLDLKLPYELTWSCYEGGEYPCGQCGTCIDREKAFEENGHIDPLVIGRGGN

SEQ ID NO: 38357 - protein, 229 aa, Fusobacterium nucleatum
  misc_feature (1)..(229): tr|A0A2B7YH53|A0A2B7YH53_FUSNP 7-cyano-7-deazaguanine s ynthase OS=Fusobacterium nucleatum subsp. polymorphum O X=76857 GN=queC PE=3 SV=1
MKALVLSSGGIDSTTCLALAIKKYGVNNVISVSIDYGQKHNKELICAEEIGRFYRIKHITLNLKEIFKYSNNALMQDSTKEVPKDSYAEQLRKTEIVDTYVPFRNGLFLSAISSLALAINNNERTDIYIGVHLDDAAGRAYADCTKEFIETISKAISLGTYEKIKIITPFVYSNKAEIVKVGLNLKAPYHLTWSCYQGGEKQCGECATCIDRKNAFKINEAIDPVRYKR

SEQ ID NO: 38358 - protein, 44 aa, Fusobacterium nucleatum
  misc_feature (1)..(44): tr|F9EQA4|F9EQA4_FUSNU ThiI family protein OS=Fusobacte rium nucleatum subsp. animalis ATCC 51191 OX=997347 GN= HMPREF9094_2109 PE=4 SV=1
MEKIKALALFSGGLDSALAIKVVQEQGIEVIALNFVSHFFWWKK

SEQ ID NO: 38359 - protein, 229 aa, Fusobacterium periodonticum
  misc_feature (1)..(229): tr|A0A2D3P4A4|A0A2D3P4A4_9FUSO 7-cyano-7-deazaguanine s ynthase OS=Fusobacterium periodonticum OX=860 GN=queC P E=3 SV=1
MKALVLSSGGIDSTTCLALAIKKYGVNNVISVSVDYGQKHNKELICAEEIAKFYGIKHITLNLKEIFKYSNNALMQNSTKEIPKDSYAEQLKETEIVDTYVPFRNGLFLSAISSLALAINNNEKAEIYIGVHLDDAAGRAYADCTKEFIETISKAISLGTYEKIKIITPFVYSNKAEIVRVGLNLKAPYHLTWSCYQGGERQCGECATCIDRKEAFKKNEAIDPVAYKR

SEQ ID NO: 38360 - protein, 222 aa, Fusobacterium sp.
  misc_feature (1)..(222): tr|R7LU43|R7LU43_9FUSO 7-cyano-7-deazaguanine synthase OS=Fusobacterium sp. CAG:815 OX=1262901 GN=queC PE=3 SV =1
MTKSIILLSGGLDSLVSLGLKREELNITLALTFDYGQKSAIKEIEASRKICEYYNVEHKVIKLDWLKQITNTSLVSEQIVPTGKALDNPEKSAKSVWVPNRNGLFLNIAASFADSQDYDYILIGANREEGQTFPDNTQDFIDSLNKEFEYSTQKKPKVVAPLINYVKNDIVMLALQYKIPLELTQSCYQDSAKHCGICESCTRLRHALEANHDTHYIKLLFG

SEQ ID NO: 38361 - protein, 348 aa, Fusobacterium sp.
  misc_feature (1)..(348): tr|W3Z514|W3Z514_9FUSO Queuosine biosynthesis protein Q ueC-like protein OS=Fusobacterium sp. CM21 OX=936562 GN =HMPREF1497_1567 PE=4 SV=1
MMISKKICKICLKPLPTDKHGNLLNTGNICHECLRKQKNINKIDWNRKKEEFENIINSIKNKHNFDALVMLSGGKDSVYVAYLLSKIYKLKVIGITIDNGFEYASTFENSSKIAEKLGISHFIYRLPENDMKEYYKVLIGNKELKMNDGSQLCFFCGRMLKSFSVDIAKRLDVGVVASGHTLEQVRALGNEQGNDRSFEIRMRYIQNYEKNKYLKLEKILKDNNLEYIHYLIKDNIDNNKFNNFIYPLSYFEYKPLEIVDLLKRELEWEPDSNFTRKYISSGCKLAKVMEYIANKNGVETYVEKEFSDQIRRGSMSKEEVQEIKKSQIRDQKIILELINRLNLSIDTI

SEQ ID NO: 38362 - protein, 222 aa, Gallaecimonas pentaromativorans
  misc_feature (1)..(222): tr|A0A3N1PPX3|A0A3N1PPX3_9GAMM 7-cyano-7-deazaguanine s ynthase OS=Gallaecimonas pentaromativorans OX=584787 GN =queC PE=3 SV=1
MSKVVVIYSGGMDSFTLLHKAINDGHEVHALSFNYGQRHVKELQVAAKVTAALGIAHEVVDISAIQSLIANSALTSDIAMPEGHYHEDNMKQTVVPNRNMILLSLAIGKAVSIGADKVYYGAHGGDHAIYPDCRPEFVNAMNAVSQVANYEPVSIETPYLLATKGEILTDGLKMGLSYENTWTCYQGGEAACGRCGACQERLEAFRENHLEDPLPYLTREML

SEQ ID NO: 38363 - protein, 222 aa, Gallaecimonas xiamenensis
  misc_feature (1)..(222): tr|K2JU48|K2JU48_9GAMM 7-cyano-7-deazaguanine synthase OS=Gallaecimonas xiamenensis 3-C-1 OX=745411 GN=queC PE =3 SV=1
MSKVVVIYSGGMDSFTLLHKAIKDGHEVHALSFNYGQRHVKELQVAAKVTAELGIAHEVVDISAIQSLIANSALTSDIAMPEGHYQENNMKQTVVPNRNMILLSLAIGKAVSIGADKVYYGAHGGDHAIYPDCRPEFVKAMNAVSQVANYEPVSIESPYLMATKGEILTDGLKMGLSYEQTWTCYQGGEAACGRCGACQERLEAFRENQLEDPLPYLTREIL

SEQ ID NO: 38364 - protein, 224 aa, Gallibacterium anatis
  misc_feature (1)..(224): tr|A0A0A2YYA6|A0A0A2YYA6_9PAST 7-cyano-7-deazaguanine s ynthase OS=Gallibacterium anatis OX=750 GN=queC PE=3 SV =1
MQNKKAIVIFSGGQDSTTCLLQALQTYGDGNVEAITFHYGQRHSIELEKSRWIADDLGVKQTIFDLSLMKSITHNALMDSNETIQQKQGKLPNTFVDGRNALFLLYAAIYAKGQGISDIITGVCETDFSGYPDCRDVFIKSMNVTLNLAMDYSFNIITPLMWLTKKETWALADQLGRLEYVMQHTHTCYEGVEGGCHHCPSCLLREKGLNEYLAGKEAKNVESR

SEQ ID NO: 38365 - protein, 224 aa, Gallibacterium anatis
  misc_feature (1)..(224): tr|A0A0A2YTM0|A0A0A2YTM0_9PAST 7-cyano-7-deazaguanine s ynthase OS=Gallibacterium anatis OX=750 GN=queC PE=3 SV =1
MQNKKAIVIFSGGQDSTTCLLQALQTYGNGNVEAITFHYGQRHNIELEKSRWIADDLGVKQTILDLSLMQSITHNALMDSNETIQQKQGKLPNTFVDGRNALFLLYAAIYAKGQGISDIITGVCETDFSGYPDCRDVFIKSMNVTLNLAMDYRFNIITPLMWLTKKETWALADQLGRLEYVMQHTHTCYEGVEGGCHHCPSCLLREKGLNEYLAGKEAKNVESR

SEQ ID NO: 38366 - protein, 224 aa, Gallibacterium genomosp.
  misc_feature (1)..(224): tr|A0A1A7P5E7|A0A1A7P5E7_9PAST 7-cyano-7-deazaguanine s ynthase OS=Gallibacterium genomosp. 1 OX=155515 GN=queC PE=3 SV=1
MQNKKAIVIFSGGQDSTTCLLQALQTYGNGNVEAITFHYGQRHSIELDKSRWIANDLGVKQTILDLSLMQSITHNALMDNNETIQQKQGELPNTFVDGRNALFLLYAAIYAKGQGISDIITGVCETDFSGYPDCRDVFIKSMNVTLNLAMDYSFNIITPLMWLTKKETWALADQLGRLEYVMQHTHTCYEGVEGGCHHCPSCLLREKGLNEYLAEKEAKNVESR

SEQ ID NO: 38367 - protein, 221 aa, Gallibacterium genomosp.
  misc_feature (1)..(221): tr|A0A1A7Q0M9|A0A1A7Q0M9_9PAST 7-cyano-7-deazaguanine s ynthase OS=Gallibacterium genomosp. 3 OX=505345 GN=queC PE=3 SV=1
MQNKKAVVIFSGGQDSTTCLLQALQTYGKDNVETITFQYGQRHHIELEKARWIANDLGVKQTIIDTSVITAITHNALLDAEQTISQKQGELPNTFVDGRNALFLLYAAIYAKSQGISDIITGVCETDFSGYPDCRDIFIKSMNVTLNLAMDYQFNLITPLMWLTKKETWALADQLGKLDYVLQHTHTCYEGVEGGCHHCPSCLLREKGLNEYLASKGQSDV

SEQ ID NO: 38368 - protein, 218 aa, Gallibacterium salpingitidis
  misc_feature (1)..(218): tr|A0A1A7P1T5|A0A1A7P1T5_9PAST 7-cyano-7-deazaguanine s ynthase OS=Gallibacterium salpingitidis OX=505341 GN=qu eC PE=3 SV=1
MQNKKAVVIFSGGQDSTTCLLQALQTYGNGNVEAITFKYGQRHSIELEKAQWIANDLGVKQTIIDTSVITSITHNALLDSQQTIEQQQGELPNTFVDGRNALFLLYAAIYAKGQGISDIITGVCETDFSGYPDCRDIFIKSMNVTLNLAMDYHFNLITPLMWLTKKETWALADQLGKLDYVIQHTHTCYEGVEGGCHQCPSCLLREKGLKEYLASKKQ

SEQ ID NO: 38369 - protein, 216 aa, Gallibacterium salpingitidis
  misc_feature (1)..(216): tr|A0A1A7Q708|A0A1A7Q708_9PAST 7-cyano-7-deazaguanine s ynthase OS=Gallibacterium salpingitidis OX=505341 GN=qu eC PE=3 SV=1
MQNKKAVVIFSGGQDSTTCLLQALQTYGNGNVEAITFKYGQRHSIELEKAQWIANDLGVKQTIIDTSVITSITHNALLDSQQTIEQQQGELPNTFVDGRNALFLLYAAIYAKGQGISDIITGVCETDFSGYPDCRDIFIKSMNVTLNLAMDYHFNLITPLMWLTKKETWALADQLGKLDYVIQHTHTCYEGVEGGCHQCPSCLLREKGLKEYLASK

SEQ ID NO: 38370 - protein, 225 aa, Gallionella capsiferriformans
  misc_feature (1)..(225): tr|D9SCJ6|D9SCJ6_GALCS 7-cyano-7-deazaguanine synthase OS=Gallionella capsiferriformans (strain ES-2) OX=39549 4 GN=queC PE=3 SV=1
MKNAVVLLSGGLDSATVLAMARAQGYTCYALSVDYGQRHHSELAAAQRVAETLGAREHRVVNIDLTGFGGSALTDNNIAVPEHASAGIPLTYVPARNTIMLSLALAWAEVLRAQDIFIGVNAVDYSGYPDCRPAYIEAFERMANLATQAAVEGHPLTLHAPLLHLSKADIIKSGSLLSVDYAATVSCYQADDLGRACGVCDSCRLRSAGFAAAGVSDPTRYRKLN

SEQ ID NO: 38371 - protein, 225 aa, Gallionella sp.
  misc_feature (1)..(225): tr|A0A3D2HAH6|A0A3D2HAH6_9PROT 7-cyano-7-deazaguanine s ynthase OS=Gallionella sp. OX=2052161 GN=queC PE=3 SV=1
MKNAVVLLSGGLDSATVLAMAHAQGYTCYALSVDYGQRHHSELAAAQRVAETLGAREHRVVNIDLTGFGGSALTDNNIDVPEHASAGIPLTYVPARNTIMLSLALAWAEVLRAQDIFIGVNAVDYSGYPDCRPAYIDAFERMANLATQAAVEGHPLTLHAPLLHLSKAEIIQKGSSLGVDYAATVSCYQADDLGQACGVCDSCRLRSAGFSAAGVSDPTRYRKIN

SEQ ID NO: 38372 - protein, 232 aa, Gallionella sp.
  misc_feature (1)..(232): tr|A0A3D2NR61|A0A3D2NR61_9PROT 7-cyano-7-deazaguanine s ynthase OS=Gallionella sp. OX=2052161 GN=queC PE=3 SV=1
MKNAVVLLSGGLDSATVLAMARAEGYVCYALSVDYGQRHHSELDAAQRVARTLGAHEHRVINIDLTAFGGSALTDNNIAVPQHESAGIPLTYVPARNTIMLSLALAWAEVLHAQDIFIGVNAVDYSGYPDCRPAFIEAFERMGNLATQAAIEGHPLTLHAPLLHLSKAEIIRQGNKLGVDYAATVSCYQADAQGRACGLCDSCRLRRAGFEAAGIVDPTRYRNAPDSFNNPV

SEQ ID NO: 38373 - protein, 224 aa, Gallionellaceae bacterium
  misc_feature (1)..(224): tr|A0A1J4TEI4|A0A1J4TEI4_9PROT 7-cyano-7-deazaguanine s ynthase OS=Gallionellaceae bacterium CG1_02_60_325 OX=1 805162 GN=queC PE=3 SV=1
MKRAVVLLSGGLDSATVLAMAGAQGFQCRALSVDYGQRHHAELAAAQRVARALGVHEHRVINIDLAAFGGSALTDANIAVPEQETSGIPLTYVPARNTIMLSLALAWAEVLQARDIFIGVNAVDYSGYPDCRPAFIAAFEQMANLATKAAAEGKQLKLHAPLMDMSKAEIIRQGTQLGVDYAQTVSCYQADEQGQACGRCDSCRLRREGFRAAGIPDPTAYRAV

SEQ ID NO: 38374 - protein, 224 aa, Gallionellaceae bacterium
  misc_feature (1)..(224): tr|A0A521QEN5|A0A521QEN5_9PROT 7-cyano-7-deazaguanine s ynthase OS=Gallionellaceae bacterium OX=2052162 GN=queC PE=3 SV=1
MKNAVVLLSGGLDSATVLAMARQQGYACHALSVDYGQRHHAELAAAQRVAKTLGATEHRNISIDLTAFGGSALTDSNIAVPEQLSTGIPLTYVPARNTIMLSLALAWAEVLQAQDIFFGVNAVDYSGYPDCRPEYVEAFERMANLATKAAVEGKPLTLHAPLLHLSKAEIIQQGIKLGVDYSLTVSCYQADAQGRACGVCDSCRLRRAGFELAGIPDSTRYRNA

SEQ ID NO: 38375 - protein, 225 aa, Gallionellales bacterium
  misc_feature (1)..(225): tr|A0A1G0DVW5|A0A1G0DVW5_9PROT 7-cyano-7-deazaguanine s ynthase OS=Gallionellales bacterium RIFCSPLOWO2_02_58_1 3 OX=1798252 GN=queC PE=3 SV=1
MMKNAVVLLSGGLDSATVLAMARAQGFICYALSVDYGQRHHAELAAAQRVAQMLGAHEQRVIDIDLTGFGGSALTDNNIAVPQQPSAGIPPTYVPARNTIMLSLALAWAEVLQAQDIFIGVNAVDYSGYPDCRPAYIEAFERMANLATRAAVEGSSLAIHAPLLHLSKAEIIRQGIALGVDYAQTVSCYQADESGRACGVCDSCRLRRAGFAAAGVADQTAYRAI

SEQ ID NO: 38376 - protein, 232 aa, Gallionellales bacterium; identical to SEQ ID NO: 38372
  misc_feature (1)..(232): tr|A0A2M8DY77|A0A2M8DY77_9PROT 7-cyano-7-deazaguanine s ynthase OS=Gallionellales bacterium CG_4_9_14_0_8_um_fi lter_55_61 OX=1974015 GN=queC PE=3 SV=1

SEQ ID NO: 38377 - protein, 233 aa, Unknown
  misc_feature (1)..(233): tr|E1VPX8|E1VPX8_9GAMM 7-cyano-7-deazaguanine synthase OS=gamma proteobacterium HdN1 OX=83406 GN=exsB PE=3 SV= 1
MSNHRAAIVLLSGGLDSATCLALARQQGFDVYALSFSYGQRHSVELEASRRVAHALGATAHRIANIDLAAFGGSALTDLSIDVPVAAPNAPVDHSEEIPITYVPARNTIFLSYALAWAEVLESDDIFIGVNAVDYSGYPDCRLEFINAFETMANLATRRAVEGAKLHIHAPLMKMSKAQIIEVGVSLGVDYGATISCYQADDQGAACGACDSCRLRREGFLQAGVPDPTLYQG

SEQ ID NO: 38378 - protein, 226 aa, Unknown
  misc_feature (1)..(226): tr|A0A2T9ZYJ6|A0A2T9ZYJ6_9GAMM 7-cyano-7-deazaguanine s ynthase OS=gamma proteobacterium symbiont of Ctena orbi culata OX=1968598 GN=queC PE=3 SV=1
MSRRAVVLLSGGLDSATVLALASNQGYACHALSMAYGQRHAAELAAASRVAASLKAEAHKLVHIGLDDIGGSALTDRSIQVPEEMGNGIPVTYVPARNTVFLSLALGWAEVLDAQDIFIGVNAVDYSGYPDCRPQFIEAFQSLANLATKAADEGGTYKIHTPLINLTKAEIIRRGVELGVDYSMTVSCYQASEAGEACGVCDSCRLRAKGFEDAGIVDPTRYLNSD

SEQ ID NO: 38379 - protein, 231 aa, Gammaproteobacteria bacterium
  misc_feature (1)..(231): tr|A0A1G0GAD4|A0A1G0GAD4_9GAMM 7-cyano-7-deazaguanine s ynthase OS=Gammaproteobacteria bacterium RIFCSPHIGHO2_0 2_FULL_39_13 OX=1798270 GN=queC PE=3 SV=1
MSEKTAKAVILLSGGLDSTTCLAIAKKQGYDCYALSINYGQKQCIELAAARKIAAVFQVKKHHVVTLSIGEFGGSALTDKNMIIPAFRSSENKLTVIPTTYVPARNTIFLSVALGFAETVDADAIFIGANAVDYSGYPDCRPEYFEAFQIMANIATKSAVCGKKIKIETPILHLSKADIIALGTTLGVDYGLTISCYQANESGLACGICDACAFRKMGFEKNNMVDPTRYA

SEQ ID NO: 38380 - protein, 226 aa, Gammaproteobacteria bacterium
  misc_feature (1)..(226): tr|A0A1G0J2G4|A0A1G0J2G4_9GAMM 7-cyano-7-deazaguanine s ynthase OS=Gammaproteobacteria bacterium RIFCSPLOWO2_02 _FULL_38_11 OX=1798293 GN=queC PE=3 SV=1
MRKAIILLSGGLDSTTCLAYAKHQGFECYALSFAYGQRHVFELEAAKRIAEHYAVKKHLIFPLSVDVFQGSSLTDVSKVVPGYSGLVEIPVTYVPARNTVFLSIGLAWAEVLGAENIFIGASSIDYSHYPDCRPAFFEAFQALVRLATKEGVEEGLSFRIETPLLHLTKAQTINLGRELGVDYSMTVSCYQLNERGEACASCDSCTLRKKGFLESGVTDPTHYERK

SEQ ID NO: 38381 - protein, 232 aa, Geitlerinema sp.
  misc_feature (1)..(232): tr|K9SC87|K9SC87_9CYAN 7-cyano-7-deazaguanine synthase OS=Geitlerinema sp. PCC 7407 OX=1173025 GN=queC PE=3 SV =1
MKAVILLSGGLDSSTVIYQAKADGCDCYALSFDYRQRHRRELAAAAAIAQAAGAADHQVIRFDLRQWGGSALTDDALDLPQHRSLESMAAEVPITYVPARNMIFLSFASAYAEVLGAERVYIGVNALDYSGYPDCRPDFIEAMQEVFRLGTQQGREGKPIEIVTPLLTLRKTEIIELGDRLGVPWELTWSCYDGGEKACGVCDACQLRLAAFAELGRPDPVAYAENSEDLRG

SEQ ID NO: 38382 - protein, 240 aa, Geitlerinema sp.
  misc_feature (1)..(240): tr|K9SC01|K9SC01_9CYAN 7-cyano-7-deazaguanine synthase OS=Geitlerinema sp. PCC 7407 OX=1173025 GN=queC PE=3 SV =1
MNAPKAIVLLSGGLDSSTSAAQAIADGYELIALSLHYGQRHDRELIAAKRVAEHLGIKEHFVVDVNLAQWGGSALTDQAVDVPTDGVKPGVIPITYVPGRNTVFLAIALSLAEAKGAEAIYLGINAVDYSGYPDCRPEYLEAVQHLATLSSKTGLEGHAPKLVAPLVMDSKVDIVHRALQLGVPIHLTWSCYQGEDEPCGLCDSCRIRDRALIDAGRPDLATLVGRELYEQENRCATPVS

SEQ ID NO: 38383 - protein, 1375 aa, Gelidibacter algens
  misc_feature (1)..(1375): tr|A0A1A7R6X0|A0A1A7R6X0_9FLAO Amino acid adenylation d omain-containing protein OS=Gelidibacter algens OX=4928 0 GN=A9996_00555 PE=4 SV=1
MKLKLTASQMSLWVGQKMNPDVPLYNTAYSYEISGAIDKQIFEKAFQLLIDTTDALRIRFYEEDGIPYQEAKDKLDYNIEVIDFSSDPEFNMISDWLLNRSLKKLDLSQQVFDTVLIKKSENTYIWFMNMHHLITDGVSRKIIFDRMNKYYEALSGHHDGIQPVDSASYLDYVKSELDAASSKTHEDSYWSSKVRDIEKIHSFYGIHPKPDATEASRVFLHLGRERSQKLQLFLQRPEVKGWTAQLALFNVMSTLLFIFMYRVSGQKKLSIGAPLHNRISRKFHHTVGYFLEIFPMLTEIDDADSFKTLLQRVKLENSDNLKHALQDTVTSEISNSFNVVLNYIHTGFSNFNGFKTTSEWIYTGHIDSNHQMRCHVMVPETNGEYKIMLDLNHGTFDHELQQKVPNHLLSLLDAMLQDIEMDISVPSLVTPKEQKLLIDPDFKIVEPTTTALTYFEENALKRPNSVALQGDKQTLTYSELNKKANQLAHYLYEKKILENQKVALHFYRNPEYIIAVLAVLKLGATFIPIPSDQPSERIRFIIGNSDASLVLTESGLIKNLDIDSNRLCDITKERSEISKQPFTAIQSDLKKNDMAYILYTSGSTGKPKGVRISHSALSNYLGWAKAAYNINEKSIFPLFSSIGFDLTITSTLLPLISGGRIITYKENTFGADMSLMQVFEDNMVNTIKLTPSHLALVQEKKISSSYIHTMIIGGEDLKIALAKSMQSAFPNPLRIFNEYGPTEATIGCIVSEFDSQKHLGTSVPIGTPIANMQAYVLDSHNNIVPQGVVGELYLSGIGLAEGYVDAPEMTEAKFVANPFFKDSKMYRSGDLCRINGNGEFEYLGRTDDQVKLRGYRIELSDIESNLVNYPEIDLCAVVLIEDKTSIPEEDVVNCIECGLPSNYPNTDFNENGVCHLCTAFESYKVKAERYFKNDDELLQVLTSKRNQNPNYDCISLLSGGKDSTYVLARLVNMGLRVLAFTMDNGYISDQAKANIDTIIKKLGVDHVYGETPHMNDIFVDSLHRHHNVCNGCFKTIYTLSTQIALEKEIPFIVTGLSRGQFFETRLTEELFWDEALDTKKIDQTILEARKLYHQEDDAVKKLLDVSMFDDDKLYEKVEFVDFYRFSDVSLEELLVYLKENVGWVRPTDTGRSTNCLINQVGIYVHKKEMGYSNYSFPYSWDVRLGHKTRDESLEEINEVIDETEVKRIMKEIGYDKSDDDWQNSDKLVAYYTGNPNLSLKDIREFAEQRLPSYMVPTVFKHLNEIPLTKNGKVDKKALKNLTSVQLELDTPYAAPRNEIEEILERIWQEVLQLKKVGIYDNFIALGGHSLAAIRATARINDEIELNFPLNKIFELPTIAEYSAYIEQTLMALLEE

SEQ ID NO: 38384 - protein, 1375 aa, Gelidibacter salicanalis
  misc_feature (1)..(1375): tr|A0A5C7AHD6|A0A5C7AHD6_9FLAO Amino acid adenylation d omain-containing protein OS=Gelidibacter salicanalis OX =291193 GN=ES711_14150 PE=4 SV=1
MKLKLTASQLSLWIGQKINPDIPLYNTAYTYEISGPIDQNIFKNAFQFLINATDALRIRFYEEDGIPFQEAKDSLKYDIEYLDFSLDSESDVITDWLLNRSLEKLNLSQQVFDAVLIKKSENSYIWFMNMHHLVTDGVSRKIVFDRMNSYYKAIINDFNSFQPEYSVTYLDYVTSELQAASSKIDDDSYWSSKVHEVEKLPSFYGIHPKPNATEASRIYIPLGADRSQKLHVFLQRPEVKGWTAQLALFNVLSSLLFIYMYRVSDQKKLAIGAPLHNRIQRKFHNTVGYFLEIFPMMTEIEETDSFKSILQRVKLENNNNLKHALQDTITSEISNSFNVVLNYIHTGFSNFNGFPTTSEWIYTGHIDSNHQMRCHVMVPDSNGEFKIMLDLNHGTFNSNLRERVSGHLLSLLDAMLDDIETCISVPSLVSPTEQKSLIDPNFKIVEPTGTAITYFEEHALNRPNAVAIQGGRRTLTYSELNKKANQLAHYLHEKGIRKNQKIALHFYRNPDYIIGVLAVLKLGATFIPIPTDQAPERISFILKNANASLVLTESGLTKNLDLSANQVCDINKESSEIFNQPFSTIQNDVKTSDLAYILYTSGSTGVPKGVCISHRALTNYLLWSKTNYTINEKSIVPLFSSIGFDLTITSTLLPLISGGRIITYKENTSGPDVSLLQVFEDNLVNIIKLTPSHLALVQEKKLSSSNIDTMIIGGEDLKVALAQSIQSLFLNPIKIYNEYGPTEATVGCIVSEYDAQMHLGSSVPIGKPIDNMQVYVLDSYKNSVPQGVIGELYLSGIGLAEGYISSPEMTAAKFVENPFFEGSKMYKSGDLGRINNDGELEYLGRTDDQVKLRGYRIELSDIESNLVHHPEVDNCAVVLIKDDIHIPEDDIVNCIKCGLPSNYPNTDFNQYGICHLCTSFEDYKTKVERYFKNDDELVKLLTSKRDENPNYDCISLLSGGKDSTYVLSRLVNMGLRVLAFTMDNGYISDQAKANITTIVKKLGVDHVYGETPHMNDIFVDSLHRHHNVCNGCFKTIYTISTQIALKKEIPYIVTGLSRGQFFETRLTEELFSDDTLDSKVIDQTILEARKLYHQEDDAVKRLLDVSIFEDDRVFEKVEFVDFYRFSDVSLEDMLVYLKENVGWVRPTDTGRSTNCLINQVGIYVHKKEMGYSNYSFPYSWDVRLGHKTRDESLEEINEVIDEAEAKRILKEIGYDKSEEDWQNTDKLVAYYTGNPNLSLKDIREFAALRLPSYMVPTVFKHLNKIPLTKNGKVDKKALQNLTSVQLELETPYAAPRNEIEEILERIWQDVLQLKKVGIYDNFIALGGHSLAAIRVTARINDEIELNLPLNKIFELPTIAEYSRYIENTLMALLEE

SEQ ID NO: 38385 - protein, 218 aa, Geminocystis sp.
  misc_feature (1)..(218): tr|A0A0D6AT62|A0A0D6AT62_9CHRO 7-cyano-7-deazaguanine s ynthase OS=Geminocystis sp. NIES-3709 OX=1617448 GN=que C PE=3 SV=1
MSKKAIVLLSGGLDSATSAAIAKKEGYETIALSFRYGQRHAKELEIAQKLAPKLGIEKHYIIDVNLSLWGGSSLTDDNLSIPQDGLKPDEIPSTYVPGRNTVFIAIALSLAEATQAEAIYLGINAVDYSGYPDCRPEYLQAFQQLANLSSKVGIEGNPPQLIAPLVTLSKVEIVKKAIKLGVPIDETWSCYQGDEIPCGICDSCRIRDQALLQAGYVQ

SEQ ID NO: 38386 - protein, 224 aa, Geminocystis sp.
  misc_feature (1)..(224): tr|A0A0D6AC51|A0A0D6AC51_9CHRO 7-cyano-7-deazaguanine s ynthase OS=Geminocystis sp. NIES-3708 OX=1615909 GN=que C PE=3 SV=1
MSQKKAIVLFSGGLDSATSAAIAIQAGYDTIALSFRYGQKHARELEIAHKLAPKLGIKEHYIIDVNLSLWGGSSLTDEKMNIPEDGVKPDEIPSTYVPGRNTVFVAIALSLAEAKEAEAIYLGINAVDYSGYPDCRPEYLKTFQELANLSSKVGVEGKPPQLIAPLIHLSKEDIVKKAITLNVPIQETWSCYQGGQKPCGVCDSCRIRNEALIKAGYAHLAQFN

SEQ ID NO: 38387 - protein, 219 aa, Gemmata obscuriglobus
  misc_feature (1)..(219): tr|A0A2Z3H9P3|A0A2Z3H9P3_9BACT 7-cyano-7-deazaguanine s ynthase OS=Gemmata obscuriglobus OX=114 GN=C1280_29875 PE=3 SV=1
MPDAPLAVLVSGGLDSAILLAEAVRACPVVFPLYVRSGLHWEAVERAYLERFLAAIAAPNLRPLRVLDQPTADVYGAHWSTTGEGVPGADSADEAVFLPGRNVLLLAKPLIWCHLNAVPFVATAPLGTNPFPDATPAFYDGFAGIVSSAVRGDVRVLRPYAALHKVDVMRRGRGRPLEHTFSCIRPVRGLHCGTCNKCAERRQAFRDAHMTDPTEYAEK

SEQ ID NO: 38388 - protein, 230 aa, Gemmata obscuriglobus
  misc_feature (1)..(230): tr|A0A2Z3H2M7|A0A2Z3H2M7_9BACT 7-cyano-7-deazaguanine s ynthase OS=Gemmata obscuriglobus OX=114 GN=queC PE=3 SV =1
MSKAVVLLSGGLDSTTALAVARGQGFECYALSVDYGQRHRVELERAAVVAKALGVIEHRTVKLDLREIGGSALTSDLAVPKDRSDGEMGHGVPVTYVPARNTILLGVALGFAEVVGAFDIFIGANVLDYSGYPDCRPEFLSAFEALANLATKAGTEGAGRFRVHSPLLKLTKAEIIREGVKLGVDYAQTLSCYDPDAAGRACGRCDSCLLRKKGFAEAGVPDPTHYAVGG

SEQ ID NO: 38389 - protein, 238 aa, Gemmata sp.
  misc_feature (1)..(238): tr|A0A142XTB4|A0A142XTB4_9BACT 7-cyano-7-deazaguanine s ynthase OS=Gemmata sp. SH-PL17 OX=1630693 GN=queC_3 PE= 3 SV=1
MGVSVTAVSDQHSTAPWPPSNPRGALAVLVSGGSDSAILLAEAVRAYPAVFPLYVRTGLHWEEVEREHLDRFLEAVRAPALRPLRVLDEPIRDVYGAHWSVSGEGAPDADSPDEAVFLPGRNVLLLAKPLLWCHLNGVPEIATAPLGANPFPDATPQFYDNFAAIVSSAVNGSVRVLRPFAALHKVDVLRRGRGLPLEHTFSCLRPVNGLHCGACNKCAERQRGFRDAEMPDPTRYAG

SEQ ID NO: 38390 - protein, 593 aa, Gemmata sp.
  misc_feature (1)..(593): tr|A0A142XDR9|A0A142XDR9_9BACT 7-cyano-7-deazaguanine s ynthase OS=Gemmata sp. SH-PL17 OX=1630693 GN=queC_2 PE= 4 SV=1
MADPQLVLCGGVRAAHAPRPWRAAARTHALAIGPGPRDVHLEINQLSRAMGRGLSDLDADLLEVAAYVYTIDQVVSRGGTVAIDYGARWRRHLRCVVPVRCPELWNQPRALGALRRVLLFMTDDAEWEFAFVRAPAPAPRARYLLDLVDPPDGTEFEEVVLFSGGLDSLCGAVEEVLIGQRPVVLVSHRPVSRTQARQGAVLDALRARLPRRELGPLHVGASINKGEQLNNEFTQRARSFLFAAVAAVVARLVGRRRIRFYENGVTSLNLPGSRELVGARASRTTHPQVLHGLGELFALLFGGPFEVQNPFQWTTKAGMLRRLKAQGHADLCALTYSCGHVWGRPERTPHCGRCSQCVDRRLTALGAGLGDAEDPPHRYESDVLTGERTGPELTLSERYVGSALDMEGIGDPVTFGLRYAELNDALPFTGLPAGDAARAAFALYRDHAAEVRGALREILGTRAVEILRQEYPAQSLLGVIVGRRDRGPAPARPAPGPGWVVDRSQFSVFLSGRGCFLGNTNEFRVVARLSESPGRYVSVEDLQDDVWRGAHVSRNAVQQTMTNIRRLFRDSELTEIRLDGSQAGHYRLVLGAE

SEQ ID NO: 38391 - protein, 227 aa, Gemmataceae bacterium
  misc_feature (1)..(227): tr|A0A5C1A4X9|A0A5C1A4X9_9BACT 7-cyano-7-deazaguanine s ynthase OS=Gemmataceae bacterium PX52 OX=2598579 GN=que C_1 PE=3 SV=1
MARAVVLLSGGLDSTTTLAVAKDQGYELYALSVDYGQRHKVELARAATVARQFGVANHRTVTLDLRAIGGSALTADVAVPKDRTDAAMGHGVPITYVPARNTILLGVALGYAETVGAFDLFIGANVLDYSGYPDCRPEFLTAFESLANLATKAGVEGTGRFRVHAPLLKLTKAEIIREGTRLGVDFGQTLSCYDPDAAGKACGHCDSCLLRKKGFAEAGVPDPTAYQ

SEQ ID NO: 38392 - protein, 227 aa, Gemmataceae bacterium
  misc_feature (1)..(227): tr|A0A4V0HSU3|A0A4V0HSU3_9BACT 7-cyano-7-deazaguanine s ynthase OS=Gemmataceae bacterium OX=2052164 GN=queC PE= 3 SV=1
MSKAVVLLSGGLDSTTALAVAKSQGFTTYALSVDYGQRHRVELRRAVAVAHALGVADHRVVVLDLRAIGGSALTADLEVPKGRTADEMGRGVPVTYVPARNTILLGLALGYAETVGAFDLFIGANVLDYSGYPDCRPEFLTAFENLANLATRAGTEGAGRFRVHSPLLKMTKAEIIREGTRLGVDHALTLSCYDPDGEGRACGRCDSCVLRARGFDEAGVPDPTAYQ

SEQ ID NO: 38393 - protein, 231 aa, Gemmatimonadaceae bacterium
  misc_feature (1)..(231): tr|A0A2E8H3T1|A0A2E8H3T1_9BACT 7-cyano-7-deazaguanine s ynthase OS=Gemmatimonadaceae bacterium OX=2026741 GN=qu eC PE=3 SV=1
MPPHPTPPAILLLSGGMDSTTLLFHLRQTAPNTPLHTISIDYGQRHRIELDFAARLSDLAGAASHRVLPLDLTSIGGSPLTDPDLRIPASADDEQITTVVPFRNMLFVTLASACGETLGARDLYLSPVRDDYDAYRDCRREFYDSLEGTLRLGATRETDFRIHTPFVDHTKVDVVAMGLQLEVPYELTHTCYEGRRPACGICDACVERLHAFDANGVADPLDYENTPGGHS

SEQ ID NO: 38394 - protein, 1479 aa, Gemmatimonadaceae bacterium
  misc_feature (1)..(1479): tr|A0A2E5W983|A0A2E5W983_9BACT Carrier domain-containin g protein OS=Gemmatimonadaceae bacterium OX=2026741 GN= CME05_00355 PE=4 SV=1
  misc_feature (505)..(505): Xaa can be any naturally occurring amino acid
  misc_feature (508)..(508): Xaa can be any naturally occurring amino acid
  misc_feature (570)..(570): Xaa can be any naturally occurring amino acid
  misc_feature (590)..(590): Xaa can be any naturally occurring amino acid
  misc_feature (592)..(593): Xaa can be any naturally occurring amino acid
  misc_feature (625)..(625): Xaa can be any naturally occurring amino acid
MSERSTIEQFLSQLRRADVYITVRGDRLVVDAPEGTLTDDLRARIAARKDEILQFLAEAVDSDGEVIVATPGSEPILSFAQQRMWFLDQLQKGTSAFNSPMQVRFRGPLNVEALAQGVAEIHRRHDVLRMSFPVRDGKPVARIRPPSPIDLPLIDCSGATADERARIRHEHARAIATAPFDLAVDDLVRMELLRLEENDHLFLFTMHHIVSDGWSIGLFLHEFSDLYRIFDQGRPERLPGLQLQYADFARWQATTLAKTKHARDLAYWRSILKGAPDLLSLPTDRPRPAIYRFEGGKVPFTIGQDQTDDLRRLCEQEGVTAFMVLLAAYSAVLSKMSGLKDIVVGYPIAGRRHNQLESIIGCFVNTLLLRCELTDDLTFRQLIAHVRTASSQAYEHQDLPFEKLVDEVQPERNLSHNPLFQVAFVFQNVPFGLPDFPGMEVLPRDDEQFTPGATFDMTLVMEEVEDALRGELEYNRVLFDHETAQRVAAVFTALLDAAIREPDQXVLXLEVLDPSTRRDLIWGRNKTGVDYPKTTTVSRLFESVVEETPDVVAIECDDATVTYRELNERXNRLARWLQSRGAGRGTIVGXMXXHSVDLLVGLLGVMKSGAAYLPIDPSHPAGRVXGIIQDANLQLLLTPRELIADLTQIAPDVHILDVADAAVAEVAADNLNNQIQTSDVAYVIYTSGSSGRPKGVVVEHGALTNYIWWARQQYLADDKLDFALHTSVAFDLTVTSLYVPLISGSRLVVYGESGEHRVPPILRIVQEGTADIVKLTPSHLALLRDLDLKDSRVRKLVVGGENLRTELARRIHDVFGGNIEIYNEYGPTEATVGCMIHRYDPEQDTATSVPIGVPADNLRIYLLRDDYEPVPAGAIGEMYIAGDGVARGYLHQEELTRERFLPDPFVQGARMYRTGDLARWRNEHVMEYHGRTDHQVKIRGHRVELGEIETQICTHAGVRECVVNVAQTGLTSQDEGELEHCVECGLPSNYPGTTFDEQGRCNQCTAYERYRRKVEPYFKDIGKFEAIFNATRQARQGEYDCIVLLSGGKDSTYVLARLVDMGLDVLAYTLDNGYISDQAKENIRRVVEALGVDHIFGTTPHMPAIFADSLARHSNVCNGCFKALYTLSMSLARQKRIPCIVTGLSRGQQFETRLSNFYRADDFCVDTVDRSITEARKVYHRLDDEVSRRLDVEIFRDESIFDEIQILDFYRYCDVSLDEMYSYLDTRVPWVRPSDTGRSTNCTINDVGIYIHKKQREYHNYAMPYAWDVRMGHKQRDAALQELEDEIDVDAVRQMLTEIGYDERQHSTRRTQDVLVAYFVGDGAVAEEELRAHLGHRLPVAMIPAVFVPVDEIPLTPNGKVDNTALAQISIARTGTDLDYVPPRTAVEQQLVSIWADILGLHRISVQDSFFRLGGHSLLAAQVVSRIAQDLHVELPVATLFDHVTIEELAIAIDESRSVLGVDDADVEDILAEVEGMTD

SEQ ID NO: 38395 - protein, 230 aa, Gemmatimonadales bacterium
  misc_feature (1)..(230): tr|A0A524GYG9|A0A524GYG9_9BACT 7-cyano-7-deazaguanine s ynthase OS=Gemmatimonadales bacterium OX=2448054 GN=que C PE=3 SV=1
MPPAPAVVLLSGGLDSATTLAIARAEGFDCHALSFRYGQRHAVELASASAVAQHLGAVSHRIIEIDPRAFGGSALTDDIPVPKDRDEAARAGGIPITYVPARNTIFLAYALGCAEVLGANDIFLGINAVDYSGYPDCRPEFVEAFERMAHLATRAGVEGHRLTIHAPLLTMGKSAIIARGLELGVDFGMTLSCYDPEADGASCGRCDACQLRLEGFQKIGRPDPARYQSA

SEQ ID NO: 38396 - protein, 234 aa, Gemmatimonadales bacterium
  misc_feature (1)..(234): tr|A0A524R2P3|A0A524R2P3_9BACT Uncharacterized protein OS=Gemmatimonadales bacterium OX=2448054 GN=E4G90_00440 PE=4 SV=1
MKTCALLFSGGLDSVSLAILLERQGLGGLEVLPVYMAHRPGGNVTKKELEAAGPLAEEITGHELLIVKAKPKGNDDWYRKLGQVCYSRRLPVSKANKKRRNRTFLKVAKDLGLDQCDRIALGVFGPSANANVPEADVCYDQLVKRTPWLKRGQLVTFESMGIFDKTAMLKAVGRGALNRGRVYASESCLMYFNTHCGECISCHQRADAFMEAWGQDKTRYRKGTYADRRKRRRR

SEQ ID NO: 38397 - protein, 32 aa, Gemmatimonadetes bacterium
  misc_feature (1)..(32): tr|A0A2V7SEA3|A0A2V7SEA3_9BACT 7-cyano-7-deazaguanine s ynthase (Fragment) OS=Gemmatimonadetes bacterium OX=202 6742 GN=DMD36_00645 PE=4 SV=1
MTNPKPKGIVLLSGGIDSTTTLALAQRQGFEV

SEQ ID NO: 38398 - protein, 228 aa, Gemmatimonadetes bacterium
  misc_feature (1)..(228): tr|A0A2E9MFF6|A0A2E9MFF6_9BACT 7-cyano-7-deazaguanine s ynthase OS=Gemmatimonadetes bacterium OX=2026742 GN=que C PE=3 SV=1
MTDTGSSPSLVLLSGGMDSTTCLWWVRANTQGPVHSVSIDYGQRHRVELEFAQQLSTLAGVATHRQIQVDLRSIGGSPLTDPDLAVPAAVEDRQTATVVPFRNLLFVTLAAGVAEVEDVHDLYIAPVRDDQAAYRDCRREFYDSLESTLGLGATKEADFRIHTPLVEYSKKRVVQLGLELGVPYELTHTCYEGRRPACGVCDACSERLAAFAAHDVDDPIDYEEQAAR

SEQ ID NO: 38399 - protein, 238 aa, Gemmatimonas aurantiaca
  misc_feature (1)..(238): tr|A0A3D4VC55|A0A3D4VC55_9BACT 7-cyano-7-deazaguanine s ynthase OS=Gemmatimonas aurantiaca OX=173480 GN=queC PE =3 SV=1
MTSDPHSPAPERPAVVLLSGGLDSATALAVARRDGFTPYAMTFRYGQRHAGEIEAARRVAAAQQAARHVVVDIDLRQWGGSALTSDVEVPKDRDVDEVTDEIPVTYVPARNTIFLSFALAWAETLGADAIFIGVNALDYSGYPDCRPEYVAAFETMANLATRAGVEGTQRLTIHAPLQHLTKAQIVTLGRSLGVDYSLTTSCYDPAPDGTACGHCDACQLRLRGFAEAGAADPIAYAG

SEQ ID NO: 38400 - protein, 238 aa, Gemmatimonas aurantiaca; identical to SEQ ID NO: 38399
  misc_feature (1)..(238): tr|C1AA81|C1AA81_GEMAT 7-cyano-7-deazaguanine synthase OS=Gemmatimonas aurantiaca (strain T-27 / DSM 14586 / J CM 11422 / NBRC 100505) OX=379066 GN=queC PE=3 SV=1

SEQ ID NO: 38401 - protein, 243 aa, Gemmatimonas phototrophica
  misc_feature (1)..(243): tr|A0A143BM37|A0A143BM37_9BACT 7-cyano-7-deazaguanine s ynthase OS=Gemmatimonas phototrophica OX=1379270 GN=que C PE=3 SV=1
MTGEPNTSPAGFPATSKPAVVLLSGGLDSTTVLAVAKRDGYTPFAMTFRYGQRHSVEIDAARRVAQAMGVAKHVVVDIDLRQWGGSALTADVDVPKDRDVDHAVDEIPVTYVPARNTIFMSFALAWAEVLGADAIFIGVNALDYSGYPDCRPEYVAAFETMANLATAAGVQGTHRLRIHAPLQHLTKAQIVALGHDLGVDYSITTSCYDPAPDGTACGHCDACQLRLRGFAEAGARDPIAYAD

SEQ ID NO: 38402 - protein, 248 aa, Gemmatimonas sp.
  misc_feature (1)..(248): tr|A0A0S8AL39|A0A0S8AL39_9BACT 7-cyano-7-deazaguanine s ynthase OS=Gemmatimonas sp. SG8_28 OX=1703357 GN=queC P E=3 SV=1
MSTRPTTRHRTRSAAPPRKAVVLLSGGVDSSTTLAIARSEGFEPYALTLAYGQRHAGEIDAARRVARSMGVAHHVVTTIDLRAFGGSALTADIAVPKDRSAAEIGEGIPVTYVPARNTIFLSFALAWAETLGARDIFIGVNALDYSGYPDCRPAFIEAFERMANLATRAGVEDGEGFRIHTPLIALSKAEIIRRGLELGVDYARTTSCYDPAPDGAACAHCDACLLRLRGFAEAGVPDPIRYREEPRP

SEQ ID NO: 38403 - protein, 237 aa, Gemmatimonas sp.
  misc_feature (1)..(237): tr|A0A0S7ZK38|A0A0S7ZK38_9BACT 7-cyano-7-deazaguanine s ynthase OS=Gemmatimonas sp. SG8_17 OX=1703355 GN=queC P E=3 SV=1
MTDAPKAVVLLSGGLDSATTLAIAQADGFEPYALTFRYGQRHALEVAAARRVAQQLGAADHVILDIDLRTFGASALTDDIPVPKDRSEPELGGGVPVTYVPARNTIFLSFALGWAEVLRAGDIFIGVNALDYSGYPDCREEYIVAFQRMADLATRAGTEEGRRIEIHTPLIGMTKQEIVRKGVELGVDYSLTVSCYDPAPDGAACGHCDACLLRLRGFAAAGVADPIRYSAGTEIGR

SEQ ID NO: 38404 - protein, 227 aa, Gemmatirosa kalamazoonesis
  misc_feature (1)..(227): tr|W0RN93|W0RN93_9BACT 7-cyano-7-deazaguanine synthase OS=Gemmatirosa kalamazoonesis OX=861299 GN=queC PE=3 SV =1
MLLSGGLDSTTCLAVAVREGFAVHALSFRYGQRHAHEVDAARRIAARWGVARHVVVDIDLRVFGGSALTADIAVPKDRPAASLATDGVPITYVPARNTIFLSYALALAEVSDARDVFIGVNAYDYSGYPDCRPEYVRAFERMANLATRAGVEAAARGETALRIRTPLLDLTKADIVRLGLSLGVDYADTTSCYDPTPDGAACGHCDACQLRLKGFAEAGATDPIRYA

SEQ ID NO: 38405 - protein, 224 aa, Geoalkalibacter ferrihydriticus
  misc_feature (1)..(224): tr|A0A1G9MD89|A0A1G9MD89_9DELT 7-cyano-7-deazaguanine s ynthase OS=Geoalkalibacter ferrihydriticus OX=392333 GN =queC PE=3 SV=1
MKKAVILYSGGLDSTTCMALAGRAGFASYALSFAYGQRHSIELDKAREYAPRIGAAEHLVVEVDMRRIGGSALTAEGQVPKDGIEEGAIPVTYVPARNTLFLSFALSWAEVLGAFDIFIGVNALDYSGYPDCRPEYIAAFEQLANLATRAAVEGQGRYRIHTPLIDLTKAQIIQRGLALGVDYALTHSCYDPLPEGLACGRCDSCRLRLKGFAEAGVEDPLKYA

SEQ ID NO: 38406 - protein, 224 aa, Geoalkalibacter ferrihydriticus; identical to SEQ ID NO: 38405
  misc_feature (1)..(224): tr|A0A0C2EGB9|A0A0C2EGB9_9DELT 7-cyano-7-deazaguanine s ynthase OS=Geoalkalibacter ferrihydriticus DSM 17813 OX =1121915 GN=queC PE=3 SV=1

SEQ ID NO: 38407 - protein, 700 aa, Geoalkalibacter subterraneus
  misc_feature (1)..(700): tr|A0A0B5FRS1|A0A0B5FRS1_9DELT Uncharacterized protein OS=Geoalkalibacter subterraneus OX=483547 GN=GSUB_10200 PE=4 SV=1
MQDKRYIICGNAPTDGIEENPDRDLRLRLWGKDGPDKITLRIEDIHKKMSKDVPDSFQDLLEIATYVYSADQAIPRGADDVDSFGHGWRRDLHFIIPVRKPDFWNGDDIHQALRSTLGFLSDDNYHFEFVKLKEAQAFQGYLDFNDDGRLLGYPEQVVMFSGGLDSLAGAIDEVLNEKHRVVLVTHKSTPKLNKRHRRLEKMIADKAGENAPLHIGVRVNKNKGLNYEYTQRSRSFLYVSIGATIAKMLNLKSVRFYENGVISLNLPVCAQVVGGRATRTTHPRVIRGFQEIISLVAGEPFTIENPYIWKTKAGVIEVITKAGCQDMIAASTTCTHTWEMTNHHTHCGTCSQCIDRRFAMIAAKADQHDPVEDYKADIFTQSRSKDEDKIMAAAYLERANQVRDQDDITQFIARFSEVSRVFRYLNGNPGSVAQKVYDLYKRHAKEVCEAMDTMVARNITAIRQRTLPGDCLLRTVYESGSVISVPAIPVEQKQPDNYFRKRGGVWAARFNGNAEVLVTGVDKGAEYINFLLARPNKETSVYEIVCGLAINTCNTFLNSDETEDGFQVTQGVPLGDTGFVADRKAIEQYREAAHDLLREIEDARAENNAAEIQRLEEEMAKVTTAINEAVGLGGKLRKSNDKRKNIRDAFRNAVNRAITYLEKYDKPLAAHLKESIKCGNEPVYRTEEEIVWEVRPIVNE

SEQ ID NO: 38408 - protein, 224 aa, Geoalkalibacter subterraneus
  misc_feature (1)..(224): tr|A0A0B5FNV3|A0A0B5FNV3_9DELT 7-cyano-7-deazaguanine s ynthase OS=Geoalkalibacter subterraneus OX=483547 GN=qu eC PE=3 SV=1
MKKAVVLYSGGLDSTTCMAIARSEGFTPYALSFAYGQRHSIELQKAREYAPRIGAADHLVVEVDLRRIGGSALTTDLEVPKAGVEPDEIPVTYVPARNTVFLSFALGWAEVLGAFDIFIGVNALDYSGYPDCRPEYIASFEQTANLATRAAVQGEGRYRIHAPLIDLTKGEIIRRGMELGVDYSLTHSCYDPTPEGLACGTCDSCRLRLKGFAEAGVSDPVTYR

SEQ ID NO: 38409 - protein, 221 aa, Geobacillus galactosidasius
  misc_feature (1)..(221): tr|A0A226QQT5|A0A226QQT5_9BACI 7-cyano-7-deazaguanine s ynthase OS=Geobacillus galactosidasius OX=883812 GN=que C PE=3 SV=1
MKKEKAIVVFSGGQDSTTCLFWALKQFDEVEAVTFDYGQRHRLEIEVAASIAKELGVPHTVLDMSLLNQLAPNALTRSDIAIEQNEGQLPSTFVDGRNLLFLSFAAVLAKQKGARHLVTGVCETDFSGYPDCRDIFIKSLNVTLNLAMDYQFVIHTPLMWLTKAKTWKLADELGAFDFVRTKTLTCYNGIIADGCGECPACVLRRRGLEEYMKEKEGANQL

SEQ ID NO: 38410 - protein, 221 aa, Geobacillus kaustophilus
  misc_feature (1)..(221): sp|Q5L1C0|QUEC_GEOKA 7-cyano-7-deazaguanine synthase OS =Geobacillus kaustophilus (strain HTA426) OX=235909 GN= queC PE=3 SV=2
MNEEKAVVVFSGGQDSTTCLFWAKKQFGEVEAVTFDYGQRHRREIDVAQAIADELGVRHTVLDLSLLGQLAPNALTRRDIAIEQKKGELPTTFVDGRNLLFLSFAAVFAKQRGARHIVTGVCETDFSGYPDCRDVFIKSLNVTLNLAMDYEFVIHTPLMWLTKAETWKLADELGALEFIRTKTLTCYNGIIADGCGECPACALRKRGLDEYLREKAEVESR

SEQ ID NO: 38411 - protein, 224 aa, Geobacillus kaustophilus
  misc_feature (1)..(224): tr|A0A0N9HMW6|A0A0N9HMW6_GEOKU 7-cyano-7-deazaguanine s ynthase OS=Geobacillus kaustophilus NBRC 102445 OX=1220 595 GN=queC PE=3 SV=1
MMKMNEEKAVVVFSGGQDSTTCLFWAKKQFGEVEAVTFDYGQRHRREIDVAQAIADELGVRHTVLDLSLLGQLAPNALTRRDIAIEQKKGELPTTFVDGRNLLFLSFAAVFAKQRGARHIVTGVCETDFSGYPDCRDVFIKSLNVTLNLAMDYEFVIHTPLMWLTKAETWKLADELGALEFIRTKTLTCYNGIIADGCGECPACALRKRGLDDYLREKAEVESR

SEQ ID NO: 38412 - protein, 223 aa, Geobacillus lituanicus
  misc_feature (1)..(223): tr|A0A223DZ77|A0A223DZ77_9BACI 7-cyano-7-deazaguanine s ynthase OS=Geobacillus lituanicus OX=169283 GN=queC PE= 3 SV=1
MKMKEEKAVVVFSGGQDSTTCLVWAKEQFGEVEAVTFDYGQRHRREIEVAQAIAAELGVRHTVLDMSLLGQLAPNALTRDDIAIEQKEGGLPTTFVDGRNLLFLSFAAVFAKQRGARHLVTGVCETDFSGYPDCRDVFIKSLNVTLNLAMDYEFVIHTPLMWLTKAETWKLADELGALEFIRTKTLTCYNGIIADGCGECPACVLRKRGLDDYLREKAGVEAQ

SEQ ID NO: 38413 - protein, 224 aa, Geobacillus proteiniphilus
  misc_feature (1)..(224): tr|A0A1Q5T7Q4|A0A1Q5T7Q4_9BACI 7-cyano-7-deazaguanine s ynthase OS=Geobacillus proteiniphilus OX=860353 GN=queC PE=3 SV=1
MMKMNEEKAVVVFSGGQDSTTCLFWAKKQFGEVEAVTFDYGQRHRREIDVAQAIADELGVRHTVLDLSLLGQLAPNALTRRDVAIEQKKGELPTTFVDGRNLLFLSFAAVFAKQRGARHIVTGVCETDFSGYPDCRDVFIKSLNVTLNLAMDYEFVIHTPLMWLTKAETWKLADELGALEFIRTKTLTCYNGIIADGCGECPACVLRKRGLDEYLREKAGDKVR

SEQ ID NO: 38414 - protein, 221 aa, Geobacillus sp.; identical to SEQ ID NO: 38409
  misc_feature (1)..(221): sp|C5D7Y2|QUEC_GEOSW 7-cyano-7-deazaguanine synthase OS =Geobacillus sp. (strain WCH70) OX=471223 GN=queC PE=3 SV=1

SEQ ID NO: 38415 - protein, 221 aa, Geobacillus sp.
  misc_feature (1)..(221): tr|A0A1V9B1H1|A0A1V9B1H1_9BACI 7-cyano-7-deazaguanine s ynthase OS=Geobacillus sp. 44B OX=1963023 GN=queC PE=3 SV=1
MKMEKAVVVFSGGQDSTTCLFWALKQFAEVEAVTFDYGQRHRLEIEVASAIAKELHVPHTVLDMSLLNQLAPNALTRSEIAIEQKEGQLPSTFVDGRNLLFLSFAAVLAKQKGARHLVTGVCETDFSGYPDCRDIFIKSLNVTLNLAMDYQFVIHTPLMWLTKAQTWKLADELGAFEFVRTKTLTCYNGIIADGCGECPACVLRRRGLEEYMKEKEGITQL

SEQ ID NO: 38416 - protein, 223 aa, Geobacillus stearothermophilus
  misc_feature (1)..(223): tr|A0A0K2HB48|A0A0K2HB48_GEOSE 7-cyano-7-deazaguanine s ynthase OS=Geobacillus stearothermophilus 10 OX=272567 GN=queC PE=3 SV=1
MKMNEEKAVVVFSGGQDSTTCLFWAKKQFGEVEAVTFDYGQRHRREIDVAQAIADELGVRHTVLDLSLLGQLAPNALTRRDIAIEQKEGELPTTFVDGRNLLFLSFAAVFAKQRGARHIVTGVCETDFSGYPDCRDVFIKSLNVTLNLAMDYEFVIHTPLMWLTKAETWKLADELGALEFIRTKTLTCYNGIIADGCGECPACVLRKRGLDEYLREKEGVESR

SEQ ID NO: 38417 - protein, 223 aa, Geobacillus stearothermophilus
  misc_feature (1)..(223): tr|A0A0K9I190|A0A0K9I190_GEOSE 7-cyano-7-deazaguanine s ynthase OS=Geobacillus stearothermophilus OX=1422 GN=qu eC PE=3 SV=1
MKMKEEKAVVVFSGGQDSTTCLVWAKEQFGEVEAVTFDYGQRHRREIEVAQAIAAELGVRHTVLDMSLLGQLAPNALTRDDIAIEQKEGELPTTFVDGRNLLFLSFAAVFAKQRGARHLVTGVCETDFSGYPDCRDVFIKSLNVTLNLAMDYEFVIHTPLMWLTKAETWKLADELGALEFIRTKTLTCYNGIIADGCGECPACVLRKRGLDDYLREKAGVEAQ

SEQ ID NO: 38418 - protein, 223 aa, Geobacillus subterraneus
  misc_feature (1)..(223): tr|A0A143MJQ3|A0A143MJQ3_9BACI 7-cyano-7-deazaguanine s ynthase OS=Geobacillus subterraneus OX=129338 GN=queC P E=3 SV=1
MKMKEEKAVVVFSGGQDSTTCLFWAKKQFAEVEAVTFDYGQRHRREIDVAASIADELGVRHTVLDMSLLGQLAPNALTRGEIAIEQKEGELPTTFVDGRNLLFLSFAAVLAKQRGARHLVTGVCETDFSGYPDCRDIFIKSLNVTLNLAMDYPFVIHTPLMWLTKAETWKLADELGALEFVRTKTLTCYNGVIADGCGECPACVLRKRGLDEYLRGKAEVEAR

SEQ ID NO: 38419 - protein, 223 aa, Geobacillus thermocatenulatus
  misc_feature (1)..(223): tr|A0A226Q3R2|A0A226Q3R2_9BACI 7-cyano-7-deazaguanine s ynthase OS=Geobacillus thermocatenulatus OX=33938 GN=qu eC PE=3 SV=1
MKMKEEKAVVVFSGGQDSTTCLFWAKQQFGAVEAVTFDYGQRHRREIEVAQAIAAELGVRHTVLDMSLLGQLAPNALTRDDIAIEQKEGELPTTFVDGRNLLFLSFAAVLAKQRGARHIVTGVCETDFSGYPDCRDVFIKSLNVTLNLAMDYEFVIHTPLMWLTKAETWQLADELGALEFIRTKTLTCYNGIIADGCGECPACVLRKRGLDDYLREKAGVERP

SEQ ID NO: 38420 - protein, 221 aa, Geobacillus thermodenitrificans
  misc_feature (1)..(221): sp|A4ILN7|QUEC_GEOTN 7-cyano-7-deazaguanine synthase OS =Geobacillus thermodenitrificans (strain NG80-2) OX=420 246 GN=queC PE=3 SV=2
MNEEKAVVVFSGGQDSTTCLFWAKKQFAEVEAVTFDYGQRHRREIEVAASIADELGVRHTVLDMSLLGQLAPNALTRGEIAIEQKEGELPTTFVDGRNLLFLSFAAVLAKQRGARHIVTGVCETDFSGYPDCRDIFIKSLNVTLNLAMDYPFVIHTPLMWLTKAETWKLADELGALEFVRTKTLTCYNGVIADGCGECPACVLRKRGLEEYLQEKAGVKAR

SEQ ID NO: 38421 - protein, 223 aa, Geobacillus thermodenitrificans
  misc_feature (1)..(223): tr|A0A1W6VPZ8|A0A1W6VPZ8_GEOTD 7-cyano-7-deazaguanine s ynthase OS=Geobacillus thermodenitrificans OX=33940 GN= queC PE=3 SV=1
MKMNEEKAVVVFSGGQDSTTCLFWAKKQFAEVEAVTFDYGQRHRREIEVAASIADELGVRHTVLDMSLLGQLAPNALTRGEIAIEQKEGELPTTFVDGRNLLFLSFAAVLAKQRGARHIVTGVCETDFSGYPDCRDIFIKSLNVTLNLAMDYPFVIYTPLMWLTKAETWKLADELGALEFVRTKTLTCYNGVIADGCGECPACVLRKRGLEEYLQEKAGVKAR

SEQ ID NO: 38422 - protein, 224 aa, Geobacillus thermoleovorans
  misc_feature (1)..(224): tr|G8MYS8|G8MYS8_GEOTH 7-cyano-7-deazaguanine synthase OS=Geobacillus thermoleovorans CCB_US3_UF5 OX=1111068 G N=queC PE=3 SV=1
MMKMNEEKAVVVFSGGQDSTTCLFWAKKQFGEVEAVTFDYGQRHRREIDVAQAIADELGVRHTVLDLSLLGQLAPNALTRRDIAIEQKKGELPTTFVDGRNLLFLSFAAVFAKQRGARHIVTGVCETDFSGYPDCRDVFIKSLNVTLNLAMDYEFVIHTPLMWLTKAETWKLADELGALEFIRTKTLTCYNGIIADGCGECPACALRKRGLDEYLREKAEVESR

SEQ ID NO: 38423 - protein, 224 aa, Geobacillus thermoleovorans; identical to SEQ ID NO: 38422
  misc_feature (1)..(224): tr|A0A098L5Y2|A0A098L5Y2_GEOTH 7-cyano-7-deazaguanine s ynthase OS=Geobacillus thermoleovorans B23 OX=1406857 G N=queC PE=3 SV=1

SEQ ID NO: 38424 - protein, 223 aa, Geobacillus zalihae
  misc_feature (1)..(223): tr|A0A1V9CQG4|A0A1V9CQG4_9BACI 7-cyano-7-deazaguanine s ynthase OS=Geobacillus zalihae OX=213419 GN=queC PE=3 S V=1
MKMNEEKAVVVFSGGQDSTTCLVWAKEQFGEVEAVTFDYGQRHRREIEVAQAIAAELGVRHTVLDMSLLGQLAPNALTRRDIAIEQKEGELPTTFVDGRNLLFLSFAAVFAKQRGARHLVTGVCETDFSGYPDCRDVFIKSLNVTLNLAMDYEFVIHTPLMWLTKAETWKLADELGALEFIRTKTLTCYNGIIADGCGECPACLLRKRGLDEYLREKAGVERP

SEQ ID NO: 38425 - protein, 228 aa, Geobacter argillaceus
  misc_feature (1)..(228): tr|A0A562WSW3|A0A562WSW3_9DELT 7-cyano-7-deazaguanine s ynthase OS=Geobacter argillaceus OX=345631 GN=queC PE=3 SV=1
MKKKAVVLYSGGLDSTTCMAIARIEGFEPYAISFAYGQRHSVELELAKKNARPMGAKDHLVVDFDYRRIGGSALTADIAVPKEGVGSDIPVTYVPARNTIFLSFALGWAEVLSAFDIYIGVNALDYSGYPDCRPEYIAAFEAMANLGTKAAVEGKGQYTIHTPLIHLTKAEIITRGLSLGVDYGRTHSCYDPTPEGFACGLCDSCRLRLKGFIEAGVPDPVKYVRRDT

SEQ ID NO: 38426 - protein, 225 aa, Geobacter bemidjiensis
  misc_feature (1)..(225): sp|B5EDQ7|QUEC_GEOBB 7-cyano-7-deazaguanine synthase OS =Geobacter bemidjiensis (strain Bem / ATCC BAA-1014 / D SM 16622) OX=404380 GN=queC PE=3 SV=1
MQKKAVILYSGGLDSTTCLAIAKEQGFAPYALSFSYGQRHQQELEVAKLNARPMGAVDHLLVEFDLRKMGGSALTSDIEVPKEGVGEEIPVTYVPARNTIFLSFALGWAETLDCFDIFIGVNALDYSGYPDCRPEFISAYETMANLATKAGVEGKRLKIHTPLISLTKAEIIQKGLSLGVDYSKTHSCYDPAEDGAACGRCDSCRLRLKGFAEAGVTDPVKYQKL

SEQ ID NO: 38427 - protein, 229 aa, Geobacter daltonii
  misc_feature (1)..(229): sp|B9M0M7|QUEC_GEODF 7-cyano-7-deazaguanine synthase OS =Geobacter daltonii (strain DSM 22248 / JCM 15807 / FRC -32) OX=316067 GN=queC PE=3 SV=1
MKKKAVILYSGGLDSTTCMAIAREEGFEPYAMSFDYGQRHSVELATAKANAKTMGASEHLVVSFDLRKVGGSALTADLDVPKEGIGAGIPVTYVPARNTIFLSFALGWAEVLGAFDIFIGVNALDYSGYPDCRPEYIAAFEATANLATRAGVEGTGRFVIHAPLIAMTKAEIIRKGLALGVDYGRTHSCYDPTPEGLACGLCDSCRLRLKGFAEAGVTDPVPYAVRSKK

SEQ ID NO: 38428 - protein, 196 aa, Geobacter daltonii
  misc_feature (1)..(196): tr|B9M1I5|B9M1I5_GEODF 7-cyano-7-deazaguanine synthase OS=Geobacter daltonii (strain DSM 22248 / JCM 15807 / F RC-32) OX=316067 GN=Geob_2717 PE=3 SV=1
MSIVTLVSGGLDSTLIAKLAQEEGLIQHPLFVDYGQRARDQELAACRRGMSELGLPEPRVADLSGFGALIHSGLTDSSLDIVKDAFTPGRNMLFLLIAAAYAVQVKADAISIGLLHESTSLFPDQTSAFLRDAEVLIRRCMNRDIKLLAPLASFLKTDVVALAKLKRIGATYSCHTGNEETCGTCIACREFETVEV

SEQ ID NO: 38429 - protein, 223 aa, Geobacter lovleyi
  misc_feature (1)..(223): tr|B3E749|B3E749_GEOLS 7-cyano-7-deazaguanine synthase OS=Geobacter lovleyi (strain ATCC BAA-1151 / DSM 17278 / SZ) OX=398767 GN=queC PE=3 SV=1
MRKAVILYSSGLDSTTCLAIARDQGFAPYAISFDYGQRHRHELDLARANARKLGAVEHLVVAFDLRQVGGSALTSEIDVPKEGVADDIPVTYVPARNTIFLSFALGWAEVLGAYDIFIGVNALDYSGYPDCRPEYIDAYQRMANLATKAGVEGTGHFTIHTPLINLTKAEIIKQGTALGVDYSQTHSCYDPTPDGLSCGQCDSCRLRLKGFSEAGLRDPLRYA

SEQ ID NO: 38430 - protein, 237 aa, Geobacter metallireducens
  misc_feature (1)..(237): sp|Q39R35|QUEC_GEOMG 7-cyano-7-deazaguanine synthase OS =Geobacter metallireducens (strain GS-15 / ATCC 53774 / DSM 7210) OX=269799 GN=queC PE=3 SV=1
MHKKAVVLYSGGLDSTTCLAIARAEGYEPYAMSFSYGQRHSVELEQAKRNARPMGAVDHLVVEFDYRQVGGSALTSDIAVPKEGVGSDIPVTYVPARNTVFLSFALGWAEVLGAFDIFIGVNALDYSGYPDCRPEYIAAFEAMANLATKAGVEGKGRFRIHTPLIHLTKAEIIRKGLSLGVDYGRTHSCYDPTPEGLACGLCDSCRLRLKGFAEAGVADPVAYATIKNPEVRSQESE

SEQ ID NO: 38431 - protein, 225 aa, Geobacter pelophilus
  misc_feature (1)..(225): tr|A0A1W7QXN8|A0A1W7QXN8_9DELT 7-cyano-7-deazaguanine s ynthase OS=Geobacter pelophilus OX=60036 GN=queC PE=3 S V=1
MQKKAVILYSGGLDSTTCLAIAKEQGFAPYALSFSYGQRHQQELEVAKRNARPMGAVDHLLVEFDLRKMGGSALTSDIEVPKEGVGEEIPVTYVPARNTIFLSFALGWAETLDCFDIFIGVNALDYSGYPDCRPEFIAAYETMANLATKAGVEGRRLKIHTPLISLTKAEIIQKGLSLGVDYSRTHSCYDPAEDGAACGRCDSCRLRLKGFTEAGVTDPVRYQKF

SEQ ID NO: 38432 - protein, 226 aa, Geobacter pickeringii
  misc_feature (1)..(226): tr|A0A0B5BGM0|A0A0B5BGM0_9DELT 7-cyano-7-deazaguanine s ynthase OS=Geobacter pickeringii OX=345632 GN=queC PE=3 SV=1
MSKKAVVLYSGGLDSTTCLAIARTEGFEPYAMSFSYGQRHTHELEVAKANARPLGAVDHMVVEFDLRKVGGSALTADIAVPKEGVGDEIPVTYVPARNTIFLSFALGWAEVLGAFDIFIGVNALDYSGYPDCRPAYITAYETMANLATRAGVEGMGRFQIHTPLISLTKAEIIRKGLELGVDYGRTHSCYDPTPEGFACGLCDSCRLRLKGFAEAGVADPVPYVTR

SEQ ID NO: 38433 - protein, 237 aa, Geobacter soli
  misc_feature (1)..(237): tr|A0A0C1QSD9|A0A0C1QSD9_9DELT 7-cyano-7-deazaguanine s ynthase OS=Geobacter soli OX=1510391 GN=queC PE=3 SV=1
MTRKAVVLYSGGLDSTTCLAIARAEGFEPHAMSFSYGQRHSVELELAKRNARPAGAVEHMVVEFDLRKVGGSALTADIAVPKEGVGDDIPVTYVPARNTIFLSFALGWAEVLGAFDIFIGVNALDYSGYPDCRPDYISAFETMANLATRAGVEGTDRFRIHAPLMSLTKAEIIRKGLALGVDYGLTHSCYDPSPAGVACGLCDSCRLRLKGFAEAGVADPVNYATVDQGTGAGKETA

SEQ ID NO: 38434 - protein, 380 aa, Geobacter sp.
  misc_feature (1)..(380): tr|A0A212PDU7|A0A212PDU7_9DELT N-acetyl sugar amidotran sferase OS=Geobacter sp. DSM 9736 OX=1277350 GN=SAMN062 69301_0452 PE=4 SV=1
MNARNQLTREYRICSRCVMDTSDRGILFDENGVCNHCHNYEIISKRVLLPPEIAQEKLLQIIEKIKRDGEKQEYDCIIGLSGGIDSSYLALQAKNFGLRPLAVHFDNGWNSEISVKNIENIVKKLGFDLFTYVIDWEEFKDLQRSFFKASVVDIELLTDNAIFTSLYKLARQHKIKYSLEGHNIVTESIMGKDWNYWKFDLKNIKAIQKEFGTLKIKSFPTMGPWKRLFLQVMKIIEPVYILNFLEYDKKKAMETLEKELEWKYYGGKHYESVFTKFYQAYVLPTKFGIDKRRAHLSNLICSGQLTREEAVVELEREIYPQDELRKDKEYVVKKLGFSEEEFDDIMQQSPKSHMDYPNDWESYHRIVDSIKNLKCSVRRR

SEQ ID NO: 38435 - protein, 225 aa, Geobacter sp.
  misc_feature (1)..(225): sp|C6E7E7|QUEC_GEOSM 7-cyano-7-deazaguanine synthase OS =Geobacter sp. (strain M21) OX=443144 GN=queC PE=3 SV=1
MQKKAVILYSGGLDSTTCLAIAKKQGFAPYALSFSYGQRHQQELEVAKLNARPMGAVDHLLVEFDLRKMGGSALTSDIEVPKEGVGEEIPVTYVPARNTIFLSFALGWAETLDCFDIFIGVNALDYSGYPDCRPEFISAYETMANLATKAGVEGKRLQIHTPLISLTKAEIIQKGISLGVDYSKTHSCYDPAEDGAACGRCDSCRLRLKGFAEAGVTDPVRYQKL

SEQ ID NO: 38436 - protein, 237 aa, Geobacter sulfurreducens
  misc_feature (1)..(237): sp|Q74FW9|QUEC_GEOSL 7-cyano-7-deazaguanine synthase OS =Geobacter sulfurreducens (strain ATCC 51573 / DSM 1212 7 / PCA) OX=243231 GN=queC PE=3 SV=1
MTRKAVVLYSGGLDSTTCLAIARAEGFEPHAMSFSYGQRHSVELELAKRNARPAGAVEHMVVEFDLRKVGGSALTADIAVPKEGVGDDIPVTYVPARNTIFLSFALGWAEVLGAFDIFIGVNALDYSGYPDCRPEYISAFETMANLATRVGVEGTGRFRIHAPLMRLTKAEIIRKGLALGVDYGLTHSCYDPSPAGVACGLCDSCRLRLKGFAEVGVADPVPYVTGGQGLGGGKETP

SEQ ID NO: 38437 - protein, 237 aa, Geobacter sulfurreducens
  misc_feature (1)..(237): tr|A0A2Z5SS05|A0A2Z5SS05_GEOSN 7-cyano-7-deazaguanine s ynthase OS=Geobacter sulfurreducens OX=35554 GN=queC PE =3 SV=1
MTRKAVVLYSGGLDSTTCLAIARAEGFEPHAMSFSYGQRHSVELELAKKNARPAGAVEHMVVEFDLRKVGGSALTADIAVPKKGVGDDIPVTYVPARNTIFLSFALGWAEVLGAFDIFIGVNALDYSGYPDCRPEYISAYETMANLATRAGVEGTGRFRIHAPLMRLTKAEIIRKGLVLGVDYGLTHSCYDPTPAGVACGLCDSCRLRLKGFAEVGVADPVPYVTGGQGLGGGKETP

SEQ ID NO: 38438 - protein, 223 aa, Geobacter thiogenes
  misc_feature (1)..(223): tr|A0A1T4PPZ9|A0A1T4PPZ9_9DELT 7-cyano-7-deazaguanine s ynthase OS=Geobacter thiogenes OX=115783 GN=queC PE=3 S V=1
MRKAVILYSSGLDSTTCLAIAQDQGFTPYAISFDYGQRHRHELDLARANAKKLGAVEHLVVAFDLRQVGGSALTSEIEVPKEGVGNDIPVTYVPARNTIFLSFALGWAEVLGAYDIFIGVNALDYSGYPDCRPEYIEAYQRMANLATKAGVEGTGHFTIHTPLINLTKAEIIKQGTALGVDYSQTHSCYDPTPEGLSCGTCDSCRLRLKGFSEAGLSDPLRYA

SEQ ID NO: 38439 - protein, 228 aa, Geobacter uraniireducens
  misc_feature (1)..(228): sp|A5G8S2|QUEC_GEOUR 7-cyano-7-deazaguanine synthase OS =Geobacter uraniireducens (strain Rf4) OX=351605 GN=que C PE=3 SV=1
MPKKAVILYSGGLDSTTCMAIAKAEGFEPYAMSFAYGQRHKAELELAKGNAKPMGAVEHMVVEFDLRKMGGSALTAEIDVPKEGVGNDIPVTYVPARNTIFLSFALGWAETLGAFDIFIGVNALDYSGYPDCRPEYIAAFETMANLATKAGVEGAGRFTIHTPLIHLTKAEIIRKGLSLGVDYGRTHSCYDPTADELACGRCDSCRLRLKGFAEAGMTDPVKYVKGEK

SEQ ID NO: 38440 - protein, 224 aa, Geobacteraceae bacterium
  misc_feature (1)..(224): tr|A0A1G0LT63|A0A1G0LT63_9DELT 7-cyano-7-deazaguanine s ynthase OS=Geobacteraceae bacterium GWC2_55_20 OX=17983 17 GN=queC PE=3 SV=1
MQQKAVVLYSGGLDSSTCMAMAAAEGFTPYAISFSYGQRHGHELTVAKANAVRLGAAEHLVVDFDLRLMGGSALTAEIDVPKQGVGNDIPVTYVPARNTIFLSFALGWAEVLGAADIYIGVNALDYSGYPDCRPEYIEAYQKMANLATRAGVEGTSRFKIHTPLISMTKAGIIKAGLALGVDYSLTHSCYDPTPTGLSCGECDSCRLRLKGFAEAGLKDPLQYS

SEQ ID NO: 38441 - protein, 224 aa, Geobacteraceae bacterium
  misc_feature (1)..(224): tr|A0A1G0MGJ6|A0A1G0MGJ6_9DELT 7-cyano-7-deazaguanine s ynthase OS=Geobacteraceae bacterium GWC2_58_44 OX=17983 18 GN=queC PE=3 SV=1
MQKKAVILYSGGLDSTTCLAIAREQGYAPYALSFSYGQRHQQELEVAKRNARPMGALDHLLVEFDLRKIGGSALTSDIAVPKDGVEDEIPVTYVPARNTIFLSFALGWAETLGSFDIFIGVNALDYSGYPDCRPEFIAAYEAMANLATKAGVEGRERMKIHTPLISLSKADIIRKGLSLGVDYSLTHSCYDPAEDGAACGLCDSCRLRLKGFAEAGVVDPVRYA

SEQ ID NO: 38442 - protein, 230 aa, Geodermatophilus aquaeductus
  misc_feature (1)..(230): tr|A0A521EYC3|A0A521EYC3_9ACTN 7-cyano-7-deazaguanine s ynthase OS=Geodermatophilus aquaeductus OX=1564161 GN=q ueC PE=3 SV=1
MSKPAVVLLSGGLDSTTVLAIARDRGFEPCALSFDYGQKHEVELRSASAVAAAMGVKRHEVLHVGLSEFGGSSLTDDAMEVPVGRTHDDIGEGIPSTYVPARNTVFLACALGYAEVLGAEHIFIGVNALDYSGYPDCRPEFIEAFERLANLATAAAVEGRQHISVHAPLMTMTKADIVREGTRLGVDYSMTVSCYRADERGSCGECDSCTLRLRGFAEAGLVDPTPYWPR

SEQ ID NO: 38443 - protein, 224 aa, Geofilum rubicundum
  misc_feature (1)..(224): tr|A0A0E9M213|A0A0E9M213_9BACT 7-cyano-7-deazaguanine s ynthase OS=Geofilum rubicundum JCM 15548 OX=1236989 GN= queC PE=3 SV=1
MKRAVVLLSGGLDSAVALWLAKSEGYELYTLSFDYGQRHNKEIMAAAKIAELAEVKSHRLVTINMDQWGGSSLTDKSMEVEDGDVDRTDIPVTYVPARNMVFLSIAASFAEAVEAQNIFIGVSQVDYSGYVDCRETFITAMENAINQGTVMAAEHHKPIKVHAPFIYKTKTEEILLGAQLGVPFEHTWSCYRGGEKPCGTCDSCLLRAKAFREAGVIDGAADQQ

SEQ ID NO: 38444 - protein, 220 aa, Geomicrobium sp.
  misc_feature (1)..(220): tr|A0A061N783|A0A061N783_9BACL 7-cyano-7-deazaguanine s ynthase OS=Geomicrobium sp. JCM 19055 OX=1460649 GN=que C PE=3 SV=1
MKRDKAVVVFSGGQDSTTCLFWALERFETVYAVTFSYGQRHSQEVEVAKSIANDVGVEHHVLDMDLLNQLAPNALTRSDIEVTDGGEGELPSTFVPGRNLLFLTFATIFGQQRGAFDIITGVCETDYSGYPDCRDGFVKSLNVTLNLAIDNTFVIHTPLMWLDKEATWKLADDLGKLDYVRERTLTCYHGVQGDGCGECPACELRMQGLQKYLDHKGRDD

SEQ ID NO: 38445 - protein, 220 aa, Geomicrobium sp.
  misc_feature (1)..(220): tr|A0A061NHS2|A0A061NHS2_9BACL 7-cyano-7-deazaguanine s ynthase OS=Geomicrobium sp. JCM 19037 OX=1460634 GN=que C PE=3 SV=1
MKREKAVVVFSGGQDSTTCLFWALERFETVYAVTFAYGQRHSEELNVAKAIAKDVGVEHHILDMDLLNQLAPNALTRSDIDVTDGGEGELPSTFVPGRNLLFLTFATIFGQQRGANHIITGVCETDYSGYPDCRDGFVKSLNVTLNLAIDDTFVIHTPLMWLDKEATWKLADDLGRLDYVRERTLTCYHGVQGDGCGECPACELRQLGLNKYLERKGSDR

SEQ ID NO: 38446 - protein, 225 aa, Geomonas terrae
  misc_feature (1)..(225): tr|A0A4S1CMG8|A0A4S1CMG8_9DELT 7-cyano-7-deazaguanine s ynthase OS=Geomonas terrae OX=2562681 GN=queC PE=3 SV=1
MKKKAVILYSGGLDSTTCMAIARHQGFEPYAMSFSYGQRHQHELAVCKQNARPMGAVDHMLVEFDLRMMGGSALTSDIAVPKEGVGEEIPVTYVPARNTIFLSFALGWAETLGAFDIFIGVNALDYSGYPDCRPEYIAAYETMANLATKAGVEGKKMTIHTPLISLSKAEIIRTGLTLGVDYGKTHSCYDPTEDGASCGLCDSCRLRLKGFAELGVTDPVRYAKR

SEQ ID NO: 38447 - protein, 254 aa, Georgenia sp.
  misc_feature (1)..(254): tr|A0A5B8AW61|A0A5B8AW61_9MICO Uncharacterized protein OS=Georgenia sp. Z294 OX=2585135 GN=FE251_11460 PE=4 SV =1
MTAAANVLWTAGWDSTYRVADLVFTYRKPVRPHYVKDWRRASTRLEMLRQQEIREEIARIDPDAARLLLPTVVHHYDDIPADPAARKQHEGARQLGFLGTQYLFLTAMARSSGLTNLEIVAHRDDNAVRLLEGNVRFQDDDAGGYHELVPQPTKPALELFRPFRFPVFDMTKIEMGERAAAAGFGQVMELTWFCHYPTLGGKPCGVCNPCRYTREEGLGRRVPGATRARLVAHMVNRKTGAVARRIGHKIGRCT

SEQ ID NO: 38448 - protein, 229 aa, Geothermobacter ehrlichii
  misc_feature (1)..(229): tr|A0A5D3WGT5|A0A5D3WGT5_9DELT 7-cyano-7-deazaguanine s ynthase OS=Geothermobacter ehrlichii OX=213224 GN=queC PE=3 SV=1
MKKKAVVLYSGGLDSTTCLAIARDQGFAPHALSFSYGQRHTVELEKARRYAPLVGAVEHRVVDIDLRAFGGSALTDAIEVPKDRPLEAGIPVTYVPARNTIFLSFALAWAEVLGAFDIFIGVNALDYSGYPDCRPDYIAAWERLANLATAAAVEGKGRYRIHAPLLHLSKAEIIRRGLELGVDYGLTHSCYDPDPQGRACGRCDSCRLRLKGFAEAGAEDPVAYLRQDQ

SEQ ID NO: 38449 - protein, 225 aa, Geothermobacter sp.
  misc_feature (1)..(225): tr|A0A1X0XZG3|A0A1X0XZG3_9DELT 7-cyano-7-deazaguanine s ynthase OS=Geothermobacter sp. EPR-M OX=1969733 GN=queC PE=3 SV=1
MKKKAVVLYSGGLDSTTCLAIARDQGFAPYALSFAYGQRHTVELEKAKTYAPQIGAVAHRVADIDLRAFGGSALTADIEVPKDRPLDEEIPVTYVPARNTIFLSFALGWAEVLGAFDIFIGVNALDYSGYPDCRPEYIAAWQKLANLATAAAVEGKGEYRIHSPLLELTKADIIRRGLDLGVDYSLTHSCYDPTPEGLACGRCDSCRLRLKGFAEVGLQDPVAYA

SEQ ID NO: 38450 - protein, 225 aa, Geothermobacter sp.
  misc_feature (1)..(225): tr|A0A2K2HAT9|A0A2K2HAT9_9DELT 7-cyano-7-deazaguanine s ynthase OS=Geothermobacter sp. HR-1 OX=654845 GN=queC P E=3 SV=1
MKKKAVVLYSGGLDSTTCLAIARDQGFAPYALSFAYGQRHTVELEKAKTYAPQIGAVAHQVADIDLRAFGGSALTADIEVPKDRPLDEEIPVTYVPARNTIFLSFALGWAEVLGAFDIFIGVNALDYSGYPDCRPEYIAAWQKLANLATAAAVEGKGEYRIHSPLLELTKADIIRRGLDLGVDYSLTHSCYDPTPEGLACGRCDSCRLRLKGFAEVGLQDPVAYA

SEQ ID NO: 38451 - protein, 224 aa, Geovibrio thiophilus
  misc_feature (1)..(224): tr|A0A3R5YZC4|A0A3R5YZC4_9BACT 7-cyano-7-deazaguanine s ynthase OS=Geovibrio thiophilus OX=139438 GN=queC PE=3 SV=1
MSKKKAVVLVSGGMDSCVTAAVAAQNYEPCFLHVNYGQKTENRESKAFEALCLAYGIKRKLVVDISYLREIGGSSLTDDAIEVEEGELDRQGIPKTYVPFRNANILSIAASWAEVLEASAIFIGAVEEDGSGYPDCRRVFYDAFEAAIDAGTRPETKIKIETPLISMKKCDIVKLGKELGAPLELSWSCYKSEDEACGECDSCLLRLRGFKQAGYEDPIPYKKR

SEQ ID NO: 38452 - protein, 232 aa, Gibbsiella quercinecans
  misc_feature (1)..(232): tr|A0A250AYQ6|A0A250AYQ6_9ENTR 7-cyano-7-deazaguanine s ynthase OS=Gibbsiella quercinecans OX=929813 GN=queC PE =3 SV=1
MKRAVVVFSGGQDSTTCLIQALQHYDEVHCITFDYGQRHRAEIEVAQRLAHRLGAKAHKVLDVNLLNELAISSLTRDNIPVPAYGSEQPDALPSTFVPGRNILFLTLAAIYAYQVEAEAVITGVCETDFSGYPDCRDAFVKALNHAVVLGIARDIRFETPLMWLNKAETWALADYYHQLALVRQETLTCYNGIQGDGCGECAACNLRANGLRQYQENQAAVLASLKQKAGLA

SEQ ID NO: 38453 - protein, 235 aa, Giesbergeria anulus
  misc_feature (1)..(235): tr|A0A1H9RU43|A0A1H9RU43_9BURK 7-cyano-7-deazaguanine s ynthase OS=Giesbergeria anulus OX=180197 GN=queC PE=3 S V=1
MRDGKALVLFSGGQDSTTCLAWALEQFAHVETIGFDYGQRHQVELQARQDVLQALRAQFPHWGARLGEDHMVDLAVLGQISDTALTRDTEIAMTAAGLPNTFVPGRNLLFFQLAAAVGYRRGLHILVGGMCETDFSGYPDCRDDTIKALQVAVSLGMGQRFTFETPLMWLDKEQTWALAQTLGGTALIDILIEQSHTCYHGTRELRHPWGYGCGHCPACALRQRGFESWQAALNS

SEQ ID NO: 38454 - protein, 421 aa, Giesbergeria anulus
  misc_feature (1)..(421): tr|A0A1H9RHR9|A0A1H9RHR9_9BURK Queuosine biosynthesis p rotein QueC OS=Giesbergeria anulus OX=180197 GN=SAMN029 82919_02884 PE=4 SV=1
MMKVLCTSIDHLPATLADGERAFTLFKSAKRAGIGTIAKGWRGSLRRKGFAPSAQTWDFVQFCLSACAADLCCPRNTSADGWTRTIELTVALHEPLRWTPWKVHAEALLKVLTGDYWTLNFVDGGVAPPNGKPQPLVHDCVSLLSGGLDSLVGGINLVSEGRRPAFVSQLAHEDSERQRRYAAMLGGGATHMQWSHGISFSGRREPSTRGRSLAFYAFAVLAASRIAGAPVQVFIPENGLICINPPLVPGRVASLSTRTTHPLFIAKLQELLDGLNIGVHLELPYQFKTKGEMLQECADQALLSNVASDSTSCGRYRTYNRIHCGRCVPCMIRRAAFLAWGPGRDATQYVYQSVVGSDKSSGPDDPMAAALAVLLAKEKGLNRFLGGTLAFASLAERPAYRRVLQAGFDELENLLRGDGLL

SEQ ID NO: 38455 - protein, 218 aa, Gilliamella apicola
  misc_feature (1)..(218): tr|A0A1B9MZ20|A0A1B9MZ20_9GAMM 7-cyano-7-deazaguanine s ynthase OS=Gilliamella apicola OX=1196095 GN=queC PE=3 SV=1
MQTRKALVIFSGGQDSTTCLLQAITDYGRENVETISFQYGQRHAIELEKAKWIAEDLGVKQTVVDTSVIKQTTNNALIDDSQKITAAKEGDYPNTFVDGRNMLFLLLAGCHAKQHGISDIIIGVCETDFSGYPDCRDIFIKSMNVSMNLAMDYNFNLITPLMYLTKAQTWEMADKLGYLGYVRDHTHTCYYGIDGGCGKCPSCILRDKGLTEYLNHSN

SEQ ID NO: 38456 - protein, 217 aa, Gilliamella apicola
  misc_feature (1)..(217): tr|A0A081Y0T1|A0A081Y0T1_9GAMM 7-cyano-7-deazaguanine s ynthase OS=Gilliamella apicola SCGC AB-598-B02 OX=14455 13 GN=queC PE=3 SV=1
MKNRKALVIFSGGQDSTTCLLQAIADYGLENVETISFQYGQRHSIELDKAKWIAEDLGVKQTVIDTSVIKQTTNNALIDDSQEIKAAQDGDYPNTFVDGRNMLFLLLAGCYAKQQDIQDIIIGVCETDFSGYPDCRDIFIKSMNVSMNLAMDYAFNIKTPLMYLTKAQTWEMADKLGYLDYVRQNTHTCYYGVEGGCGKCPSCMLRDKGLQEYLAKT

SEQ ID NO: 38457 - protein, 218 aa, Gilliamella apis
  misc_feature (1)..(218): tr|A0A242P8H5|A0A242P8H5_9GAMM 7-cyano-7-deazaguanine s ynthase OS=Gilliamella apis OX=1970738 GN=queC PE=3 SV= 1
MQNRKALVIFSGGQDSTTCLLQAIADYGRENVETISFQYGQRHAIELKKAKWIAEDLGVKQTVIDTSVIKQTTNNALIDDSQEIKAAKEGDYPNTFVDGRNMLFLLLAGCYAKQQDICDIIIGVCETDFSGYPDCRDIFIKSMNVSMNLAMDYNFNLITPLMYLTKAQTWEMADKLGYLDYVRKYTHTCYYGVDGGCGKCPSCILREKGLNEYFNHSN

SEQ ID NO: 38458 - protein, 218 aa, Gilliamella apis
  misc_feature (1)..(218): tr|A0A242NV39|A0A242NV39_9GAMM 7-cyano-7-deazaguanine s ynthase OS=Gilliamella apis OX=1970738 GN=queC PE=3 SV= 1
MQNRKALVIFSGGQDSTTCLLQAIADYGRENVETISFQYGQRHAIELEKAKWIAEDLGVKQTVIDTSVIKQTTNNALIDDSQEIKAAKEGDYPNTFVDGRNMLFLLLAGCYAKQQDICDIIIGVCETDFSGYPDCRDIFIKSMNVSMNLAMDYNFNLITPLMYLTKAQTWEMADKLGYLDYVRKYTHTCYYGVDGGCGKCPSCILREKGLNEYLNHSN

SEQ ID NO: 38459 - protein, 218 aa, Gilliamella bombicola
  misc_feature (1)..(218): tr|A0A1C3YNQ5|A0A1C3YNQ5_9GAMM 7-cyano-7-deazaguanine s ynthase OS=Gilliamella bombicola OX=1798182 GN=queC PE= 3 SV=1
MQTRKALVIFSGGQDSTTCLLQAIADYGRENVQAISFHYGQRHAIELEKAKWIAKDLGIKQTVIDTSVIKQTTNNALIDDSQEIQAAQDGDYPNTFVDGRNMLFLLLAGCHAKQQGIADIIIGVCETDFSGYPDCRDIFIKSMNVSMNLAMDYAFNLITPLMYLTKAQTWEMADKLGYLDYVQQHTHTCYYGVDGGCGKCPSCLLRDKGLQEYMARAR

SEQ ID NO: 38460 - protein, 218 aa, Gilliamella intestini
  misc_feature (1)..(218): tr|A0A1C3YXE4|A0A1C3YXE4_9GAMM 7-cyano-7-deazaguanine s ynthase OS=Gilliamella intestini OX=1798183 GN=queC PE= 3 SV=1
MQTRKALVIFSGGQDSTTCLLQAIADYGRENVQAISFHYGQRHAIELEKAKWIADDLGIEQTVIDTSVIKQTTNNALIDDAQEIKAAQDGDYPNTFVDGRNMLFLLLAGCHAKQQGISDIIIGVCETDFSGYPDCRDVFIKSMNVSMNLAMDYTFNLITPLMYLTKAQTWEMADKLGYLDYVQKHTHTCYYGVEGGCGKCPSCLLRNKGLQEYMAQDK

SEQ ID NO: 38461 - protein, 218 aa, Gilliamella sp.
  misc_feature (1)..(218): tr|A0A242PFD8|A0A242PFD8_9GAMM 7-cyano-7-deazaguanine s ynthase OS=Gilliamella sp. N-G2 OX=1970471 GN=queC PE=3 SV=1
MQNRKALVIFSGGQDSTTCLLQAIADYGRENVETISFQYGQRHVIELEKAKWIAEDLGVKQTVIDTSVIKQTTNNALIDDSQEIKAAKEGDYPNTFVDGRNMLFLLLAGCYAKQQGIPNVIIGVCETDFSGYPDCRDIFIKSMNVSMNLAMDYNFNLITPLMYLTKAQTWEIADKLGCLAYVRKHTHTCYYGVDGGCGQCPSCILREKGLNEYLNHSN

SEQ ID NO: 38462 - protein, 218 aa, Gilliamella sp.
  misc_feature (1)..(218): tr|A0A242P1P2|A0A242P1P2_9GAMM 7-cyano-7-deazaguanine s ynthase OS=Gilliamella sp. A7 OX=1970465 GN=queC PE=3 S V=1
MQNRKALVIFSGGQDSTTCLLQAIADYGRENVETISFQYGQRHAIELEKAKWIAEDLGVKQTVIDTSVIKQTTNNALIDDSQEITATKETDYPNTFVDGRNMLFLLLAGCYAKQHDICDIIIGVCETDFSGYPDCRDIFIKSMNVSMNLAMDYHFNIITPLMYLTKAQTWEIADKLGYLDYVRKYTHTCYYGVDGGCGKCPSCILRDKGLTDYLRHSN

SEQ ID NO: 38463 - protein, 233 aa, Gimesia maris
  misc_feature (1)..(233): tr|A0A3D3R5A2|A0A3D3R5A2_9PLAN 7-cyano-7-deazaguanine s ynthase OS=Gimesia maris OX=122 GN=queC PE=3 SV=1
MTTEVPKAVVLVSGGLDSATTLAIAADAGFELYALSFDYGQRHRHELEAAKKVCQAFDVKKFVIFPLDLRVFGGSALTADIDVPKDRSEHDLETGIPITYVPARNTVFLSLALAWAETLNAYDLFIGVNAVDYSGYPDCRPEFISAFQTVASLATKTGVEHSGHWKIHTPLISLKKADIIKTGMELGVDYGLTHSCYDPLSDGTPCGHCDSCQLRAKGFAEAGFADPALKADR

SEQ ID NO: 38464 - protein, 233 aa, Gimesia maris
  misc_feature (1)..(233): tr|A6C4N4|A6C4N4_9PLAN 7-cyano-7-deazaguanine synthase OS=Gimesia maris DSM 8797 OX=344747 GN=queC PE=3 SV=1
MTTEVPKAVVLVSGGLDSATTLAIAADAGFELYALSFDYGQRHRHELEAAKKVCQAFDVKKFVIFPLDLRVFGGSALTADIDVPKDRSEHDLETGIPITYVPARNTVFLSLALAWAETLNAYDLFIGVNAVDYSGYPDCRPEFISAFQTVASLATKTGVEHSGHWKIHTPLISLKKADIIKTGMELGVDYGLTHSCYDPLPDGTPCGHCDSCQLRAKGFAEAGFADPALKADS

SEQ ID NO: 38465 - protein, 232 aa, Gimesia sp.
  misc_feature (1)..(232): tr|A0A2E2C107|A0A2E2C107_9PLAN 7-cyano-7-deazaguanine s ynthase OS=Gimesia sp. OX=2024833 GN=queC PE=3 SV=1
MTTVAPKAVVLVSGGLDSATTLAIAAHAGFELYALSFDYGQRHRQELEAAKKVCQAFDVKKFVTFPLDLRVFGGSALTADIDVPKDRTEHDLETGIPITYVPARNTVFLSIALAWAETLNAYDLFIGVNAVDYSGYPDCRPEFISAFQTVASLATKTGVEHSGHWKIHTPLISLTKADIIRTGMELGVDYGLTHSCYDPLPDGTPCGHCDSCQLRIKGFQEAGFADPALKTD

SEQ ID NO: 38466 - protein, 231 aa, Gimesia sp.
  misc_feature (1)..(231): tr|A0A2E7KIH8|A0A2E7KIH8_9PLAN 7-cyano-7-deazaguanine s ynthase OS=Gimesia sp. OX=2024833 GN=queC PE=3 SV=1
MSSAAPRAVVLVSGGLDSATTLAIAADAGFELYALSFDYGQRHRHELDAAKKVCQAFDAQHFVTFPLDLRVFGGSALTADIEVPKDRSDDDLEAGIPITYVPARNTVFLSLALAWAETLNAFDLFIGVNAVDYSGYPDCRPEFIESFEKMANLATKSGVEHSGTWKVHTPLISLTKAEIIQKGMELGVDYGLTHSCYDPLPDGTPCGHCDSCQLRAKGFAEAGFDDPALKS

SEQ ID NO: 38467 - protein, 219 aa, Glaciecola nitratireducens
  misc_feature (1)..(219): tr|G4QKN8|G4QKN8_GLANF 7-cyano-7-deazaguanine synthase OS=Glaciecola nitratireducens (strain JCM 12485 / KCTC 12276 / FR1064) OX=1085623 GN=queC PE=3 SV=1
MSAKVVVIYSGGMDSYTVLNKAMQQGYDVHAVSFNYGQRHSKELLFAKKVCEQHKIEHKIVDISSINQLIGGSALTDDIDVPEGHYEEESMKTTVVPNRNMIMLSMAVGYAVSIEAEAVYFGAHSGDHAIYPDCRTEFVDAMNDVCKIANYQAVEVRAPYLAASKIDILRDGLAMNLDYADTWTCYNGQERACGRCGACQERLEAFAENNTVDPIAYQD

SEQ ID NO: 38468 - protein, 219 aa, Glaciecola pallidula
  misc_feature (1)..(219): tr|K7A4G3|K7A4G3_9ALTE 7-cyano-7-deazaguanine synthase OS=Glaciecola pallidula DSM 14239 = ACAM 615 OX=1121922 GN=queC PE=3 SV=1
MSAKVVVIYSGGMDSYTVLNKAMQQGYDVHAVSFNYGQRHSKELLFAKKVCEQHNIEHKVVDISSINQLIGGSALTDDIDVPQGHYQEESMKTTVVPNRNMIMLSMAVGYAVSIEAEAVYFGAHSGDHAIYPDCRTEFVDAMNDVCKIANYQAVEVRAPYLAASKTDILREGLAMDLDYNDTWTCYNGQDKACGKCGACQERLEAFSENNTIDPIDYQN

SEQ ID NO: 38469 - protein, 219 aa, Glaciecola punicea
  misc_feature (1)..(219): tr|H5T8R2|H5T8R2_9ALTE 7-cyano-7-deazaguanine synthase OS=Glaciecola punicea ACAM 611 OX=1121923 GN=queC1 PE=3 SV=1
MSTKKVVIIYSGGMDSYTVLHLAKHEGYEVHAVSFNYGQRHSKELLYAEKVTRKFNIPHKIVDISSINQLIAGSSLTSNIDVPQGHYEEASMKQTVVPNRNMILLSLAVGYAVSIKAEAVYFGAHSGDHAIYPDCRTEFVSTMNEVCKIANYEAVEVRAPFLKSDKIEILARGLALNLDYNDTWTCYNGREKACGKCGACQERLEAFAGNNMTDPLEYE

SEQ ID NO: 38470 - protein, 219 aa, Glaciecola sp.
  misc_feature (1)..(219): tr|A0A2N1HPU8|A0A2N1HPU8_9ALTE 7-cyano-7-deazaguanine s ynthase OS=Glaciecola sp. 33A OX=2057807 GN=queC PE=3 S V=1
MSAKVVVIYSGGMDSYTVLNKAMQQGYDVHAVSFNYGQRHSKELLFAKKVCEQHDIEHKVVDISSINQLIGGSALTDDIDVPEGHYQEESMKTTVVPNRNMIMLSMAVGYAVSIEAEAVYFGAHSGDHAIYPDCRTEFVDAMNDVCKIANYQAVEVRAPYLAASKTDILREGLVMNLDYNDTWTCYNGQEKACGRCGACQERLEAFSENNTIDPIDYQN

SEQ ID NO: 38471 - protein, 218 aa, Glaciecola sp.
  misc_feature (1)..(218): tr|A0A2Z6UEP3|A0A2Z6UEP3_GLASK 7-cyano-7-deazaguanine s ynthase OS=Glaciecola sp. (strain KUL10) OX=2161813 GN= queC PE=3 SV=1
MGKKVVVIYSGGMDSFTVLNKALQQGYEVHATSFNYGQRHSKELEFAKRVTEKLNIPHKIVDISAINQLILGSALTDDIDVPEGHYEEQSMQQTVVPNRNMIMLSLAVGYAVSVEAEAVYFGAHSGDHAIYPDCRTEFVDAMNEVCKIANYQAVEVRAPYLQSDKIEILADGLAMDLDYADTWTCYNGREKACGKCGACQERLEAFEKNGIKDPLAYE

SEQ ID NO: 38472 - protein, 233 aa, Glaciimonas sp.
  misc_feature (1)..(233): tr|A0A2T6F576|A0A2T6F576_9BURK 7-cyano-7-deazaguanine s ynthase OS=Glaciimonas sp. PCH181 OX=2133943 GN=queC PE =3 SV=1
MTISSGALVLFSGGQDSTTCLAWALSRYDRVETIGFDYGQRHAIELTQRPILLEKLRSQSAEWDEKLDEDHVIDLSIISKISSTAMTEDVEIVMQENGLPNTFVPGRNLLFMTVAATVAYRRGLDVLVGGMCETDFSGYPDCRDDTMKALQVALNLGMATRLKLETPLMWIDKSETWKMAQDLGGDALVDLIRADTHTCYLGDRGMLHDWGYGCGTCPACALRARGYQQFASS

SEQ ID NO: 38473 - protein, 219 aa, Glaesserella parasuis
  misc_feature (1)..(219): tr|U4SHT2|U4SHT2_HAEPR 7-cyano-7-deazaguanine synthase OS=Glaesserella parasuis D74 OX=1275971 GN=queC PE=3 SV =1
MKPTPKAAVIFSGGQDSTTCLFLAIKEFGKENVEAVTFQYGQRHAIELDKARWIAQDLGVKQTLIDTSVIKAITANALMDDQAEIKQIGNTPNTFVDGRNALFLLYTAIYAKSQGIQTIYTGVCETDFSSYPDCRDVFIKSMNVTLNLAMDYNFNIRTPLMYLTKKETWALADQLGAFDYIRTHTHTCYLGVEGGCHTCPSCLLREKGLNEYLEEKSNV

SEQ ID NO: 38474 - protein, 219 aa, Glaesserella parasuis
  misc_feature (1)..(219): tr|U4RUH5|U4RUH5_HAEPR 7-cyano-7-deazaguanine synthase OS=Glaesserella parasuis str. Nagasaki OX=1117322 GN=qu eC PE=3 SV=1
MKPTPKAVVIFSGGQDSTTCLFLAIEEFGKENVEVVTFQYGQRHAIELDKARWIAQDLGVKQTLIDTSVIKAITTNALMDDQAEIKQTGNTPNTFVDGRNALFLLYTAIYAKSQGIQTIYTGVCETDFSGYPDCRDVFIKSMNVTLNLATDYNFNIRTPLMYLTKKETWALADQLGAFDYIRTHTHTCYLGVEGGCHTCPSCLLREKGLNEYLEEKSNV

SEQ ID NO: 38475 - protein, 219 aa, Glaesserella sp.
  misc_feature (1)..(219): tr|A0A328BVY4|A0A328BVY4_9PAST 7-cyano-7-deazaguanine s ynthase OS=Glaesserella sp. HHC-2018 OX=2094024 GN=queC PE=3 SV=1
MNTTPKAAVIFSGGQDSTTCLFLAIQEFGKENVEVVTFQYGQRHAIELEKARWIAQDLGVKQTVIDTSVIKAITTNALMDDNAEIKQTGATPNTFVDGRNALFLLYTAIYAKSQGIQTLYTGVCETDFSGYPDCRDVFIKSMNVTLNLAMDYNFNIRTPLMYLTKKETWALADKLEAFDYIREHTHTCYLGVEGGCHTCPSCLLREKGLNEYLEEKGNV

SEQ ID NO: 38476 - protein, 229 aa, Gloeobacter kilaueensis
  misc_feature (1)..(229): tr|U5QCG5|U5QCG5_9CYAN 7-cyano-7-deazaguanine synthase OS=Gloeobacter kilaueensis JS1 OX=1183438 GN=queC PE=3 SV=1
MVLSGGQDSTTCAALACRQFDAVYAVTFEYNQRHAIELESAQAVSEALALAGQEVIRLGPVLKGTSPLVSDAPVGEYDSPEQLPGGVEPTFIPGRNILFLTIAANRAYCLGCRDIFIGVCEADFAGYWDCRQLFIDAMAKALGEGIYGDPAALRIHAPLMHLSKAQTVRLSAEVLGERFEEVLEQTHTCYQGIRGGCGRCHACILRDRGFREAKIADPIWKYRKEPIKL

SEQ ID NO: 38477 - protein, 234 aa, Gloeobacter violaceus
  misc_feature (1)..(234): sp|Q7NCE2|QUEC_GLOVI 7-cyano-7-deazaguanine synthase OS =Gloeobacter violaceus (strain ATCC 29082 / PCC 7421) O X=251221 GN=queC PE=3 SV=1
MKKALVVFSGGQDSTTCAALACREYDEVHAVTFEYNQRHAIELESARAVGQALGLTGHEFIRLGPLLKGTSPLVSDAPLGQYASAAELPAGVEPTFVPGRNILFLTLAANRAFCLGTGDIVIGVCEADFAGYWDCRQVFVEAMARALGEGIYGDANAIRIHTPLMRLTKAETVKLSVEVLGERFEEVLALSHTCYAGVRGGCGRCHACILRDRGFREAGVPDPIWKFRKEPVSL

SEQ ID NO: 38478 - protein, 227 aa, Gloeocapsa sp.
  misc_feature (1)..(227): tr|K9X863|K9X863_9CHRO 7-cyano-7-deazaguanine synthase OS=Gloeocapsa sp. PCC 7428 OX=1173026 GN=queC PE=3 SV=1
MKAVILLSGGLDSSTVLYQAVADGYKCYAISFDYQQRHQRELKAAIAIAQSTQVLVHKVVNFDLRSWGGSALTDTSIELPSDRAVSEMSQNVPVTYVPARNTIFLSFALAYAETIAAQRVYIGVNALDYSGYPDCRPDYIQAMQEVFRLGTKLGREGQPIAIETPLINLKKTEIIQLGNQLGVPWEKTWSCYAGGAIACGVCDACRLRLAAFAELGLEDPILYRTRI

SEQ ID NO: 38479 - protein, 223 aa, Gloeocapsa sp.
  misc_feature (1)..(223): tr|L8LM79|L8LM79_9CHRO 7-cyano-7-deazaguanine synthase OS=Gloeocapsa sp. PCC 73106 OX=102232 GN=queC PE=3 SV=1
MRQAVVLLSGGLDSATTTAIALKDGYQVIALSFRYGQRHERELKAAVKIAQTLGIQEHYIIDVNLAQWGGSSLTDVHLALPQEGVKPGIIPSTYVPGRNTVFISIALSLAEAKQAEAIYLGINAVDYSGYPDCRPEYLEAYQKLANLSSKAGIEGKAPQLIAPLVHLTKVDIVKSAIALGVPIEDTWSCYLGGDTPCGLCDSCRIRDQALIAAGYPYLASSKV

SEQ ID NO: 38480 - protein, 228 aa, Gloeomargarita lithophora
  misc_feature (1)..(228): tr|A0A1J0AH30|A0A1J0AH30_9CYAN 7-cyano-7-deazaguanine s ynthase OS=Gloeomargarita lithophora Alchichica-D10 OX= 1188229 GN=queC PE=3 SV=1
MNQRAIVLLSGGLDSATVLYHAQAAGDECYALSFDYQQRHRRELHSAQAIAHSAAVHGHEIIPLDLGRWGGSALTQRDLDLPRQRHPAAMTQGIPITYVPARNTIFLSLALAWAEVLGAKRVYLGANALDYSGYPDCREDYLLAMQQVYTLGTKRGREGQPIELAAPLLHLHKGEIIQLGQELGVPWELTWSCYQGEEMACGMCDSCILRREGFRQAGIEDPLPYAGT

SEQ ID NO: 38481 - protein, 230 aa, Gloeothece citriformis
  misc_feature (1)..(230): sp|B7K7J4|QUEC_GLOC7 7-cyano-7-deazaguanine synthase OS =Gloeothece citriformis (strain PCC 7424) OX=65393 GN=q ueC PE=3 SV=1
MNQPKAVILLSGGLDSATTAAIALASGYEAIALSLFYGQRHHKEIEAAQKIVQVLGIKEHYSLEVNLSQWGGSALTDQSIEVPKAGLNPHLIPITYVPGRNTVFIAIALSLAEAKGAQAIYLGINAIDYSGYPDCRPEYLEAFQKLANLSSKIGVEGKTIQLIAPLVKDSKVDIVRRAVRLGVPIADTWSCYQGEDEPCGLCDSCRIRDRALIEAGYPELATEIGRKLSH

SEQ ID NO: 38482 - protein, 227 aa, Gloeothece verrucosa
  misc_feature (1)..(227): tr|E0UJP7|E0UJP7_GLOV7 7-cyano-7-deazaguanine synthase OS=Gloeothece verrucosa (strain PCC 7822) OX=497965 GN= queC PE=3 SV=1
MNQPLAVVLLSGGLDSATSAAIALADGYEVIALSLSYGQRHQRELQAAKKVVAALDIKSHYIMDVNLSQWGGSSLTDELIDMPTDGVKPNLIPNTYVPGRNTVFIAIALSLAEAKGAEAIYLGINAVDYSGYPDCRPEYIEAFQKLASLSSKVGVEGKAIQLMAPLVKDSKADIVRRAMSLEVPIADTWSCYQGGDEPCGLCDSCRIRNRALIEAGYPELATPVLKS

SEQ ID NO: 38483 - protein, 245 aa, Gluconacetobacter diazotrophicus
  misc_feature (1)..(245): sp|A9HRF6|QUEC_GLUDA 7-cyano-7-deazaguanine synthase OS =Gluconacetobacter diazotrophicus (strain ATCC 49037 / DSM 5601 / PAl5) OX=272568 GN=queC PE=3 SV=1
MATSLTPADPLQEAAIVLFSGGQDSATCLAWALSRFGRVETVGFDYGQRHAVELACRARLRDGMAALDPDWATRLGQDHTLALDALGTVSDTALTRDAAITMNENGLPSTFVPGRNLIFLTFAAALAARRGARHIVGGMCETDYSGYPDCRDDTIKAMQVALNLGMASRYVLHTPLMWIDKAETWRMAEGLGGADLVELINRESHSCYLGVRDVMHPWGHGCGTCPACMLRRAGWERYVADGADA

SEQ ID NO: 38484 - protein, 246 aa, Gluconacetobacter entanii
  misc_feature (1)..(246): tr|A0A318PZK3|A0A318PZK3_9PROT 7-cyano-7-deazaguanine s ynthase OS=Gluconacetobacter entanii OX=108528 GN=queC PE=3 SV=1
MTIPAPSCAGPSGESALVVFSGGQDSATCLAWALSRFAHVETLGFDYGQRHSVELSCLEKLRDGMAALDPAWGARLGPDHTLSLDALGAVSDTALTREAEITLGENGLPTTFVPGRNIIFLTFAAALAARRNARHIITGVCETDYSGYPDCRDDTIKALQVTLNLGMASRLVLHTPLMWIDKAQTWMMARELGGDALVDLINRESHSCYLGTRGVMHPWGHGCGTCPACQLRRAGWERFEAMTSDA

SEQ ID NO: 38485 - protein, 245 aa, Gluconacetobacter liquefaciens
  misc_feature (1)..(245): tr|A0A370G309|A0A370G309_GLULI 7-cyano-7-deazaguanine s ynthase OS=Gluconacetobacter liquefaciens OX=89584 GN=q ueC PE=3 SV=1
MAASLTPADPKQESAIVLFSGGQDSATCLAWALSRFGRVETLGFAYGQRHAVELECRDTLRAGMAAHDPAWAARLGEDHTLALDALGAVSDTALTRDAAITMNENGLPSTFVPGRNLIFLTFAAALAARRGARHIIGGMCETDYSGYPDCRDDTIKAMQVALNLGMASRLVLHTPLMWIDKADTWRLAESLGGPDLVALINRESHSCYLGTRETMHPWGHGCGTCPACDLRRNGWERYMAGRKNA

SEQ ID NO: 38486 - protein, 245 aa, Gluconacetobacter sp.
  misc_feature (1)..(245): tr|F3SDH6|F3SDH6_9PROT 7-cyano-7-deazaguanine synthase OS=Gluconacetobacter sp. SXCC-1 OX=1004836 GN=queC PE=3 SV=1
MSVSPPPSTPAREAALVLFSGGQDSATCLAWALARFGRVETLGFDYGQRHAVELECRATLREGMATENPQWAARLGADHTLDLAVLGTLSDTALTREAEITLNENGLPNTFVPGRNLLFLTFAAALAARRNIRHIITGVCETDYSGYPDCRDDTIKSLQVTLNLGMASHYVLHTPLMWLDKARTWELARTLGGDALVGLINRESHSCYLGTRGTLHPWGHGCGTCPACQLRKAGWERFLAECCHV

SEQ ID NO: 38487 - protein, 243 aa, Gluconobacter albidus
  misc_feature (1)..(243): tr|A0A1U9KW92|A0A1U9KW92_9PROT 7-cyano-7-deazaguanine s ynthase OS=Gluconobacter albidus OX=318683 GN=queC PE=3 SV=1
MSTTISSNTALVLFSGGQDSATCLAWALSRFDRVETVGYAYGQRHAIELECRDTLREQMAAFSPDCKARLGDDHTIDLASLGALSETALTREAEIGLSENGLPNTFVPGRNIIFLTFAAALAVRRNARHIVTGVCETDYSGYPDCRDDTIKALQVALNLGMDQRFVLHTPLMWIDKAQTWDLTEQLGGQTLVDVINRDSHSCYMGDRTHQHDWGYGCGTCPACNLRADGWRRYQQNRHHGGAA

SEQ ID NO: 38488 - protein, 245 aa, Gluconobacter albidus
  misc_feature (1)..(245): tr|A0A149TH11|A0A149TH11_9PROT 7-cyano-7-deazaguanine s ynthase OS=Gluconobacter albidus OX=318683 GN=queC PE=3 SV=1
MSTNPAISSNTALVLFSGGQDSTTCLAWALSRFDRVETVGYAYGQRHAIELECRDTLREQMAAFSPEWKARLGDDHTIDLASLGSLSETALTREAEIGLSENGLPNTFVPGRNIIFLTFAAALAVRRNARHIVTGVCETDYSGYPDCRDDTIKALQVALNLGMDQRFVLHTPLMWIDKAQTWDLTEQLGGQTLVDVINRDSHSCYMGDRTHQHDWGYGCGTCPACNLRADGWRRYQQSRHHGGAA

SEQ ID NO: 38489 - protein, 233 aa, Gluconobacter cerinus
  misc_feature (1)..(233): tr|A0A1B6VLK8|A0A1B6VLK8_9PROT 7-cyano-7-deazaguanine s ynthase OS=Gluconobacter cerinus OX=38307 GN=queC PE=3 SV=1
MSNAALVLFSGGQDSATCLAWALSRFDRVETVGYAYGQRHLVELECRDTLRAQMAAHSAEWKARLGEDHTIDLASLGALSETALTREAEIGFNESGLPNTFVPGRNLIFLTFAAALAYRRNVKHIVTGVCETDYSGYPDCRDDTIKALQVALNLGMDQRFVLHTPLMWIDKAQTWDLTEELGGKALVDLINQESHSCYMGDRTHQHAWGYGCGTCPACQLRAEGWRRYCESKA

SEQ ID NO: 38490 - protein, 233 aa, Gluconobacter frateurii
  misc_feature (1)..(233): tr|A0A0D6PKL4|A0A0D6PKL4_9PROT 7-cyano-7-deazaguanine s ynthase OS=Gluconobacter frateurii M-2 OX=1231354 GN=qu eC PE=3 SV=1
MSNAALVLFSGGQDSATCLAWALSRFDRVETVGYAYGQRHLVELECRDTLRTRIAEHSPEWKARLGEDHTIDLASLGALSETALTREAEIGFNESGLPNTFVPGRNLIFLTFAAALAYRRNVKHIVTGVCETDYSGYPDCRDDTIKALQVALNLGMDQRFVLHTPLMWIDKAQTWDLTEELGGKTLVDLINHESHSCYMGDRTHHHAWGYGCGTCPACELRADGWRRYCESQA

SEQ ID NO: 38491 - protein, 233 aa, Gluconobacter frateurii
  misc_feature (1)..(233): tr|A0A0K8N4C1|A0A0K8N4C1_9PROT 7-cyano-7-deazaguanine s ynthase OS=Gluconobacter frateurii NBRC 101659 OX=11049 96 GN=queC PE=3 SV=1
MSNAALVLFSGGQDSATCLAWALSRFDRVETVGYAYGQRHLVELECRDTLRARMAEHSPEWKARLGEDHTIDLASLGALSETALTREAEIGFSESGLPNTFVPGRNLIFLTFAAALAYRRNVKHIVTGVCETDYSGYPDCRDDTIKALQVALNLGMDQRFVLHTPLMWIDKAQTWDLTEELGGKTLVDLINHESHSCYMGDRTHHHAWGYGCGTCPACELRAEGWRRYCENKA

SEQ ID NO: 38492 - protein, 233 aa, Gluconobacter japonicus
  misc_feature (1)..(233): tr|A0A149TMF1|A0A149TMF1_GLUJA 7-cyano-7-deazaguanine s ynthase OS=Gluconobacter japonicus OX=376620 GN=queC PE =3 SV=1
MSNAALVLFSGGQDSATCLAWALSRFDRVETVGYAYGQRHLVELECRDTLRARMAEHSSEWKARLGEDHTIDLASLGALSETALTREAEIGFSESGLPNTFVPGRNLIFLTFAAALAYRRNVKHIVTGVCETDYSGYPDCRDDTIKALQVALNLGMDQRFVLHTPLMWIDKAQTWDLTEELGGKTLVDLINHESHSCYMGDRTHHHTWGYGCGTCPACELRAEGWRRYCESKA

SEQ ID NO: 38493 - protein, 233 aa, Gluconobacter japonicus
  misc_feature (1)..(233): tr|A0A149SG99|A0A149SG99_GLUJA 7-cyano-7-deazaguanine s ynthase OS=Gluconobacter japonicus OX=376620 GN=queC PE =3 SV=1
MSNAALVLFSGGQDSATCLAWALSRFDRVETVGYAYGQRHLVELECRDTLRARMAEHSPEWKARLGEDHTIDLASLGALSETALTREAEIGFSESGLPNTFVPGRNLIFLTFAAALAYRRNVKHIVTGVCETDYSGYPDCRDDTIKALQVALNLGMDQRFVLHTPLMWIDKAQTWDLTEELGGKTLVDLINHESHSCYMGDRTHHHAWGYGCGTCPACELRAEGWRRYCESKA

SEQ ID NO: 38494 - protein, 244 aa, Gluconobacter kanchanaburiensis
  misc_feature (1)..(244): tr|A0A511B8I9|A0A511B8I9_9PROT 7-cyano-7-deazaguanine s ynthase OS=Gluconobacter kanchanaburiensis NBRC 103587 OX=1307948 GN=queC PE=3 SV=1
MSTNTAISSNTALVLFSGGQDSATCLAWALSRFDRVETVGYAYGQRHAIELECRDTLREQMAAFSPEWTARLGDDHTIDLASLGALSETALTREAEIGLSESGLPNTFVPGRNIIFLTFAAALAVRRNARHIVTGVCETDYSGYPDCRDDTIKALQVALNLGMDQRFVLHTPLMWIDKAQTWDLTEQLGGQKLVDVINRDSHSCYMGDRTHQHDWGYGCGTCPACDLRADGWRRYQQSRHGGAL

SEQ ID NO: 38495 - protein, 238 aa, Gluconobacter morbifer
  misc_feature (1)..(238): tr|G6XFJ6|G6XFJ6_9PROT 7-cyano-7-deazaguanine synthase OS=Gluconobacter morbifer G707 OX=1088869 GN=queC PE=3 SV=1
MSNTALVLFSGGQDSATCLAWALSRFDRVETVGYAYGQRHAVELDCRETLRHEMAAFSPEWKARLGEDHTIDLASLGALSDTALTREAEIGFSESGLPNTFVPGRNLIFLTFAAALAYRRGAKHIVTGVCETDYSGYPDCRDDTIKALQVALNLGMDSRFVLHTPLMWIDKAQTWDLTEALGGAPLVDLINRDSHSCYMGDRTHRHDWGYGCGACPACNLRAEGWRRYREGSARKDPA

SEQ ID NO: 38496 - protein, 233 aa, Gluconobacter oxydans
  misc_feature (1)..(233): tr|K7S9X4|K7S9X4_GLUOY 7-cyano-7-deazaguanine synthase OS=Gluconobacter oxydans H24 OX=1224746 GN=queC PE=3 SV =1
MSNAALVLFSGGQDSATCLAWALSRFDRVETVGYAYGQRHLVELECRDTLRTRMAEHSPEWKARLGEDHTIDLASLGALSETALTREAEIGFNESGLPNTFVPGRNLIFLTFAAALAYRRNVKHIVTGVCETDYSGYPDCRDDTIKALQVALNLGMDQRFVLHTPLMWIDKAQTWDLTEELGGKALVDLINHESHSCYMGDRTHHHAWGYGCGTCPACELRADGWRRYCESQA

SEQ ID NO: 38497 - protein, 242 aa, Gluconobacter oxydans
  misc_feature (1)..(242): sp|Q5FQR2|QUEC_GLUOX 7-cyano-7-deazaguanine synthase OS =Gluconobacter oxydans (strain 621H) OX=290633 GN=queC PE=3 SV=1
MTISSNTALVLFSGGQDSATCLAWALSRFDRVETVGYAYGQRHAIELECRETLRNEMAAFSPDWKARLGEDHTIDLASLGALSETALTREAEIGLSENGLPNTFVPGRNIIFLTFAAALAARRNARHIVTGVCETDYSGYPDCRDDTIKALQVTLNLGMDQRFVLHTPLMWIDKAQTWDLTEELGGQKLVNLINRDSHSCYMGDRTHQHDWGYGCGTCPACNLRADGWRRYQQSRPSHGGAA

SEQ ID NO: 38498 - protein, 241 aa, Gluconobacter roseus
  misc_feature (1)..(241): tr|A0A4Y3M2R7|A0A4Y3M2R7_9PROT 7-cyano-7-deazaguanine s ynthase OS=Gluconobacter roseus NBRC 3990 OX=1307950 GN =queC PE=3 SV=1
MTISSNTALVLFSGGQDSATCLAWALSRFDRIETVGYAYGQRHAIELECRETLRNEMAAFSPDWKARLGEDHTIDLASLGALSETALTREAEIGLSENGLPNTFVPGRNIIFLTFAAALAVRRNARHIVTGVCETDYSGYPDCRDDTIKALQVALNLGMDQRFVLHTPLMWIDKAQTWDLTEELGGQKLVDVINRDSHSCYMGDRTHRHDWGYGCGTCPACNLRAEGWRRYQQNRSEGGAA

SEQ ID NO: 38499 - protein, 233 aa, Gluconobacter sp.
  misc_feature (1)..(233): tr|A0A252BMP7|A0A252BMP7_9PROT 7-cyano-7-deazaguanine s ynthase OS=Gluconobacter sp. DsW_058 OX=1511210 GN=queC PE=3 SV=1
MSNAALVLFSGGQDSATCLAWALSRFDRVETVGYAYGQRHLVELECRDTLRAQMAAHSAEWKARLGEDHTIGLASLGALSETALTREAEIGFNESGLPNTFVPGRNLIFLTFAAALAYRRNVKHIVTGVCETDYSGYPDCRDDTIKALQVALNLGMDRRFVLHTPLMWIDKAQTWDLTEELGGKALVDLINQESHSCYMGDRTHQHAWGYGCGTCPACQLRAEGWRRYCESKA

SEQ ID NO: 38500 - protein, 242 aa, Gluconobacter sphaericus
  misc_feature (1)..(242): tr|A0A4Y3Q8C0|A0A4Y3Q8C0_9PROT 7-cyano-7-deazaguanine s ynthase OS=Gluconobacter sphaericus NBRC 12467 OX=13079 51 GN=queC PE=3 SV=1
MTISSNTALVLFSGGQDSATCLAWALSRFDRVETVGYAYGQRHAIELECRETLREQMAAFSSDWKSRLGEDHTIDLASLGALSETALTREAEIGLNESGLPNTFVPGRNIIFLTFAAALAVRRNARHIVTGVCETDYSGYPDCRDDTIKALQVALNLGMDQRFVLHTPLMWIDKAQTWDLTEQLGGQKLVNLINRESHSCYMGDRTHQHEWGYGCGSCPACNLRADGWRRYQQSRHSHGGAT

SEQ ID NO: 38501 - protein, 233 aa, Gluconobacter thailandicus
  misc_feature (1)..(233): tr|M9MAH6|M9MAH6_GLUTH 7-cyano-7-deazaguanine synthase OS=Gluconobacter thailandicus NBRC 3255 OX=1291534 GN=q ueC PE=3 SV=1
MSNAALVLFSGGQDSATCLAWALSRFDRVETVGYAYGQRHLVELECRDTLRTRMAEHSPEWKARLGEDHTIDLASLGALSETALTREAEIGFNESGLPNTFVPGRNLIFLTFAAALAYRRNVKHIVTGVCETDYSGYPDCRDDTIKALQVALNLGMDQRFVLHTPLMWIDKAQTWDLTEELGGKTLVDLINHESHSCYMGDRTHHHAWGYGCGTCPACELRADGWRRYCESQV

SEQ ID NO: 38502 - protein, 233 aa, Gluconobacter thailandicus
  misc_feature (1)..(233): tr|A0A149SM53|A0A149SM53_GLUTH 7-cyano-7-deazaguanine s ynthase OS=Gluconobacter thailandicus OX=257438 GN=queC PE=3 SV=1
MSNAALVLFSGGQDSATCLAWALSRFDRVETVGYAYGQRHLVELECRDTLRTRMAEHSPEWKARLGEDHTIDLASLGALSETALTREAEIGFNESGLPNTFVPGRNLIFLTFAAALAYRRNVKHIVTGVCETDYSGYPDCRDDTIKALQVALNLGMDQRFVLHTPLMWIDKAQTWDLTEELGGKALVDLINQESHSCYMGDRTHHHAWGYGCGTCPACELRADGWRRYCESKA

SEQ ID NO: 38503 - protein, 232 aa, Gluconobacter wancherniae
  misc_feature (1)..(232): tr|A0A511B106|A0A511B106_9PROT 7-cyano-7-deazaguanine s ynthase OS=Gluconobacter wancherniae NBRC 103581 OX=656 744 GN=queC PE=3 SV=1
MSTALVLFSGGQDSATCLAWALSRFERVETVGYAYGQRHAVELECRNVLREKMTAIHPQWSSRLGEDHTIDLASLGALSDTALTREASIGFAENGLPNTFVPGRNLIFLTFAAALAFRRGAKHIVTGVCETDYSGYPDCRDDTIKALQVALNLGMDKRFVLHTPLMWIDKAQTWDLTEELGGESLVNLIREDSHSCYLGDRTHLHPWGYGCGTCPACELRADGWRRYCESHS

SEQ ID NO: 38504 - protein, 242 aa, Glycocaulis alkaliphilus
  misc_feature (1)..(242): tr|A0A3T0E809|A0A3T0E809_9RHOB 7-cyano-7-deazaguanine s ynthase OS=Glycocaulis alkaliphilus OX=1434191 GN=queC PE=3 SV=1
MAVQASKPAAQDAKGALVLFSGGQDSAVCLAHALTHYDRVETIGFDYGQRHRVELEARVRVRQAMTALDPAWAEKLGGDVLVDISGYGQLAESALTYERVIEMGESGLPTSFVPGRNLVFLVMAAAHAWRRGLDVLVGGMCQTDYSGYPDCREDTLKAQERALSLGLDMPVTIDTPLMFLTKGETWELADGLGGKPLVDLIVEHSHTCYMGDREHRHDWGYGCGTCPACELRAAGWKEWAGA

SEQ ID NO: 38505 - protein, 239 aa, Glycocaulis sp.
  misc_feature (1)..(239): tr|A0A550JZT2|A0A550JZT2_9RHOB 7-cyano-7-deazaguanine s ynthase OS=Glycocaulis sp. ZYF765 OX=2518983 GN=queC PE =3 SV=1
MALKSDKALVLFSGGQDSATCLAWALDRFGEVETIGFDYGQRHRVELEARLAVREAVAARFPAWGAKLGPDRMVDLSGYGALAESALTGGDDASVSETGESGLPKTFVPGRNLVFLTVAGAHAWLRKAGTLVTGVCQTDYSGYPDCRQDTIDAQARALSLGLDVNLPVQTPLMHLTKAETWALAHDLGGDALVDLIVEESHTCYRGTRGARHDWGHGCGACPACELRAKGWTEWREGRA

SEQ ID NO: 38506 - protein, 188 aa, Gordonia alkanivorans
  misc_feature (1)..(188): tr|F9W271|F9W271_9ACTN 7-cyano-7-deazaguanine synthase OS=Gordonia alkanivorans NBRC 16433 OX=1027371 GN=queC PE=3 SV=1
MILIPDAPHIRSVGLMLSGGLDSSVCAAWLTAQSIAVFAIQLHHPRRPRREVTAADTVIALLGLERRDICVPPPNASAHIPRTVQLSVGLTEARGLGVERLVLADLRSDLPRIGTSVHRLTAEADYIENGSRGPEMWLPFWDVPKLGVKSLADDLAFPVGLTWSCDLDREAQCGACGGCLSRRSAGIA

SEQ ID NO: 38507 - protein, 232 aa, Gordonia paraffinivorans
  misc_feature (1)..(232): tr|M3VJV3|M3VJV3_9ACTN 7-cyano-7-deazaguanine synthase OS=Gordonia paraffinivorans NBRC 108238 OX=1223543 GN=q ueC PE=3 SV=1
MIKPPAVVLLSGGLDSTTVLAIANDLGYLAYALSFRYGQRHSVELEASKRVAESLGVERHEIVDIDLRPFGGSSLTADIPVPKHDSVDDVEPSIPNTYVPARNTIFLSFALAYAEVVGARDIFLGVNALDYSGYPDCRPEYIEAFQNMANLATRAGVDGQNLQIHTPLISMTKAEIVKKGVELGVDYSVTSSCYDPDPDGRACGHCDSCLLRLRGFEGAGFTDPIEYQGSHV

SEQ ID NO: 38508 - protein, 216 aa, Gordonia polyisoprenivorans
  misc_feature (1)..(216): tr|H0RJ69|H0RJ69_9ACTN 7-cyano-7-deazaguanine synthase OS=Gordonia polyisoprenivorans NBRC 16320 = JCM 10675 O X=1077976 GN=GOPIP_077_00460 PE=3 SV=1
MTVAADTTPPETPGVLLLSGGLDSTALAAILRPTLCLAIAYGQRPAAAETRAATAVCRELDLVCATITLDLAAIGSGLLLDDGPAPPDAASPEWWPFRNQLLVTAAAAVALNNGLHDVYIGTVAGDGERHADGTQAFYDALNTVMAVQEGAVKVHTPAIGCSTTDLLRRSGLGPSQLGWTTSCHRSDTPCGACPGCWKRRRVLAELQILDERDERS

SEQ ID NO: 38509 - protein, 216 aa, Gordonia sp.
  misc_feature (1)..(216): tr|A0A1V4Q2G5|A0A1V4Q2G5_9ACTN 7-cyano-7-deazaguanine s ynthase OS=Gordonia sp. i37 OX=1961707 GN=B1964_19730 P E=3 SV=1
MTVAADTTPPGTSGVLLLSGGLDSTALAAILRPTLCLAIAYGQRPAAAETRAAAAVCRELDLDCATITLDLAAIGSGLLLDDGPAPPDAASPEWWPFRNQLLVTAAAAVALNHGLHDVYIGTVAGDGERHADGTQAFYDALNTVMAVQEGAVKVHTPAIGCSTTDLLRRSGLGPSQLGWTTSCHRSDTPCGACPGCWKRHRVLADLQILDQRDERS

SEQ ID NO: 38510 - protein, 424 aa, Gordonia sp.
  misc_feature (1)..(424): tr|A0A1A0L4Q6|A0A1A0L4Q6_9ACTN Queuosine biosynthesis p rotein queC OS=Gordonia sp. 852002-10350_SCH5691597 OX= 1834085 GN=A5777_15940 PE=4 SV=1
MTASGAYVVRAQGDKKSRLQGYDTLKWPTAPGHTKSVVSDLAWNLAPLQDVAPAVADLVHIAAGAYMADRSTRRGARFSRDIALHVTVVAPELWTEELLDTTSELLGWLTGDTWNLTVAGGAEVDFEETLKVGENGSVALLSGGLDSFLGAIQLLMSGAETIFVGHKDSATSIRGAQSTVGTWLGQSFAPAPSYTRVQLAQAIRRREPSSRSRAFMFLSLGVAVASSLGSRSLIIPENGYTGINLPLRPNRGGALSTRSTHPETFRRVAEILTALNIDVTVTNPFEWMTKGEMMQSIRGLRPPSGWQETAAATLSCSKLGGNWFGGSPNLNCGLCVPCMVRRATFIKAEVPDKTQYLCHAISGTHLAELIDARRGDIEAVRYAIEAGADADAIDSGTWPPDYDLDRVEGLVQRGLDELAMLELP

SEQ ID NO: 38511 - protein, 218 aa, Gottschalkia acidurici
  misc_feature (1)..(218): tr|K0B4U8|K0B4U8_GOTA9 7-cyano-7-deazaguanine synthase OS=Gottschalkia acidurici (strain ATCC 7906 / DSM 604 / BCRC 14475 / CIP 104303 / NCIMB 10678 / 9a) OX=1128398 GN=queC PE=3 SV=1
MKNESAVVVFSGGQDSTTCLFWAKERFKEVIAVSFDYNQRHSEELECAKEICKKHNFEHHILDMSLLNQLAPNSLTRTDIKVDKEASEGEVPNSCVDGRNMLFLTFVAVFAKQRDIKHIITGVSQSDFSGYPDCRDVFIKSLNVTLNLSMDYEYVVHTPLMWIDKEETWKMADDLGVLEVIKNETLTCYNGIKGSGCGECPSCTLRNRGYENYINSFK

SEQ ID NO: 38512 - protein, 212 aa, Gottschalkiaceae bacterium
  misc_feature (1)..(212): tr|A0A521IYP3|A0A521IYP3_9FIRM 7-cyano-7-deazaguanine s ynthase OS=Gottschalkiaceae bacterium OX=2527676 GN=EWM 50_06365 PE=3 SV=1
MQENRKVVLLLSGGIDSTVLLYWLIEKNYEVFPLIINYGQVTFEGEYKSAASILYDLGMENIFTVDISEISKLGKGTLIGQYPKDVTSYNGWYNTEFFPNRNIMLLILATSYAYKINASNIAIGVVGASYKDTSLSFLNSFMKCIEISLMPINIIAPFADRQRDEVIKQAIRLNVPIEKTFSCNALSERHCQLCSSCHDREMAFNLMSRLLL

SEQ ID NO: 38513 - protein, 204 aa, Gracilibacillus boraciitolerans
  misc_feature (1)..(204): tr|W4VP69|W4VP69_9BACI 7-cyano-7-deazaguanine synthase OS=Gracilibacillus boraciitolerans JCM 21714 OX=1298598 GN=queC PE=3 SV=1
MDKNKRAVVVFSGGQDSTTCLFWTLEKFDHVELVTFDYNQRHKEEIEVAKAIASEQGLTHHILDMTLLNQLAPNALTRKDIEVEAGEDGGLPNTFVPGRNLLFLSFATILAKQINAKHIITGVCETDFSGYPDCRDIFIKSLNVSLNLSMDDDFVLHTPLMWLDKAQTWEMADQLGVFEYVRENTLTCYNGIKGTGCGNVLHVS

SEQ ID NO: 38514 - protein, 221 aa, Gracilibacillus dipsosauri
  misc_feature (1)..(221): tr|A0A317L1T5|A0A317L1T5_9BACI 7-cyano-7-deazaguanine s ynthase OS=Gracilibacillus dipsosauri OX=178340 GN=queC PE=3 SV=1
MKQDKAIVVFSGGQDSTTCLFWAKDRFKEVEAVTFDYGQRHALEIECAKEIAEELGIKHHILDMSLLNQLAPNALTRESMEVAEGEEGELPSTFVPGRNLLFLSFAGVLASQVGAKHLVTGVCETDFSGYPDCRDVFIKSLNVTLNLSMDDNFVIHTPLMWLDKAETWELADQHGALSFVREKTLTCYNGIKADGCGECPACKLRNKGLEQYLEAKKTEEL

SEQ ID NO: 38515 - protein, 222 aa, Gracilibacillus halophilus
  misc_feature (1)..(222): tr|N4WPC2|N4WPC2_9BACI 7-cyano-7-deazaguanine synthase OS=Gracilibacillus halophilus YIM-C55.5 OX=1308866 GN=q ueC PE=3 SV=1
MNTNQKAVVVFSGGQDSTTCLFWALERFEEVELVTFDYNQRHKEEIKVAKEIANDQNLAHHILDMSLLNQLAPNALTRNDMEVEEGEDGELPNTFVPGRNLLFLSFASILAKQIGAKHIVTGVCETDYSGYPDCRDIFIKSLNVTLNLSMEDDFVVHTPLMWLDKAETWELADQLQAFDYVREHTLTCYNGVRGDGCGECPACQLRQKGLETYVDKRNGGGS

SEQ ID NO: 38516 - protein, 222 aa, Gracilibacillus kekensis
  misc_feature (1)..(222): tr|A0A1M7IEV1|A0A1M7IEV1_9BACI 7-cyano-7-deazaguanine s ynthase OS=Gracilibacillus kekensis OX=1027249 GN=queC PE=3 SV=1
MNKNNRAVVVFSGGQDSTTCLFWALERFDHVELVTFDYNQRHKEEIEVAKEIATNQNLKHHILDMSLLNQLAPNALTRSDMEVEEGKDGALPNTFVPGRNLLFLSFATILAKQINAKHIITGVCETDFSGYPDCRDVFIKSLNVTLNLSMDDDFVVHTPLMWLDKAQTWQLADQLGSFNYVREKTLTCYNGVRGAGCGECPACELRQKGLDLYLEQRAEENN

SEQ ID NO: 38517 - protein, 248 aa, Gracilibacillus orientalis
  misc_feature (1)..(248): tr|A0A1I4GZY3|A0A1I4GZY3_9BACI 7-cyano-7-deazaguanine s ynthase OS=Gracilibacillus orientalis OX=334253 GN=queC PE=3 SV=1
MPSLRYDFFVFGCIEFSFFSVKGDFFMDKNKRAVVVFSGGQDSTTCLFWALEKFDHVELVTFDYNQRHQQEIEVATEIAAEQGLKHHILDMSLLNQLAPNALTRDDIEVADGEDGELPNTFVPGRNLLFLSFATILAKQIDAKHIITGVCETDFSGYPDCRDIFIKSLNVTLNLSMDDDFVVHTPLMWMDKAETWELADQLDAFDYIREKTLTCYNGVRGTGCGECPACHLRQNGLDTYLAKRNGVNN

SEQ ID NO: 38518 - protein, 222 aa, Gracilibacillus ureilyticus
  misc_feature (1)..(222): tr|A0A1H9P840|A0A1H9P840_9BACI 7-cyano-7-deazaguanine s ynthase OS=Gracilibacillus ureilyticus OX=531814 GN=que C PE=3 SV=1
MEKNKRAVVVFSGGQDSTTCLFWALKKFKHVELVTFDYDQRHKEEITVAKEIAEEQGLRHHILDMALLNQLAPNALTRESIDVTHGENGDLPSTFVPGRNLLFLSFAAILAKQIDARHIITGVCETDFSGYPDCRGIFVKSLNVTLNLSMDNDFVLHTPLMWLDKAETWKLAEELGAFDYIREKTLTCYNGIRGSGCGECPSCELRQKGLEKYIRLRSEGEM

SEQ ID NO: 38519 - protein, 252 aa, Granulibacter bethesdensis
  misc_feature (1)..(252): sp|Q0BQ87|QUEC_GRABC 7-cyano-7-deazaguanine synthase OS =Granulibacter bethesdensis (strain ATCC BAA-1260 / CGD NIH1) OX=391165 GN=queC PE=3 SV=1
MIETKPIPGLALPRHDHALVLFSGGQDSTTCLAWALERFAHVETIGFTYGQRHSVEMECRGRVRQVLAHMSGRSGADWGSRLGDDHVLDLGNALHHVGQSALTGRSPIEIGQGGLPTSFVPGRNLIFLTYAAALGWRRGLRRMVGGMCETDYSGYPDCRDDTIKAMQLALNTGMEAHFVLETPLMWLTKAETWALADSLGGPALVALIEEETHTCYLGDRSQRHPWGYGCGECPACSLRAEGWREWQTASSA

SEQ ID NO: 38520 - protein, 265 aa, Granulibacter bethesdensis
  misc_feature (1)..(265): tr|A0A1L3S0X4|A0A1L3S0X4_9PROT 7-cyano-7-deazaguanine s ynthase OS=Granulibacter bethesdensis OX=364410 GN=queC PE=3 SV=1
MLIIGTAIGQRESMTETKPIPGLALPRNDHALVLFSGGQDSTTCLAWALERFAHVETIGFTYGQRHSVEMECRGQVRKALAQMSGLSGAEWGSRLGEDHVLDLGNALHHVGQSALTGRSPIEIGQGGLPTSFVPGRNLIFLTYAAALGWRRGLRRIVGGMCETDYSGYPDCRDDTIKAMQLALNTGMEAHFVLETPLMWLTKAETWSLAHSLGGPTLVALIEEETHTCYLGDRSQRHPWGYGCGECPACALRAEGWREWQAASSA

SEQ ID NO: 38521 - protein, 214 aa, Granulicatella elegans
  misc_feature (1)..(214): tr|D0BNU5|D0BNU5_9LACT 7-cyano-7-deazaguanine synthase OS=Granulicatella elegans ATCC 700633 OX=626369 GN=queC PE=3 SV=1
MKLVLLSGGVDSSTALSLALSQDPQVEAISFSYNQKHKELELEAARKIAAYYKVPHQILEVSSIFSGSKSSLNAGNDIEVSTGDYATQTEANTEVEFRNGIFISILAGIAMQKGASEIYFGAHLDDSGVIYPDCSPEFIEAMNQAVQLGSGGKVRLTAPFGQVKKKDIVAKGVELGVPYELTYSCYNGVYPPCGKCGTCIDRNKAFLANGLEIL

SEQ ID NO: 38522 - protein, 214 aa, Granulicatella sp.
  misc_feature (1)..(214): tr|A0A420YUI8|A0A420YUI8_9LACT 7-cyano-7-deazaguanine s ynthase OS=Granulicatella sp. OX=2049028 GN=queC PE=3 S V=1
MKLVLLSGGVDSSTALALALSQDPQVEAISFSYNQKHKELELEAARKIAAYYKVPHQILEVSSVFSGSKSSLNAGNDIEVSTGDYAIQTEANTEVEFRNGIFISILAGIAMQKGASEIYFGAHLDDSGVIYPDCSPEFIEAMNQAVQLGSGGKVRLTAPFGQVKKKDIVAKGVELGVPYELTYSCYNGVYPPCGKCGTCIDRNKAFLANGLEIL

SEQ ID NO: 38523 - protein, 236 aa, Granulicella mallensis
  misc_feature (1)..(236): tr|G8NPF1|G8NPF1_GRAMM 7-cyano-7-deazaguanine synthase OS=Granulicella mallensis (strain ATCC BAA-1857 / DSM 2 3137 / MP5ACTX8) OX=682795 GN=queC PE=3 SV=1
MSRPKAVVCLSGGMDSTVCAALAARDYESYGLHFSYGQRTEARELASARAVAAAVGLHDLLELKTDLFRRIGGSALTDSSIAVPEAGDENADETSHRTGSEVPVTYVPFRNAHFLSAAVSWAEVLGATTVFIGAVEQDSSGYPDCRPAYYEAFNQLIRTGTKEGEIAVVTPLIRLRKSEIVRLGVELGAPLHVSWSCYSGETEACGVCESCVLRLRAFAEAGAVDPIPYAEPKRSN

SEQ ID NO: 38524 - protein, 230 aa, Granulicella pectinivorans
  misc_feature (1)..(230): tr|A0A1I6MZ14|A0A1I6MZ14_9BACT 7-cyano-7-deazaguanine s ynthase OS=Granulicella pectinivorans OX=474950 GN=queC PE=3 SV=1
MSKPKAVLCLSGGMDSCVCAALAARDYEVYALHFSYGQRTELRELQSAREIVRLTNAKELMHLTIDLFRKIGGSALTDEAIAVPDAVEHVDGSDRVGDEVPVTYVPFRNAHFLSAAVSWAEVLGAETILIGAVEQDSSGYPDCRPSYYAAFNELIKMGTKDGTIRVETPLIAMRKREIVALGVELGAPFHVSWSCYASGTEACGVCESCALRLKAFEEAGAVDPIVYSRR

SEQ ID NO: 38525 - protein, 232 aa, Granulicella rosea
  misc_feature (1)..(232): tr|A0A239JMT7|A0A239JMT7_9BACT 7-cyano-7-deazaguanine s ynthase OS=Granulicella rosea OX=474952 GN=queC PE=3 SV =1
MTTKPKAVLCLSGGMDSCVCAALAARDHEVYALHFSYGQRTEARELRAATDIARLIGAKEFMHLKIDLFRRIGGSALTDANIAVPDAAEDETQIGAEVPVTYVPFRNAHFLSAAVSWAEVIGAKKVLIGAVEQDSSGYPDCRPAYYAAFNELIRQGTKEGDIQVETPLIALRKKEIVELGVEVGAPFHVSWSCYAGEREACGACESCALRLRAFREAGGVDPIPYASGAGRI

SEQ ID NO: 38526 - protein, 238 aa, Granulicella sibirica
  misc_feature (1)..(238): tr|A0A4Q0T2K9|A0A4Q0T2K9_9BACT 7-cyano-7-deazaguanine s ynthase OS=Granulicella sibirica OX=2479048 GN=queC PE= 3 SV=1
MSSDLVRPRAVVCLSGGMDSCVCATLAARDFDVFAVHFSYGQRTEAREQWSAEEVARITGAQELMHLKIDLFRMIGGSALTDEGIAVPSAKDDESEMAGGSLRTGHQVPVTYVPFRNAHFLSAAVSWAEVLGARTIFIGAVEQDSSGYPDCRPAYYDAFNELIRTGTKDGDIRVETPLIAMRKSEIVRLGVELGAPFHVSWSCYASESEACGVCESCVLRLRAFREAGAVDPIPYIQR

SEQ ID NO: 38527 - protein, 232 aa, Granulicella sp.
  misc_feature (1)..(232): tr|A0A3N1JKW0|A0A3N1JKW0_9BACT 7-cyano-7-deazaguanine s ynthase OS=Granulicella sp. GAS466 OX=2485170 GN=queC P E=3 SV=1
MTNREQSRPRAVVCLSGGMDSCVCAALAARDYDVYAVHFSYGQRTEARERRSAEEVARIVGARELMPLKIDLFRQIGGSALTDAGIAVPAAPAEEASIGAEVPVTYVPFRNAHFLSAAVSWAEVLGARTVFIGAVEQDSSGYPDCRPAYYAAFNELIRTGTKEGDIRVATPLIAMRKSEIVRLGVELGAPFHVSWSCYSGETEACGVCESCVLRLRAFREAGAIDPIPYAVS

SEQ ID NO: 38528 - protein, 214 aa, Granulicella sp.
  misc_feature (1)..(214): tr|A0A1D2UEY2|A0A1D2UEY2_9BACT 7-cyano-7-deazaguanine s ynthase OS=Granulicella sp. SCN 62-9 OX=1660100 GN=queC PE=3 SV=1
MDSAVCATLAARDFDVYALHFGYGQRTEARELRSAQDVARIVGVRELLPLRMDLFRKIGGSALTDPGIAVPAAGDEASIGVEVPVTYVPFRNAHFLSAAVSWAEVLGAKTVFIGAVEQDSSGYPDCRPAYYEAFNRLIQTGTKEGDIRIHTPLIGLRKSEIVRLGVELGAPFHVSWSCYSAEKVACGVCESCVLRLRAFHDAGATDPIPYAVAG

SEQ ID NO: 38529 - protein, 231 aa, Granulicella tundricola
  misc_feature (1)..(231): tr|E8X137|E8X137_GRATM 7-cyano-7-deazaguanine synthase OS=Granulicella tundricola (strain ATCC BAA-1859 / DSM 23138 / MP5ACTX9) OX=1198114 GN=queC PE=3 SV=1
MSKAVLCLSGGMDSCVCAALAARDHELYAVHFSYGQRTEARELRSAEAIAKLVGAKDFLHLKIELFRRIGGSALTDRSIAVPDAVAEEAMHGRTGDEVPVTYVPFRNAHFLSAAVSWAEVLGAKVVTIGAVEQDSSGYPDCRPAYYDAFNELIRQGTKEGEIRVETPLIRMRKNEIVRLGVELGAPLHVSWSCYSGEDEACGVCESCALRLRAFREAGATDPVPYAAGTIR

SEQ ID NO: 38530 - protein, 229 aa, Granulosicoccus antarcticus
  misc_feature (1)..(229): tr|A0A2Z2NWD2|A0A2Z2NWD2_9GAMM 7-cyano-7-deazaguanine s ynthase OS=Granulosicoccus antarcticus IMCC3135 OX=1192 854 GN=queC PE=3 SV=1
MNTLVICSGGLDSVTLAWKVASEAKLAGLISFNYGQRHLRELDAAASCAQQLDVPHDIVDLRALASLLPGSALTDPDIDVPLGHYQEQSMRSTVVPNRNPIMMSIAFGVASARALDAVALAVHGGDHFIYPDCRPGFIHAFAQMEQQALEGVHCPQLQAPFVNGSKADIVRIGYDLKVPFADTWSCYAGNDVHCGRCGTCVERREAFQLADVTDPTTYADPHSAIPSQP

SEQ ID NO: 38531 - protein, 231 aa, Grimontella sp.
  misc_feature (1)..(231): tr|A0A318G6F6|A0A318G6F6_9GAMM 7-cyano-7-deazaguanine s ynthase OS=Grimontella sp. AG753 OX=2183905 GN=queC PE= 3 SV=1
MKRAVVVFSGGQDSTTCLVQALQQYDEVHCVTFDYGQRHRAEIDVARELALQLGARAHKVLDVTLLNELAVSSLTRDSIPVPDYQPDASGIPNTFVPGRNILFLTLTAIYAYQVQAEAVITGVCETDFSGYPDCRDEFVKALNHAVNLGMAKDIRFETPLMWIDKAETWALADYWGKLELVRNETLTCYNGIKGDGCGQCAACNLRANGLSHYLADKTAVMAAMKKKTGLK

SEQ ID NO: 38532 - protein, 228 aa, Grimontia celer
  misc_feature (1)..(228): tr|A0A128ESQ1|A0A128ESQ1_9GAMM 7-cyano-7-deazaguanine s ynthase OS=Grimontia celer OX=1796497 GN=queC PE=3 SV=1
MKKAVVVFSGGQDSTTCLIQALSEFDEVHCITFDYNQRHKQEIDVARDVANALGATSHKVMDVGLLNELAISSLTRDNIPVSHELQENGLPNSFVPGRNILFLTLAGIYAYQLGAQTVITGVCETDFSGYPDCRNDFVQAMNKSLVLGMDRELEIRTPLMWLNKAETWALADKYGKLEFVRDHTLTCYNGVIGKGCGDCPACDLRQKGLDSYLEDKENVMASLDSKSA

SEQ ID NO: 38533 - protein, 232 aa, Grimontia hollisae
  misc_feature (1)..(232): tr|A0A377HPJ3|A0A377HPJ3_GRIHO 7-cyano-7-deazaguanine s ynthase OS=Grimontia hollisae OX=673 GN=queC PE=3 SV=1
MKKAVVVFSGGQDSTTCLIQALSEFDEVHCITFDYNQRHKQEIEVACDVAKTLGVTSHKVMDVGLLNELAISSLTRDNIPVSHELQENGLPNSFVPGRNILFLTLAGIYAYQLGVQTVITGVCETDFSGYPDCRNDFVQAMNKSLVLGMDRELEIRTPLMWLNKAETWALADKYGKLEYVRDNTLTCYNGVIGRGCGDCPACDLRQKGLDGYLSDKENVTASLNHKSLFVAR

SEQ ID NO: 38534 - protein, 232 aa, Grimontia hollisae
  misc_feature (1)..(232): tr|D0I7A2|D0I7A2_GRIHO 7-cyano-7-deazaguanine synthase OS=Grimontia hollisae CIP 101886 OX=675812 GN=queC PE=3 SV=1
MKKAVVVFSGGQDSTTCLIQALSEFDEVHCITFDYNQRHKQEIEVACDVAKTLGVTSHKVMDVGLLNELAISSLTRDNIPVSHELQENGLPNSFVPGRNILFLTLAGIYAYQLGAQTVITGVCETDFSGYPDCRNDFVQSMNKSLVLGMDRELEIRTPLMWLNKAETWALADKYGKLEYVRDNTLTCYNGVIGRGCGDCPACDLRQKGLDDYLSDKENVTASLNHKSLFVAR

SEQ ID NO: 38535 - protein, 228 aa, Grimontia indica
  misc_feature (1)..(228): tr|R1IRZ8|R1IRZ8_9GAMM 7-cyano-7-deazaguanine synthase OS=Grimontia indica OX=1056512 GN=queC PE=3 SV=1
MKKAVVVFSGGQDSTTCLIQALSEFDEVHCITFDYNQRHKQEIDVARDVANTLGATSHKVMDVGLLNELAISSLTRDNIPVSHELQENGLPNSFVPGRNILFLTLAGIYAYQLGAQTVITGVCETDFSGYPDCRNDFVQAMNKSLVLGMDRELEIRTPLMWLNKAETWALADKYGKLEFVRDHTLTCYNGVIGKGCGDCPACDLRQKGLDSYLEDKKNVMASLDSKSV

SEQ ID NO: 38536 - protein, 228 aa, Grimontia marina
  misc_feature (1)..(228): tr|A0A128FAT7|A0A128FAT7_9GAMM 7-cyano-7-deazaguanine s ynthase OS=Grimontia marina OX=646534 GN=queC PE=3 SV=1
MKKAVVVFSGGQDSTTCLIQALSEFDEVHCITFDYNQRHKQEIDVARDVANALGATSHKVMDVGLLNELAISSLTRDNIPVSHELQENGLPNSFVPGRNILFLTLAGIYAYQLGAQTVITGVCETDFSGYPDCRNDFVQAMNKSLVLGMDRELEIQTPLMWLNKAETWALADKYGKLEFVRDHTLTCYNGVIGKGCGDCPACDLRQKGLDSYLEDKEHVMASLDRKSV

SEQ ID NO: 38537 - protein, 228 aa, Grimontia sp.
  misc_feature (1)..(228): tr|A0A0F5ZXS9|A0A0F5ZXS9_9GAMM 7-cyano-7-deazaguanine s ynthase OS=Grimontia sp. AD028 OX=1581149 GN=queC PE=3 SV=1
MKKAVVVFSGGQDSTTCLIQALSEFDEVHCITFDYNQRHKQEIDVARDVASALGATSRKVMDVGLLNELAISSLTRDNIPVSHELQENGLPNSFVPGRNILFLTLAGIYAYQLGAQTVITGVCETDFSGYPDCRNDFVQAMNKSLVLGMDRELEIRTPLMWLNKAETWALADKYGKLEFVRDHTLTCYNGVIGKGCGDCPACDLRQKGLDSYLEDKENVMASLDSKSV

SEQ ID NO: 38538 - protein, 231 aa, Gulbenkiania indica
  misc_feature (1)..(231): tr|A0A0K6GRV6|A0A0K6GRV6_9NEIS 7-cyano-7-deazaguanine s ynthase OS=Gulbenkiania indica OX=375574 GN=queC PE=3 S V=1
MNQQDKALVVLSGGQDSTTCLYWALERFGGPSNVEAVTFDYGQRHRVELEAAEHIARMAGVHHTVLPIDTFAAIGGNALTDASITPETEGPAEGALPNTFVPGRNLIFLTFAAALAYTRGARHLVTGVAQTDYSGYPDCRENTLKALELALRLGMDSRVVLHAPLMYLTKAETVHLARSVGAMEALAYSHTCYNGTVPPCGHCASCELRAKGFAEAGEPDPLVVRCAGRPQ

SEQ ID NO: 38539 - protein, 236 aa, Guyparkeria sp.
  misc_feature (1)..(236): tr|A0A426QEP1|A0A426QEP1_9GAMM 7-cyano-7-deazaguanine s ynthase OS=Guyparkeria sp. SCN-R1 OX=2341113 GN=queC PE =3 SV=1
MTNRVARVAESSNKPAVVLLSGGLDSATLAWQARADGYAVHALSFDYGQRHRVELEAADRVARAVGATAHRTIRIDMGGLSGSSLTDQDRSVPDYSPDNTAIPSTYVPARNLTFLSFALGWAEMLGAERIYIGVNAVDYSGYPDCRPEFIEAFQKLANVATAADHPFEIHAPLLYMTKAEIIAHGSALGVDYGLTVSCYRADAQGRACGTCDSCHYRRQGFVEAGVSDPTDYVGGS

SEQ ID NO: 38540 - protein, 225 aa, Gynuella sunshinyii
  misc_feature (1)..(225): tr|A0A0C5VMQ6|A0A0C5VMQ6_9GAMM 7-cyano-7-deazaguanine s ynthase OS=Gynuella sunshinyii YC6258 OX=1445510 GN=que C PE=3 SV=1
MKKAVILLSGGLDSATTLYMAKDQGFDCYALSFDYGQKHSSELSAAKAIAESAGVIEHKIIPLNLRLIGGSALTDDSFSVPTDSDLTSSDIPVTYVPARNTVFLSIAMGYAEVIGSQNIFIGVNAVDYSGYPDCRPEFIHAFEVMANLATKASVEGQKLKINTPLIDLTKAEIVTQGTKLGLDYALTVSCYQADAAGKACGVCDSCRLRAQGFADAGLSDPTIYS

SEQ ID NO: 38541 - protein, 227 aa, Gynuella sunshinyii
  misc_feature (1)..(227): tr|A0A0C5VET2|A0A0C5VET2_9GAMM 7-cyano-7-deazaguanine s ynthase OS=Gynuella sunshinyii YC6258 OX=1445510 GN=que C PE=3 SV=1
MTKKTKALVVLSGGQDSTTCLYWAKENFDEVLCITFDYNQRHSIELDCAKKISEIAGVEQEVIRMGEIFKGLSPLTDKTKSVEQYESADTLPGGLENTFVPGRNMMFLTVAANRAYVHECDTIVIGVSQEDYGGYPDCRSEYIEQMEKAIEFALDKKIKIATPLINLNKKQTVEMAKEFSGCMDALSYSHTCYNGVFPPCGKCHSCLLRLRGFEQAGETDPIYRRVS

SEQ ID NO: 38542 - protein, 236 aa, Haematospirillum jordaniae
  misc_feature (1)..(236): tr|A0A143DBT8|A0A143DBT8_9PROT 7-cyano-7-deazaguanine s ynthase OS=Haematospirillum jordaniae OX=1549855 GN=que C PE=3 SV=1
MLDHDAALVLFSGGQDSATCLAWALERYTRVETVGFDYRQRHAIELEVRHSFRESIAHLHNHWGNRLGVDHRIDARSLADISQTAMTETVAFRTGSDGLPNTFVPGRNLLFLTYAAAIAYRRGIRTLVTGVCETDFSGYPDCRDDTLKAMQVALNLGMDCRFVVETPLMWIDKAGTWAMAHDLGGDKLVDLILEKTHTCYAGDRDHRHPWGYGCGTCQACELRARGWDAWQQAVHQ

SEQ ID NO: 38543 - protein, 227 aa, Haemophilus aegyptius
  misc_feature (1)..(227): tr|A0A3S5ERR7|A0A3S5ERR7_HAEAE 7-cyano-7-deazaguanine s ynthase OS=Haemophilus aegyptius OX=197575 GN=queC PE=3 SV=1
MNIFNPNHDRKAIVIFSGGQDSTTCLFQAIAEYGKENVEAITFQYGQRHAIELEKARSIAQDLGIKQTLIDTSVMKAITHNALMDEQAHIEQKESELPNTFVDGRNALFLLYAAIYAKGQGIQDIITGVCETDFSGYPDCRDVFIKSMNVTLNLAMDYQFNIKTPLMYLTKAQTWQLADELGVLDYVQKHTHTCYEGIEGGCGKCPSCILRNKGLKKYLTQKGRKNV

SEQ ID NO: 38544 - protein, 224 aa, Haemophilus ducreyi
  misc_feature (1)..(224): tr|A0A448KIK6|A0A448KIK6_HAEDC 7-cyano-7-deazaguanine s ynthase OS=Haemophilus ducreyi OX=730 GN=queC PE=3 SV=1
MNRSTRSHKAIVIFSGGQDSTTCLFQAIQEFKRENVEVITFQYGQRHSIELEKAAWIAQDLGIKQTVIDTSVIKAITTNALITEATIKQDGDKPNTFVDGRNALFLLYTAIYAKGQGIQTIFTGVCETDFSGYPDCRDIFIKSMNVTLNLAMDYNFNIRTPLMYLTKKQTWTLADQLGAFEYVRKHTHTCYLGVEGGCHTCPSCLLREKGLNEYLAEKSGEKNV

SEQ ID NO: 38545 - protein, 224 aa, Haemophilus ducreyi
  misc_feature (1)..(224): sp|Q7VNH6|QUEC_HAEDU 7-cyano-7-deazaguanine synthase OS =Haemophilus ducreyi (strain 35000HP / ATCC 700724) OX= 233412 GN=queC PE=3 SV=1
MNRSTRSHKAIVIFSGGQDSTTCLFQAIQEFKRENVEVITFQYGQRHSIELEKAAWIAQNLGIKQTVIDTSVIKAITTNALITEATIKQDGDKPNTFVDGRNALFLLYTAIYAKGQGIQTIFTGVCETDFSGYPDCRDIFIKSMNVTLNLAMDYNFNIRTPLMYLTKKQTWALADQLGAFEYVREHTHTCYLGVEGGCHTCPSCLLREKGLNEYLAEKSGEKNV

SEQ ID NO: 38546 - protein, 224 aa, [Haemophilus] felis
  misc_feature (1)..(224): tr|A0A1T0BAU3|A0A1T0BAU3_9PAST 7-cyano-7-deazaguanine s ynthase OS=[Haemophilus] felis OX=123822 GN=queC PE=3 S V=1
MKNQPKAAVIFSGGQDSTTCLFLAIQEFGKENVEVITFQYGQRHAIELEKAAWIAKDLGVKQTLIDTSVIKSITTNALMDDTAEIQENGNTPNTFVDGRNALFLLYAAIYAKSQGIQTIFTGVCETDFSGYPDCRDVFVKSMNVTLNLAMDYNFNIRTPLMYLTKKETWKLADELGAFDYIREHTHTCYLGVEGGCHTCPSCVLREKGLNEYLAERACLEKDDV

SEQ ID NO: 38547 - protein, 227 aa, Haemophilus haemolyticus
  misc_feature (1)..(227): tr|A0A502LG59|A0A502LG59_HAEHA 7-cyano-7-deazaguanine s ynthase OS=Haemophilus haemolyticus OX=726 GN=queC PE=3 SV=1
MNISNPNYNRKAIVIFSGGQDSTTCLFQAIAEYGKENVETMTFQYGQRHSIELEKAKWIAQDLGVKQTFIDTSVIKAITHNALMDENVHIEQKDNKLPNTFVDGRNALFLLYAAIYAKGQGIQDIITGVCETDFSGYPDCRDVFIKSMNVTLNLAMDYQFNIKTPLMYLTKAQTWQLADELGVLDYVRNYTHTCYEGVDGGCSQCPSCILRDKGLKEYLAQKGGKNV

SEQ ID NO: 38548 - protein, 227 aa, Haemophilus haemolyticus
  misc_feature (1)..(227): tr|A0A502JMS5|A0A502JMS5_HAEHA 7-cyano-7-deazaguanine s ynthase OS=Haemophilus haemolyticus OX=726 GN=queC PE=3 SV=1
MNISNPNYNRKAIVIFSGGQDSTTCLFQAIAEYGKENVETMTFQYGQRHSIELEKAKWIAQDLGVKQTFIDTSVIKAITHNALMDENMHIEQKDNKLPNTFVDGRNALFLLYAAIYAKGQGIQDIITGVCETDFSGYPDCRDVFIKSMNVTLNLAMDYQFNIKTPLMYLTKAQTWQLADELGVLDYVRNYTHTCYEGVDGGCSQCPSCILRGKGLKEYLAQKGGKNV

SEQ ID NO: 38549 - protein, 228 aa, Haemophilus influenzae
  misc_feature (1)..(228): sp|P44124|QUEC_HAEIN 7-cyano-7-deazaguanine synthase OS =Haemophilus influenzae (strain ATCC 51907 / DSM 11121 / KW20 / Rd) OX=71421 GN=queC PE=3 SV=2
MNIFNPNHDRKAIVIFSGGQDSTTCLFQAIAEYGKENIEAITFQYGQRHAIELEKARTIAQDLGIKQTLIDTSVMKAITHNALMDEQAHIEQKENELPNTFVDGRNALFLLYAAIYAKGQGIQDIITGVCETDFSGYPDCRDVFIKSMNVTLNLAMDYPIPISKTPLMYLTKAQTWQLADELGVLDYVQKHTHTCYEGIEGGCRKCPSCILRNKGLKKYLTQKGRKNV

SEQ ID NO: 38550 - protein, 227 aa, Haemophilus influenzae
  misc_feature (1)..(227): sp|A5UCR9|QUEC_HAEIE 7-cyano-7-deazaguanine synthase OS =Haemophilus influenzae (strain PittEE) OX=374930 GN=qu eC PE=3 SV=1
MNIFNPNHDRKAIVIFSGGQDSTTCLFQAIAEYGKENIEAITFQYGQRHAIELEKARAIVQDLGIKQTLIDTSVMKAITHNALMDEQAHIEQKENELPNTFVDGRNALFLLYAAIYAKGQGIQDIITGVCETDFSGYPDCRDVFIKSMNVTLNLAMDYQFNIKTPLMYLTKAQTWQLADELGVLNYVQKHTHTCYEGIEGGCGKCPSCILRNKGLKKYLTQKGRKNV

SEQ ID NO: 38551 - protein, 221 aa, Haemophilus paracuniculus
  misc_feature (1)..(221): tr|A0A1T0ARN5|A0A1T0ARN5_9PAST 7-cyano-7-deazaguanine s ynthase OS=Haemophilus paracuniculus OX=734 GN=queC PE= 3 SV=1
MSYSKKAVVIFSGGQDSTTCLFLAIQEFGRENVEVVTFQYGQRHHIELDKAKWIAQDLGVKQTVIDTSVIKAITTNALMDDNAQIEQQGDKPNTFVDGRNALFLLYTAIYAKSQGIQTIFTGVCETDFSGYPDCRDVFIKSMNVTLNLAMDYNFNIRTPLMYLTKKETWALADQLGAFDYVRTHTHTCYLGVEGGCHTCPSCVLREKGLNEYLAEKGESNV

SEQ ID NO: 38552 - protein, 224 aa, Haemophilus parahaemolyticus
  misc_feature (1)..(224): tr|A0A377I2I4|A0A377I2I4_HAEPH 7-cyano-7-deazaguanine s ynthase OS=Haemophilus parahaemolyticus OX=735 GN=queC PE=3 SV=1
MNLSQQPKKALVIFSGGQDSTTCLFQAIKEFGKENVEVVTFQYGQRHAIELEKAEWIAKDVGVKQTLIDTSVIKAITTNALMQEAAEIQQEGDKPNTFVDGRNALFLLYAGIYAKGQGISTIYTGVCETDFSGYPDCRDVFVKSMNVTMNLAMDYNFNIRTPLMYLTKKETWKLADELGVFDYILEHTHTCYLGVEGGCHTCPSCVLREKGLNEYLAEREKKDV

SEQ ID NO: 38553 - protein, 224 aa, Haemophilus parahaemolyticus
  misc_feature (1)..(224): tr|A0A377JDL7|A0A377JDL7_HAEPH 7-cyano-7-deazaguanine s ynthase OS=Haemophilus parahaemolyticus OX=735 GN=queC PE=3 SV=1
MNLSEQPQKALVIFSGGQDSTTCLFQAIKEFGKENVEVVTFQYGQRHAIELEKAEWIAKDVGVKQTLIDTSVIKAITTNALMQEGAEIQQEGNKPNTFVDGRNALFLLYACIYAKGQDISTIYTGVCETDFSGYPDCRDVFVKSMNVTMNLAMDYNFNIRTPLMYLTKKETWKLADELGVFDYIREHTHTCYLGVEGGCHTCPSCVLREKGLNEYLAEREKKDV

SEQ ID NO: 38554 - protein, 225 aa, Haemophilus parainfluenzae
  misc_feature (1)..(225): tr|A0A369YX22|A0A369YX22_HAEPA 7-cyano-7-deazaguanine s ynthase OS=Haemophilus parainfluenzae OX=729 GN=queC PE =3 SV=1
MNISNPNHNRKALVIFSGGQDSTTCLIQAIAEYGVENVEAVTFQYGQRHAIELEKARWIAKDLGVKQTLIDTSVIKSITHNALIDGNAAIEQKDGELPNTFVDGRNALFLLYAAIYAKGQEIHDIITGVCETDFSGYPDCRDVFVKSMNVTLNLAMDYQFNLKTPLMYLTKAQTWALADELDTLDYIRQHSHTCYEGVEGGCGECPSCKLRDKGLQEYLSTKAKA

SEQ ID NO: 38555 - protein, 225 aa, Haemophilus parainfluenzae
  misc_feature (1)..(225): tr|F0EUB3|F0EUB3_HAEPA 7-cyano-7-deazaguanine synthase OS=Haemophilus parainfluenzae ATCC 33392 OX=888828 GN=e xsB PE=3 SV=1
MNISNPNHNRKALVIFSGGQDSTTCLIQAIAEYGVENVETVTFQYGQRHSIELEKARWIAKDLGVKQTLIDTSVIKSITHNALMDANADIEQKDGELPNTFVDGRNALFLLYAAIYAKGQGINDIITGVCETDFSGYPDCRDVFIKSMNVTLNLAMDYPFNLKTPLMYLTKAQTWALADELGTLDYIRQHTHTCYEGVEGGCRECPSCKLRDKGLLEYLATKVKA

SEQ ID NO: 38556 - protein, 224 aa, Haemophilus paraphrohaemolyticus
  misc_feature (1)..(224): tr|A0A369ZU33|A0A369ZU33_9PAST 7-cyano-7-deazaguanine s ynthase OS=Haemophilus paraphrohaemolyticus OX=736 GN=q ueC PE=3 SV=1
MNLSEQPQKALVIFSGGQDSTTCLFQAIKEFGKENVEVVTFQYGQRHAIELEKAEWIAKDVGVKQTLIDTSVIKAITTNALMQEGAEIQQEGDKPNTFVDGRNALFLLYAGIYAKGQDISTIYTGVCETDFSGYPDCRDVFVKSMNVTMNLAMDYNFNIRTPLMYLTKKETWKLADELGVFDYIREHTHTCYLGVERGCHTCPSCVLREKGLNEYLAEREKKDV

SEQ ID NO: 38557 - protein, 224 aa, Haemophilus paraphrohaemolyticus; identical to SEQ ID NO: 38553
  misc_feature (1)..(224): tr|I2NFN6|I2NFN6_9PAST 7-cyano-7-deazaguanine synthase OS=Haemophilus paraphrohaemolyticus HK411 OX=1095743 GN =queC PE=3 SV=1

SEQ ID NO: 38558 - protein, 219 aa, Haemophilus parasuis
  misc_feature (1)..(219): tr|A0A143CH34|A0A143CH34_HAEPR 7-cyano-7-deazaguanine s ynthase OS=Haemophilus parasuis OX=738 GN=queC PE=3 SV= 1
MKPTPKAAVIFSGGQDSTTCLFLAIKEFGKENVEAVTFQYGQRHAIELDKARWIAQDLGVKQTLIDTSVIKAITANALMDDQAEIKQTGNTPNTFVDGRNALFLLYTAIYAKSQGIQTIYTGVCETDFSSYPDCRDVFIKSMNVTLNLAMDYNFNIRTPLMYLTKKETWALADQLGAFDYIRTHTHTCYLGVEGGCHTCPSCLLREKGLNKYLEEKSNV

SEQ ID NO: 38559 - protein, 219 aa, Haemophilus parasuis
  misc_feature (1)..(219): sp|B8F6L5|QUEC_HAEPS 7-cyano-7-deazaguanine synthase OS =Haemophilus parasuis serovar 5 (strain SH0165) OX=5577 23 GN=queC PE=3 SV=1
MKPTPKAVVIFSGGQDSTTCLFLAIKEFGKENVEVVTFQYGQRHAIELDKARWIAQDLGVKQTLIDTSVIKAITTNALMDDQAEIKQTGNTPNTFVDGRNALFLLYTAIYAKSQGIQTIYTGVCETDFSGYPDCRDVFIKSMNVTLNLAMDYNFNIRTPLMYLTKKETWALADQLGAFDYIRTHTHTCYLGVEGGCHTCPSCLLREKGLNEYLEEKGNV

SEQ ID NO: 38560 - protein, 228 aa, Haemophilus pittmaniae
  misc_feature (1)..(228): tr|F9Q7R4|F9Q7R4_9PAST 7-cyano-7-deazaguanine synthase OS=Haemophilus pittmaniae HK 85 OX=1035188 GN=queC PE=3 SV=1
MNIANPNRNRKALVIFSGGQDSTTCLIQAIAEYGVENVETVTFQYGQRHAIELAKARWIAQDLGVKQTLIDTSVIKSITHNALMDENATIEQKDGELPNTFVDGRNALFLLYAAIYAKGQGIHDIITGVCETDFSGYPDCRDVFVKSMNVTLNLAMDYPFNLKTPLMYLTKAQTWALADELGALDYVRQHSHTCYEGVEGGCGECPSCKLRDNGLQEYLATKAEANCV

SEQ ID NO: 38561 - protein, 228 aa, Haemophilus pittmaniae
  misc_feature (1)..(228): tr|A0A377IZZ8|A0A377IZZ8_9PAST 7-cyano-7-deazaguanine s ynthase OS=Haemophilus pittmaniae OX=249188 GN=queC PE= 3 SV=1
MNIANPNRNRKALVIFSGGQDSTTCLIQAIAEYGVENVETVTFQYGQRHAIELAKARWIAQDLGVKQTLIDTSVIKSITHNALMDENATIEQKDGELPNTFVDGRNALFLLYAAIYAKGQGIHDIITGVCETDFSGYPDCRDVFVKSMNVALNLAMDYPFNLKTPLMYLTKAQTWALADELGALDYVRQHSHTCYEGVEGGCGECPSCKLRDNGLQEYLAAKAEANCV

SEQ ID NO: 38562 - protein, 228 aa, Haemophilus sp.
  misc_feature (1)..(228): tr|A0A1S1FMU9|A0A1S1FMU9_9PAST 7-cyano-7-deazaguanine s ynthase OS=Haemophilus sp. HMSC61B11 OX=1608882 GN=queC PE=3 SV=1
MNISNPNHNRKALVIFSGGQDSTTCLIQAIAEYGVENVEAVTFQYGQRHAIELEKARWIAKDLGVKQTLIDTSVIKSITHNALMDANTNIEQKDGELPNTFVDGRNALFLLYAAIYAKGQEIHDIITGVCETDFSGYPDCRDVFVKSMNVTLNLAMDYPFNLKTPLMYLTKAQTWALADELDALDYVRQHSHTCYEGVEGGCGECPSCQLRHKGLQEYLSIKAENKNV

SEQ ID NO: 38563 - protein, 225 aa, Haemophilus sp.
  misc_feature (1)..(225): tr|A0A1F0UEM0|A0A1F0UEM0_9PAST 7-cyano-7-deazaguanine s ynthase OS=Haemophilus sp. HMSC073C03 OX=1739452 GN=que C PE=3 SV=1
MNISNPNHNRKALVIFSGGQDSTTCLIQAIAEYGVENVETVTFQYGQRHAIELEKARWIAQDLGVKQTLIDTSFIKSITHNALMDANADIEQKNGELPNTFVDGRNALFLLYAAIYAKGQGINDIITGVCETDFSGYPDCRDVFIKSMNVTLNLAMDYPFNLKTPLMYLTKAQTWALADELGALDYVRQHTHTCYEGIEGGCGECPSCKLRDKGLQEYLATKAKA

SEQ ID NO: 38564 - protein, 438 aa, Haemophilus sputorum
  misc_feature (1)..(438): tr|J5HH07|J5HH07_9PAST 7-cyano-7-deazaguanine synthase OS=Haemophilus sputorum HK 2154 OX=1078483 GN=HMPREF112 8_0217 PE=3 SV=1
MTQLVFHHDINQLNNLQNGTIPVHLYGMGNKNLQIAHIGNMVLDRVRRLGIRLNNQVMDFLTIAMAVTAADTFVLRKDTANGWCRSFSITLPLCQPAIWQANKVHLEHILHFLSGDIWQFDFQENGQNPTQPYSQNGRTKLVDLRNKDCVCLFSGGLDSSIGAIDLLEQGHSPVLVSHSYKGDKSRQQAIIQQLNQNGYINQFSQFNAIAQPHLNNGRATEITMRTRSLNFLAFAIVSAYALQDVVQKEIDIFVPENGVISINAPLTVRRVGTLSTRTTHPYFIQEIQKLFTAVNIPFTLKNPYQFKTKGQMIAECKNLPLLQQIIPDTVSCSHWKRKNQQCGVCVPCLIRRASLHYAGITHDAGYEFNDIRQILTNRDRKDDLFALINAIHQKNHRNMNQWVLQSGSLPTQQLNQFANVLMNGLDEVEKLLMVNQIL

SEQ ID NO: 38565 - protein, 221 aa, Haemophilus sputorum
  misc_feature (1)..(221): tr|A0A369YPX5|A0A369YPX5_9PAST 7-cyano-7-deazaguanine s ynthase OS=Haemophilus sputorum OX=1078480 GN=queC PE=3 SV=1
MQQNKKAVVIFSGGQDSTTCLFQAIEEFGKENVEVVTFQYGQRHAIELEKAAWIAQDLGVKQTLIDTSLIKAITTNALMQDGAEIKQQGDTPNTFVDGRNALFLLYAAIYAKGQGIQTIFTGVCETDFSGYPDCRDVFVKSMNVTLNLAMDYNFNIRTPLMYLTKKETWALADKLGAFDYIRTHTHTCYLGVEGGCHTCPSCLLREKGLNEYLAEKGMANV

SEQ ID NO: 38566 - protein, 228 aa, Hafnia alvei
  misc_feature (1)..(228): tr|A0A0K0HWF1|A0A0K0HWF1_HAFAL 7-cyano-7-deazaguanine s ynthase OS=Hafnia alvei OX=569 GN=queC PE=3 SV=1
MKRAVVVFSGGQDSTTCLIQALERYDEVHCITFDYGQRHRAEIDVARDLAIKLGASAHKVLDVGLLNELAISSLTRDNIPVPTESEDGIPNTFVPGRNILFLTLAAIYAYQVQAEAVITGVCETDFSGYPDCRDEFVKALNKAIVLGMARDVRFETPLMWLNKAETWALADHYQKLDLVRQETLTCYNGIQGDGCGECAACHLRSHGLNDYLANRAAVSASLKEKTGL

SEQ ID NO: 38567 - protein, 228 aa, Hafnia alvei; identical to SEQ ID NO: 38566
  misc_feature (1)..(228): tr|A0A097R538|A0A097R538_HAFAL 7-cyano-7-deazaguanine s ynthase OS=Hafnia alvei FB1 OX=1453496 GN=queC PE=3 SV= 1

SEQ ID NO: 38568 - protein, 228 aa, Hafnia paralvei
  misc_feature (1)..(228): tr|A0A2A2M7B2|A0A2A2M7B2_9GAMM 7-cyano-7-deazaguanine s ynthase OS=Hafnia paralvei OX=546367 GN=queC PE=3 SV=1
MKRAVVVFSGGQDSTTCLIQALDQYDEVHCITFDYGQRHRAEIDVARDLAIKLGASAHKVLDVGLLNELAISSLTRDNIPVPTESEDGIPNTFVPGRNILFLTLAAIYAYQVQAEAVITGVCETDFSGYPDCRDEFVKALNKAITLGMARDVRFETPLMWLNKAETWALADHYQKLDLVRRETLTCYNGIQGDGCGECAACHLRSHGLNEYLANQAVVSASLKEKTGL

SEQ ID NO: 38569 - protein, 446 aa, Hafnia paralvei
  misc_feature (1)..(446): tr|A0A2A2MB56|A0A2A2MB56_9GAMM DNA-binding protein OS=H afnia paralvei OX=546367 GN=CJD50_12945 PE=4 SV=1
MNIYIDHDYSRLPASNDSTISVQIYSRDGVVAKNGIKPRNDIATIGKPVYDAIKRLGVQISDEVMDFLTISMAVTAADTFILRDDCFDGWTRDINVSVRVINPTIWIKNKTYIEKALQFLSGDVWNFDFKKDGMKPPVPFKPVNGRKLINLKGLDCISLFSGGLDSAIGVIDILTTGEKPLLISHSYKGDKAKQAQISKGIKDKGTFSRLCTSANPIGRGMERDITMRTRSLNFLAFAAVGADAVMKANNKSNISIYVPENGFISLNAPLTNRRIGSLSTRTTHPYFIEMMQDIFDNIGFKMKFINPYQFKTKGQMVSQCKDMKTLAQIVDSTVSCSHWKRKHQQCGYCVPCMIRRASLLRGGIKETITYHQASYANLLNFVKNKQDGRDDIFSVIMAIENAKKRNLKAWVLKSGKLKEQDIGKYENVFFEGLQEVEAFLKKEKLV

SEQ ID NO: 38570 - protein, 231 aa, Hahella chejuensis
  misc_feature (1)..(231): sp|Q2S7U9|QUEC_HAHCH 7-cyano-7-deazaguanine synthase OS =Hahella chejuensis (strain KCTC 2396) OX=349521 GN=que C PE=3 SV=1
MNQSDTSLIPNRAVAIFSGGMDSFTLLNELVQEGKEVFALSFNYGQRHSKELECARQVCESLNIAHKIIDITAINSLLAGSSLTDDIQVPEGHYEEENMKSTVVPNRNMILLSLAIGYAVSLKAEAVYYGAHGGDHAIYPDCRPAFVEIMSEASKLANYEPVEVRAPYLYETKIEILRRGLALGLDYGQTWTCYNGREKACGKCGSCVERLEAFDKNDATDPLAYESVCTG

SEQ ID NO: 38571 - protein, 223 aa, Hahella sp.
  misc_feature (1)..(223): tr|A0A3T0VWJ1|A0A3T0VWJ1_9GAMM 7-cyano-7-deazaguanine s ynthase OS=Hahella sp. KA22 OX=1628392 GN=queC PE=3 SV= 1
MPNRAVAIFSGGMDSFTLLNELVAEGKEVFALSFNYGQRHSKELVCARQVCESLNVAHKIIDITAINSLLAGSSLTDDIQVPEGHYEEENMKSTVVPNRNMILLSLAIGYAVSLKAEAVYYGAHGGDHAIYPDCRPAFVEIMSEASKLANYEPVEVRAPYLYETKIEILRRGLALGLDYGQTWTCYNGREKACGKCGSCVERLEAFEKNDAVDPVAYESVCTG

SEQ ID NO: 38572 - protein, 461 aa, Hahella sp.
  misc_feature (1)..(461): tr|A0A261GNL8|A0A261GNL8_9GAMM Uncharacterized protein OS=Hahella sp. CCB-MM4 OX=1926491 GN=BTA51_11355 PE=4 S V=1
MTFLSSPENSSNSLTVDVVEPHNTLLPTSAVACEINNHIQFNPEILETYCAKNLESIVYDLLITTAAIEFSDRYKPRSRVKWPRDIQLRIPVADPSHWSSPSVSDSLRKTLNVLTGDHWRLYFVQRSSKYTEAVQSQLDYPPNASAIMAYSDGLDSRSVASIFEDSEGKDTLIKVRVGSSDKQNGKPAAFTAIPFTVKYPKHHHKEDSFRSRGFKFAAISAIAAYLSKTKNIIVPESGQGALSPVLLPLHAQYPDFRNHPVFFRKMESFIYALLGYSLNYSQPRIWFTKGETVFSALNTGIPEDVLKDTRSCWQSRYNVSFGGIRHQCGACAACLLRRLSLNHAEIEESENTYYWSNLSSSSFEKAAPDSLSTRKGFKTMKANAVAGVRHFDELANLVKDSNTRFLLAHSLELAKSTNQKHEDVHIRLTEMLKKHSHEWHEFLNSLKDKSFINNWIQGVIR

SEQ ID NO: 38573 - protein, 253 aa, Hahellaceae bacterium
  misc_feature (1)..(253): tr|A0A2D8R8K0|A0A2D8R8K0_9GAMM 7-cyano-7-deazaguanine s ynthase OS=Hahellaceae bacterium OX=2048971 GN=queC PE= 3 SV=1
MSSRSFNNAPSGDSPSVVIFSGGMDSYTLLHSLLQQVGPSARVQAEAVPQRDLVHALSFDYGQRHKKELIYAADVCKSLGIPHRIIDITAVNSLLAGSSLTDAIDVPEGHYESESMKSTVVPNRNMILLSLAIGYAVSIKAEAVYFGAHGGDHAIYPDCRPEFLERMNAVSVIANYEPVRVEAPFVGIDKIDILGQGLAMGLDYSKTWTCYNGREKACGKCGSCVERLEAFAENGVVDPLPYEPNVDRPDLKV

SEQ ID NO: 38574 - protein, 234 aa, Hahellaceae bacterium
  misc_feature (1)..(234): tr|A0A2D8RHY9|A0A2D8RHY9_9GAMM 7-cyano-7-deazaguanine s ynthase OS=Hahellaceae bacterium OX=2048971 GN=queC PE= 3 SV=1
MVLSNDSALVLFSGGQDSTTCLGWALDRFRRVETIGFRYKQRHAVELECREQILAYLSKDYPEWGDRLGEDHLVDVPALADIGETAMTEEVEITAGNNGLPNTFVPGRNLLFLTFAAALAYRRGIKHIITGVCETDFSGYPDCRDDTVKALQVAINLGMESRFNLETPLMWLDKAETWALADHIGGKVFLELIIEQSHTCYKGDRSQRWAWGYGCGDCPACDLRASGWELFQAR

SEQ ID NO: 38575 - protein, 125 aa, Halanaerobium congolense
  misc_feature (1)..(125): tr|A0A4R7EC13|A0A4R7EC13_9FIRM Queuosine biosynthesis p rotein QueC (Fragment) OS=Halanaerobium congolense OX=5 4121 GN=BY453_11357 PE=4 SV=1
MSTATTEAKYNLLIDNLKELEPFVIAFSGGVDSTFLTAAAQKAGVEFEAVTVNSPFVPDREIKEVENLVRSMDFKHQQISIELQELKKAADNTAERCYYCKKVIFDKIINYANGKTVIEGSNLDD

SEQ ID NO: 38576 - protein, 272 aa, Halanaerobium congolense
  misc_feature (1)..(272): tr|A0A1M7LVS0|A0A1M7LVS0_9FIRM Uncharacterized protein OS=Halanaerobium congolense OX=54121 GN=C7954_10622 PE= 4 SV=1
MTTATTKAKYNLLIDNLKELEPFVIAFSGGVDSTFLTAAAQEAGVEFEAVTVNSPFVPDREIKEVENLVRSMDFKHQQMSIELQELKKAADNTAERCYYCKKVIFDKIINYANGKTVIEGSNLDDTGDYRPGRKALKELGIKSPLLKVELTKKEIRMLSKELGLSTWDKPSLSCLATRVSYDNQITAERLEKIELAEELLRRNGFHQFRVRDHNNLARIELSEADREKILDLNLMDKLSDKLQKLGFQYVTLDLSAYKSGSMNKEILEAKDE

SEQ ID NO: 38577 - protein, 272 aa, Halanaerobium hydrogeniformans
  misc_feature (1)..(272): tr|E4RKB3|E4RKB3_HALHG Uncharacterized protein OS=Halan aerobium hydrogeniformans OX=656519 GN=Halsa_2216 PE=4 SV=1
MSTVTKEEKYSILLDNLKNLEPFILAFSGGVDSTFLTAAALDAEVEFEAVTVNTPFVPQREINEIKELVKELKFEHRQLDIGLSELEKALENTPERCYYCKEIIFSKIKEYAGEREIIEGSNLDDTGDYRPGRKALKELKVKSPLLDAGFTKKEIRSLSKKMDLSTWNKATLSCLATRISYNDQITEEKLEKIYLAEELLRKNGLIQFRVRDHNNLARIEIAPQERSKILDLNLMDKIHSKLIKLGFQYVTLDLSAYKSGSMNKEILGVDDE

SEQ ID NO: 38578 - protein, 272 aa, Halanaerobium kushneri
  misc_feature (1)..(272): tr|A0A1N6Z4V6|A0A1N6Z4V6_9FIRM Uncharacterized protein OS=Halanaerobium kushneri OX=56779 GN=SAMN05421834_1165 2 PE=4 SV=1
MSTVTTTDKYNLLLESLTELEPFIIAFSGGVDSTFLAAAATKAGVDFEAVTVNTPFVPEREIKEVAELVEKLDLNHQQLEIELRELEKAVENNSDRCYHCKKVIFNKIIDYAAGKTVIEGSNVDDQGDYRPGRKALKELGVKSPMLAAALTKNEIRELSKKLGLSTWNKPSMSCLATRVSYDDRISADKLEKIEIAEELMHRMGFEQFRVRDHSNLARIELSEADREKILDLKLMDKLSDKLQKLGFQYVTLDLSAYKSGSMNKEILEAKDE

SEQ ID NO: 38579 - protein, 272 aa, Halanaerobium saccharolyticum
  misc_feature (1)..(272): tr|M5EF96|M5EF96_9FIRM ATP-utilizing enzyme of the PP-l oop superfamily OS=Halanaerobium saccharolyticum subsp. saccharolyticum DSM 6643 OX=1293054 GN=HSACCH_01615 PE =4 SV=1
MSISTTKDKYKLLLDNLKELEPFVIAFSGGVDSTFLTAAAKEAGVEFEAVTVNTPFVPEREIREVKKLVQELEIEHQQLEIELNQLEKALENDAERCYHCKKVIFNQIMDYAAGKKVVEGSNLDDTGDYRPGRRALKELGIKSPLLTAQLTKKEIRMLSKDLGLITWNKPSLSCLATRVSYGNKITADRLEKIEIAEELLRRNGFHQFRVRDHNNLARIELSEADRDKILDLNLMDKLSDKLQKLGFQYVTLDLSAYESGSMNKEILEGKDE

SEQ ID NO: 38580 - protein, 272 aa, Halanaerobium saccharolyticum
  misc_feature (1)..(272): tr|A0A4R6M1D9|A0A4R6M1D9_9FIRM Uncharacterized protein OS=Halanaerobium saccharolyticum OX=43595 GN=DFR79_1021 02 PE=4 SV=1
MSTVTTADKYNLLLDNLKELEPFVIAFSGGVDSTFLTAAAQKAGAEFEAVTVNTPFVPDREIREVAELVEELNFEHQQIEIELSELKKAAANTAERCYHCKKVIFNQILDYAAGKTVVEGSNLDDTGDYRPGRKALQELGVKSPLLAAQLTKKEIRMLSKDLGLVTWNKPTLSCLATRVSYNNPITAERLEKIEIAEELLRRNGFKQFRVRDHNNLARIELSEADREKIMDLNLMDKLSDKLQKLGFQYVTLDLSAYQSGSMNKEILEGKDE

SEQ ID NO: 38581 - protein, 272 aa, Halanaerobium sp.
  misc_feature (1)..(272): tr|A0A424YEM6|A0A424YEM6_9FIRM ATP-dependent sacrificia l sulfur transferase LarE OS=Halanaerobium sp. MSAO_Bac 5 OX=2293859 GN=larE PE=4 SV=1
MSTVTKEDKYKLLINKLKKLSPFVLAFSGGVDSTFLTAAALDAEVEFEAVTINTPFVADREINEVEELVKQLQFEHKEIEIELAELKKALDNTAERCYFCKEIIFSKIIDYAGDREVIEGSNLDDTGDYRPGRKALKELQVKSPLLEVGLTKKEIRELSKKMKLPTWNKATLSCLATRISYNDPITAQKLEKIDLAEELMRKNGFEQFRVRDHNNLARIEIAPQERSKILDLNLMDKIHSKLIKLGFKYVTLDLSAYESGSMNKEILEGENE

SEQ ID NO: 38582 - protein, 127 aa, Halanaerobium sp.
  misc_feature (1)..(127): tr|A0A139D768|A0A139D768_9FIRM Uncharacterized protein (Fragment) OS=Halanaerobium sp. T82-1 OX=1794808 GN=AWL 62_1219 PE=4 SV=1
MSTATTEAKYNLLIDNLKELEPFVIAFSGGVDSTFLTAAAQKAGVEFEAVTVNSPFVPDREIKEVENLVRSMDFKHQQISIELQELKKAADNTAERCYYCKKVIFDKIINYANGKTVIEGSNLDDTG

SEQ ID NO: 38583 - protein, 233 aa, Haliea salexigens
  misc_feature (1)..(233): tr|A0A3C1KQB3|A0A3C1KQB3_9GAMM 7-cyano-7-deazaguanine s ynthase OS=Haliea salexigens OX=287487 GN=queC PE=3 SV= 1
MSPVTERPGTGQRAVILVSGGLDSTTVLAMALRQGYKCYTLSFDYGQRHRAELVAAERVSTAHRGVQHKVVTLNLDSIGGSALTDPAIAVPEEATTGIPVTYVPARNTVFLSIALGWAEVLDAQAIFIGVNAVDYSGYPDCRPAYITAFEEMANLATRAGVEGRRLTLHTPLMHLSKAEIIAAGIGLGVDYALTVSCYQATDEGLACGRCDACRLRRDGFLQAGVADPTRYRP

SEQ ID NO: 38584 - protein, 236 aa, Haliea sp.
  misc_feature (1)..(236): tr|A0A2D5F8A9|A0A2D5F8A9_9GAMM 7-cyano-7-deazaguanine s ynthase OS=Haliea sp. OX=1932666 GN=queC PE=3 SV=1
MNGSKALVLFSGGQDSATCLAWALDRFDVVETIGFDYGQRHAIELAARGPLRDAVAIAMMDKGKGKLGGDIVLPAHVLGEVAQTALTHDVAIKAEEGGLPNTFVPGRNLLFLTLAAAYGWRRGIETLVGGMCETDYSGYPDCRDDTMKAMASALTLGLDQPVKIETPLMFITKAETWALAERLGGERLIEAILEHSHTCYEGVREERHSWGYGCGVCPACGLRAKGHAEWTAWTER

SEQ ID NO: 38585 - protein, 234 aa, Haliea sp.
  misc_feature (1)..(234): tr|A0A519JJ63|A0A519JJ63_9GAMM 7-cyano-7-deazaguanine s ynthase OS=Haliea sp. OX=1932666 GN=queC PE=3 SV=1
MHTTALVLFSGGQDSTTCLAQALSKYQRVETVGFDYGQRHSVELQARLVVLQQLRAQFPQWAHKLGEDHVLDLAVLGQVSETSLTRDMAFKMESSGLPNTFVPGRNLLFLTLAAALAYRRGLQVMVTGVCETDFSGYPDCRDDTMKAMQLALSLGMDKRFLIETPLMWIDKAATWALAESLGGTALVDLIIEHTHTCYLGDREHRHAWGYGCGSCPACDLRSRGYAAYRGTPPA

SEQ ID NO: 38586 - protein, 223 aa, Halieaceae bacterium; identical to SEQ ID NO: 37351
  misc_feature (1)..(223): tr|A0A2D7P0W4|A0A2D7P0W4_9GAMM 7-cyano-7-deazaguanine s ynthase OS=Halieaceae bacterium OX=2026743 GN=queC PE=3 SV=1

SEQ ID NO: 38587 - protein, 237 aa, Halieaceae bacterium
  misc_feature (1)..(237): tr|A0A356SFY9|A0A356SFY9_9GAMM 7-cyano-7-deazaguanine s ynthase OS=Halieaceae bacterium OX=2026743 GN=queC PE=3 SV=1
MSGSEKAVVLLSGGLDSSTVLRMAGAQHPEVYALSFRYGQRHSVELDCATRVATAAGVSKHTIIDIDLRQFGGSALTDDIDVPKDRSDAEMSADIPITYVPARNTIFLSFALAWAEVLKANHIYVGVNAVDYSGYPDCRPEFITAFEDMANLATKEAVEGRSRVQIHTPLIDLTKAEIIQQGMDLGVDYALTSSCYDPGDDGRPCMACDSCLLRQKGFLAAGVTDPLVAKFEQAPYA

SEQ ID NO: 38588 - protein, 225 aa, Halioglobus japonicus
  misc_feature (1)..(225): tr|A0A2N5Y877|A0A2N5Y877_9GAMM 7-cyano-7-deazaguanine s ynthase OS=Halioglobus japonicus OX=930805 GN=queC PE=3 SV=1
MNSDKRAVILVSGGLDSTTVLAMARAQGYACYTLSFDYGQRHRAELLAADRVSTALGDVEHKVVNLNLDAIGGSALTDTDIDVPEEETQGIPVTYVPARNTVFMSIALGWAEVLGAQDIFIGVNAVDYSGYPDCRPEYIAAFEAMANLATRAGVEGQKLTIHTPLMELGKGDIIAAGLDLGVDYSLTVSCYQADADGRACGKCDSCRLRRQGFVDAGVADPTRYY

SEQ ID NO: 38589 - protein, 224 aa, Halioglobus lutimaris
  misc_feature (1)..(224): tr|A0A2N5X0L4|A0A2N5X0L4_9GAMM 7-cyano-7-deazaguanine s ynthase OS=Halioglobus lutimaris OX=1737061 GN=queC PE= 3 SV=1
MSEQRAVILVSGGLDSATVLAMARAEGYACYTLSFDYGQRNRAELQAAERVSASLGDVEHKVVRLNLDSIGGSALTDAAIDVPESLTEGIPVTYVPARNTIFLSIGLGWAEVLGAQDIFIGVNAVDYSGYPDCRPEYIAAFETMSNLATRIGVEGRKTTIHTPLMKLGKGEIIRAGLDLGLDYSLTVSCYQASVEGFACGKCDSCRLRRQGFVDAGVKDPTRYI

SEQ ID NO: 38590 - protein, 225 aa, Halioglobus sp.
  misc_feature (1)..(225): tr|A0A2E0Z321|A0A2E0Z321_9GAMM 7-cyano-7-deazaguanine s ynthase OS=Halioglobus sp. OX=2024834 GN=queC PE=3 SV=1
MSARAKAVVLVSGGLDSTTVLAMARARGFACYTLSFDYGQRHRAELAAAERVSAALGDVEHKVVTLNLDSIGGSALTDLSIAVPEQETEGIPVTYVPARNTVFLSIALGWAEVLGAQDIFIGVNAVDYSGYPDCRPQFIDAFEAMANLATREGVEGRKISVHAPLIDLGKGEIIRAGLELGVDYALTVSCYQATATGLACGRCDSCRLRRAGFEQAGVADPTRYV

SEQ ID NO: 38591 - protein, 224 aa, Halioglobus sp.
  misc_feature (1)..(224): tr|A0A3L7DU84|A0A3L7DU84_9GAMM 7-cyano-7-deazaguanine s ynthase OS=Halioglobus sp. U0301 OX=2283635 GN=queC PE= 3 SV=1
MTDKRAVILVSGGLDSTTVLAMARSEGYACYTLSFDYGQRHRAELFAAERVSAALGDVEHKVVKLNLDSIGGSALTDAAIAVPEEETEGIPVTYVPARNTVFLSIALGWAEVLGAQDIFIGVNAVDYSGYPDCRPAYIAAFENMANLATRAGVEGNRLRIHTPLMDLGKGEIINAGLALGVDYALTVSCYQATDAGLACGKCDACRLRARGFADAGVDDPTPYA

SEQ ID NO: 38592 - protein, 225 aa, Haloarcobacter mediterraneus
  misc_feature (1)..(225): tr|A0A4Q1AV66|A0A4Q1AV66_9PROT 7-cyano-7-deazaguanine s ynthase OS=Haloarcobacter mediterraneus OX=2023153 GN=q ueC PE=3 SV=1
MNKASKKAVCILSGGMDSTLASYIAKKEGYEIIAVHFNYGQRTEKKELQAFRNICNDLQIKEKYEIDIPFFTQIGASALTDNSIDIPINGIEEGVPITYVPFRNGIFLSIASAIAEKEEANALFIGVVEEDSSGYPDCTDEFISKMTNAINQGTKESTKIEIKTPLVHLMKDEIVKKSLELNVPLEHTWSCYQEEESACGVCDSCRLRLNGFEKANSKDPIKYKE

SEQ ID NO: 38593 - protein, 221 aa, Halobacillus aidingensis
  misc_feature (1)..(221): tr|A0A1H0S7B6|A0A1H0S7B6_HALAD 7-cyano-7-deazaguanine s ynthase OS=Halobacillus aidingensis OX=240303 GN=queC P E=3 SV=1
MEKNNKAVVVFSGGQDSTTCLFWALKKFDSVEVVTFDYNQRHKEEIEVAKEIAEDQQVLHHILDMSLLNQLAPNALTRDDIEVKDGEDGELPSTFVPGRNQLFLSFATILARQIGAKHIVTGVCETDFSGYPDCRDVFVKSLNVTLNLSMDDEFVIHTPLMWLDKAETWEMADDLDAFNYVREKTLTCYNGIRGDGCGECPACELRRNGLHTYLAKKEVTK

SEQ ID NO: 38594 - protein, 222 aa, Halobacillus alkaliphilus
  misc_feature (1)..(222): tr|A0A1I2TK75|A0A1I2TK75_9BACI 7-cyano-7-deazaguanine s ynthase OS=Halobacillus alkaliphilus OX=396056 GN=queC PE=3 SV=1
MEKNNKAIVVFSGGQDSTTCLFWALKKYDEVQVVTFDYNQRHNEEIEVAKEIAVDLKVKHHVLDMSLLNQLAPNALTRDDIEVTDGKDGGLPSTFVPGRNLLFLSFASILAKQIGAKHVVTGVCETDFSGYPDCRDVFIKSLNVTLNLSMDDEFVVHTPLMWLDKAQTWALADELNAFEYVREKTLTCYHGVRGDGCGECPACELRQKGLEAYLEQGTEVNR

SEQ ID NO: 38595 - protein, 198 aa, Halobacillus alkaliphilus
  misc_feature (1)..(198): tr|A0A1I2L1Z3|A0A1I2L1Z3_9BACI 7-cyano-7-deazaguanine s ynthase OS=Halobacillus alkaliphilus OX=396056 GN=SAMN0 5216353_10711 PE=3 SV=1
MNNKKKNVSILLSGGLDSTTLIEYYKQYNYEINGIHFQYNQSAKNTEWEACKNIANYYDIEVKNLKLGLPILNFEGQIQCRNSLFIFGAAANIKPSENVTLAYGAHSGTPYYDCSINFVSSAQTILDGYFGGTVSIEAPFIRWSKEDILKFSLMKKVPIELTYSCEKKEYIECGKCPSCLDRRALTSAYKEYLQKKEN

SEQ ID NO: 38596 - protein, 221 aa, Halobacillus dabanensis
  misc_feature (1)..(221): tr|A0A1I3XVK5|A0A1I3XVK5_HALDA 7-cyano-7-deazaguanine s ynthase OS=Halobacillus dabanensis OX=240302 GN=queC PE =3 SV=1
MEKNNKAVVVFSGGQDSTTCLFWALKKFDSVEVVTFDYNQRHNEEINVAKEIAEDMDVRHHILDMSLLNQLAPNALTRDDIEVEGGNEGELPSTFVPGRNLLFLSFATILARQIGAKHIVTGVCETDFSGYPDCRDVFVKSLNVTLNLSMDDEFVVHTPLMWLDKAETWEMADELNAFQYVRENTLTCYNGIRGDGCGNCPACELRKNGLDTYLANKEVSG

SEQ ID NO: 38597 - protein, 221 aa, Halobacillus faecis
  misc_feature (1)..(221): tr|A0A511WYF6|A0A511WYF6_9BACI 7-cyano-7-deazaguanine s ynthase OS=Halobacillus faecis OX=360184 GN=queC PE=3 S V=1
MKKNNKAVVVFSGGQDSTTCLFWALKKFDSVEVVTFDYNQRHKEEIEVAKEIAEDQQVRHHILDMSLLNQLAPNALTRDDIEVKDGEDGELPSTFVPGRNLLFLSFATILARQIGAKHIVTGVCETDFSGYPDCRDVFVKSLNVTLNLSMDDEFVIHTPLMWLDKAQTWEMADDLGAFDYVREKTLTCYNGVRGDGCGECPACELRKNGLDTYVAKKEVSR

SEQ ID NO: 38598 - protein, 222 aa, Halobacillus halophilus
  misc_feature (1)..(222): tr|I0JJQ2|I0JJQ2_HALH3 7-cyano-7-deazaguanine synthase OS=Halobacillus halophilus (strain ATCC 35676 / DSM 226 6 / JCM 20832 / NBRC 102448/ NCIMB 2269) OX=866895 GN=q ueC PE=3 SV=1
MENNNKAVVVFSGGQDSTTCLFWALKKYDEVQVVTFDYNQRHNEEIEVAKEIAEDLKVKHHVLDMSLLNQLAPNALTRDDIEVTDGEDGGLPSTFVPGRNLLFLSFASILAKQIGAKHVVTGVCETDFSGYPDCRDVFIKSLNVTLNLSMDDEFVVHTPLMWLDKAQTWALADELDAFEYVREKTLTCYHGVRGDGCGECPACELRQKGLEIYLEQGTEVNR

SEQ ID NO: 38599 - protein, 221 aa, Halobacillus karajensis
  misc_feature (1)..(221): tr|A0A024P5I4|A0A024P5I4_9BACI 7-cyano-7-deazaguanine s ynthase OS=Halobacillus karajensis OX=195088 GN=queC PE =3 SV=1
MEKNSKAVVVFSGGQDSTTCLFWALKKFDHVEVVTFDYNQRHKEEIKVAQEIAEDQKVRQHILDMSLLNQLAPNALTRDDIEVKEGEEGELPSTFVPGRNLLFLSFATILARQINAKHIVTGVCETDFSGYPDCRDVFVKSLNVSLNLSMDDEFVIHTPLMWLDKAETWELADQLDAFNYVRTKTLTCYNGVRGDGCGECPACELRRNGLDTYLSKKEVQD

SEQ ID NO: 38600 - protein, 221 aa, Halobacillus litoralis
  misc_feature (1)..(221): tr|A0A410MB19|A0A410MB19_9BACI 7-cyano-7-deazaguanine s ynthase OS=Halobacillus litoralis OX=45668 GN=queC PE=3 SV=1
MEKNNKAVVVFSGGQDSTTCLFWAMKKFDEVEVVTFDYNQRHKEEIEVAREIAGEMDVRHHVLDMSLLNQLAPNALTRNDIEVKDGEDGELPSTFVPGRNLLFLSFATILARQIGAKHVVTGVCETDFSGYPDCRDIFIKSLNVTLNLSMEDDFVVHTPLMWLDKAQTWEMADQLDAFNYVREKTLTCYNGIRGDGCGECPACQLRRNGLETYVAQKEVNQ

SEQ ID NO: 38601 - protein, 245 aa, Halobacillus mangrovi
  misc_feature (1)..(245): tr|A0A1W5ZSB5|A0A1W5ZSB5_9BACI Uncharacterized protein OS=Halobacillus mangrovi OX=402384 GN=HM131_04765 PE=4 SV=1
MPNNVLWTGGWDSTYRVLNLVLDQKKTIQPYYVLDPVRPSTEMELKTMERIKRLMNEFDPGAEERVLETIEIRKDEIPLNPDFTKEYEKLQKEFRLGDQYDWLGRYAESVNMDTLELSVHHDDKVQGMIKDDVIKIEDGEDFYYRVVDNPSHPAFVIFQKYRFPLLEITKLGMEEKAKERGYAHIMEETWFCHTPKKTGEPCGLCNPCKYTQEEGLGRRIPEPTRFEKIRYFLFKVNRRIKKMVK

SEQ ID NO: 38602 - protein, 222 aa, Halobacillus mangrovi
  misc_feature (1)..(222): tr|A0A1W5ZYJ1|A0A1W5ZYJ1_9BACI 7-cyano-7-deazaguanine s ynthase OS=Halobacillus mangrovi OX=402384 GN=queC PE=3 SV=1
MEKNNKAVVVFSGGQDSTTCLFWALKKFDHVEVVTFDYNQRHKEEIEVAKEIAGDLNVKHHVIDMSLLNQLAPNALTRDDIEVKAGENGELPSTFVPGRNLLFLSFATIIANQIGAKHVVTGVCETDFSGYPDCRDVFVKSLNVTLNLSMDDQFVIHTPLMWLDKAETWEMADELDAFTYVREKTLTCYNGVRGDGCGECPACNLRLNGLETYLEKREEVAK

SEQ ID NO: 38603 - protein, 221 aa, Halobacillus salinus
  misc_feature (1)..(221): tr|A0A4Z0H2C2|A0A4Z0H2C2_9BACI 7-cyano-7-deazaguanine s ynthase OS=Halobacillus salinus OX=192814 GN=queC PE=3 SV=1
METNQKAVVVFSGGQDSTTCLFWAMQKFAHVEVVTFDYDQRHKAEVEVAKEIAEDQQVTHHVLDMSLLNQLAPNALTRDDIEVKDGEDGELPSTFVPGRNLLFLSFATILARQIGAKHVVTGVCETDFSGYPDCRDVFVKSLNVTLNLSMDDEFVVHTPLMWLDKAETWGMADELGAFDYVRTKTLTCYNGVRGDGCGECPACHLRKNGLDTYLAQKGESQ

SEQ ID NO: 38604 - protein, 245 aa, Halobacillus sp.
  misc_feature (1)..(245): tr|A0A0B0D1W6|A0A0B0D1W6_9BACI Uncharacterized protein OS=Halobacillus sp. BBL2006 OX=1543706 GN=LD39_09990 PE =4 SV=1
MPNNVLWTGGWDSTYRVLNLVLDQKKTIQPYYVLDSVRPSTKMELKTMERIKRLMVEFDPEAEQRILETIEIKKDEIPLNPDFTKEYEKLRKEYRLGDQYDWLGRYAESVNMDTLELSVHHDDKAQGMIKDDVVKIEDGEDFYYRVVDNPSHPAFVIFQKYRFPLLEITKLEMEEKAKERGYAHIMEETWFCHTPKKNGEPCGLCNPCKYTQEEGLGRRIPEPTRAERIRYFLFKVNRRLKKIVN

SEQ ID NO: 38605 - protein, 221 aa, Halobacillus sp.
  misc_feature (1)..(221): tr|L5NDT4|L5NDT4_9BACI 7-cyano-7-deazaguanine synthase OS=Halobacillus sp. BAB-2008 OX=1246484 GN=queC PE=3 SV =1
MEKNSKAVVVFSGGQDSTTCLYWALEKFDHVEAVTFDYDQRHKEEIEVAKEIAADKGVRHHILDMALLNQLAPNALTRNDMEVKDGENGELPSTFVPGRNLLFLSFASILARQIGAKHVITGVCETDFSGYPDCRDVFVKSLNVTLNLSMDDEFVLHTPLMWLDKAETWELADTLGGFEYVREKTLTCYNGIRGEGCGDCPACRLRQNGLDMYLAQKEVSR

SEQ ID NO: 38606 - protein, 221 aa, Halobacillus trueperi
  misc_feature (1)..(221): tr|A0A3D8VSN9|A0A3D8VSN9_9BACI 7-cyano-7-deazaguanine s ynthase OS=Halobacillus trueperi OX=156205 GN=queC PE=3 SV=1
MEKNNKAVVVFSGGQDSTTCLFWALKKFDSVEVVTFDYNQRHKEEIEVAKEIAEDQQVRHHILDMSLLNQLAPNALTRDDIEVKDGEDGELPSTFVPGRNQLFLSFATILARQIGAKHIVTGVCETDFSGYPDCRDVFVKSLNVTLNLSMDDEFVIHTPLMWLDKAETWEMADDLDAFDYVREKTLTCYNGIRGDGCGECPACELRRNGLHTYLAKKEVTK

SEQ ID NO: 38607 - protein, 221 aa, Halobacillus trueperi
  misc_feature (1)..(221): tr|A0A3E0J6N5|A0A3E0J6N5_9BACI 7-cyano-7-deazaguanine s ynthase OS=Halobacillus trueperi OX=156205 GN=queC PE=3 SV=1
MEKNKKAVVVFSGGQDSTTCLFWALKKFDSVEVVTFDYNQRHKEEIEVAKEIAGDQRVRHHILDMSLLNQLAPNALTRDDIEVKDGEDGELPSTFVPGRNLLFLSFATILARQIGAKHIVTGVCETDFSGYPDCRDVFVKSLNVTLNLSMDDEFVIHTPLMWLDKAETWEMADDLDAFDYVREKTLTCYNGIRGDGCGECPACELRRNGLHTYLAKKEVTK

SEQ ID NO: 38608 - protein, 223 aa, Halobacteriovoraceae bacterium
  misc_feature (1)..(223): tr|A0A2E4D983|A0A2E4D983_9PROT 7-cyano-7-deazaguanine s ynthase OS=Halobacteriovoraceae bacterium OX=2026745 GN =queC PE=3 SV=1
MSDLAIVLVSGGMDSVTVAAIAHEKHQNLAFLHLNYHQKTAAKERECFQAIAQHYLVPKELQKIVDMSFLSQIGGSSLTDQNISVSDYQGDNNNIPSSYVPFRNTHIIALAVSWAETIGAQSIYIGANEEDSPGYPDCRKEYYDAYNKLISLGTKEGKIQVHTPIIKMKKSEIVLKAKALNAPLELTWSCYKNGERACGTCDSCALRLRGFKEAGLQDPIHYQ

SEQ ID NO: 38609 - protein, 233 aa, Halobacteriovoraceae bacterium
  misc_feature (1)..(233): tr|A0A2E3XTC5|A0A2E3XTC5_9PROT 7-cyano-7-deazaguanine s ynthase OS=Halobacteriovoraceae bacterium OX=2026745 GN =queC PE=3 SV=1
MKSKSTELAVVLVSGGMDSLVSAAIANEAHESLAFLHLNYGQNTEDKEFECFQKIAEFYNVPESLQKVIDITFLKQIGGSSLTDDQIEVKKYHGDSEEIPDSYVPFRNTHIISMAVSWAEVIGAKKIYIGAVEEDSSGYPDCRPSYYQAMNALIKQGTKDGDIEVITPVIDLSKDQIVKKAVELKAPIAASWSCYEKEDKACGVCDSCALRLRGFEKAGLEDPIEYHQRPKYT

SEQ ID NO: 38610 - protein, 233 aa, Halobacteriovorax marinus
  misc_feature (1)..(233): tr|E1X5I2|E1X5I2_HALMS 7-cyano-7-deazaguanine synthase OS=Halobacteriovorax marinus (strain ATCC BAA-682 / DSM 15412 / SJ) OX=862908 GN=queC PE=3 SV=1
MSEKSNELAVVLVSGGMDSLVTAAMANEKHQRMAFLHLNYGQKTQDRELKCFNEIADHYNVPKSLRKIIDISFLSQIGGSSLTDDSIDVKDYKGDSEEIPDSYVPFRNTHIVAMAVSWSEVVGAKKIYIGAVYEDSSGYPDCRPSYYQALNNLIKEGTKDGDIEVVTPVIHMKKEEIVKKAISLQAPLSSSYSCYARGDKACGICDSCALRLRGFQIAGLEDPIEYDQRPNYL

SEQ ID NO: 38611 - protein, 285 aa, Halobacteriovorax marinus
  misc_feature (1)..(285): tr|A0A1Y5F988|A0A1Y5F988_9PROT Uncharacterized protein OS=Halobacteriovorax marinus OX=97084 GN=A9Q84_19910 PE =4 SV=1
MKYSGESVAILFSGGTDSTLTAALLEKSFEKIHLVTYNRFGFHATDNTAVQAKMLKDKFGAERFVHDILNVDKLFKHISYERYVKNIKEFGFFNLSTCGLCKLSMHVRTIIYCKDNDIKYVADGANQAMSMFPAQMEGVIDELKKMYEHFGIVYFNPVFEMDGHEDKGFIEKANLQLLNDPTIPEIEKINLPVRDKKTETPGDKLFKLGLAPNPNVKGSKYDRKRQPRCFQFIIFNIFAIKYYLQKNTYEEYRDKTVSFYKHKIGGMIDLIEKKDDKKVRRLFEE

SEQ ID NO: 38612 - protein, 233 aa, Halobacteriovorax sp.
  misc_feature (1)..(233): tr|A0A2E5JEX7|A0A2E5JEX7_9PROT 7-cyano-7-deazaguanine s ynthase OS=Halobacteriovorax sp. OX=2020862 GN=queC PE= 3 SV=1
MSQKENTLAIALVSGGMDSLLSAAMAHEKHQHLAFLHLNYGQKTEERELQCFHKIAEYYGVPKELRKVVDVTFLKQIGGSSLTDDGIDVKKYKGDSEDIPDSYVPFRNTHIVSMAVSWAEVIGAKKIYIGAVDEDSSGYPDCRPSYYKALNALIKEGTKDGDIEVITPVITMKKFEIVKKALELKAPIIDSWSCYARGDKACGVCDSCALRLRGFAQAGLEDPIEYDQRPKYI

SEQ ID NO: 38613 - protein, 231 aa, Halobacteriovorax sp.
  misc_feature (1)..(231): tr|A0A4Z0KY35|A0A4Z0KY35_9PROT 7-cyano-7-deazaguanine s ynthase OS=Halobacteriovorax sp. Y22 OX=2505978 GN=queC PE=3 SV=1
MKSDKLAVVLVSGGMDSLVCAAIANEKHENLAFLHLNYGQKTEERELDCFQKIADHYGVDKSLRKVIDVSFLKQIGGSSLTDDGIDVKQYKGDSEEIPDSYVPFRNTHIIAMAVSWSEVVGAKNIYIGAVNEDSSGYPDCRPSYYAAYNELIKQGTKDGDIEIITPVIDMAKNEIVQKAVDLGAPLQFSYSCYARGDKACGVCDSCALRLRGFQKAGIEDPIEYDQRPNYL

SEQ ID NO: 38614 - protein, 233 aa, Halodesulfovibrio marinisediminis
  misc_feature (1)..(233): tr|A0A1N6I872|A0A1N6I872_9DELT 7-cyano-7-deazaguanine s ynthase OS=Halodesulfovibrio marinisediminis DSM 17456 OX=1121457 GN=queC PE=3 SV=1
MNNSALVVFSGGQDSTTCLAWALERFDSVATIGFSYGQRHDVEMDCRKNVLSEVCGLNDTWKQRLKHDEVLEINLFNEIGGTALTEEVEIQMGENGLPTTFVPGRNLVFLTAAAAYAYRQGIRHIVIGVCETDFSGYPDCRDDTVKAMQVALNLGMESRFVIHTPLMWIDKAATWTMADDLGGKPFVDLVREHTHTCYLGDRTELHAWGYGCGTCPACELRAKGWEQFEEGKQ

SEQ ID NO: 38615 - protein, 230 aa, Halomonadaceae bacterium
  misc_feature (1)..(230): tr|A0A139CD28|A0A139CD28_9GAMM 7-cyano-7-deazaguanine s ynthase OS=Halomonadaceae bacterium T82-2 OX=1783518 GN =queC PE=3 SV=1
MTRTTLSTPARAVVIYSGGMDSYTVLHHALRQGFELHALSFHYGQRHDRELDAARRVCEQLGIAHQVVDIQAIHPLIDNSALTDAERALPDGDYAEDNLTATVVPNRNMILLSLAIAKAVNIGAEVCFYGAHGGDHVLYPDCRPEFLARMNDVAAIANFSPVTIEAPYLHADKADILADGLAMGLDYAETWTCYQGGETACGECGSCRERLAAFAAHGQVDPLPYAATGR

SEQ ID NO: 38616 - protein, 233 aa, Halomonas aestuarii
  misc_feature (1)..(233): tr|A0A1J0VBV3|A0A1J0VBV3_9GAMM 7-cyano-7-deazaguanine s ynthase OS=Halomonas aestuarii OX=1897729 GN=queC PE=3 SV=1
MTHSPDPATVVIYSGGMDSFTVLHRALREGLDVHALSFDYGQRHRRELEVAERVCRELGVPHQVVDITAIHGLIDNSALTDASRAMPEGDYAAENLADTVVPNRNMILLSLAIAKAVNIGAGRVDYGAHGGDHVLYPDCRPEFVQAMNDVAGIANFEPLTIHAPYLRASKAEILAEGLAMGLDYADTWTCYRGEALACGRCGSCRERLAAFAANGATDPLGYSERPDLDEGAP

SEQ ID NO: 38617 - protein, 237 aa, Halomonas alkaliantarctica
  misc_feature (1)..(237): tr|A0A4R7YA78|A0A4R7YA78_9GAMM 7-cyano-7-deazaguanine s ynthase OS=Halomonas alkaliantarctica OX=232346 GN=queC PE=3 SV=1
MSSTPPMAADTATTTVVIYSGGMDSFTVLHRALREGLNVHALSFDYGQRHARELDTARQVCASLGLPHQVVDIRAIHGLIDNSALTNPAQAMPQGDYDADNLRATVVPNRNMILLSLAIAKAVNIGAERVDYGAHGGDHVLYPDCRPEFVEAMNHVAGIANFEPVKLHAPYLKVSKADILRDGLAMGLDYRHTWTCYEGRELACGVCGSCRERLEAFAANGVTDPLAYSVDSAVGQR

SEQ ID NO: 38618 - protein, 237 aa, Halomonas alkaliphila
  misc_feature (1)..(237): tr|A0A386X3S8|A0A386X3S8_9GAMM 7-cyano-7-deazaguanine s ynthase OS=Halomonas alkaliphila OX=272774 GN=queC PE=3 SV=1
MSLPPTSGADASSTVVIYSGGMDSYTVLHRAIKEGLEVHALSFDYGQRHHAKELDIAKAVCKQHNIPHQVVDIRAIHGLIDNSALTNPDISMPEGDYAADNLTTTVVPNRNMILLSLAIAKAVNIGAGRVDYGAHGGDHILYPDCRPEFVHAMNQVAGIANFEPITLHAPYLAASKADILRDGLAMGLNYRDTWTCYEGRPLACGKCGSCRERLAAFAANNTSDPLAYESTPAQVTG

SEQ ID NO: 38619 - protein, 236 aa, Halomonas andesensis
  misc_feature (1)..(236): tr|A0A3S0XXX1|A0A3S0XXX1_9GAMM 7-cyano-7-deazaguanine s ynthase OS=Halomonas andesensis OX=447567 GN=queC PE=3 SV=1
MSSSPILGANASSTVVIYSGGMDSYTVLHRAIKEGLVVHALSFDYGQRHAKELDVAKAVCKLHNIPHQVIDIRAIHSLIDNSALTNPDVSMPEGNYAADNLHTTVVPNRNMILLSLAIAKAVNSGAARVDYGAHGGDHILYPDCRPEFVHAMNQVAGIANFQPVMLHAPYLTSSKADILRDGLAMGLDYRDTWTCYEGRELACGKCGSCHERLAAFAANNVEDPLAYEFVPAKVTD

SEQ ID NO: 38620 - protein, 229 aa, Halomonas anticariensis
  misc_feature (1)..(229): tr|S2L7E0|S2L7E0_HALAF 7-cyano-7-deazaguanine synthase OS=Halomonas anticariensis (strain DSM 16096 / FP35) OX =1121939 GN=queC PE=3 SV=1
MPNTLSLSGSPSRAVVIYSGGMDSFTVLHRARREGYEIHALSFDYGQRHARELDAATWVCQQLGIAHQVVDIRAIHGLIDNSALTDASREMPEGNYDSDNLATTVVPNRNMILLSLAIAQAVNIGANKVFYGAHGGDHVLYPDCRPLFVEKMNAVAAIANFEAVEICAPYLHSSKQAILADGLAMGLDYAATWTCYRGEELACGRCGSCRERLAAFTDNGVTDPLAYRG

SEQ ID NO: 38621 - protein, 236 aa, Halomonas aquamarina
  misc_feature (1)..(236): tr|A0A1H8INZ0|A0A1H8INZ0_9GAMM 7-cyano-7-deazaguanine s ynthase OS=Halomonas aquamarina OX=77097 GN=queC PE=3 S V=1
MSSTASSGAQAPSTVVIYSGGMDSYTVLHRALREGLAVHALSFDYGQRHRRELDVARQVCESLAIPHQVVDIRAIHGLIDNSALTNAALTMPQGEYDADSLHSTVVPNRNMILLSLAIAKAVNIGANRVDYGAHGGDHMLYPDCRPAFVEAMNDVAQIANFEPVTVHAPYLASSKADILRDGLAMGLDYRHTWTCYEGQQLACGQCGSCRERLAAFAANHSVDPLDYAIDTSQVAH

SEQ ID NO: 38622 - protein, 232 aa, Halomonas arcis
  misc_feature (1)..(232): tr|A0A1H0FA21|A0A1H0FA21_9GAMM 7-cyano-7-deazaguanine s ynthase OS=Halomonas arcis OX=416873 GN=queC PE=3 SV=1
MSTYPAPHGDTAVVIYSGGMDSFTLLHRALNEGYHVHALSFHYGQRHARELDTARQVCQHLGVSHQVVDIRAIHSLIDNSALTNTAHEMPHGDYDGDNLAATVVPNRNMILLSLAIANAVNIGAHRVDYGAHGGDHVLYPDCRPAFVDAMDRVAQIANFSPIAVHAPYLHASKADILRDGLAMGLDYRHTWTCYEGGDLACGRCGSCRERLAAFAANGVTDPLEYARSPETP

SEQ ID NO: 38623 - protein, 132 aa, Halomonas axialensis
  misc_feature (1)..(132): tr|A0A455V5Q4|A0A455V5Q4_9GAMM 7-cyano-7-deazaguanine s ynthase OS=Halomonas axialensis OX=115555 GN=HAALTHF_35 420n PE=3 SV=1
MVPNRNMILLSLAIAKAVNIGANRVDYGAHGGDHMLYPDCRPAFVEAMNDVAQIANFEPVTVHAPYLASSKADILRDGLAMGLDYRHTWTCYEGQQLACGQCGSCRERLAAFAANHSVDPLDYAIDTSQVAH

SEQ ID NO: 38624 - protein, 229 aa, Halomonas beimenensis
  misc_feature (1)..(229): tr|A0A291P7W0|A0A291P7W0_9GAMM 7-cyano-7-deazaguanine s ynthase OS=Halomonas beimenensis OX=475662 GN=queC PE=3 SV=1
MSHHSAPATVVIYSGGMDSYTVLHRALREGREVHALSFDYGQRHARELEVARRVCRELGVPHQVVDITAIHGLIDASALTDASRELPDADYAEDNLQDTVVPNRNMILLSLAIAKAVNIGADRVDYGAHGGDHVLYPDCRPEFVEAMNAVAAIANFAPIEIHAPYLRAGKAEILADGLAMGLDYARTWTCYRGEALACGRCGSCRERLAAFAANDAVDPLAYAGEPGDV

SEQ ID NO: 38625 - protein, 237 aa, Halomonas boliviensis
  misc_feature (1)..(237): tr|A0A265DV65|A0A265DV65_9GAMM 7-cyano-7-deazaguanine s ynthase OS=Halomonas boliviensis LC1 OX=1072583 GN=queC PE=3 SV=1
MSLLPPVAADTATTTIVIYSGGMDSFTVLHRALREGLTVHALSFDYGQRHARELDTARQVCASLGLPHQVVDIRAMHGLIDNSALTDPDQAMPKGDYGADNLRATVVPNRNMILLSLAIAKAVNIGAERVDYGAHGGDHVLYPDCRPEFVEAMNHVAGIANFEPVELHAPYLTASKADILRDGLAMGLDYRHTWTCYEGRELACGVCGSCRERLAAFAANGVTDPLAYSEDSAVGQH

SEQ ID NO: 38626 - protein, 236 aa, Halomonas campaniensis
  misc_feature (1)..(236): tr|A0A060B686|A0A060B686_9GAMM 7-cyano-7-deazaguanine s ynthase OS=Halomonas campaniensis OX=213554 GN=queC PE= 3 SV=1
MSLPPTSGADASSTVVIYSGGMDSYTVLHRAIKEGLEVHALSFDYGQRHAKELDIAKAVCKQHNIPHQVVDIRAIHGLIDNSALTNPDISMPEGDYAADNLTTTVVPNRNMILLSLAIAKAVNIGAGRVDYGAHGGDHILYPDCRPEFVHAMNQVAGIANFEPITLHAPYLATSKADILRDGLAMGLNYRDTWTCYEGRPLACGKCGSCRERLAAFAANNTSDPLAYESTPAQVTG

SEQ ID NO: 38627 - protein, 237 aa, Halomonas campaniensis
  misc_feature (1)..(237): tr|A0A246S0T6|A0A246S0T6_9GAMM 7-cyano-7-deazaguanine s ynthase OS=Halomonas campaniensis OX=213554 GN=queC PE= 3 SV=1
MSSIPQVTANTATTTVVIYSGGMDSFTVLHRALREGLSVHALSFDYGQRHARELDTARQVCASLDLPHQVVDIRAIHGLIDNSALTNQDQAMPQGDYDTDNLRATVVPNRNMILLSLAIAKAVNIGAERVDYGAHGGDHVLYPDCRPEFVEAMNHVAGIANFEPVKLHAPYLSASKADILREGLAMGLDYRHTWTCYEGREMACGVCGSCRERLAAFAANGVTDPLAYSVDSAVGQR

SEQ ID NO: 38628 - protein, 241 aa, Halomonas caseinilytica
  misc_feature (1)..(241): tr|A0A1M6NTP7|A0A1M6NTP7_9GAMM 7-cyano-7-deazaguanine s ynthase OS=Halomonas caseinilytica OX=438744 GN=queC PE =3 SV=1
MSQASASSATVVIYSGGMDSFTVLHRALREGRDVHALSFDYGQRHARELEVARRVCRELTVPHQVVDIRVIHGLIDNSALTDADRRMPDGDYDADNLADTVVPNRNMMLLSMAIAKAVNIGAGRVDYGAHGGDHVLYPDCRPEFVEAMNAVAGIANFEPVEIHTPYLRRTKAEILAGGLAMGLDYADTWTCYLGESLACGRCGSCRERLAAFAANGIDDPLGYSYRPEPVADAPSEGEHDV

SEQ ID NO: 38629 - protein, 268 aa, Halomonas chromatireducens
  misc_feature (1)..(268): tr|A0A0X8HDK0|A0A0X8HDK0_9GAMM 7-cyano-7-deazaguanine s ynthase OS=Halomonas chromatireducens OX=507626 GN=queC PE=3 SV=1
MTQSATSPVPATVVIYSGGMDSFTVLHRALREGLAVHALSFDYGQRHARELEVAAHVCRELDVPHQVVDIRAIHGLIDNSALTDASRDMPDGDYASDNLSATVVPNRNMILLSMAIAKAVNIGAGRVDYGAHGGDHVLYPDCRPEFVERMNAVAGIANFEPVRIHAPYLGSTKADILADGLAMGLDYSDTWTCYLGEELACGRCGSCRERLAAFTANGATDPLGYLQRPDTAATAQRPEAGYLQRPDATATSTRSDTDAPESREAPDV

SEQ ID NO: 38630 - protein, 231 aa, Halomonas cupida
  misc_feature (1)..(231): tr|A0A1M7ATM9|A0A1M7ATM9_9GAMM 7-cyano-7-deazaguanine s ynthase OS=Halomonas cupida OX=44933 GN=queC PE=3 SV=1
MIDSNPATVVVYSGGMDSYTVLHRVLRETPNVHALSFHYGQRHSRELDVARDVCNRLGIEHQVVDITAIHGLIDNSALTDASRAMPDGDYAEDNLTATVVPNRNMILLSLAIAKAVNVGASRVAYGAHGGDHVLYPDCRPAFVEAMNDVAAIANFSPVEIHAPYLRASKSEILADGLAMGLDYGETWTCYEGRELACGRCGSCRERLAAFAAHGVTDPLAYADTSADTQHV

SEQ ID NO: 38631 - protein, 236 aa, Halomonas daqingensis
  misc_feature (1)..(236): tr|A0A1H5RP84|A0A1H5RP84_9GAMM 7-cyano-7-deazaguanine s ynthase OS=Halomonas daqingensis OX=419596 GN=queC PE=3 SV=1
MTQATPRATVVIYSGGMDSYTVLHRALREGLNVTALSFDYGQRHGRELEVAARVCAELGVPHQVVDIRAIHGLIDNSALTDASRDMPEGDYGEENLAATVVPNRNMILLSLAIAKAVNVGAERVDYGAHGGDHVLYPDCRPAFVEAMNAVAAIANFSPVEIHAPYLRASKAEILADGLAMGLDYAKTWTCYRGEALACGRCGSCRERLAAFAANGQTDPLEYAVDAPRPDLARGGV

SEQ ID NO: 38632 - protein, 236 aa, Halomonas desiderata
  misc_feature (1)..(236): tr|A0A243T3H1|A0A243T3H1_9GAMM 7-cyano-7-deazaguanine s ynthase OS=Halomonas desiderata SP1 OX=1191209 GN=queC PE=3 SV=1
MTQATPRATVVIYSGGMDSYTVLHRALREGLNVTALSFDYGQRHARELAVAARVCAELGVPHQVVDIRAIHGLIDNSALTDASRDMPEGDYGEENLAATVVPNRNMILLSLAIAKAVNVGAERVDYGAHGGDHVLYPDCRPAFVEAMNAVAAIANFSPVEIHAPYLRASKAEILADGLAMGLDYAKTWTCYRGEALACGRCGSCRERLAAFAANGQTDPLEYAVDAPRPDLARGGV

SEQ ID NO: 38633 - protein, 238 aa, Halomonas elongata
  misc_feature (1)..(238): tr|A0A329QCK2|A0A329QCK2_HALEL 7-cyano-7-deazaguanine s ynthase OS=Halomonas elongata OX=2746 GN=queC PE=3 SV=1
MSQAPASSATVVIYSGGMDSFTVLHRALREGRDVHALSFDYGQRHSRELDVARRVCRDLEVPHQVVDIRAIHGLIDNSALTDAERAMPDGDYDADNLADTVVPNRNMMLLSMAIAKAVNIGAGRVDYGAHGGDHVLYPDCRPEFVEAMNAVAGIANFEPVEIHTPYLRHTKADILADGLSMGLDYADTWTCYLGESLACGRCGSCRERLAAFAANGVSDPLGYAQRPDAATNGESDDV

SEQ ID NO: 38634 - protein, 238 aa, Halomonas elongata
  misc_feature (1)..(238): tr|A0A1B8P2S0|A0A1B8P2S0_HALEL 7-cyano-7-deazaguanine s ynthase OS=Halomonas elongata OX=2746 GN=queC PE=3 SV=1
MSQAPASSATVVIYSGGMDSFTVLHRALREGRDVHALSFDYGQRHSRELDVARRVCRDLEVPHQVVDIRAIHGLIDNSALTDAERAMPDGDYDAGNLADTVVPNRNMMLLSMAIAKAVNIGAGRVDYGAHGGDHVLYPDCRPEFVEAMNAVAGIANFEPVEIHTPYLRHTKADILADGLSMDLDYADTWTCYLGESLACGRCGSCRERLAAFAANGVSDPLGYAQRPDAATDGESDDV

SEQ ID NO: 38635 - protein, 233 aa, Halomonas endophytica
  misc_feature (1)..(233): tr|A0A2N7TXN1|A0A2N7TXN1_9GAMM 7-cyano-7-deazaguanine s ynthase OS=Halomonas endophytica OX=2033802 GN=queC PE= 3 SV=1
MTQPVSSSVPATVVIYSGGMDSFTVLHRALREGLEVHALSFDYGQRHARELNVAATVCRGLGVPHQVVDIRAIHGLIDNSALTDASRDMPCGDYASDNLSATVVPNRNMILLSLAVAKAVNIGAGRVDYGAHGGDHVLYPDCRPEFVERMNAVAGIANFEPVEIHAPYLRATKAEILADGLSMGLDYADTWTCYLGEELACGRCGSCRERLGAFAANGVSDPLSYAAQSDQEV

SEQ ID NO: 38636 - protein, 238 aa, Halomonas eurihalina
  misc_feature (1)..(238): tr|A0A5D9D9Z1|A0A5D9D9Z1_HALER 7-cyano-7-deazaguanine s ynthase OS=Halomonas eurihalina OX=42566 GN=queC PE=3 S V=1
MSQAPASSATVVIYSGGMDSFTVLHRALREGRDVHALSFDYGQRHARELEVARRVCRDLAVPHQVVDIRAIHGLIDNSALTDTERAMPDGDYDADNLADTVVPNRNMMLLSMAIAKAVNIGAGRVDYGAHGGDHVLYPDCRPEFVEAMNAVAGIANFEPVEIHTPYLRHTKADILADGLAMGLDYADTWTCYLGESLACGRCGSCRERLAAFAAHGVSDPLGYAQRPDTATDGESDDV

SEQ ID NO: 38637 - protein, 239 aa, Halomonas halmophila
  misc_feature (1)..(239): tr|A0A4Y4EZZ0|A0A4Y4EZZ0_9GAMM 7-cyano-7-deazaguanine s ynthase OS=Halomonas halmophila OX=252 GN=queC PE=3 SV= 1
MSQSSSSSATVVIYSGGMDSYTVLHRALREGLEVHALSFDYGQRHSRELEVARRVCAALEVPHQVIDIRAIHSLIDNSALTDSDRSMPDGDYDADNLTATVVPNRNMMLLSMAIAKAVNIGAGRVDYGAHGGDHVLYPDCRPAFVEAMNAVAGIANFEAVTIHTPYLHSSKAEILADGLAMGLDYAATWTCYEGAELACGRCGSCRERLAAFDANRASDPLAYAATPESAGSSEGREDV

SEQ ID NO: 38638 - protein, 249 aa, Halomonas halophila
  misc_feature (1)..(249): tr|A0A510ZBW7|A0A510ZBW7_9GAMM 7-cyano-7-deazaguanine s ynthase OS=Halomonas halophila OX=29573 GN=queC PE=3 SV =1
MSESAAPATVVIYSGGMDSFTVLHRALREGREVHALSFDYGQRHARELAVAREVCRELGVPHQVVDITAIHGLIDASALTDSSQELPDADYAEANLKATVVPNRNMILLSLAIAKAVNIGADRVDYGAHGGDHVLYPDCRPEFVEAMNDVAGIANFEPVTLHAPYLRAGKDEILAEGLAMGLDYARTWTCYRGEALACGRCGSCRERLSAFAANGAVDPIAYDTTGDEADVSSQRPDAAADAAEGSDHV

SEQ ID NO: 38639 - protein, 254 aa, Halomonas heilongjiangensis
  misc_feature (1)..(254): tr|A0A2N7TIE3|A0A2N7TIE3_9GAMM 7-cyano-7-deazaguanine s ynthase OS=Halomonas heilongjiangensis OX=1387883 GN=qu eC PE=3 SV=1
MTHSSAPATVVIYSGGMDSFTVLHRALGEGLDVHALSFDYGQRHARELEVAARVCRRLGVPHQVVDIRAIHGLIDNSALTDASREMPEGDYGQENLTATVVPNRNMILLSLAIAKAVNIGAGRVDYGAHGGDHVLYPDCRPEFVEAMNAVAGIANFAPVEIHAPYLRASKAEILADGLAMGLDYADTWTCYRGEDLACGRCGSCRERLAAFAANGASDPLGYRERPDAAGTSQRPDAAGTSQRPDAAARGAPDV

SEQ ID NO: 38640 - protein, 227 aa, Halomonas huangheensis
  misc_feature (1)..(227): tr|W1NBS2|W1NBS2_9GAMM 7-cyano-7-deazaguanine synthase OS=Halomonas huangheensis OX=1178482 GN=queC PE=3 SV=1
MTDSSNATVVVYSGGMDSYTVLHRVLRETRNVHALSFHYGQRHSRELDVARRVCEELRVAHQVVDITAIHGLIDNSALTDDSRPMPDDDYAEDNLTATVVPNRNMILLSLAIAKAVNVGAGRVAYGAHGGDHVLYPDCRPAFVEAMNDVAAIANFSPVEIHAPYLNANKEQILADGLAMGLDYANTWTCYVGEELACGRCGSCRERLAAFAAHGIKDPLNYADTSHV

SEQ ID NO: 38641 - protein, 235 aa, Halomonas hydrothermalis
  misc_feature (1)..(235): tr|A0A291JWY7|A0A291JWY7_9GAMM 7-cyano-7-deazaguanine s ynthase OS=Halomonas hydrothermalis OX=115561 GN=queC P E=3 SV=1
MSSTASPGAQAPSTVVIYSGGMDSYTVLHRALREGLTVHALSFDYGQRHRRELDVARQVCESLAIPHQVVDIRAIHGLIDNSALTNSALAMPQGEYDADSLHSTVVPNRNMILLSLAIAKAVNIGASRVDYGAHGGDHVLYPDCRPAFVEAMNDVAQIANFEPVTVHAPYLASSKADILRDGLAMGLDYRHTWTCYEGQQLACGQCGSCRERLAAFAANQATDPLAYAPLAERDC

SEQ ID NO: 38642 - protein, 251 aa, Halomonas korlensis
  misc_feature (1)..(251): tr|A0A1I7K843|A0A1I7K843_9GAMM 7-cyano-7-deazaguanine s ynthase (Queuosine biosynthesis) OS=Halomonas korlensis OX=463301 GN=SAMN04487955_11576 PE=4 SV=1
MDKAIDVFWTGGWDSSYRVLYASVVEKRLIKPHYIIDFGRKSSLRELEAISDIRRKLEKIDPEAAKRIGEIKITPITEIADIPEVTESFNRLKKQAHLGSQYDWLSRYATSHNIDDLELSVHVDDKAYFFLEGRVKQGKDGRWRMRDDAEGDVRIFSCLTFPLLQISKTEMREQAQKHDFIDALEKAWFCFNPKKGKPCGVCNPCIYAVEEGMGYRLSGNAMLNYRTRHIRKIAKAPGYVSRNIYRKAKGQ

SEQ ID NO: 38643 - protein, 258 aa, Halomonas korlensis
  misc_feature (1)..(258): tr|A0A1I7F3I6|A0A1I7F3I6_9GAMM 7-cyano-7-deazaguanine s ynthase OS=Halomonas korlensis OX=463301 GN=queC PE=3 S V=1
MTIPAFPPGKATDTTVVIYSGGMDSYTVLHRALREGLTVHALSFDYGQRHRRELTVATRVCRALGVPHQVVDIRAIHGLIDNSALTDADREMPEGDYSEANLTATVVPNRNMILLSLAIAKAANIGAGRVDYGAHGGDHVLYPDCRPEFVEAMNAAAGIANFDPVQLHAPYLRSTKAEILADGLAMGLDYADTWTCYQGGELACGRCGSCRERLAAFAANGVEDPLSYLQQPCLQRPCLQRPSDAARSQRPDPDAGVA

SEQ ID NO: 38644 - protein, 236 aa, Halomonas meridiana
  misc_feature (1)..(236): tr|A0A1N6D148|A0A1N6D148_9GAMM 7-cyano-7-deazaguanine s ynthase OS=Halomonas meridiana OX=29570 GN=queC PE=3 SV =1
MSSTASSGAQAPSTVVIYSGGMDSYTVLHRALREGLAVHALSFDYGQRHRRELDVARQVCESLAIPHQVVDIRAIHGLIDNSALTNAALTMPQGEYDADSLHSTVVPNRNMILLSLAIAKAVNIGASRVDYGAHGGDHMLYPDCRPAFVEAMNDVAQIANFEPVTVHAPYLASSKADILRDGLAMGLDYRHTWTCYEGQQLACGQCGSCRERLAAFAANHSVDPLDYAIDTSQVAH

SEQ ID NO: 38645 - protein, 236 aa, Halomonas meridiana
  misc_feature (1)..(236): tr|A0A0D7V0G2|A0A0D7V0G2_9GAMM 7-cyano-7-deazaguanine s ynthase OS=Halomonas meridiana OX=29570 GN=queC PE=3 SV =1
MSSTASSGAQAPSTVVIYSGGMDSYTVLHRALREGLAVHALSFDYGQRHRRELDVARQVCESLAIPHQVVDIRAIHGLIDNSALTNAALTMPQGEYDADSLHSTVVPNRNMILLSLAIAKAVNIGASRVDYGAHGGDHVLYPDCRPAFVEAMNDVAQIANFEPVTVHAPYLASSKADILRDGLAMGLDYRYTWTCYEGQQLACGQCGSCRERLAAFAANHSVDPLDYAIDTSQVAH

SEQ ID NO: 38646 - protein, 245 aa, Halomonas muralis
  misc_feature (1)..(245): tr|A0A1G9FS00|A0A1G9FS00_9GAMM 7-cyano-7-deazaguanine s ynthase OS=Halomonas muralis OX=119000 GN=queC PE=3 SV= 1
MTQQHRDASGIARLKAIVIYSGGMDSYTVLHHALCQGYEVHALSFDYGQRHSRELNVARDVCQRLGIAHQIVDIRAIHSLIDNSALTDASRDLPGGDYASDNMVATLVPNRNMILLSLAIAQAVNIGAELCFYGAHGGDHVLYPDCRPEFVERMNDVAAIANFETARIEAPYLHVDKAAILADGLAMGLDYGETWTCYLGEEFACGACGSCRERLAAFAANGVSDPVRYSHRCQPGTNGKGEPDV

SEQ ID NO: 38647 - protein, 236 aa, Halomonas nigrificans
  misc_feature (1)..(236): tr|A0A2A4HIX1|A0A2A4HIX1_9GAMM 7-cyano-7-deazaguanine s ynthase OS=Halomonas nigrificans OX=2042704 GN=queC PE= 3 SV=1
MLLSPASDVNASSTVVIYSGGMDSFTVLHRAIQEGLNVHALSFDYGQRHARELVTAREVCRQLKVPHQVVDIRAIHGLIDNSALTNSSIAMPEGDYAADNLRATVVPNRNMILLSLAIAKAVNIGASRVDYGAHGGDHILYPDCRPEFVDAMNHVSGIANFEPVLIHAPYLKSTKADILRDGLAMGLDYRHTWTCYEGRTLACGKCGSCLERLAAFTANHATDPLEYEHSTAQVTS

SEQ ID NO: 38648 - protein, 239 aa, Halomonas nitroreducens
  misc_feature (1)..(239): tr|A0A3S0JZQ1|A0A3S0JZQ1_9GAMM 7-cyano-7-deazaguanine s ynthase OS=Halomonas nitroreducens OX=447425 GN=queC PE =3 SV=1
MSKPASPATVVIYSGGMDSYTVLHRALREGREVHALSFDYGQRHAKELEVARRVCRDLDLPHQVVDIRAIHGLIDNSALTDASREMPEGDYAADNLADTVVPNRNMMLLSLAIAKAVNIGADRVDYGAHGGDHVLYPDCRPEFVTAMNAVAGIANFAPVSIHAPYLRAGKAEILADGLAMGLDYAATWTCYRGEPLACGRCGSCRERLAAFAANGVPDPLGYAQRPDTAAEASEAAGDV

SEQ ID NO: 38649 - protein, 58 aa, Halomonas olivaria
  misc_feature (1)..(58): tr|A0A3T1DQH7|A0A3T1DQH7_9GAMM 7-cyano-7-deazaguanine s ynthase OS=Halomonas olivaria OX=390919 GN=HORIV_32720 PE=3 SV=1
MREGLAMGLDYTHTWTCYEGRELACGVCGSCRERLAAFAVNGVTDPLAYSVSTPIGQR

SEQ ID NO: 38650 - protein, 236 aa, Halomonas pacifica
  misc_feature (1)..(236): tr|A0A510X3W3|A0A510X3W3_9GAMM 7-cyano-7-deazaguanine s ynthase OS=Halomonas pacifica OX=77098 GN=queC PE=3 SV= 1
MTTPSRGRRAVIIYSGGMDSFTVLHQALAEGLEVHALSVDYGQRHHRELDTARRVCQALGVPHQVVDLRAIHGLVDASALTDTAQALPEGDYAADNLAATVVPNRNMILLSLALAKAINIGAEEVRYGAHGGDHDLYPDCRPEFVRRMQAAAEVCDFAPLRLTVPFLHNSKAEILAAGLALGLDYADTWTCYRGEALACGRCGSCRERLAAFAANGVVDPLAYAADSPRPDLAGGR

SEQ ID NO: 38651 - protein, 238 aa, Halomonas pantelleriensis
  misc_feature (1)..(238): tr|A0A1G9MC93|A0A1G9MC93_9GAMM 7-cyano-7-deazaguanine s ynthase OS=Halomonas pantelleriensis OX=48727 GN=queC P E=3 SV=1
MTTDARPAVVIYSGGMDSYTVLHRALRDGHHVHALSFDYGQRHARELDAARAVCQRLGVAHQVIDIRAIHGLIDNSALTDASREMPSGDYDADNLAATVVPNRNMILLSLAIAQAVNIGAPRVYYGAHGGDHVLYPDCRPAFVDKMNAVAAIANFDAVEIVAPYLRRGKDEILADGLAMGLDYAETWTCYLGGELACGTCGSCRERLAAFAANGASDPLGYVERPDSDASSSAGGAPR

SEQ ID NO: 38652 - protein, 278 aa, Halomonas saccharevitans
  misc_feature (1)..(278): tr|A0A1I6ZP61|A0A1I6ZP61_9GAMM 7-cyano-7-deazaguanine s ynthase OS=Halomonas saccharevitans OX=416872 GN=queC P E=3 SV=1
MTHTPYPATVVIYSGGMDSFTVLHRALREGLDVHALSFDYGQRHRRELEVAARVCRELGVPHQIVDITAIHGLIDSSALTDESRAMPEGDYAEDNLTATVVPNRNMVLLSLAIAKAVNIGAGRVDYGAHGGDHVLYPDCRPAFVEAMNDVAGIANFEAVTIHAPYLRSSKAEILAEGLAMGLDYADTWTCYRGEALACGRCGSCRERLAAFAANGAVDPLGYLQRPDDAADSQRPDPAAAIQRPDDAATAQRPDDAADAQRPETAADLQRPGADAGDS

SEQ ID NO: 38653 - protein, 238 aa, Halomonas shengliensis
  misc_feature (1)..(238): tr|A0A1H0G0S3|A0A1H0G0S3_9GAMM 7-cyano-7-deazaguanine s ynthase OS=Halomonas shengliensis OX=419597 GN=queC PE= 3 SV=1
MTSSPSPKAAGRATVVIYSGGMDSYTVLHRALREGLDVHALSFDYGQRHARELEVARRVCRGLGVSHQVIDITAIHGLIDNSALTDAGRALPDADYAEDNLQDTVVPNRNMILLALSIAKAVNIGAGRVDYGAHGGDHVLYPDCRPEFVEAMNAVAGIANFEAVEIHAPYLRASKAEILADGLAMGLDYADTWTCYRGGRLACGRCGSCRERLAAFAANGAVDPLAYAERPFDGPGGG

SEQ ID NO: 38654 - protein, 235 aa, Halomonas songnenensis
  misc_feature (1)..(235): tr|A0A2T0V116|A0A2T0V116_9GAMM 7-cyano-7-deazaguanine s ynthase OS=Halomonas songnenensis OX=1176243 GN=queC PE =3 SV=1
MSNTSSTSPAAPATVVIYSGGMDSYTVLHRALREGLNVHALSFNYGQRHARELEVATQVCQQLGVPHQVVDIRAIHGLIDSSALTDATQAMPDGDYADDNLRATVVPNRNMILLSLAIAKAVNIGAERVDYGAHGGDHVLYPDCRPEFVEAMNQVAGIANFEPVVLHAPYLKATKAEILRDGLSMGLDYRHTWTCYEGRALACGKCGSCRERLEAFAANNATDPLAYASTDQVNG

SEQ ID NO: 38655 - protein, 236 aa, Halomonas sp.
  misc_feature (1)..(236): tr|F7SNT6|F7SNT6_9GAMM 7-cyano-7-deazaguanine synthase OS=Halomonas sp. TD01 OX=999141 GN=queC PE=3 SV=1
MSLPQTSGADASSTVVIYSGGMDSYTVLHRAIKEGLDVHALSFDYGQRHTKELDIAKAVCKQHNIPHQIVDIRAIHGLIDNSALTNPDLSMPEGNYAADNLHTTVVPNRNMILLSLAIAKAVNIGAARVDYGAHGGDHILYPDCRPEFVHAMNHVAGIANFEPVTLHVPYLTSSKADILRDGLAMGLDYRDTWTCYEGRALACGKCGSCHERLAAFAANDVVDPLTYESTPAQVTG

SEQ ID NO: 38656 - protein, 260 aa, Halomonas sp.
  misc_feature (1)..(260): tr|A0A369KYD9|A0A369KYD9_9GAMM 7-cyano-7-deazaguanine s ynthase OS=Halomonas sp. DQ26W OX=2282311 GN=queC PE=3 SV=1
MTQSDTSSVPATVVIYSGGMDSFTVLHRALREGLAVHALSFNYGQRHARELEVAARVCRELDVPHQVVDIRAIHGLIDNSALTDAGRDMPEGDYASDNLTATVVPNRNMILLSLAIAKAVNIGAGRVDYGAHGGDHVLYPDCRPEFVERMNAVAGIANFEPVQINAPYLGSTKAEILAEGLAMGLDYADTWTCYLGRELACGHCGSCRERLEAFAANGVSDPLGYLQRPEAAASSTRPEAADTVQRPEAAALASRGASDV

SEQ ID NO: 38657 - protein, 236 aa, Halomonas subglaciescola
  misc_feature (1)..(236): tr|A0A1M7EUZ0|A0A1M7EUZ0_9GAMM 7-cyano-7-deazaguanine s ynthase OS=Halomonas subglaciescola OX=29571 GN=queC PE =3 SV=1
MPTPSTANATVVIYSGGMDSFTVLHRALREGRNVHALSFDYGQRHVRELDTAQRVCHALDVPHQVVDIRAIHGLIDSSALTDAAQAMPHGDYASDNLASTAVPNRNMILLSLAIAKAVNIGADRVDYGAHGGDHVLYPDCRPAFVDAMRHAAGLANLEPVEIHVPYLHATKADILRDGLAMGLDYADTWTCYEGGEQACGQCASCRERLEAFADNGMTDPLDYSPRHAETAHANTP

SEQ ID NO: 38658 - protein, 225 aa, Halomonas subterranea
  misc_feature (1)..(225): tr|A0A1H9VIL1|A0A1H9VIL1_9GAMM 7-cyano-7-deazaguanine s ynthase OS=Halomonas subterranea OX=416874 GN=queC PE=3 SV=1
MVIYSGGMDSFTLLHRALNEGYHVHALSFHYGQRHARELDAARQVCQHLNVPHQVVDIRAIHSLIDNSALTNTDQAMPQGDYDGDNMAATVVPNRNMILLSLAIANAVNIGAERVDYGAHGGDHVLYPDCRPAFVEAMDQVSQIANFSPVKVHAPYLHASKADILQQGLAMGLDYRNTWTCYEGGELACGQCGSCRERLAAFAANGVTDPLTYASHPCASQQEAR

SEQ ID NO: 38659 - protein, 95 aa, Halomonas sulfidaeris
  misc_feature (1)..(95): tr|A0A455UH62|A0A455UH62_9GAMM 7-cyano-7-deazaguanine s ynthase OS=Halomonas sulfidaeris OX=115553 GN=HSBAA_360 00 PE=3 SV=1
MLHRALREGLNVHALSFDYGQRHARELDTARQVCAALGLPHQVVDIRAIHSLIDNSALTNPDQPMPQGNYAADNLHDTVVPNRNMILLSWRLPRP

SEQ ID NO: 38660 - protein, 115 aa, Halomonas sulfidaeris
  misc_feature (1)..(115): tr|A0A455U8J4|A0A455U8J4_9GAMM 7-cyano-7-deazaguanine s ynthase OS=Halomonas sulfidaeris OX=115553 GN=HSBAA_360 10 PE=3 SV=1
MNIGAERVDYGAHGGDHVLYPDCRPEFVEAMDHVAGIANFEPVKLHAPYLYASKADILREGLAMGLDYRLTWTCYEGRELACGMCGSCRERLAAFAANGVTDPLGYNPDTTAGQG

SEQ ID NO: 38661 - protein, 256 aa, Halomonas taeanensis
  misc_feature (1)..(256): tr|A0A328XHP8|A0A328XHP8_9GAMM 7-cyano-7-deazaguanine s ynthase OS=Halomonas taeanensis OX=284577 GN=queC PE=3 SV=1
MTSSTPRAVVIYSGGMDSYTVLHRARREGYELHALSFNYGQRHARELDTAKQVCEQLGIAHQIVDIRAIHGLIDSSALTDASQALPGGDYDADNLSATVVPNRNMILLSLAIAQAVNIGADRVFYGAHGGDHVLYPDCRPEFVEKMNDVAAIANFSPVTIEAPYLHKGKHEILADGLAMGLDYANTWTCYLGETLACGECGSCRERLAAFAHHGLSDPLGYSSSQRSGSDEKAATSQRPGSDAETSADSGEGRHDV

SEQ ID NO: 38662 - protein, 263 aa, Halomonas taeanensis
  misc_feature (1)..(263): tr|A0A1G7V704|A0A1G7V704_9GAMM 7-cyano-7-deazaguanine s ynthase OS=Halomonas taeanensis OX=284577 GN=queC PE=3 SV=1
MTSSTPRAVVIYSGGMDSYTVLHRARREGYELHALSFNYGQRHARELDIAKQVCAELGIAHQIVDIRAIHGLIDNSALTDASQALPSGDYAADNLSATVVPNRNMILLSLAIAQAVNIGADRVFYGAHGGDHVLYPDCRPEFVEKMNDVAAIANFSPVTIEAPYLHKGKDEILADGLAMGLDYANTWTCYLGEALACGECGSCRERLAAFARHGLSDPLGYSSQRPEAAASPQPGTDEKTAASQRPGTDAEAIADTNEGRQDV

SEQ ID NO: 38663 - protein, 237 aa, Halomonas titanicae
  misc_feature (1)..(237): tr|A0A558J5K2|A0A558J5K2_9GAMM 7-cyano-7-deazaguanine s ynthase OS=Halomonas titanicae OX=664683 GN=queC PE=3 S V=1
MSSIPPVAADTATTTVVIYSGGMDSFTVLHRALREGLNVHALSFDYGQRHARELDTARQVCTSLELPHQVVDIRAIHGLIDNSALTNPEQAMPQGDYDADNLRATVVPNRNMILLSLAIAKAVNIGAERVDYGAHGGDHVLYPDCRPEFVEAMNQVAGIANFEPVKLHAPYLYTSKADILREGLAMGLDYAHTWTCYEGRELACGVCGSCRERLAAFAANGVTDPLAYSVNSTAGQC

SEQ ID NO: 38664 - protein, 237 aa, Halomonas ventosae
  misc_feature (1)..(237): tr|A0A2T0VEY2|A0A2T0VEY2_9GAMM 7-cyano-7-deazaguanine s ynthase OS=Halomonas ventosae OX=229007 GN=queC PE=3 SV =1
MNDASTPATVVIYSGGMDSFTVLHRALREGREVHALSCDYGQRHARELEVAARVCRTLGVPHQVVDIRAIHGLIDASALTDARRELPEGDYAADNLTATVVPNRNMILLSLAIAKAVNIGAGRVDYGAHGGDHELYPDCRPAFVEAMNAVAGIANFQAVEIHTPYLRAGKAEILAEGLAMGLDYADTWTCYRGEELACGRCGSCRERLAAFAANDATDPLGYCQRPDPAAEPAKGGE

SEQ ID NO: 38665 - protein, 237 aa, Halomonas ventosae
  misc_feature (1)..(237): tr|A0A4R6ZWD2|A0A4R6ZWD2_9GAMM 7-cyano-7-deazaguanine s ynthase OS=Halomonas ventosae OX=229007 GN=queC PE=3 SV =1
MNDASTPATVVIYSGGMDSYTVLHRALREGREVHALSFDYGQRHARELEVAARVCRNLGVPHQVVDIRAIHGLIDASALTDARRALPEGDYAEENLTATVVPNRNMILLSLAIAKAVNIGAGRVDYGAHGGDHVLYPDCRPEFVEAMNAVAGIANFQAVEIHTPYLQAGKAEILADGLAMGLDYADTWTCYRGEALACGRCGSCRERLAAFAANDATDPLGYCQRPDPAAEPAKGGE

SEQ ID NO: 38666 - protein, 236 aa, Halomonas venusta
  misc_feature (1)..(236): tr|A0A3Q8WH84|A0A3Q8WH84_9GAMM 7-cyano-7-deazaguanine s ynthase OS=Halomonas venusta OX=44935 GN=queC PE=3 SV=1
MSLPPASGADASSTVVIYSGGMDSYTVLHRAIKEGLDVHALSFDYGQRHSKELDIAKAVCKQLNIPHQVVDIRAIHGLIDNSALTNPDISMPEGDYAADNLSTTVVPNRNMILLSLAIAKAVNIGAGRVDYGAHGGDHILYPDCRPEFVHAMNQVAGIANFEPVTLHAPYLASSKADILRDGLAMGLNYRDTWTCYEGRALACGKCGSCRERLAAFAANNVSDPLAYESTPAQVID

SEQ ID NO: 38667 - protein, 233 aa, Halomonas xianhensis
  misc_feature (1)..(233): tr|A0A1I3A6I0|A0A1I3A6I0_9GAMM 7-cyano-7-deazaguanine s ynthase OS=Halomonas xianhensis OX=442341 GN=queC PE=3 SV=1
MTALFSDATGITSRKAVVIYSGGMDSYTVLHKSLREGFEVHALSFHYGQRHARELKVAEQVCLDLDIPHRLIDIRAIHSLMDGSALTDTERAMPQGEYGQDNLTATMVPNRNMVLLSLAIAHAVNIGASICFYGAHGGDHVLYPDCRPEFVDKMNDVAAIANFDPVRIEAPYLHSDKASILADGLSMGLDYARTWTCYLGEELACGQCGSCRERLAAFAANRLTDPLRYAAHV

SEQ ID NO: 38668 - protein, 233 aa, Halomonas xianhensis
  misc_feature (1)..(233): tr|A0A4R8FWI5|A0A4R8FWI5_9GAMM 7-cyano-7-deazaguanine s ynthase OS=Halomonas xianhensis OX=442341 GN=queC PE=3 SV=1
MTALSSDATGITSRKAVVIYSGGMDSYTVLHKALRQGFEVHALSFHYGQRHARELKVAEQVCLDLDIPHRLIDIRAIHSLMDGSALTDTERAMPQGEYGQDNLTATVVPNRNMVLLSLAIAHAVNIGAGLCFYGAHGGDHVLYPDCRPEFVDKMNDVAAIANFDPVRIEAPYLHSDKASILADGLSMGLDYARTWTCYLGEELACGQCGSCRERLAAFAAHGLTDPLRYAAHV

SEQ ID NO: 38669 - protein, 249 aa, Halorhodospira halochloris
  misc_feature (1)..(249): tr|A0A0X8X956|A0A0X8X956_HALHR 7-cyano-7-deazaguanine s ynthase OS=Halorhodospira halochloris OX=1052 GN=queC P E=3 SV=1
MVSQSHQLHSSICPKATGEAALLLFSGGQDSTTCLAWALERFSRVETIGFDYGQRHSVELEARCTILEQIAEQFPIWRERLGEDHLLDSHVLGQISSTSLTSESAITYDSRGLPSTYVPGRNLLFFVLAAAVAERRNIRNIVAGVCETDYSGYPDCRDDTIKSLQVTLNLGMAQQLILHTPLMWLDKARTWELAAKVGGNDLINLIVEHSHTCYHGNRQKLHPWGYGCGQCPACQLRADGWQRYIDSHA

SEQ ID NO: 38670 - protein, 247 aa, Halorhodospira halophila
  misc_feature (1)..(247): sp|A1WY18|QUEC_HALHL 7-cyano-7-deazaguanine synthase OS =Halorhodospira halophila (strain DSM 244 / SL1) OX=349 124 GN=queC PE=3 SV=1
MAERPQRVPASTEQESALVLFSGGQDSTACLAWALEYFSRVETVGFAYGQRHDVELSAREEVLDGLRALRPDWAARLGSDRVLDAGVLGEISDTALTQDAEIAYDARGLPTTFVPGRNLLFFTLAAAVAHRRGIRHLVAGVCETDFSGYPDCRDDTVKSLQVTLNLGMAERLVLHTPLMWLDKAQTWMLAEQLGGSALVDLTVEASHTCYYGMREQRHEWGYGCGECPACRLRAEGWHRFRHGSGAQ

SEQ ID NO: 38671 - protein, 238 aa, Halospina denitrificans
  misc_feature (1)..(238): tr|A0A4R7JNQ6|A0A4R7JNQ6_9GAMM Queuosine biosynthesis p rotein QueC OS=Halospina denitrificans OX=332522 GN=DES 49_2402 PE=4 SV=1
MDVLWTGGWDSTFRILQHLFEGRDVKPHYILDPGRPSTKREIKAMKDLREQFNADHRLGGRLHETRMVKKCSFPEDARIREAYQDLIRIRYIGEQYKWIAEYCKYFDLRRIEVSVLNNPLILKYHINKEYPFSVIFSYFEFPLINYSKTDMKEWCEENGFMGIMELTWFCHTPRKSGMPCGVCHPCITVMKEGMSGRMPFSSKIHYHLRILPRIKDTLKRHPNIYARLVALKKKIEVC

SEQ ID NO: 38672 - protein, 220 aa, Halospina denitrificans
  misc_feature (1)..(220): tr|A0A4R7K0Q0|A0A4R7K0Q0_9GAMM 7-cyano-7-deazaguanine s ynthase OS=Halospina denitrificans OX=332522 GN=queC PE =3 SV=1
MGTVVVIYSGGMDSYTLLHKALHEGWEVHALSFDYGQRHSRELDCAREVCRKLAVPHQVVDIGSIQSLLGGSALTDEVDVPEGHYEESNMKATVVPNRNMILLSLAIGQAVSLEAEAVWYGAHGGDHAIYPDCRPAFIERMDQLARVANYQPVRVEAPFMQMSKGEILAEGLSMGLDYRATWTCYNGREQACGRCGACVERLEAFSLNGLSDPLSYKELG

SEQ ID NO: 38673 - protein, 220 aa, Halospina sp.
  misc_feature (1)..(220): tr|A0A5J5FM26|A0A5J5FM26_9GAMM 7-cyano-7-deazaguanine s ynthase QueC OS=Halospina sp. K52047b OX=2614160 GN=que C PE=4 SV=1
MSRIVVIYSGGMDSYTLLHRALAEGWHVHALSFDYGQRHARELDCARAVTRELGIDHEVVDITSIQGLLAGSALTDSEPVPEGHYEEATMKATVVPNRNMILLSLAIGHAVSRGAEAVWYGAHGGDHAIYPDCRPEFIEQMDRVARVANYEAVRVAAPFMHFTKGQILGEGLAMDLDYSRTWTCYNGRTRACGRCGACTERLEAFAAHGVTDPLPYEDAH

SEQ ID NO: 38674 - protein, 233 aa, Halotalea alkalilenta
  misc_feature (1)..(233): tr|A0A172YEM4|A0A172YEM4_9GAMM 7-cyano-7-deazaguanine s ynthase OS=Halotalea alkalilenta OX=376489 GN=queC PE=3 SV=1
MSSNAQYPRAASRRAVVIYSGGMDSFTVLHRAINEGFEVHALSFDYGQRHRRELEVAARVCSRLGIDHRVVDLRAIHGLIDASSLTDASKPLPKAAYAGDNMRSTVVPNRNMILLALAIGHAVNIEAPVCFYGAHGGDHAIYPDCRPEFVEKINAVAAIANYQPVEVVAPYLHADKTSILADGLAMGLDYAQTWTCYLGEAQACGECGSCRERLAAFAAHGLEDPLDYVDGVR

SEQ ID NO: 38675 - protein, 237 aa, Halothece sp.
  misc_feature (1)..(237): tr|K9YGX3|K9YGX3_HALP7 7-cyano-7-deazaguanine synthase OS=Halothece sp. (strain PCC 7418) OX=65093 GN=queC PE= 3 SV=1
MTQKAVVLLSGGLDSSTVLYQAQADGYECYALSFDYQQRHQRELEAAQQIAEAAGVKQHQVVSFDLGLWGGSALTDQTIDVPRDRAPQEMADNIPITYVPARNTIFLSFALAYAEALSAECVYIGVNALDYSGYPDCRPDYIQAMQQVFQLGTKQGREGNPITIQTPLIDLKKTDIIQLGNQLHVPWEKTWSCYQGETEACGVCDSCQLRLKAFQELGLTDPLPYRVSNRHEPNERD

SEQ ID NO: 38676 - protein, 231 aa, Halothiobacillaceae bacterium
  misc_feature (1)..(231): tr|A0A545SCC7|A0A545SCC7_9GAMM 7-cyano-7-deazaguanine s ynthase OS=Halothiobacillaceae bacterium OX=2268194 GN= queC PE=3 SV=1
MSDQSRRAVVLVSGGLDSATVLAIARAEGYACHALSVDYGQRHAAELEASRHVASALGAVEHRQVHVDLGGIAGSALTDHNIPVPEAEGQGIPVTYVPARNTIMLSIALGWAEVLGAQDIFVGVNAVDYSGYPDCRPAFIDAFERLANLATKAGVEGRAFHIRAPLIRMSKAEIITKGIELGVDYAQTVSCYQADQHGRACGRCDSCRLRAAGFAEAGVPDPTRYARKNDA

SEQ ID NO: 38677 - protein, 166 aa, Halothiobacillaceae bacterium
  misc_feature (1)..(166): tr|A0A539E610|A0A539E610_9GAMM 7-cyano-7-deazaguanine s ynthase (Fragment) OS=Halothiobacillaceae bacterium OX= 2268194 GN=FD130_1211 PE=3 SV=1
HKTITVDLDGIGGSALTDLTIPLPEQLRPGIPVTYVPARNTIFLSFALGWAEVLGATDIFIGVNAVDYSGYPDCRPEYIAAFERLAALATKAGVEGTCFKVQAPLLHMSKGQIIREGVRLGVDYGLTVSCYGADAAGQACGVCDSCRLRRAGFDEAGMIDPTLYSH

SEQ ID NO: 38678 - protein, 235 aa, Halothiobacillus neapolitanus
  misc_feature (1)..(235): tr|D0KY70|D0KY70_HALNC 7-cyano-7-deazaguanine synthase OS=Halothiobacillus neapolitanus (strain ATCC 23641 / c 2) OX=555778 GN=queC PE=3 SV=1
MSLDTENTQPKAVVLLSGGLDSATVAAIAKSDGYQVHAVSFDYGQRHKVELKAAYRVALQLGIQHHKMISINLNDVGGSALTDSALAVPDYDAQSAEHIPITYVPARNLTFLSLALGWAEILGARRIYIGVNAVDYSGYPDCRPEFIKQFEVTANLATAAGLTGEPFKIIAPLQTLTKAEIIQWGTRFGVDYAQTISCYNPDEQGRACGRCDACHYRKQGFMDAGIPDVTIYAPE

SEQ ID NO: 38679 - protein, 225 aa, Halothiobacillus sp.
  misc_feature (1)..(225): tr|A0A0W1RY91|A0A0W1RY91_9GAMM 7-cyano-7-deazaguanine s ynthase OS=Halothiobacillus sp. XI15 OX=1766620 GN=queC PE=3 SV=1
MSATREPAIVLLSGGLDSATLAWMARADGYAVHALSFDYGQRHRAELAAAGRVAQAAGAVEHRTIRIDMDGITGSSLTDVERSVPDYDPAQSEIPSTYVPARNLTFLSFALGWAEVLSARRIYIGVNAVDYSGYPDCRPAFIEKFQELANVATAAAHPFEIHAPLLHMTKAEIIRTGQALGVDYGLTVSCYRADEAGRACGRCDSCHYRQQGFRDAGVPDPTRYA

SEQ ID NO: 38680 - protein, 235 aa, Halothiobacillus sp.
  misc_feature (1)..(235): tr|A0A191ZIG4|A0A191ZIG4_9GAMM 7-cyano-7-deazaguanine s ynthase OS=Halothiobacillus sp. LS2 OX=1860122 GN=queC PE=3 SV=1
MDTNSHTCPKAVVLLSGGLDSATVAAIARSEGYELYAISFDYGQRHKAELKAAARVAQAMGVRDHKVIRIDLNGMGGSALTDEALAVPDFAQRAENDIPITYVPARNLTFLSFALGWAEILGARQIFIGVNAVDYSGYPDCRPEFIAQFERVANLATAAGVNSLPFRIVAPLQYLTKVQIIEMGTKLGVDYRQTVSCYNPDSEGRACGRCDACHYRRQGFDEAGIPDATIYQASN

SEQ ID NO: 38681 - protein, 220 aa, Halovibrio sp.
  misc_feature (1)..(220): tr|A0A2A2FAL0|A0A2A2FAL0_9GAMM 7-cyano-7-deazaguanine s ynthase OS=Halovibrio sp. YL5-2 OX=2032626 GN=queC PE=3 SV=1
MSRIVVIYSGGMDSYTLLHRALAEGWRVHALSFDYGQRHARELDCARAVTRELGIDHEVVDITGIQGLLAGSALTDSEPVPEGHYEEATMKATVVPNRNMILLSLAIGHAVSRGAEAVWYGAHGGDHAIYPDCRPEFIEQMDRVARVANYEAVRVAAPFMHFTKGQILGEGLAMDLDYSRTWTCYNGRTLACGRCGACTERLEAFAAHGVTDPLPYEDAH

SEQ ID NO: 38682 - protein, 237 aa, Halovibrio variabilis
  misc_feature (1)..(237): tr|A0A511URM2|A0A511URM2_9GAMM 7-cyano-7-deazaguanine s ynthase OS=Halovibrio variabilis OX=31910 GN=queC PE=3 SV=1
MSSTPSVAADSATTTVVIYSGGMDSFTLLHRALREGLSVHALSFDYGQRHARELDTARQVCTSLGLPHQVVDIRAIHSLIDNSALTNPDQAMPQGDYAADNLRATVVPNRNMILLSLAIAKAVNIGASRVDYGAHGGDHILYPDCRPAFVDAMNQVAGIANFEPVTLHAPYLHTSKADILREGLAMGLDYQHTWTCYEGRELACGVCGSCHERLAAFAANGVTDPLAYSPNTAAGQH

SEQ ID NO: 38683 - protein, 236 aa, Hamiltonella defensa
  misc_feature (1)..(236): tr|C4K4K2|C4K4K2_HAMD5 7-cyano-7-deazaguanine synthase OS=Hamiltonella defensa subsp. Acyrthosiphon pisum (str ain 5AT) OX=572265 GN=queC PE=3 SV=1
MRKNNPIKRAVLVFSGGQDSTTCLIQALHQYDEVHCITFDYAQRHRSEIAIAQALAKKLQATSYKILDLQLLNELTVSSLTRENIPLPKKQNSEGSLPNTFVPGRNIVFLTFSAIYAYQLDADVVITGVCETDFSGYPDCRDEFVKSLNHAVTLGMQKNITFVTPLMWLNKAETWALADYYQQMPLIRNKTLTCYNGIQGDGCGECLSCELRLKGLKYYLAHKEEVTENLKLKSQL

SEQ ID NO: 38684 - protein, 228 aa, Handelsmanbacteria sp.
  misc_feature (1)..(228): tr|A0A1F6C5L3|A0A1F6C5L3_HANXR 7-cyano-7-deazaguanine s ynthase OS=Handelsmanbacteria sp. (strain RIFCSPLOWO2_1 2_FULL_64_10) OX=1817868 GN=queC PE=3 SV=1
MQGPIDHRAVVLLSGGMDSSTCLWWARAQGGAEVHTVSIDYGQRHRVELEFSARLSARAGAVSHKVVRLDLTQFGGNPLTDAGVAVPRASEGQQARTVVPYRNMLFITLAAAHAETLGIADLYIAAVRDDHRSYRDCRRVFYNGLERALSLGGAHDREVRIHSPFVEMWKTEVVRIGLELGVPYEETHTCYEGKRPACGLCDACVERIAAFKANGVQDPIEYEIEVEW

SEQ ID NO: 38685 - protein, 223 aa, Handelsmanbacteria sp.
  misc_feature (1)..(223): tr|A0A1F6C621|A0A1F6C621_HANXR 7-cyano-7-deazaguanine s ynthase OS=Handelsmanbacteria sp. (strain RIFCSPLOWO2_1 2_FULL_64_10) OX=1817868 GN=queC PE=3 SV=1
MGRSLAVVVASGGMDSCVAAAVAAQDHDLGFLHVNYGQRTERRELRAFEEIADFYGVSRRLVVDARCLSAVGGSSLTDASMPVPEADVDRWEVPTTYVPFRNAHLLCIGVSWAEALGARKVYVGVEVESGYPDCSAGFIEAFNRAVTAGTRPGSGIEVVAPLVAMKKAGVVRLGMALGAPLHLTWSCYRSEGLACGRCDSCALRLRGFRLAGVKDLIAYARPD

SEQ ID NO: 38686 - protein, 235 aa, Hansschlegelia zhihuaiae
  misc_feature (1)..(235): tr|A0A4Q0MM39|A0A4Q0MM39_9RHIZ 7-cyano-7-deazaguanine s ynthase OS=Hansschlegelia zhihuaiae OX=405005 GN=queC P E=3 SV=1
MNGDRALVLFSGGQDSTTCLAWALDRYSHVETVGFDYGQRHRVELGQRGRLREGLAALTADWAARLGPDHTIALPALGELSETALTSDVEIAMSEAGLPNTFVPGRNIAFLTFAAALAYRRGLKRIVGGMCETDYSGYPDCRDDAIKALQAALNLGMEARFVLETPLMWLDKADTWALAEALGGRALVELIVAESHTCYLGERGEAHAWGFGCGACPACELRARGFAQYEASRTI

SEQ ID NO: 38687 - protein, 227 aa, Hapalosiphon sp.
  misc_feature (1)..(227): tr|A0A0M0SRV2|A0A0M0SRV2_9CYAN 7-cyano-7-deazaguanine s ynthase OS=Hapalosiphon sp. MRB220 OX=1704290 GN=queC P E=3 SV=1
MKAVILLSGGLDSSTVLYQALADGCKCYAISFDYQQRHRRELHSALAIAQKAGVVQNQIVTFDLRQWGGSALTDDTIDLPQKRSVEEMSQNIPVTYVPARNTIFLSFALAYAETIAAERVYIGVNALDYSGYPDCRPDYIQAMQEVFRLGTKQGREGKPITIVAPLLELKKTDIIQLGNKLGVPWELTWSCYAGGELACGVCDSCRLRLAAFAELGLKDPLNYASFD

SEQ ID NO: 38688 - protein, 227 aa, Hapalosiphonaceae cyanobacterium
  misc_feature (1)..(227): tr|A0A328IDP7|A0A328IDP7_9CYAN 7-cyano-7-deazaguanine s ynthase OS=Hapalosiphonaceae cyanobacterium JJU2 OX=210 9628 GN=queC PE=3 SV=1
MKAVILLSGGLDSSTVLYQALADGYECYTISFDYQQRHRRELDSALAIAQKAGVIQNQIVTFDLRQWGGSALTDDSIDLPEKRSLEEMSQNIPATYVPARNTIFLSFALAYAETIAAERVYIGVNALDYSGYPDCRPDYIQAMQEVFRLGTKQGREGKPITIVAPLLELKKTDIIELGNKLGVPWELTWSCYAGGEVACGICDSCRLRLAAFAKLGLTDPLNYASLC

SEQ ID NO: 38689 - protein, 225 aa, Helicobacter acinonychis
  misc_feature (1)..(225): sp|Q17XR6|QUEC_HELAH 7-cyano-7-deazaguanine synthase OS =Helicobacter acinonychis (strain Sheeba) OX=382638 GN= queC PE=3 SV=1
MGQEICVISFSGGQDSTTLAIWAAKRFKKVYLVGFDYAQKHSVELECAQKIASLLKLPYEIIQLDFLENITHSALFKNSNDLIGHSHVQNKDLPNSFVPNRNAIFITLLHSYAQKLGANNIALGVSQADFSGYPDCKEDFIKSIEHALNLGSNTTIKIVTPLMFLSKAQEFQMAKDLGALDLIIKETHTCYQGERKILHAYGYGCGECLACQLRKKGYEEFQARF

SEQ ID NO: 38690 - protein, 246 aa, Helicobacter ailurogastricus
  misc_feature (1)..(246): tr|A0A0K2X685|A0A0K2X685_9HELI 7-cyano-7-deazaguanine s ynthase OS=Helicobacter ailurogastricus OX=1578720 GN=q ueC PE=3 SV=1
MGAILAKENPMILEKTYNASCVLCFSGGQDSTTLALWAKKAFSATHLLAFDYAQKHAIELEQAQKIAGLLNLPLKILDVRFLQEITLSALFANHPQKSHAPHPQNPDLPASFVPDRNALFFTLAHAYAFNLGADFVLVGVSQQDYSGYFDCRAAFLESLQTSLNLGAFGVPEGITFLAPFMQMSKAQEFGLARDLGGLDFVLEYTHTCYEGVRGVRHAYGYGCGVCPACQLRQAAYQEFLEHYKQN

SEQ ID NO: 38691 - protein, 260 aa, Helicobacter ailurogastricus
  misc_feature (1)..(260): tr|A0A0K2Y0Z5|A0A0K2Y0Z5_9HELI 7-cyano-7-deazaguanine s ynthase OS=Helicobacter ailurogastricus OX=1578720 GN=q ueC PE=3 SV=1
MVVLIPKHKKPFAIMGAILAKENPMILEKTYNASCVLCFSGGQDSTTLALWAKKAFSATHLLAFDYAQKHAIELEQAQKIAGLLNLPLKILDVRFLQEITLSALFANHPQKSHAPHPQNPDLPASFVPDRNALFFTLAHAYAFNLGADFVLVGVSQQDYSGYFDCRAAFLESLQTSLNLGAFGVPEGITFLAPFMQMSKAQEFGLARDLGGLDFVLEYTHTCYEGVRGVRHAYGYGCGVCPACQLRQAAYQEFLEHYKQN

SEQ ID NO: 38692 - protein, 224 aa, Helicobacter anseris
  misc_feature (1)..(224): tr|A0A3D8JAY6|A0A3D8JAY6_9HELI 7-cyano-7-deazaguanine s ynthase OS=Helicobacter anseris OX=375926 GN=queC PE=3 SV=1
MEKCLVIFSGGQDSTTTARWAQEKFQSVVLLGFDYGQKHKIELTQAQLIAQKLHLPFHIIKLDFLDQICQSALFFNSTQNVNDTHLNNNALPASFVPNRNAIFITLAHSFAQKIGANHLALGVSEQDYSGYPDCRKVFIDSIEKTLNLSSQTHITIHTPLIAMSKAKEFALAKELGILEIILEDTHTCYEGIREKKHPWGYGCGICNACILRKNAYESFLLQNA

SEQ ID NO: 38693 - protein, 213 aa, Helicobacter bilis
  misc_feature (1)..(213): tr|N2BLN8|N2BLN8_9HELI 7-cyano-7-deazaguanine synthase OS=Helicobacter bilis WiWa OX=1235804 GN=C826_00969 PE= 3 SV=1
MRLVLFSGGVDSTTALFWSKKECATHALIFKYPSLHNKREIDSAVRICKDENISYTLLDMSSVFIGFKSALLQNSSESIPQDSYNLESMAKLVVPFRNGIFLSVAAGLAESLGYKEIVLANHAGDHPLYPDCTKTFIDSMNESIMQGSGGAVKLCSPFCNWDKKEIVKLGLSLGVDYTKTYSCYRGGEKHCNTCPTCIESNESFLANGIVIER

SEQ ID NO: 38694 - protein, 213 aa, Helicobacter bilis; identical to SEQ ID NO: 38693
  misc_feature (1)..(213): tr|A0A4U8TTR4|A0A4U8TTR4_9HELI 7-cyano-7-deazaguanine s ynthase OS=Helicobacter bilis OX=37372 GN=queC PE=3 SV= 1

SEQ ID NO: 38695 - protein, 244 aa, Helicobacter bizzozeronii
  misc_feature (1)..(244): tr|F8KRV0|F8KRV0_HELBC 7-cyano-7-deazaguanine synthase OS=Helicobacter bizzozeronii (strain CIII-1) OX=1002804 GN=queC PE=3 SV=1
MFNPFDISALLATSFEGSCVLCFSGGQDSTTLALWGKHAFKQVHLLGFDYAQKHAIELEQAQKIAQLLHLPYTCLSLDFLASISASALFTHSTESMQSSHPRNPNLPASFVPDRNALFLTLAHAYAFNVGADFVLVGVSQQDYSGYFDCREVFIASMQESLNLGAFGSKEGISILAPLMFASKAQEFQLAQELGGLDLVLEHSHTCYEGVRDQKHVYGYGCGVCPACALRQKGYAEFLEYYKKN

SEQ ID NO: 38696 - protein, 244 aa, Helicobacter bizzozeronii
  misc_feature (1)..(244): tr|H5VD62|H5VD62_HELBI 7-cyano-7-deazaguanine synthase OS=Helicobacter bizzozeronii CCUG 35545 OX=1002805 GN=q ueC PE=3 SV=1
MFNPFDISALLATSFEGSCVLCFSGGQDSTTLALWGKHAFKQVHLLGFNYAQKHAIELEQAQKIAQLLHLPYTCLSLDFLASISASALFTHSTESMQASHPRNPNLPASFVPDRNALFLTLAHAYAFNVGADFVLVGVSQQDYSGYFDCREGFIASMQESLNLGAFGSKEGIGILAPLMFASKAQEFQLAQELGGLDLVLEHSHTCYEGVRDQKHVYGYGCGVCPACALRQKGYAEFLEYYKQN

SEQ ID NO: 38697 - protein, 223 aa, Helicobacter canadensis
  misc_feature (1)..(223): tr|C5ZVV2|C5ZVV2_9HELI 7-cyano-7-deazaguanine synthase OS=Helicobacter canadensis MIT 98-5491 OX=537970 GN=exs B PE=3 SV=1
MDKAIVLASGGLDSCVSVACAIKDGYEVCLLHINYGQRTQKRENQAFNDIANYYGIQNKLIVDIDYLRQIGGSSLVDSSIPIEQETIPSSTGQIPMTYVPFRNANMISIAVSWAEVIGAKKIYVGAVEEDSSGYPDCMEIFYEKFNELLKVALLPQNNVEILTPLIHLNKAEIVHQGILLKAPLHLTWSCYQNEDKACGVCESCKLRLRGFKLAGECDPIAYK

SEQ ID NO: 38698 - protein, 225 aa, Helicobacter cetorum
  misc_feature (1)..(225): tr|I0ENM2|I0ENM2_HELC0 7-cyano-7-deazaguanine synthase OS=Helicobacter cetorum (strain ATCC BAA-429 / MIT 00-7 128) OX=182217 GN=queC PE=3 SV=1
MKQEICVLSFSGGQDSTTLAVWATKHFKKVYLVGFDYAQKHSIELECATKIASLLQLPYEIIKLDFLESITHSALFKSSKDLIKNSHTQHKDLPSSFVPNRNAIFITLLHSYAQKLGASNIALGVSQADFSGYPDCKEDFIKSIENSLNLGSNTHITIHTPLMFLTKAQEFQMAKDLGILDLIIKETHTCYHGERKTLHAYGYGCNECPACKLRKKGYEEFQSNL

SEQ ID NO: 38699 - protein, 227 aa, Helicobacter cetorum
  misc_feature (1)..(227): tr|I0EQP3|I0EQP3_HELCM 7-cyano-7-deazaguanine synthase OS=Helicobacter cetorum (strain ATCC BAA-540 / MIT 99-5 656) OX=1163745 GN=queC PE=3 SV=1
MKQEICVLSFSGGQDSTTLAVWATKHFKKVYLVGFDYAQKHSIELECATKIASLLQLPYEIIKLDFLESITNSALFKNSKDLIKNSHTQHKNLPSSFVPNRNAIFITLLHSYAQKLGASNLALGVSQADFSGYPDCKEDFIKSIENSLNLGSNTHITIHTPLMFLTKAQEFQMAKDLGILDLIIKETHTCYHGERKTLHAYGYGCNECPACQLRKKGYEEFQSQMIL

SEQ ID NO: 38700 - protein, 67 aa, Helicobacter cinaedi
  misc_feature (1)..(67): tr|I7HED8|I7HED8_9HELI Truncated tRNA methyltransferase OS=Helicobacter cinaedi CCUG 18818 = ATCC BAA-847 OX=5 37971 GN=HCBAA847_2312 PE=4 SV=1
MLALALFSGGCDSLISMKLLKDQGIDVIALHFNIGFGGNKDKLEYFQNATAQIDVKLQVLDIRQQFF

SEQ ID NO: 38701 - protein, 243 aa, Helicobacter felis
  misc_feature (1)..(243): tr|E7AC02|E7AC02_HELFC 7-cyano-7-deazaguanine synthase OS=Helicobacter felis (strain ATCC 49179 / NCTC 12436 / CS1) OX=936155 GN=queC PE=3 SV=1
MLHPFDLAKMLTIQDFKTHTCVLCFSGGQDSTTLALWAKRVFEQTYLLGFDYDQKHAIELAQAHKIARMLELPYKVLDLSCLQEISTSALFAHTSHALNTPHPQAQDLPSSFVPDRNALFITLAHAYAFNLGAQAVLLGVSMQDYSGYFDCRQNFIESLQTSLNLGAFGKKEGINLLAPLMFSSKAQEFQLAHALGGLELILEHTHTCYEGVRESRHEFGYGCGVCPACQLRQQGYMKFLDTK

SEQ ID NO: 38702 - protein, 246 aa, Helicobacter heilmannii
  misc_feature (1)..(246): tr|A0A0K2XWH3|A0A0K2XWH3_HELHE 7-cyano-7-deazaguanine s ynthase OS=Helicobacter heilmannii OX=35817 GN=queC PE= 3 SV=1
MGIILAKDTKMILEQTTNGSCVLCFSGGQDSTTLALWAKKAFKKTHLLTFNYAQKHAIELKQAQKIATLLDLPLKILDLAFLQEITFSALFASNSQSSNAPHPKNPNLPASFVPDRNALFFTLAHAYAFNLGADFVLVGVSQADYSGYFDCRKEFIESLQTSLNLGAFGAPKGIDFLAPFMDMSKAQEFALAQDLGGLELILEHTHTCYEGERGVRHAYGHGCGACPACCLRQEAYQEFLEYYKQN

SEQ ID NO: 38703 - protein, 246 aa, Helicobacter heilmannii
  misc_feature (1)..(246): tr|A0A0K2Y6Y1|A0A0K2Y6Y1_HELHE 7-cyano-7-deazaguanine s ynthase OS=Helicobacter heilmannii OX=35817 GN=queC PE= 3 SV=1
MGIILAKDTKMILEQTTNGSCVLCFSGGQDSTTLALWAKKAFKKTHLLTFNYAQKHAIELKQAQKIATLLDLPLKILDLAFLQEITFSALFASNSQSSNAPHPKNPNLPASFVPDRNALFFTLAHAYAFNLGADFVLVGVSQADYSGYFDCRKEFIESLQTSLNLGAFGAPKGIDFLAPFMDMSKAQEFALAQDLGGLELILEHTHTCYEGERGVRHAYGHGCGACPACCLRQEAYQEFLEHYKQN

SEQ ID NO: 38704 - protein, 258 aa, Helicobacter muridarum
  misc_feature (1)..(258): tr|A0A377PUA6|A0A377PUA6_9HELI 7-cyano-7-deazaguanine s ynthase OS=Helicobacter muridarum OX=216 GN=queC PE=3 S V=1
MIESNIDSLVNHNICSLHSTKNVNIESIELKNAKRAVCIMSGGIDSALCAYIAKNQGFEIIALHFDYAQRTQTKERECFYALCDDLKPISRVLLNVDFIAHIGGSSLTNSELTIRKNFTDIRESKEIPNTYVPFRNGIFLSIASALAEKEQCEAIFIGVVQEDSSGYPDCTHAFIDKMQAAVNEGRGYSNTRIFAPLLHKNKCEIIELALEHGVPISSTWSCYESQDLACGLCDSCILRLDGFKMAGKSDPILYRIFT

SEQ ID NO: 38705 - protein, 231 aa, Helicobacter mustelae
  misc_feature (1)..(231): tr|D3UGG7|D3UGG7_HELM1 7-cyano-7-deazaguanine synthase OS=Helicobacter mustelae (strain ATCC 43772 / LMG 18044 / NCTC 12198 / 12198) OX=679897 GN=queC PE=3 SV=1
MQKCLVVFSGGQDSTTVAAWAKKEFSSVELLAFDYQQKHRIELQQARKIAEKLELKLNMIVLDFLAQIADSALFAKSIENLSTKHKTHQDLLASFVPNRNGLFLTIAHAFAQKIHANHIAIGVSEQDYSGYPDCREEFITAMESALNKGAQTQIKIHTPLSHMSKAEEFLLAQNLGVLEMILEDSHTCYEGVRESRHAWGYGCGICAACILRKNAYEKFLAIIAQKNAGNG

SEQ ID NO: 38706 - protein, 223 aa, Helicobacter pullorum
  misc_feature (1)..(223): tr|C5EZS7|C5EZS7_9HELI 7-cyano-7-deazaguanine synthase OS=Helicobacter pullorum MIT 98-5489 OX=537972 GN=queC PE=3 SV=1
MDKAIVLASGGLDSCVSIACALKDGYEVCLLHINYGQRTQSREDRAFSDIADFYGITQKLIVDISYLRQIGGSSLVDSSMPIEEDTIPSAKGAIPSTYVPFRNANMISIAVSWAEVIRAKKIYIGAVEEDSSGYPDCREIFYQKFNDLLKVGLSPKNEVEILTPLIHLSKKEIVQKGIELEAPLHLTWSCYQNENKACGVCESCKLRLRGFELAGVKDPIKYE

SEQ ID NO: 38707 - protein, 223 aa, Helicobacter pullorum
  misc_feature (1)..(223): tr|A0A0N0LT80|A0A0N0LT80_9HELI 7-cyano-7-deazaguanine s ynthase OS=Helicobacter pullorum OX=35818 GN=queC PE=3 SV=1
MDKAIVLASGGLDSCVSIACALKDGYEVCLLHINYGQRTQNREDRAFSDIADFYGITQKLIVDISYLRQIGGSSLVDSSMPIEEDTIPSAKGAIPSTYVPFRNANMISIAVSWAEVIGAKKIYIGAVEEDSSGYPDCREIFYQKFNDLLKVGLSPKNEVEILTPLIHLSKKEIVQKGIELEAPLHLTWSCYQNENKACGVCESCKLRLRGFELAGVKDPIKYE

SEQ ID NO: 38708 - protein, 226 aa, Helicobacter pylori
  misc_feature (1)..(226): sp|O25356|QUEC_HELPY 7-cyano-7-deazaguanine synthase OS =Helicobacter pylori (strain ATCC 700392 / 26695) OX=85 962 GN=queC PE=3 SV=1
MEQKICVIGFSGGQDSTTLAVWAKKRFKKVCLVGFDYAQKHSVELECAQKIASLLQLPYEIIPLDFLENITRSALFKNSNDLIGHSHAQNKDLPNSFVPNRNAIFITLLHSYAQKLGASNIALGVSQADFSGYPDCKEDFIKSIEHALNLGSNTAIKILTPLMFLNKAQEFQMAKDLGVLDLVIKETHTCYQGERKILHAYGYGCDKCPACQLRKKGFEEFQANKK

SEQ ID NO: 38709 - protein, 226 aa, Helicobacter pylori
  misc_feature (1)..(226): tr|D6XPN3|D6XPN3_HELPV 7-cyano-7-deazaguanine synthase OS=Helicobacter pylori (strain v225d) OX=637913 GN=queC PE=3 SV=1
MEQEICAISFSGGQDSTTLAVWAKKRFKKVYLVGFDYAQKHSVELECAQKIASLLQLPYEIIPLDFLENITHSALFKNSNDLMGHSHAQNKDLPNSFVPNRNAIFITLLHSYAQKIGASNIALGVSQADFSGYPDCKEDFIKSIEHALNLGSNTAIKILTPLMFLNKAQEFQMAKDLGVLDLVIKETHTCYQGERKILHAYGYGCGECPACQLRKKGYEEFESNKK

SEQ ID NO: 38710 - protein, 233 aa, Helicobacter sp.
  misc_feature (1)..(233): tr|A0A3D6E338|A0A3D6E338_9HELI 7-cyano-7-deazaguanine s ynthase OS=Helicobacter sp. OX=218 GN=queC PE=3 SV=1
MTSLTPSALSSSHALVVFSGGQDSTTCLGWAIKHFKSVEAITFDYGQRHRIEIEQSRLIAQKLGIKQFILEFDLFSKLGDSALLETSSDLKASPHRTKPHLPASFVPNRNALFFTLAHAYAQREGLTHIITGISEADYSGYPDCREEFITHLERTLNLGSDSSILFAYPLLHRNKAQTFALAKECGVLDLVLEESHTCYNGDRSHRYEWGYGCKECPACGLREKGWREYQASL

SEQ ID NO: 38711 - protein, 228 aa, Helicobacter sp.
  misc_feature (1)..(228): tr|A0A268TWM7|A0A268TWM7_9HELI 7-cyano-7-deazaguanine s ynthase OS=Helicobacter sp. 12S02232-10 OX=1476197 GN=q ueC PE=3 SV=1
MARKCVVSFSGGQDSTTVAAWAKKEFDEVVLVGFDYNQKHKIELTQAKLIAQKLSLPFHIINISFFSQIVESALLQNNQKNINDPHLTNSNLPASFVPNRNALFITIVHSFAQKIGAQHIALGVSEQDYSGYPDCRENFIDAIENSLNLGSETNIQIHTPLMHLDKAKEFALAKDLGVLQIVLEDTHTCYEGNRSNYQEWGYGCGVCNACILRKKAYEKYLKTYAHQH

SEQ ID NO: 38712 - protein, 242 aa, Helicobacter suis
  misc_feature (1)..(242): tr|A0A510H9D9|A0A510H9D9_9HELI 7-cyano-7-deazaguanine s ynthase OS=Helicobacter suis OX=104628 GN=queC PE=3 SV= 1
MKPFDLQSLLTKRYKSSCVLCFSGGQDSTTLALWSLSAFEKTYLLGFDYAQRHGIELEQATKIATQLKLPFKILSLDFLQELSNSALFKKSPQSIQAPHMKNPQLPASFVPDRNALFVTLAHAYAFNLGASFVLLGISEQDYSGYFDCRQNFLESLQTSLNLGAFGTPEGITLLAPFMFMSKAQEFALAQKLGFLDFILEQTHTCYIGDRSIRHPYGYGCGTCPACLLRQKGYENFLKESNK

SEQ ID NO: 38713 - protein, 242 aa, Helicobacter suis
  misc_feature (1)..(242): tr|E7G4M2|E7G4M2_9HELI 7-cyano-7-deazaguanine synthase OS=Helicobacter suis HS5 OX=710394 GN=exsB PE=3 SV=1
MKPFDLQSLLTKRYKSSCVLCFSGGQDSTTLALWSLSAFEKTYLLGFDYAQRHGIELEQATKIATQLKLPFKILSLDFLQELSNSALFKKSPQSIQAPHMKNPQLPASFVPDRNALFVTLAHAYAFNLGASFVLLGISEQDYSGYFDCRQNFLESLQTSLNLGAFGTPEGITLLAPFMFMSKAQEFALAQKLGFLDFILEQTHTCYIGDRSTRHPYGYGCGTCPACLLRQKGYENFLKESNK

SEQ ID NO: 38714 - protein, 213 aa, Helicobacter trogontum
  misc_feature (1)..(213): tr|A0A4U8SAW2|A0A4U8SAW2_9HELI 7-cyano-7-deazaguanine s ynthase OS=Helicobacter trogontum OX=50960 GN=queC PE=3 SV=1
MRLVLLSGGGDSTTALFWSKKTCNTHALIFKYPSLHNQKEINCAMQICRDENIPYTLLDISSVFTDFKSALLQNNTETIPNDSYNLESMSKLVIPFRNGIFLSIAAGLAESLGCTEVVLANHAGDHPIYPDCTKAFITSMNESIFQGSGGLVKLCSPFCSWDKNEIVRLGVTLGIDYAKTYSCYKGGERHCNVCPTCIESNESFLANGIVVDR

SEQ ID NO: 38715 - protein, 213 aa, Helicobacter trogontum
  misc_feature (1)..(213): tr|A0A4U8TEK8|A0A4U8TEK8_9HELI 7-cyano-7-deazaguanine s ynthase OS=Helicobacter trogontum OX=50960 GN=queC PE=3 SV=1
MRLVLLSGGGDSTTALFWSKKTCNTHALIFKYPSLHNQKEINCAMQICRDENIPYTLLDISSVFTDFKSALLQNNTETIPNDSYNLESMSKLVIPFRNGIFLSIAAGLAESLGCTEVVLSNHAGDHPIYPDCTKAFITSMNESIFQGSGGLVKLCSPFCGWDKNEIVRLGVTLGIDYAKTYSCYKGSERHCNVCPTCIESNESFLANGIVVDR

SEQ ID NO: 38716 - protein, 229 aa, Helicobacter valdiviensis
  misc_feature (1)..(229): tr|A0A2W6MWD9|A0A2W6MWD9_9HELI 7-cyano-7-deazaguanine s ynthase OS=Helicobacter valdiviensis OX=1458358 GN=queC PE=3 SV=1
MKKALCILSGGMDSTLCAYLAKKEGYEIVAIHFNYGQRTQKKEKECFDAICKELQVYKSYSLDMDFLKVIGGNALVDTNLAVPKNELGKVGEVPITYVPFRNGVFLSIAGSIAEKEECERIYIGVIEADGSGYPDCTGDFIKKAQEFINKGTKECYSVEICTPLLKMKKVDIVKKSLELGVPLELTWSCYEGEDEACGECDSCLLRLRGFREAQKEDKIPYKNSLNFLM

SEQ ID NO: 38717 - protein, 247 aa, Heliobacterium modesticaldum
  misc_feature (1)..(247): tr|B0TFM0|B0TFM0_HELMI 7-cyano-7-deazaguanine synthase OS=Heliobacterium modesticaldum (strain ATCC 51547 / Ic e1) OX=498761 GN=queC PE=3 SV=1
MDAYRERAVVILSGGLDSTTCMALADCRGEDIFALTFAYNQRHIREIEAAQAVACHYGAHHQIIDLGAVFAASALTSTEIRPEVAAPLGGSAVAKMEAMGCAEKNPVAIATAIPATYVPARNILFLAYALSFAEKVGARRIYTGVNALDNPGYPDCRPEFIAAFQRMIDVGTKAGTEGRSVEVFTPLIEMNKADIIRLALDLDAPLHLTLTCYYGERPACGECNSCRLRLEGFRLLGKGDPIAYRKG

SEQ ID NO: 38718 - protein, 230 aa, Heliophilum fasciatum
  misc_feature (1)..(230): tr|A0A4R2RIZ6|A0A4R2RIZ6_9FIRM 7-cyano-7-deazaguanine s ynthase OS=Heliophilum fasciatum OX=35700 GN=queC PE=3 SV=1
MRNAARERKAVVILSGGLDSTVCMAAAVSVGLKVYGLTFDYGQRHRRELKAAAAVARHYGVEHTVVSLPDIFASNALTKELNKLEVSGEIRAGIPATYVPARNILFLSYGLAWAENVGAEQIYIGVNATDYTGYPDCRPAFIEAFQQMIEVGTEAGLNGRAIQICAPLMQMTKKEIIQWGIELKAPLGLTHTCYQNAEPPCGVCDSCRLRKAGFAEAGKVDPLSFRPMLD

SEQ ID NO: 38719 - protein, 235 aa, Henriciella algicola
  misc_feature (1)..(235): tr|A0A399RC93|A0A399RC93_9RHOB 7-cyano-7-deazaguanine s ynthase OS=Henriciella algicola OX=1608422 GN=queC PE=3 SV=1
MSQSSSALVLFSGGQDSTTCLASALKRYRHVETVGFDYGQRHRVELDAREHVLTAIRQDFPQWADRLGEDHLIDLGVLGQISETSLTRETEITEDEDGLPSTFVPGRNLIFLTLSAALAWRRGIDVIIGGMCETDYSGYPDCRRDTIDAQQKALSLGMDRQFTLKTPLMWLDKAETWQLAYDIGGDALVDLIVDKTHSCYMGDHRTRHDWGYGCGDCPACDLRAKGYRKWRERQK

SEQ ID NO: 38720 - protein, 235 aa, Henriciella barbarensis
  misc_feature (1)..(235): tr|A0A399R2F7|A0A399R2F7_9RHOB 7-cyano-7-deazaguanine s ynthase OS=Henriciella barbarensis OX=86342 GN=queC PE= 3 SV=1
MSQSSSALVLFSGGQDSTTCLASALKRYRHVETVGFDYGQRHRVELDAREHVLTAIRQDFPQWADRLGEDHLIDLGVLGQISETSLTRETEITENEDGLPSTFVPGRNLIFLTLSAALAWRRGIDVIIGGMCETDYSGYPDCRRDTIDAQQKALSLGMDRQFTLKTPLMWLDKSETWQLAFDIGGQALVDLIVEKTHSCYMGDHRTRHDWGYGCGNCPACHLRAKGYRQWRERQK

SEQ ID NO: 38721 - protein, 236 aa, Henriciella sp.
  misc_feature (1)..(236): tr|A0A399RS88|A0A399RS88_9RHOB 7-cyano-7-deazaguanine s ynthase OS=Henriciella sp. JN25 OX=2305466 GN=queC PE=3 SV=1
MVKPTSALVLFSGGQDSTTCLASALKRFAHVETVGFDYGQRHKVELRCRKNVLNAIRSKFPQWADRLGEDHMIDLAALGEISDTALTRDTDIGEGENGLPSTFVPGRNLIFLTLSAALAWRRGISVLVGGMCETDYSGYPDCRRDTIDAQQKAIGLGMDRSIIIETPLMWLDKAETWQLAADLGGQALVDLIVDETHTCYKGERLRRHAWGYGCGECPACQLRKAGFEKWKQGAVA

SEQ ID NO: 38722 - protein, 235 aa, Henriciella sp.
  misc_feature (1)..(235): tr|A0A2E6L7D3|A0A2E6L7D3_9RHOB 7-cyano-7-deazaguanine s ynthase OS=Henriciella sp. OX=1968823 GN=queC PE=3 SV=1
MSTSSSALVLFSGGQDSTTCLASALKRYRHVETIGFDYGQRHRVELDAREDVLAAIRQNFPQWAERLGEDHLIDLGVLGQISETSLTRETEITEDEDGLPSTFVPGRNLVFLTLAAALAWRRGISVIIGGMCETDYSGYPDCRRDTIDAQQKALSLGMDRQFTLKTPLMWLDKSETWQLAWDIGGDALVDLIVEKTHSCYVGDHRTRHDWGYGCGKCPACELRAKGYRKWRERQG

SEQ ID NO: 38723 - protein, 229 aa, Hephaestia caeni
  misc_feature (1)..(229): tr|A0A397NPN5|A0A397NPN5_9SPHN 7-cyano-7-deazaguanine s ynthase OS=Hephaestia caeni OX=645617 GN=queC PE=3 SV=1
MPTDSPFAVALVSGGLDSMVAAARAKEDGYRLLALSIDYNQRHQVELAAAHRIAGMLGAERHVVLTLDLSAFGGSALTADIAVPKGGVGADIPITYVPARNTIFLSLALGWAEAAGARDLYIGVNALDYSGYPDCRAEFITAFEEMAALATKAGVEGDRFVVHTPLQHLSKADIVREAARLGLDAGLSWSCYDPALGNRHCGLCDSCRLRAKGFAEAGLPDPTVYAAVP

SEQ ID NO: 38724 - protein, 246 aa, Herbaspirillum aquaticum
  misc_feature (1)..(246): tr|A0A225SNW8|A0A225SNW8_9BURK 7-cyano-7-deazaguanine s ynthase OS=Herbaspirillum aquaticum OX=568783 GN=queC P E=3 SV=1
MSAIPAIAPTLNTQSALVLFSGGQDSTTCLAWALSRYQRVETIGFDYGQRHAIELEVRPALLEKIKAFSPEWQSRLGEDHMIDLSLIGKISDTALTRDVAIAMQDNGLPNTFVPGRNLLFMTVAATLAYRRGLNVLVGGMCETDFSGYPDCRDDTMKALQVALNLGMATQLKVETPLMWIDKAQTWSLAESLGGTALVDLIRADTHTCYLGERGQLHDWGHGCGKCPACELRARGYEQYAASKSAG

SEQ ID NO: 38725 - protein, 242 aa, Herbaspirillum hiltneri
  misc_feature (1)..(242): tr|A0A561JVS3|A0A561JVS3_9BURK 7-cyano-7-deazaguanine s ynthase OS=Herbaspirillum hiltneri OX=341045 GN=queC PE =3 SV=1
MNIATTPRPSLPHRALVLFSGGQDSTTCLAWALSRYEKVETIGFDYGQRHAIELKVRPALLEKMRGFSDDWNNRLGEDHMVDLSLIGQISDTALTRDVAISMQENGLPNTFVPGRNLLFMTVAATVAYRRGLDVLVGGMCETDFSGYPDCRDDTMKALQVALNLGMATHLKVETPLMWIDKAATWRLSEELGGKALVDLIRSDTHTCYLGERGALHDWGYGCGKCPACELRARGYQQYAQTA

SEQ ID NO: 38726 - protein, 246 aa, Herbaspirillum huttiense
  misc_feature (1)..(246): tr|A0A4V1AQ04|A0A4V1AQ04_9BURK 7-cyano-7-deazaguanine s ynthase OS=Herbaspirillum huttiense OX=863372 GN=queC P E=3 SV=1
MPATPAIAPTLSTQSALVLFSGGQDSTTCLAWALSRYQRVETIGFDYGQRHAIELEVRPALLEKMKAFSPEWQARLGEDHMIDLSLIGKISDTALTRDVAIAMQDNGLPNTFVPGRNLLFMTVAATLAYRRGLNVLVGGMCETDFSGYPDCRDDTMKALQVALNLGMATQLKVETPLMWIDKAETWSLAESLGGSALVDLIRADTHTCYLGERGQLHDWGHGCGKCPACELRARGYQQYAARKSAR

SEQ ID NO: 38727 - protein, 246 aa, Herbaspirillum huttiense
  misc_feature (1)..(246): tr|A0A561KPZ4|A0A561KPZ4_9BURK 7-cyano-7-deazaguanine s ynthase OS=Herbaspirillum huttiense OX=863372 GN=queC P E=3 SV=1
MSAIPAIAPTLNTQSALVLFSGGQDSTTCLAWALSRYQRVETIGFDYGQRHAIELEVRPALLEKMKAFSPEWQSRLGEDHMVDLSLIGKISDTALTRDVAIAMQDNGLPNTFVPGRNLLFMTVAATLAYRRGLNVLVGGMCETDFSGYPDCRDDTMKALQVALNLGMATQLKVETPLMWIDKAQTWSLAESLGGTALVDLIRADTHTCYLGERGQLHDWGHGCGKCPACELRARGYEQYAASKSAG

SEQ ID NO: 38728 - protein, 248 aa, Herbaspirillum robiniae
  misc_feature (1)..(248): tr|A0A246WNE8|A0A246WNE8_9BURK 7-cyano-7-deazaguanine s ynthase OS=Herbaspirillum robiniae OX=2014887 GN=queC P E=3 SV=1
MSDISPDAVAPTVKTQSALVLFSGGQDSTTCLAWALSRYQRVETIGFDYGQRHAIELEVRPALLEKLKTFSPEWQARLGEDHMIDLGLIGAISDTALTRDVEIAMNDNGLPNTFVPGRNLLFMTVAATLAYRRGLNVLVGGMCETDFSGYPDCRDDTMKALQVALNLGMATQLKVETPLMWIDKAETWELAESLGGAPLVDLVRADTHTCYLGERGALHDWGHGCGKCPACALRARGYQQYAARKKTA

SEQ ID NO: 38729 - protein, 259 aa, Herbaspirillum rubrisubalbicans
  misc_feature (1)..(259): tr|A0A0U3L453|A0A0U3L453_9BURK 7-cyano-7-deazaguanine s ynthase OS=Herbaspirillum rubrisubalbicans M1 OX=107877 3 GN=queC PE=3 SV=1
MLVPVSLPALSKNMSATPPIAPTLNTQSALVLFSGGQDSTTCLAWALSRYARVETIGFDYGQRHAIELQVRPALLQKMQTFSPDWQARLGEDHMIDLSLIGKISDTALTRDVAIAMQDNGLPNTFVPGRNLLFMTVAATLAYRRGLNVLVGGMCETDFSGYPDCRDDTMKALQVALNLGMATQLKVETPLMWIDKADTWSLAESLGGSALVDLIRADTHTCYLGERGQLHDWGHGCGKCPACELRARGYQQYAARKTTG

SEQ ID NO: 38730 - protein, 246 aa, Herbaspirillum rubrisubalbicans
  misc_feature (1)..(246): tr|A0A328J4B0|A0A328J4B0_9BURK 7-cyano-7-deazaguanine s ynthase OS=Herbaspirillum rubrisubalbicans OX=80842 GN= queC PE=3 SV=1
MSATPPIAPTLNTQSALVLFSGGQDSTTCLAWALSRYARVETIGFDYGQRHAIELQVRPALLQKMQTFSPDWQARLGEDHMIDLSLIGKISDTALTRDVAIAMQDNGLPNTFVPGRNLLFMTVAATLAYRRGLNVLVGGMCETDFSGYPDCRDDTMKALQVALNLGMATQLKVETPLMWIDKADTWSLAESLGGSALVDLIRADTHTCYLGERGQLHDWGHGCGKCPACELRARGYQQYAARKTSG

SEQ ID NO: 38731 - protein, 263 aa, Herbaspirillum seropedicae
  misc_feature (1)..(263): tr|D8ITL7|D8ITL7_HERSS 7-cyano-7-deazaguanine synthase OS=Herbaspirillum seropedicae (strain SmR1) OX=757424 G N=queC PE=3 SV=1
MRLPFWFTVLLFAAMSTSSPSPSLAPTLNTQSALVLFSGGQDSTTCLAWALSRYQRVETIGFDYGQRHAIELAVRPALLERMRAFSPDWQTRLGEDHMIDLSLIGKISDTALTRDVEIAMQDNGLPNTFVPGRNLLFMTVAATLAYRRGLNVLVGGMCETDFSGYPDCRDDTMKALQVALNLGMATQLKVETPLMWIDKAGTWALAELLGGAPLVDLIRTDTHTCYLGERGALHDWGHGCGKCPACELRARGYQQYAARKSPA

SEQ ID NO: 38732 - protein, 249 aa, Herbaspirillum seropedicae
  misc_feature (1)..(249): tr|A0A5B8EEC0|A0A5B8EEC0_HERSE 7-cyano-7-deazaguanine s ynthase OS=Herbaspirillum seropedicae OX=964 GN=queC PE =3 SV=1
MSTSSPSPSLAPTLNTQSALVLFSGGQDSTTCLAWALSRYQRVETIGFDYGQRHAIELAVRPALLERMRAFSPDWQTRLGEDHMIDLSLIGKISDTALTRDVEIAMQDNGLPNTFVPGRNLLFMTVAATLAYRRGLNVLVGGMCETDFSGYPDCRDDTMKALQVALNLGMATQLKVETPLMWIDKADTWALAESLGGAPLVDLIRIDTHTCYLGERGALHDWGHGCGKCPACELRARGYQQYATRKSPA

SEQ ID NO: 38733 - protein, 252 aa, Herbaspirillum sp.
  misc_feature (1)..(252): tr|A0A1V2VKR8|A0A1V2VKR8_9BURK 7-cyano-7-deazaguanine s ynthase OS=Herbaspirillum sp. VT-16-41 OX=1953765 GN=qu eC PE=3 SV=1
MSATSAIAPTLNTQSALVLFSGGQDSTTCLAWALSRYQRVETIGFDYGQRHAIELEVRPALLEKMKGFSADWQARLGEDHMIDLSLIGKISDTALTRDVEITMQDNGLPNTFVPGRNLLFMTVAATLAYRRGLNVLVGGMCETDFSGYPDCRDDTMKALQVALNLGMATQLKVETPLMWIDKAQTWALAESLGGQALVDLIRADTHTCYLGERGQLHDWGHGCGTCPACQLRARGYEQYVQDVQNRASKKIG

SEQ ID NO: 38734 - protein, 247 aa, Herbaspirillum sp.
  misc_feature (1)..(247): tr|J3CGR8|J3CGR8_9BURK 7-cyano-7-deazaguanine synthase OS=Herbaspirillum sp. YR522 OX=1144342 GN=queC PE=3 SV= 1
MPSSVTDTPIAPTLKTQSALVLFSGGQDSTTCLAWALSRYQRVETVGFDYGQRHAVELTVRPALLASTRAFSPEWAARLGEDHMIDLSLIGSISDTALTREVEISMQDNGLPNTFVPGRNLMFMTVAATLAYRRGLNVLVGGMCETDFSGYPDCRDDTMKALQVALNLGMATQLKIETPLMWIDKAQTWSLAHSLGGDALVDLIRTDTHTCYLGERGALHDWGHGCGKCPACELRARGYRQYRQHAG

SEQ ID NO: 38735 - protein, 233 aa, Herminiimonas arsenicoxydans
  misc_feature (1)..(233): sp|A4G964|QUEC_HERAR 7-cyano-7-deazaguanine synthase OS =Herminiimonas arsenicoxydans OX=204773 GN=queC PE=3 SV =1
MNSANSALVLFSGGQDSTTCLAWALTHYARVETIGFDYGQRHAIELAVRPFLLEKMRLISPEWDGRLGADHMIDLSLIAKISNTALTSNVEIAMLENGLPNTFVPGRNLLFMTVAATVAYRRGLDVLVGGMCETDFSGYPDCRDDTMKALQVTLNLGMATKLKVETPLMWIDKAATWKMAQDLGGTPLLNLVRTGTHTCYLGERGELHDWGYGCGNCPACKLRARGYADFIAG

SEQ ID NO: 38736 - protein, 232 aa, Herminiimonas fonticola
  misc_feature (1)..(232): tr|A0A4R6GGN5|A0A4R6GGN5_9BURK 7-cyano-7-deazaguanine s ynthase OS=Herminiimonas fonticola OX=303380 GN=queC PE =3 SV=1
MNSADSALVLFSGGQDSTTCLAWALARYSRVETIGFDYGQRHAIELTVRPTVLQKLRGFSAEWDSRLGEDHMIDLSLISKISDTALTSNVEIAMMENGLPNTFVPGRNLLFMTVAATVAYRRGLNVLVGGMCETDFSGYPDCRDDTMKALQVALNLGMATKLQVETPLMWIDKAETWKMAQDLGGTALVDLIRSETHTCYLGERGKLHDWGYGCGTCPACALRARGYADFVR

SEQ ID NO: 38737 - protein, 235 aa, Herminiimonas sp.
  misc_feature (1)..(235): tr|A0A3N7A2C8|A0A3N7A2C8_9BURK 7-cyano-7-deazaguanine s ynthase OS=Herminiimonas sp. KBW02 OX=2153363 GN=queC P E=3 SV=1
MSSADGALVLFSGGQDSTTCVAWALKRYARVETIGFDYGQRHAVELEVRPGVLQSLRGINPEWDKKLGEDHMIDLSLISKISDTAMTQDVEITMMENGLPNTFVPGRNLLFMTVAATVAYRRGLDVLVGGMCETDFSGYPDCRDDTMKALQVALNLGMATRLKLETPLMWIDKAETWQLAQDLGGNTLVDLIRAGTHTCYLGERGALHDWGYGCGKCPACELRARGYANFIAPTK

SEQ ID NO: 38738 - protein, 239 aa, Hippea maritima
  misc_feature (1)..(239): tr|F2LX27|F2LX27_HIPMA 7-cyano-7-deazaguanine synthase OS=Hippea maritima (strain ATCC 700847 / DSM 10411 / MH 2) OX=760142 GN=queC PE=3 SV=1
MKKAVIIYSGGLDSTTCLFWALDEFDEVHTITFYYAQRHSIEVDFSKKTLELAQRIKNKTIKSHYFSIDLSQIGGSALTDPSIDVPKNRDEEKISSEIPITYVPFRNGVFLSITAALAEKNEIYNIIGGWNMLDYSGYPDCRDDFLTAFEKAINYGTKAGSQGKTFKILTPLLKMNKAQIILFGKKHGADYSYSYSCYSGDGIPCGECDACILRAKGFKEAGLEDDFLVRLKREGHNSP

SEQ ID NO: 38739 - protein, 458 aa, Hoeflea sp.
  misc_feature (1)..(458): tr|A0A5E8AV48|A0A5E8AV48_9RHIZ Uncharacterized protein OS=Hoeflea sp. EC-HK425 OX=2038388 GN=HOE425_50018 PE=4 SV=1
MRRDDDEPMTRDKHLVVVEKGQGAGTGGEIAIIDEHIRFKPEVLDSFNVKGFSSKHYDLMVLCAAIELADRRWKRPAGWHRDLHVTIPAIDVETWLRPAVSQSLRSLMKHLTGDSWHFSFVRANNPTPIGSRQLPLIFDHKKKFAVAYSEGLDSRAVSALSGSKDEALCIRVAGKRQRRREGDSFFTQIPFKVTGFKAKESSFRSRGFQFAAMTAIAAHLSGITRIVVPESGQGAFGPALVPLHNIYVDYRNFPSFFRKMEKFVRAIFDVSLCYEQPRLWSTKGQTLSAYLALPGKEQKHLANTKSCWQSRRVVNDGKKRRQCGLCAACLLRRQSMFAAGVVEPPETYVVSNLTTGDLEVALSRIRGKADRDIMIEYGSVGARHLQHLADLATLPDTALRIHASQIGAATAQSYDDTLQKLKMMLMTHAQEWRTFLSAQGEQSFLRGWMEGGRYGRFE

SEQ ID NO: 38740 - protein, 106 aa, Holophagaceae bacterium
  misc_feature (1)..(106): tr|A0A3D6EK01|A0A3D6EK01_9BACT 7-cyano-7-deazaguanine s ynthase (Fragment) OS=Holophagaceae bacterium OX=205216 5 GN=DHV93_06905 PE=3 SV=1
  misc_feature (74)..(75): Xaa can be any naturally occurring amino acid
LDRPGVPVSYVPFRNAHLLATCVSWAEVLCAAAIFVGFVEEDSSGYPDCREAFLKSFEQTANLGTKPETRLAFXXRLRGFQEAGFPDPIPYSFIPETLQPANRGER

SEQ ID NO: 38741 - protein, 230 aa, Hormoscilla sp.
  misc_feature (1)..(230): tr|A0A533N843|A0A533N843_9CYAN 7-cyano-7-deazaguanine s ynthase OS=Hormoscilla sp. GUM007 OX=2480854 GN=queC PE =3 SV=1
MTQKAIALLSGGLDSSTTAAQAIADGYETIALSFRYGQRHDRELEAAQAIAKELHLTEHYIIDIDLAQWGGSALTDQNVSVPTDGVKPDIIPITYVPGRNTVFIAIALSLAEAKGASAIYLGINAVDYSGYPDCRPEYLAAFQQLANLSSKVGLEGKAPKLVAPLVKDSKADIVRRALQLGVPIQETYSCYQGGETPCGLCDSCRIRDRALCEVGRPDLATPIGRSLYNL

SEQ ID NO: 38742 - protein, 236 aa, Hormoscilla sp.
  misc_feature (1)..(236): tr|A0A533NW01|A0A533NW01_9CYAN 7-cyano-7-deazaguanine s ynthase OS=Hormoscilla sp. GUM202 OX=2480853 GN=queC PE =3 SV=1
MNEKAIALLSGGLDSSTTAAQAIADGYETIALSFRYGQRHDRELEAAQTIAKELHLAEHYIIDVNLSQWGGSALTDRNVSVPTDGVKPGIIPITYVPGRNTVFIAIALSLAEAKGASAIYLGINAVDYSGYPDCRPEYLAAFGQLANLSSQVGLEGKAPKLVAPLVKDSKADIVRRALQLGVSIQETYSCYQGEELPCGLCDSCRLRDRALCEVGRPDLATQIGRSIYNLETGASH

SEQ ID NO: 38743 - protein, 227 aa, Humitalea rosea
  misc_feature (1)..(227): tr|A0A2W7K3E0|A0A2W7K3E0_9PROT 7-cyano-7-deazaguanine s ynthase OS=Humitalea rosea OX=990373 GN=queC PE=3 SV=1
MKAALVLFSGGQDSATCLAWALDRFEHVETLGFDYGQRHVVELACRDALRAGMAGPGLGPDHTLAVPTLADIGGSALTEDAAIAMRADGLPNTFVPGRNILFLTLAAALAARRGIRHLVTGVCETDYSGYPDCRDDTIKSVQVTLNLGMQARFVIHTPLMWRDKAATWMLAEELGGAPLVALINTESHSCYLGDRTHRHPWGFGCGTCPACDLRARGWAQYVASAPV

SEQ ID NO: 38744 - protein, 616 aa, Humitalea rosea
  misc_feature (1)..(616): tr|A0A2W7I6G5|A0A2W7I6G5_9PROT Queuosine biosynthesis p rotein QueC OS=Humitalea rosea OX=990373 GN=C8P66_12029 PE=4 SV=1
MKQFDIECGVAAPSHADAIAMNVHGPGKNVNLRVDYITRTMVGNVPDLLIDLLEVAAYVYCADQRLKRGSLQLTNFGESWRRSLRFSIPVRLPEVWQQDRIQSMLADTLGFLSDDSYSFEFRKATDPFQPRDVYFHDLIDASQDCDEVSMFSGGVDSFAGGLQDVVLDKRSVCLVGHSSSTKVQSIQQTLVDALKERGHERRISYIPVWVTNENVNANEYTQRTRSFLFACLGLVIARMSGKDRFTFYENGVVSINPPVAGDVVGGRATRTTHPRVFRGLEELFSTLLDRPISIRNPLQWLTKREVTLKIKEAGMADLLALTNSCTRPRSWTTKQKHCGACSQCIDRRFGVMAADMASFEPAENYKIDLLTADRSAKDDLRMAVSYVTFFKKVGSTPKERFLVEFPEVVSALDSFNDLSAAEAGNGLYDLFQRQAAAVESVITAGLQEHSRALFRNELPPASLLAVCFSRSSIEVAPPSDYDKQAKAFIDRLSVPVLEFAIDKDGKVVVFRDGTTLSGANFRLAEELLANFRDAKAAGQAVPFLAPADLAVRLGISEQSMRQQLTRLRTAIEPLSVSLGVVLDQNSFIENKERAGYRLNPNLRELSLADMREPPAP

SEQ ID NO: 38745 - protein, 229 aa, Hungateiclostridium clariflavum
  misc_feature (1)..(229): tr|G8LWS2|G8LWS2_HUNCD 7-cyano-7-deazaguanine synthase OS=Hungateiclostridium clariflavum (strain DSM 19732 / NBRC 101661 / EBR45) OX=720554 GN=queC PE=3 SV=1
MKRAIVLLSGGLDSTTCLSVALAKGYEVYPISFDYGQRHKKELDCVRQIVKYYDIKNHKLIHIDNVGGSALTDSNINVPDYEGTSNIPVTYVPARNIIFLSYAVGYAEVVDADAIFIGVNAIDYSGYPDCRPEFIEAFERMIKVGTKRGVEGKPIKIETPLLKLSKAEIIKLAYENKAPLHLTTSCYRGGDKACGVCDSCVLRLKGFKEAGIEDPIEYSIDVEEKFRTL

SEQ ID NO: 38746 - protein, 219 aa, Hungateiclostridium saccincola
  misc_feature (1)..(219): tr|A0A2K9E4G6|A0A2K9E4G6_9FIRM 7-cyano-7-deazaguanine s ynthase OS=Hungateiclostridium saccincola OX=1677857 GN =queC PE=3 SV=1
MSKAVVLLSGGLDSTTCLSIAIKEGYDVYTLSFDYGQKNNKEILCTQEIVKYYSIKEHKIIKVGNVGGSALTNDDIEVPDYQGLPNIPVTYVPARNIIFLSYAVGYAEVIGAEAIYIGVNAVDYSGYPDCTPEFIEAFQEVVKVGTKAGINGRPVKILTPLMNLSKAEIIKLACENNAPLHLTSSCYRGGDKACGVCDSCVLRLKGFKEAGIVDPVEYV

SEQ ID NO: 38747 - protein, 220 aa, Hungateiclostridium sp.
  misc_feature (1)..(220): tr|A0A4Q0I0E9|A0A4Q0I0E9_9FIRM 7-cyano-7-deazaguanine s ynthase OS=Hungateiclostridium sp. N2K1 OX=2487273 GN=q ueC PE=3 SV=1
MRRAVVLLSGGLDSTTCLSVAVAEGYEVYPLSFDYGQRNKKELESAKQVAKYFKIKEHKIVKIGNVGGSALTDMKIDVPDYKGLPSIPVTYVPARNIIFLSYAAGYAEVLDAEAIFIGVNAVDYSGYPDCRPEFIEAFQKAINVGTKNGVNGKPVRIHTPLLNLSKAEIIKLACENNAPLHLTTTCYKGGEKACGVCDSCVLRLKGFKEAGIVDAIEYMD

SEQ ID NO: 38748 - protein, 222 aa, Hungateiclostridium straminisolvens
  misc_feature (1)..(222): tr|W4V9Z1|W4V9Z1_9FIRM 7-cyano-7-deazaguanine synthase OS=Hungateiclostridium straminisolvens JCM 21531 OX=129 4263 GN=queC PE=3 SV=1
MRRAVVLLSGGLDSTTCLSVALAEGYEVYPLSFDYGQRNRRELESAKQVAKYFKIKEHKIVKIGNVGGSALTDMEIDVPDYKGLPSIPVTYVPARNIIFLSYAAGYAEVVDADAIFIGVNAVDYSGYPDCRPEFIEAFQKAINVGTKNGVNGKPVKIITPLINLTKAEIIKLACENNAPLHLTTTCYKGGEKACGVCDSCVLRLKGFKEAGIVDTIEYMEKT

SEQ ID NO: 38749 - protein, 222 aa, Hungateiclostridium thermocellum
  misc_feature (1)..(222): sp|A3DK21|QUEC_HUNT2 7-cyano-7-deazaguanine synthase OS =Hungateiclostridium thermocellum (strain ATCC 27405 / DSM 1237 / JCM 9322 / NBRC 103400 / NCIMB 10682 / NRRL B-4536 / VPI 7372) OX=203119 GN=queC PE=3 SV=1
MRRAVVLLSGGLDSTTCLSVALAEGYEVYPLSFDYGQRNRKELESAKQVVKYFKLKEHKIVKIGNVGGSALTDMNIDVPDYKGLPTIPVTYVPARNIIFLSYAVGYAEVVDAEAIFIGVNAVDYSGYPDCRPEFIEAFQKAINLGTKSGVNGKPVKIITPLINLSKAEIIKLACENNAPLHLTTTCYRGGEKACGVCDSCVLRLKGFKEAGIVDTIEYMERT

SEQ ID NO: 38750 - protein, 222 aa, Hungateiclostridium thermocellum; identical to SEQ ID NO: 38749
  misc_feature (1)..(222): tr|A0A4S5EVV1|A0A4S5EVV1_HUNTH 7-cyano-7-deazaguanine s ynthase OS=Hungateiclostridium thermocellum OX=1515 GN= queC PE=3 SV=1

SEQ ID NO: 38751 - protein, 271 aa, Hungatella hathewayi; identical to SEQ ID NO: 37496
  misc_feature (1)..(271): tr|A0A3E4TSD9|A0A3E4TSD9_9CLOT ATP-dependent sacrificia l sulfur transferase LarE OS=Hungatella hathewayi OX=15 4046 GN=larE PE=4 SV=1

SEQ ID NO: 38752 - protein, 233 aa, Hyalangium minutum
  misc_feature (1)..(233): tr|A0A085WRD6|A0A085WRD6_9DELT 7-cyano-7-deazaguanine s ynthase OS=Hyalangium minutum OX=394096 GN=queC PE=3 SV =1
MSGTERTAVVLLSGGLDSATALAMAQSEGFMPYALSFRYGQRHEVELEAAKRVAASLGAVRHEITQIDLSMFGSSALTADIAVPKDRPASEISQGIPVTYVPARNTIFLSFALAWAEVLGASDVFIGVNALDYSGYPDCRPEYIEAYERLANLATKAGVEGHQRLRIHTPLISLSKAEIIRAGLTLGVNYGITLSCYDPSPLGEACGHCDSCQLRLKGFREAGAKDPARYRAE

SEQ ID NO: 38753 - protein, 230 aa, Hyalangium minutum
  misc_feature (1)..(230): tr|A0A085WN80|A0A085WN80_9DELT 7-cyano-7-deazaguanine s ynthase OS=Hyalangium minutum OX=394096 GN=queC PE=3 SV =1
MKKAVVLLSGGLDSTTCLAMAKAAGFEPVCLGIAYGQRHAVELERARKVVASMGVRDFRVVNIDLRSVGGSALTADIPVPKDRPEKEMSHGIPVTYVPARNTLFLSLALGLAEVVGAQDLYIGVNAVDYSGYPDCRPEFIRAFETLANLATKAGVEGARFHIHAPLSGMTKAEIIHEGVRLGVDYGMTHSCYDPDTQGRACGRCDSCLLRKKGFEDAGVPDPTAYTTEGK

SEQ ID NO: 38754 - protein, 221 aa, Hydrocarboniclastica marina
  misc_feature (1)..(221): tr|A0A4P7XCR4|A0A4P7XCR4_9ALTE 7-cyano-7-deazaguanine s ynthase OS=Hydrocarboniclastica marina OX=2259620 GN=qu eC PE=3 SV=1
MKHPVVVIYSGGMDSFTLLHMARSQGRTVHALSFNYGQRHVRELDYASWVCTNLQLDHRVVDITSIQELLQGSSLTGESPVPEGHYAASNMKSTVVPNRNMILLSLAIGHAVTTGASEVWYGAHGGDHAIYPDCRPQFVERMDEVAQIANYEPVRIVAPFLHADKGQILRQGLALGLDYGQTWTCYNGREKACGRCGSCVERLEAFAANGLADPLPYETDT

SEQ ID NO: 38755 - protein, 225 aa, Hydrocarboniphaga daqingensis
  misc_feature (1)..(225): tr|A0A1M5RU21|A0A1M5RU21_9GAMM 7-cyano-7-deazaguanine s ynthase OS=Hydrocarboniphaga daqingensis OX=490188 GN=q ueC PE=3 SV=1
MTVARRAVVLLSGGLDSATVMAIARSEGYELYAISVAYGQRHMAEIKASADVARSLGARRHQVMHVNLNDVGGSALTDTSIDVPETPSEGIPVTYVPARNTLFLSLALGWAEVVGATDIFIGVNAVDYSGYPDCRPEFVAAFERLANVATRVGIEGGGIQIHTPLIDLSKADIVRIGTQLGVDYAQTVSCYQADDQGRACGRCDSCRLRRAGFESAGITDPTRYY

SEQ ID NO: 38756 - protein, 228 aa, Hydrocarboniphaga effusa
  misc_feature (1)..(228): tr|I7Z8T2|I7Z8T2_9GAMM 7-cyano-7-deazaguanine synthase OS=Hydrocarboniphaga effusa AP103 OX=1172194 GN=queC PE =3 SV=1
MNRQARKAVVLLSGGLDSATVLAMAVEQGFEPYTLAVSYGQRHSAEIEASVRVATSMGSVRHQVMRVNLDELGGSALTDRSIAVPVTPTSGIPVTYVPARNTLFLSLALGWAEVVGATDLFIGVNAVDYSGYPDCRPEFIEAFEKLANVATKAGVEGARFRIHTPLIAMSKAQIVTEGTRLGVDYAQTVSCYQADDSGAACGRCDSCRLRRAGFEVAGLADPTRYQSA

SEQ ID NO: 38757 - protein, 453 aa, Hydrocarboniphaga effusa
  misc_feature (1)..(453): tr|I7Z9L8|I7Z9L8_9GAMM Uncharacterized protein OS=Hydro carboniphaga effusa AP103 OX=1172194 GN=WQQ_35670 PE=4 SV=1
MKINSDRQAQYGLTLHVAEEADRSKARGNREIARIGSEITFDPKVLDTYHYSGWKSAHHDLLVICAAAEYADRRCARRIGQWARSFKLTIPVREPALWQRSEVTLSLIDTLRHLTGDDWDFAFTPSVAKDESFARQRSLDFGNSKQFVIAYSDGLDSRSVSGIHSVGDAAIRVRVTKNKGRIKSSEAPFDLIPFSVKVPSSPESSVRSRGFKFASVTAIAAQISNVKRIVVPESGQGALGPALLPLHNIYADYRNHPTFFRKMERFIRLALQYELSYEQPRLWHTKGQTIFEFISQPGQSAQSLSDTRSCWQQRWNTRSEGKLRQCGLCAACLLRRMSLHAAGVKETDDTYIFSDLSASKHKGSAQQTSRTMLEYGSVGARHLHQLANLAEVPDAQLRGHSYELARVLSIPEEETLLNLKRLLTQHSKEWREFVNSQGPASFLVRWTGGELYG

SEQ ID NO: 38758 - protein, 234 aa, Hydrococcus rivularis
  misc_feature (1)..(234): tr|A0A1U7H8G4|A0A1U7H8G4_9CYAN 7-cyano-7-deazaguanine s ynthase OS=Hydrococcus rivularis NIES-593 OX=1921803 GN =queC PE=3 SV=1
MSKAVVLLSGGLDSATTAAIAIADGYEVIALSFRYGQRHERELAAATKIAKTLGIKEHYTVDVNLSQWGGSALTDESIDVPKDGVKPDIIPATYVPGRNTVFIAIALSLAEAKGAEAIYLGINAVDYSGYPDCRPEYLEAYQQLANLSSKIGVEGKAPRLVAPLVKDSKVEIVRRALRLGVPIQDTWSCYQGGEDPCGVCDSCRIRDRALIEANVAELATPTGRELYYAEEMKG

SEQ ID NO: 38759 - protein, 226 aa, Hydrocoleum sp.
  misc_feature (1)..(226): tr|A0A261KNW3|A0A261KNW3_9CYAN 7-cyano-7-deazaguanine s ynthase OS=Hydrocoleum sp. CS-953 OX=1671698 GN=queC PE =3 SV=1
MKAVILLSGGLDSSTVLYQAKADGCECYAISFDYQQRHRRELESAKKIADAVGVIQHHVVNFDLRLWGGSALTDNQIDLPSDRSVEEMSENIPITYVPARNTIFLSFALAYAEVVNAGRVYIGVNALDYSGYPDCRPDYIQAMQEVFRLGTKQGREGEAIAIVAPLLEMKKTEIIQLGNSLGVPWEKTWSCYAGGEKPCGVCDSCRLRLTAFEELGLSDPLMIMDN

SEQ ID NO: 38760 - protein, 223 aa, Hydrogenimonas sp.
  misc_feature (1)..(223): tr|A0A3G9HBN4|A0A3G9HBN4_9PROT 7-cyano-7-deazaguanine s ynthase OS=Hydrogenimonas sp. OX=2231112 GN=queC PE=3 S V=1
MKKAIVILSGGMDSSTAAYIAKSRGYGVIALHFDYGQRTQSRERKAFEAICDALGVEGRYVIDLPFFSQIGASALTDRNIDVPTGGIEPGVPVTYVPFRNGIFLSIAAAVAEKEGAEALFIGVVEEDSSGYPDCREEFIAAMQKAINLGTKEGTEICIETPLIHLKKEDIVKSALNYGVPLELTWSCYKEEGEACGVCDSCRLRLKGFEKAGIKDPLEYADRC

SEQ ID NO: 38761 - protein, 222 aa, Hydrogenimonas thermophila
  misc_feature (1)..(222): tr|A0A1I5NLQ6|A0A1I5NLQ6_9PROT 7-cyano-7-deazaguanine s ynthase OS=Hydrogenimonas thermophila OX=223786 GN=queC PE=3 SV=1
MKKAVVILSGGMDSTTAAYIAKSEGYEIVALHFDYRQRTQKREHEAFDAICNSLKVVNRYVIDLPFFEHIGASALTDESIDVPTGGIEAGVPVTYVPFRNGIFLSIAAAVAEKEGAEALYIGVVEEDSSGYPDCRENFIDAIERAIDLGTKDDTKIAIKTPLVHLKKEDIVKTAIEYGVPLELTWSCYKNEDEACGVCDSCRLRLKGFEKAGLKDPIPYKVN

SEQ ID NO: 38762 - protein, 216 aa, Hydrogenivirga caldilitoris
  misc_feature (1)..(216): tr|A0A497XVT7|A0A497XVT7_9AQUI 7-cyano-7-deazaguanine s ynthase OS=Hydrogenivirga caldilitoris OX=246264 GN=que C PE=3 SV=1
MNKVIVLLSGGMDSATLLWLAKRDFNKVWAISFDYGQRHRVELKYAKELASIAGVEEHIIVDTPIYRSIKGSALIDESVDVPSGEYPENEPPITTVPMRNLNFLAIAAAFADAYEIDHIGIGVHALDTPYPDCRPEFITSAEAAINAGSVLTAKRKLRIHVWAPFLGMTKRDIALLGKELGVPYEKTYSCYRGTEPPCGECPTCRQRKEALKGILP

SEQ ID NO: 38763 - protein, 201 aa, Hydrogenivirga caldilitoris
  misc_feature (1)..(201): tr|A0A497XPD1|A0A497XPD1_9AQUI 7-cyano-7-deazaguanine s ynthase OS=Hydrogenivirga caldilitoris OX=246264 GN=BCF 55_0418 PE=3 SV=1
MKKIAVLYSSGVESASLTVHYLDEGFLVYPVYVRCGLPWEKVEVKWASRLWSYLRGRYKRVMPFRTVFLRGLGVSRGIEIPLRNLVLTTHAAIEAIKRNVKSVAVGSLGIYPFPDNNREYFDALQNLIRKGSKEEFRIETPFMGMEKWEVIRKFYGRLRYELTFSCVRPVKGMHCGRCLKCIERKEGFKLAGVKDPTFYLS

SEQ ID NO: 38764 - protein, 203 aa, Hydrogenivirga sp.
  misc_feature (1)..(203): tr|A8URJ3|A8URJ3_9AQUI 7-cyano-7-deazaguanine synthase OS=Hydrogenivirga sp. 128-5-R1-1 OX=392423 GN=HG1285_03 523 PE=3 SV=1
MKKVGVLFSAGVESTSLLVYYLERGYLTLPLYARCGLSWERTELKWSERLWAFLKYRYKNLMPLKTFPASGLQPSKGSIEIPLRNITLVMGAVVHAYVKGIRKVALGSLGIYPFPDNNRDYLDRLEALISEGARENISLETPFMGMEKWEVVREFYRKAPYRLTFSCVKPIIGKHCGKCEKCLERKEGFLKAGVPDPTSYVSS

SEQ ID NO: 38765 - protein, 166 aa, Hydrogenivirga sp.
  misc_feature (1)..(166): tr|A8V022|A8V022_9AQUI 7-cyano-7-deazaguanine synthase OS=Hydrogenivirga sp. 128-5-R1-1 OX=392423 GN=HG1285_06 988 PE=3 SV=1
MVDIPHLKGIEGSALTDEKVDIPSEDYPDQPPITTVPMRNLNFLSIAASFCDVYEIENIGIGIHSVDSPYPDCRAEFASSAEAVINASSVMVAKKKNRIKVYTPFLGMTKTDVLKLGLELGVPYEKTYSCYRGTIPPCGECATCRQRQEAFESVGVKDPLVKADER

SEQ ID NO: 38766 - protein, 250 aa, Hydrogenoanaerobacterium saccharovorans
  misc_feature (1)..(250): tr|A0A1H7YUP2|A0A1H7YUP2_9FIRM Uncharacterized protein OS=Hydrogenoanaerobacterium saccharovorans OX=474960 GN =SAMN05216180_0245 PE=4 SV=1
MTLQTFFKQNPRAAIAFSGGVDSTYLLYAAKQYGCDVHAFFIKTAFQPEFELEDAIQLAKQIDVPLTVLRHDVFEHPVVVANPADRCYHCKTALFTLMKQAAKGEGYTLLIDGTNASDDCSDRPGMKALAELSVRSPLRECGITKAEIRTLSQKAGLVTHDKPAYACLATRIPTGTAISEAVLKKVELAEGALFSMGFSNLRVRVMGDGECAKLQLPAEQFEKAVRLHAEIQKELSPNFKDILLDLNPRG

SEQ ID NO: 38767 - protein, 216 aa, Hydrogenobacter hydrogenophilus
  misc_feature (1)..(216): tr|A0A285NX87|A0A285NX87_9AQUI 7-cyano-7-deazaguanine s ynthase OS=Hydrogenobacter hydrogenophilus OX=35835 GN= queC PE=3 SV=1
MSKGKVIVLLSGGMDSAVLLWLSKKEFEKVYAISFDYGQRHKVELKYAKELAKLAQVEKHIITHIPHYSEIKISALLSEDVPVPKGEYPEDEPPITTVPMRNLTFLSIAGAFADALEIDHIGIGVHALDSPYPDCRPEFITSAEAAINAGSVLVAKTKKRIHIYAPFLGMSKRDIALLGKALNVPFEKTYSCYLGTEPPCGECPTCLQRKSALSSV

SEQ ID NO: 38768 - protein, 203 aa, Hydrogenobacter hydrogenophilus
  misc_feature (1)..(203): tr|A0A285NWJ0|A0A285NWJ0_9AQUI 7-cyano-7-deazaguanine s ynthase OS=Hydrogenobacter hydrogenophilus OX=35835 GN= SAMN06265353_0689 PE=3 SV=1
MSVRIAVLFSGGVESTTLLYMYLQKGYLVYPVYVKTGEKWESLELENAINLWRYTKRNYPNLMALRVLKVQGLASPRKTLKTIQDIFIPLRNMTLITTCALYAFSKDINRLAIGSLGLYAFPDNTAEYLKELEKLIAKGLGKEFFIETPLFGLEKAQVVKMGLSVVPYHLTLSCANPRKIKGKIVPCGKCIKCKERQEALAVG

SEQ ID NO: 38769 - protein, 203 aa, Hydrogenobacter thermophilus
  misc_feature (1)..(203): tr|D3DJ65|D3DJ65_HYDTT 7-cyano-7-deazaguanine synthase OS=Hydrogenobacter thermophilus (strain DSM 6534 / IAM 12695 / TK-6) OX=608538 GN=queC2 PE=3 SV=1
MSAYKIAVLFSGGVESTTLLYMYLQRKEIVYPVYIKMGESWERLELENALRLWQYTKSRYASLRPLRVINLQVSGAIRKSPYQVSEIFIPLRNMSLITACALYALSKKVRRLAIGSLGLYPFPDNSKSYIKELERLISEGSGTAFSIEMPFFGLEKGKIVKEFYGKVPYHLTLSCAMPKKVGKKILHCGKCIKCKERQEALLG

SEQ ID NO: 38770 - protein, 214 aa, Hydrogenobacter thermophilus
  misc_feature (1)..(214): tr|D3DIG3|D3DIG3_HYDTT 7-cyano-7-deazaguanine synthase OS=Hydrogenobacter thermophilus (strain DSM 6534 / IAM 12695 / TK-6) OX=608538 GN=queC1 PE=3 SV=1
MKSVLVLLSGGMDSATLLWLSKKEFDKIYAISFDYGQRHRVEIKYAKDLAKMAQVEEHFIVEVPHYSVLKGSALLDQEASIPKGEYPQEEPPITTVPMRNLTFISIAASFADTLEIDHIGIGVHALDSPYPDCRPEFITSAEAAVNASSIFVAKTKKRIHIYAPFLGMSKRDIALIGRDLGVPFEKTYSCYVGTEPPCGECAACLQRKQALSFL

SEQ ID NO: 38771 - protein, 216 aa, Hydrogenobaculum sp.
  misc_feature (1)..(216): tr|A0A2J6W6A9|A0A2J6W6A9_9AQUI 7-cyano-7-deazaguanine s ynthase OS=Hydrogenobaculum sp. OX=2053560 GN=queC PE=3 SV=1
MSNILVLLSGGMDSATLLWEAKAKFKDIYAISFDYGQKHIIEVKYAKELANMVGVKKHFIVKIPHYKEINFSSALLSVSSQDIPKEAYPTDVPITYVPMRNLTFLAIASGIADELSIENIGIAVHAVDAPYPDCRPEFITSAEAAINAGSSFVVKTKKRIHVYAPFLGFSKKDIAKLGKTLGVPFDKTYSCYEGTEPPCGECATCIQRKEALEGVL

SEQ ID NO: 38772 - protein, 216 aa, Hydrogenobaculum sp.
  misc_feature (1)..(216): tr|M1R5G1|M1R5G1_9AQUI 7-cyano-7-deazaguanine synthase OS=Hydrogenobaculum sp. HO OX=547144 GN=queC PE=3 SV=1
MSNILVLLSGGMDSATLLWEAKTKFKDVYAISFDYGQKHIVELKYAKELANMVGIKEHFIVKIPHYKEINFHSPLLSVSKKEIPKESYQEDVPITYVPMRNLTFLAIASGIADELGIENIGIAVHAVDAPYPDCRPEFITSAEAAINAGSSFVVKTKKRIYVYAPFLGFSKKDIAKLGKTLGVPFDKTYSCYEGTEPPCGECATCIQRKEALEGIL

SEQ ID NO: 38773 - protein, 247 aa, Hydrogenophaga crassostreae
  misc_feature (1)..(247): tr|A0A162SWN2|A0A162SWN2_9BURK 7-cyano-7-deazaguanine s ynthase OS=Hydrogenophaga crassostreae OX=1763535 GN=qu eC PE=3 SV=1
MPPRSVAPHHTSALVLFSGGQDSTTCLAQALARYPRVETLGFDYGQRHSVEMTARLNVLREIRERFPAWSPRLGEDHVLDLAVLGKVSETSLTRDKAFEMEASGLPNTFVPGRNLLFLTLAAALAYRRGIQVIVTGVCETDFSGYPDCRDDTMKALQVALSLGMDHRFLIDTPLMWIDKAATWQLAHDVGAASGVADGGKQLVDLIVEHTHTCYLGDREHRHVWGYGCGVCPACELRARGWAGFVAR

SEQ ID NO: 38774 - protein, 239 aa, Hydrogenophaga intermedia
  misc_feature (1)..(239): tr|A0A1L1PKU3|A0A1L1PKU3_HYDIT 7-cyano-7-deazaguanine s ynthase OS=Hydrogenophaga intermedia OX=65786 GN=queC P E=3 SV=1
MPEPTRHTRALVLFSGGQDSTTCLAHALARFDHVETIGFDYGQRHRVELDARLVVLRELRAAFPAWAAKLGDDHVLDLAVLGAVSETSLTRDMAFRMEANGLPNTFVPGRNLLFLTLAAALAYRRGLSVLVTGVCETDFSGYPDCRDDTMKAMQLALSLGMDQRFLIDTPLMWIDKADTWRLARELGGEALIDLVVEHTHTCYLGDREHRHDWGWGCGQCPACELRARGWAAYHGGVST

SEQ ID NO: 38775 - protein, 247 aa, Hydrogenophaga pseudoflava
  misc_feature (1)..(247): tr|A0A4P6X542|A0A4P6X542_HYDPS 7-cyano-7-deazaguanine s ynthase OS=Hydrogenophaga pseudoflava OX=47421 GN=queC PE=3 SV=1
MNAQTRTAHHTSALVLFSGGQDSTTCLAHALARYPRVETLGFDYGQRHSVELQARTVVLQKIREQFPAWAGRLGEDHLLDLAVLGKVSETSLTRDMAFKMEASGLPNTFVPGRNLLFLTLAAALAYRRDIQVIVTGVCETDFSGYPDCRDDTMKALQVALSLGMDHRFLIDTPLMWIDKAQTWQLAHDLGDGTGVADGGNALVDLIVEHTHTCYLGDREHRHDWGYGCGACPACELRARGWAGYRAA

SEQ ID NO: 38776 - protein, 258 aa, Hydrogenophaga sp.
  misc_feature (1)..(258): tr|A0A4P7R998|A0A4P7R998_9BURK 7-cyano-7-deazaguanine s ynthase OS=Hydrogenophaga sp. PAMC20947 OX=2565558 GN=q ueC PE=3 SV=1
MSDALTPPSSVPLRPSAIPHHTSALVLFSGGQDSTTCLAQALARYPRVETLGFDYGQRHSVEMTARLQVLGELRGRFPDWSTRLGEDHVLDLAVLGKVSETSLTRDMAFRMEESGLPNTFVPGRNLLFLTLAAALAYRRGIQVIITGVCETDFSGYPDCRDDTMKALQVALSLGMDHRFLIDTPLMWIDKAATWRLAHDVGAASGVEGGGQQLVDLIVEHTHTCYLGDREHRHAWGYGCGTCPACELRARGWVGFVGG

SEQ ID NO: 38777 - protein, 250 aa, Hydrogenophaga sp.
  misc_feature (1)..(250): tr|A0A1V3S1U7|A0A1V3S1U7_9BURK 7-cyano-7-deazaguanine s ynthase OS=Hydrogenophaga sp. A37 OX=1945864 GN=queC PE =3 SV=1
MVTAQPHHTSALVLFSGGQDSTTCLAHALARYPRVETLGFDYGQRHSVELQARTVVIQKLRDQFPAWSERLGEDHLLDLAVLGKVSDTSLTRDMAFKMEASGLPNTFVPGRNLLFLTLAAALAYRRDIQVIVTGVCETDFSGYPDCRDDTMKALQVALSLGMDHRFLIDTPLMWIDKAETWRMAEALGEASGVAGGGKAFVDLIVEHTHTCYLGDREHRQDWGYGCGSCPACELRARGWAGFTNACGDVS

SEQ ID NO: 38778 - protein, 223 aa, Hydrogenophilaceae bacterium
  misc_feature (1)..(223): tr|A0A1J4YTF7|A0A1J4YTF7_9PROT 7-cyano-7-deazaguanine s ynthase OS=Hydrogenophilaceae bacterium CG1_02_62_390 O X=1805218 GN=queC PE=3 SV=1
MSKKAVVLLSGGLDSATALAVARNQGYECYALSVDYGQRHASELNAARAVAAQLGVAGQRVVHLDIGQFGGSALTDKDMAVPTAPSAGIPITYVPARNTVMLSLALGWAEVLDADAIFIGVNSVDYSGYPDCRPEFIAAFQRMANLATKRAVEGQPVTIETPLMYLSKAEIVRLGSGLGVDYGLTVSCYQADEQGRACGVCDSCRFRRQGFIEAGVADPTPYR

SEQ ID NO: 38779 - protein, 239 aa, Hydrogenophilales bacterium
  misc_feature (1)..(239): tr|A0A259EYB4|A0A259EYB4_9PROT 7-cyano-7-deazaguanine s ynthase OS=Hydrogenophilales bacterium 17-61-9 OX=19705 24 GN=queC PE=3 SV=1
MKPAVILLSGGLDSATVLAIARAAGYACHALSLDYGQRHQAELVAAARLAHALGAVEHRVMRLGLGDIGGSALTDSAIAVPESPTEGIPVTYVPARNTVMLALALAWAEVLGSRDIFIGVNAVDYSGYPDCRPEFIAAFEQMANLATRSGVEGEKLQIHAPLQDLSKAQIIQRGAALGVDYVQTVSCYQADADGGACGRCDSCRLRREGFIAAGIADPTRYALESGRNDADFSQTRNPA

SEQ ID NO: 38780 - protein, 225 aa, Hydrogenophilales bacterium
  misc_feature (1)..(225): tr|A0A259GJV6|A0A259GJV6_9PROT 7-cyano-7-deazaguanine s ynthase OS=Hydrogenophilales bacterium 17-61-76 OX=1970 523 GN=queC PE=3 SV=1
MKPAVILLSGGLDSATVLAIAREADFACHTLSLDYGQRHNAELAAAGRLAKSLGAVEHRVVKLGLGDFGGSALTDASIAVPETPTSGIPATYVPARNTVMLSLALAWTEVLGGRDIFIGVNAVDYSGYPDCRAEFIAAFEHMANLATRAGVEGAQLRVHAPLQYLSKAEIIQRGIQLGVDYAQTVSCYQADLEGRACGRCDSCRLRREGFLNTGIPDPTRYAAAD

SEQ ID NO: 38781 - protein, 231 aa, Hydrogenophilus thermoluteolus
  misc_feature (1)..(231): tr|A0A2Z6E079|A0A2Z6E079_HYDTE 7-cyano-7-deazaguanine s ynthase OS=Hydrogenophilus thermoluteolus OX=297 GN=que C PE=3 SV=1
MTGYTKPKAVVLLSGGLDSTTVLAETAARGYQLYALTVAYGQRHAAEIAAAKRVARAFAVVEHRIAQASLDAFGGSALTDAALAVPEDGSTRTTIPITYVPARNTVLLALALAWAEVVGATDLFIGANAVDYSGYPDCRPPFLAAFEHLANVATKAGVEGARYRVHAPLLYLSKAEIIRRGVALGVDYGLTVSCYQADAEGRACGRCDSCRLRAAGFAAAGVPDPTHYQTG

SEQ ID NO: 38782 - protein, 221 aa, Hydrogenothermus marinus
  misc_feature (1)..(221): tr|A0A3M0BR31|A0A3M0BR31_9AQUI 7-cyano-7-deazaguanine s ynthase OS=Hydrogenothermus marinus OX=133270 GN=queC P E=3 SV=1
MEKIIVLLSGGMDSATLLWLAKKQFKEVYAISFDYGQKHKVELDFAKQLAKIAGVKEHFIAEIPHLRNIKGNALTDKNIEVPTEKYPEEAPITTVPMRNLTFLSIAAAFCDVYEIENIGIGIHSIDSPYPDCRAEFASSAEAAINASSVMVEKKKNRIKVYTPFLGKSKIDILKLGLELGVPYDKTYSCYKGTIPPCGQCATCQQRKEAFKSVGLEDPSFT

SEQ ID NO: 38783 - protein, 128 aa, Hydrogenothermus sp.
  misc_feature (1)..(128): tr|A0A432R7I0|A0A432R7I0_9AQUI 7-cyano-7-deazaguanine s ynthase (Fragment) OS=Hydrogenothermus sp. OX=2231113 G N=DSY47_07410 PE=3 SV=1
MASNIIVLVSGGMDSATLLWLAKKEFDEVYAISFDYGQKHKIELDFAKELVKLANVKKHFIVEIPHLKGIEGSALTDENIEVPSEDYPNQPPITTVPMRNLNFLAIASSFCDVYEIENIGIGIHSIDS

SEQ ID NO: 38784 - protein, 232 aa, Hydrogenovibrio crunogenus
  misc_feature (1)..(232): sp|Q31H76|QUEC_HYDCU 7-cyano-7-deazaguanine synthase OS =Hydrogenovibrio crunogenus (strain XCL-2) OX=317025 GN =queC PE=3 SV=1
MADVDVKKAVVLLSGGLDSATVLAIAQAQGFECHTISFDYGQRHRAELIAAERISRVSGAKTHRVMEMNMHAIGGSALTDDSIDVPVSGVEKEMIPVTYVPARNTVFLSYALALAEVLEADDIFIGVNAVDYSGYPDCRPEYIAAYEKMANLATKAGVEGHKMHIQTPLIDLTKAEIIQTGVKLGVDYSQTVSCYQADKNGAACGICDSCRLRKQGFENAGVTDPTIYASNL

SEQ ID NO: 38785 - protein, 232 aa, Hydrogenovibrio crunogenus
  misc_feature (1)..(232): tr|A0A4P7P0Z4|A0A4P7P0Z4_9GAMM 7-cyano-7-deazaguanine s ynthase OS=Hydrogenovibrio crunogenus OX=39765 GN=queC PE=3 SV=1
MAGVDTKKAVVLLSGGLDSATVLAIAQAQGFECHTISFDYGQRHRAELMAAERVSRASGAKTHRVMEMNMHAIGGSALTDDSIDVPVSGVDKETIPVTYVPARNTVFLSYALALAEVLQADDIFIGVNAVDYSGYPDCRPEYIAAYEKMANLATKAGVEGHKMHIQTPLIDLTKAEIIQTGVRLGVDYSKTVSCYQADKNGAACGICDSCRLRKQGFEKAGVADPTIYVSNL

SEQ ID NO: 38786 - protein, 232 aa, Hydrogenovibrio marinus
  misc_feature (1)..(232): tr|A0A066ZMZ4|A0A066ZMZ4_HYDMR 7-cyano-7-deazaguanine s ynthase OS=Hydrogenovibrio marinus OX=28885 GN=queC PE= 3 SV=1
MEPTTLNKRAVVLLSGGLDSTTVLAIAQSQGYECHALSFDYGQRHQVELQAAARIAEACQVASHRVMQMNMNAIGGSALTDNNIDVPTGGVEENTIPVTYVPARNTIFLSYALGLAEVIDADTIFIGVNAVDYSGYPDCRPEYIEAFEKMANLATKKGVEGHKIHIETPLISMTKAEIIQTGASLGVDYGLTVSCYQANDKGEACGVCDSCRLRKQGFSDAGVADPTQYYSA

SEQ ID NO: 38787 - protein, 245 aa, Hydrogenovibrio marinus
  misc_feature (1)..(245): tr|A0A5A4WME4|A0A5A4WME4_HYDMR 7-cyano-7-deazaguanine s ynthase OS=Hydrogenovibrio marinus OX=28885 GN=queC PE= 3 SV=1
MANKYITNSTDLNMEPTTLNKRAVVLLSGGLDSTTVLAIAQSQGYECHALSFDYGQRHQVELQAAARIAEACQVASHRVMQMNMNAIGGSALTDNNIDVPTGGVEENTIPVTYVPARNTIFLSYALGLAEVIDADTIFIGVNAVDYSGYPDCRPEYIEAFEKMANLATKKGVEGHKIHIETPLISMTKAEIIQTGASLGVDYGLTVSCYQANDKGEACGVCDSCRLRKQGFSDAGVADPTQYYSA

SEQ ID NO: 38788 - protein, 231 aa, Hydrogenovibrio sp.
  misc_feature (1)..(231): tr|A0A2I2A5W6|A0A2I2A5W6_9GAMM 7-cyano-7-deazaguanine s ynthase OS=Hydrogenovibrio sp. SC-1 OX=2065820 GN=queC PE=3 SV=1
MSTDQKKAVVLLSGGLDSATVLAVAQSQGYECHTLSFDYGQRHKVELHAAQALANHFKVASHRVMQMNMHAIGGSALTDNLIDVPIEGVEDNQIPVTYVPARNTVFLSYALGLAEVLEADDIFIGVNAVDYSGYPDCRPEYIAAFETLANLATKAGVEGHRMHIQTPLISLTKAQIIQTGVQLGVDYSQTVSCYQANENGQACGVCDSCRLRKQGFKEAGIADPTRYVTLA

SEQ ID NO: 38789 - protein, 227 aa, Hydrogenovibrio thermophilus
  misc_feature (1)..(227): tr|A0A410H2D3|A0A410H2D3_9GAMM 7-cyano-7-deazaguanine s ynthase OS=Hydrogenovibrio thermophilus OX=265883 GN=qu eC PE=3 SV=1
MKKAIVLLSGGLDSATVLAIAQSEGYECHTMSFDYGQRHRAELLAAERVSKAFGAKTHRVMSMNMRAIGGSALTDDAIDVPTTGVEENQIPVTYVPARNTIFLSYALGLAEVVDADDIFIGVNAVDYSGYPDCRPEFIQAFEVMANLATKAGVEGHKMHIRTPLIDLTKSQIIQEGIRLGVDYSQTVSCYQADDSGAACGVCDSCRLRKQGFEAAGVADPTVYVNTH

SEQ ID NO: 38790 - protein, 246 aa, Hydromonas duriensis
  misc_feature (1)..(246): tr|A0A4V3DK78|A0A4V3DK78_9BURK 7-cyano-7-deazaguanine s ynthase OS=Hydromonas duriensis OX=1527608 GN=queC PE=3 SV=1
MNLIKNAPDEGALVVLSGGQDSTTCLYWAIQRWGRERVQALTFDYGQRHRVELDSARAIAELAGVRQTVLPIDTFARMGGNALTDDIIPESGVRADDDAALPNTFVPGRNLIFLTFAAAFAYQKGLAHVVTGVAQTDYSGYPDCRENTLKSLELALRLGMDSRVTLHTPLMFLTKAQTVHLAQDVGAMSALALSHTCYNGAVPPCGECAACLLRAQGFAQAGAIDPLIERTGRARADETVNQLTLC

SEQ ID NO: 38791 - protein, 257 aa, Hydromonas sp.
  misc_feature (1)..(257): tr|A0A345DD84|A0A345DD84_9BURK 7-cyano-7-deazaguanine s ynthase OS=Hydromonas sp. F02 OX=2268024 GN=queC PE=3 S V=1
MDNLNLTSCGAGGVGSGALVVLSGGQDSTTCLYWAVARWGRENVQALTFDYGQRHRVELDSAQKIAALVGVKQTVLPIDTFAAMGGNALTDDIAPESGVRADDDAALPNTFVPGRNLIFLTFAAAFAYQKGLAHVVTGVAQTDYSGYPDCRENTLKSLELALRLGMDSRVTLHTPLMFMSKAETVALAQAVGAMDALALSHTCYNGAVPPCGECAACVLRAQGFAQAGVADPLVVRTLVSACAVDAVAHDDAQLTLC

SEQ ID NO: 38792 - protein, 223 aa, Hyella patelloides
  misc_feature (1)..(223): tr|A0A563VTY9|A0A563VTY9_9CYAN 7-cyano-7-deazaguanine s ynthase OS=Hyella patelloides LEGE 07179 OX=945734 GN=q ueC PE=3 SV=1
MKKAVVLLSGGLDSATTAAIAIKEGYEAIALSFRYGQRHEKELQAAAKIAQALNIQQHHIIEVNLSQWGGSSLTDTNLEIPQEGVQPDVIPSTYVPGRNTVFIAIALSLAEATGATAIYLGINAVDYSGYPDCRPEYLDAYQKLANLASKTAIEGNTIQLVAPLVKDTKVDIVKRALNLGVPLAETWSCYQGGEKPCGVCDSCRIRDHALIAAGRSDLISSNY

SEQ ID NO: 38793 - protein, 215 aa, Hyella patelloides
  misc_feature (1)..(215): tr|A0A563VTQ7|A0A563VTQ7_9CYAN 7-cyano-7-deazaguanine s ynthase OS=Hyella patelloides LEGE 07179 OX=945734 GN=H 1P_2790001 PE=3 SV=1
MDSQILDKSQIKIYLLIGGGTDSAALINFYQSRRANINGIHFNYGQPSLAGERRSVNALAEYYQISISSIDLGMKISHAKGEYYCRNATLLMAAASTFSAKQGILSLGIHSGTPYYDCSPEFLQDIQHLFDGYFGGTVQIEAPFLDFTKQDIYKYCHKNKVPVEITFSCERQSDRPCGECPSCINRRTFSCERQSDRPCGECPSCINRRMLDAIR

SEQ ID NO: 38794 - protein, 232 aa, Hylemonella gracilis
  misc_feature (1)..(232): tr|A0A4V1A1S3|A0A4V1A1S3_9BURK 7-cyano-7-deazaguanine s ynthase OS=Hylemonella gracilis OX=80880 GN=queC PE=3 S V=1
MHTSALVLFSGGQDSTTCLAQALSRYERVETIAFDYRQRHAVELDARLRVLAELRRAYPHWSGRLGQDHLLDVAVLGAVSETSLTRETEFQMQANGLPNTFVPGRNLLFLTLAAAVAYRRDLQVLITGVCETDFSGYPDCRDDTMKAMQIALSLGMDKRLLIETPLMWIDKAETWHLAESLGGKMLVDLIVEHTHTCYLGERGQRHVWGYGCGHCPACELRARGWERYRAAA

SEQ ID NO: 38795 - protein, 232 aa, Hylemonella gracilis
  misc_feature (1)..(232): tr|A0A016XKK6|A0A016XKK6_9BURK 7-cyano-7-deazaguanine s ynthase OS=Hylemonella gracilis str. Niagara R OX=14582 75 GN=queC PE=3 SV=1
MHTSALVLFSGGQDSTTCLAHALSRYERVETIAFDYRQRHVVELDARLRVLEELRRTYPHWASKLGQDHLLDVAVLGAVSETSLTRETEFQMQANGLPNTFVPGRNLLFLTLAAAVAYRRDLQVLVTGVCETDFSGYPDCRDDTMKAMQLALSLGMDKRLLIETPLMWIDKADTWRLAESLGGKALVDLIVEHTHTCYLGERDQRHAWGYGCGRCPACELRAGGWERYRSAA

SEQ ID NO: 38796 - protein, 202 aa, Hymenobacter chitinivorans
  misc_feature (1)..(202): tr|A0A2M9BN93|A0A2M9BN93_9BACT 7-cyano-7-deazaguanine s ynthase OS=Hymenobacter chitinivorans DSM 11115 OX=1121 954 GN=CLV45_0822 PE=3 SV=1
MKSALLLSGGMDSIAIAYWKRPAIAVTLDYGQLPAQAEIDASKAVAAALGIQHEIVQVNCRALGSGDLAGTTSLSNAPTAEWWPYRNQLLLTLAAMHLSRLQVTELMIGTVATDQSSHKDGHEHFVSLMNQLVSFQEGGLQITAPAISLTTAELVRISGITRSLLCYAHSCQKSNLACGECGGCEKYRATMQELYEAEGLVY

SEQ ID NO: 38797 - protein, 201 aa, Hymenobacter sp.
  misc_feature (1)..(201): tr|A0A126PCW9|A0A126PCW9_9BACT 7-cyano-7-deazaguanine s ynthase OS=Hymenobacter sp. PAMC 26628 OX=1484118 GN=AX W84_11190 PE=3 SV=1
MKRAILLSGGIDSIALSYWLRPDLAFTIDYGQLPYQGEVRAAEQIAKHLEITHELLKVDCGAIGSGDLSGKAPDPQAPASEWWPYRNQLLLTICASKAITMGATEIMIGTVASDGFHKDGTPRFIELMNEAFSYQEGNLQISAPAITMTSAELVRASQIPEELLFWAHSCHKADYACGNCRGCNKYRNVMHELYGTSFTTG

SEQ ID NO: 38798 - protein, 234 aa, Hyphomicrobiaceae bacterium
  misc_feature (1)..(234): tr|A0A5C7M006|A0A5C7M006_9RHIZ 7-cyano-7-deazaguanine s ynthase OS=Hyphomicrobiaceae bacterium OX=2015799 GN=qu eC PE=3 SV=1
MKKAVVLLSGGLDSTTTLAIAKAEGFEVYALSFRYGQRHLGELDCAKRVAALLGAKQHVIAQFDLRAFGGSALTDEIPVPKNREADEIGTGIPVTYVPARNTVFLSFALSWAEVLGANDIFIGVNALDYSGYPDCRPEYIEAFERMANLATKSGVEGHAHIRIRTPLIQLSKTDIIRKGLQLGVDYSLTSTCYDPDPSGAACGECDACLLRLKGFREIGLPDPAPYRQSMKAKP

SEQ ID NO: 38799 - protein, 215 aa, Hyphomicrobiaceae bacterium
  misc_feature (1)..(215): tr|A0A5C7LX01|A0A5C7LX01_9RHIZ 7-cyano-7-deazaguanine s ynthase OS=Hyphomicrobiaceae bacterium OX=2015799 GN=E6 R03_09375 PE=3 SV=1
MSNKVAIVSGGMDSVVMLKRFAPSLACVMYFNYGSNHAQKESYFSRLHAEEHKLAWLEIDLGFIKQHFSSALLQGSEAIPDGHYQDEIMKKTVVPFRNGIMLSIAAGFAESIGASAVMIGSHFGDHAIYPDCRADFITPMRAAVKAGTYANIEVEAPFASFVKRDIGMLGKQLGVDFTQSWSCYKNGEHHCGTCGTCVERKEALQGFDPTYYEVL

SEQ ID NO: 38800 - protein, 232 aa, Hyphomicrobium denitrificans
  misc_feature (1)..(232): tr|D8JYX1|D8JYX1_HYPDA 7-cyano-7-deazaguanine synthase OS=Hyphomicrobium denitrificans (strain ATCC 51888 / DS M 1869 / NCIB 11706 / TK 0415) OX=582899 GN=queC PE=3 S V=1
MPQTSALVLFSGGQDSTVCLAWALDRYERVETVGFTYGQRHAVELAQRPVIRSKLANLSGGSKLGDDAVLDLPALQSISDTALTRETEITFAATGLPTTFVPGRNLLFLTYAAALAYRRGIGTLVGGMCETDFSGYPDCRNATVQALAQALSLGLDTHLEIETPLMFIDKAATWDLADKLGGKALVDLIVEDTHTCYLGDRSHRHAWGYGCGTCPACELRAKGWNEWQARTT

SEQ ID NO: 38801 - protein, 215 aa, Hyphomicrobium denitrificans
  misc_feature (1)..(215): tr|N0B475|N0B475_9RHIZ 7-cyano-7-deazaguanine synthase OS=Hyphomicrobium denitrificans 1NES1 OX=670307 GN=queC PE=3 SV=1
MCLAWALDRYERVETLGFTYGQRHAVELAQRPIIRSELAKRRNGSKLGADVVLDLPALESISDTALTRETEITFAATGLPTTFVPGRNLLFLTYAAALAYRRGIATLVGGMCETDFSGYPDCRNATIQALAQALSLGLDTHLEIETPLMFIDKAATWELAGKLGGRDLIDLIIEDTHTCYLGDRSHRHTWGYGCGTCPACELRAKGWNEWQARTI

SEQ ID NO: 38802 - protein, 240 aa, Hyphomicrobium facile
  misc_feature (1)..(240): tr|A0A1I7NUW5|A0A1I7NUW5_9RHIZ 7-cyano-7-deazaguanine s ynthase OS=Hyphomicrobium facile OX=51670 GN=queC PE=3 SV=1
MPESSALVLFSGGQDSTVCLAWALDRYDRIETVGFSYGQRHSVELEQREIIRSKLARLGPAGQRLGGDTVLDLPALQSISDTALTRDTEIAFAATGLPTTFVPGRNLLFLTYAAALGYRRGIATIVGGMCETDFSGYPDCRNDTMQAMAQALSLGLATPVSIETPLMFIDKAGTWELASKLGGEDLIQIILEDTHTCYVGDRTNRHEWGYGCGVCPACDLRAKGWAEWQARTNRELPQKA

SEQ ID NO: 38803 - protein, 243 aa, Hyphomicrobium nitrativorans
  misc_feature (1)..(243): tr|V5SE88|V5SE88_9RHIZ 7-cyano-7-deazaguanine synthase OS=Hyphomicrobium nitrativorans NL23 OX=1029756 GN=queC PE=3 SV=1
MADDSALVLFSGGQDSTVCLAWALARFGRVETIGFDYGQRHAVELSQRGAVLDGLRARFPAWAPRLGADHSLALPELGRLSETSLTRETEIAMTDAGLPSTFVPGRNLLFLTYAAALAYRRGIGTLVGGMCETDYSGYPDCRNDTIQTLARTLSLGMDVELRIETPLMWIDKAGTWALTHALGGDALVDLIVQDTHTCYLGDRSRRHAWGAGCGTCPACELRAKGWNAWKRETAATDTASEPL

SEQ ID NO: 38804 - protein, 238 aa, Hyphomicrobium sp.
  misc_feature (1)..(238): tr|A0A258KYH6|A0A258KYH6_9RHIZ 7-cyano-7-deazaguanine s ynthase OS=Hyphomicrobium sp. 32-62-53 OX=1970390 GN=qu eC PE=3 SV=1
MTDVTAAPSALVLFSGGQDSTVCLAWALQQYEHVETVGFQYGQRHEVELAQRGIIRDEIAKLGDWGARLGPDTMIALPELGRLSETALTRDREIAFEVNGLPNTFVPGRNLLFLTYAAALAYRRGIHTLVGGMCETDYSGYPDCRQATMTAMEEALSRGLDYPLAIETPLMFVDKAGTWAMAETLGGAALTDIVIAHSHTCYLGDRTHQHSWGYGCGTCPACQLRAKGFLQWRGIDAL

SEQ ID NO: 38805 - protein, 239 aa, Hyphomicrobium sp.
  misc_feature (1)..(239): tr|A0A1E4C1Y3|A0A1E4C1Y3_9RHIZ 7-cyano-7-deazaguanine s ynthase OS=Hyphomicrobium sp. SCN 65-11 OX=1660102 GN=q ueC PE=3 SV=1
MTDPSERAALVLFSGGQDSTVCLASALTRYDRVETIGFDYGQRHRVELEQRGKVIAALRDRFPDWAARLGEDHRLSLPTLAQISETSLTRETAIEMTASGLPSTFVPGRNLLFFTYAAALAYRRGIATLVGGMCETDYSGYPDCRNDTLQTLARALTLGLDRPVAIDTPLMTIDKAGTWALAETLGGAALVDIIIEETHSCYLGDRATRHPSGYGCGSCPACELRANGFTRWQSERGAA

SEQ ID NO: 38806 - protein, 234 aa, Hyphomicrobium sulfonivorans
  misc_feature (1)..(234): tr|A0A120CUC4|A0A120CUC4_HYPSL 7-cyano-7-deazaguanine s ynthase OS=Hyphomicrobium sulfonivorans OX=121290 GN=qu eC PE=3 SV=1
MTDRDNAALVLFSGGQDSAVCLAWALERYGRVETLGFNYGQRHVAELAQRETLRLAMAELKPIWRERLGDDHMLALPELGRLSDTALTREAEIEISAAGLPSTFVPGRNLMFFTYAAALAYRRGIRTLVGGMCETDFSGYPDCRNDTLQTLAKALALGMDAPFVIETPLMWVDKAETWALTDTLGGQPLIDLIVEESHTCYLGVRTRRYEWGYGCNHCPACALRRKGWEEWRNR

SEQ ID NO: 38807 - protein, 240 aa, Hyphomonadaceae bacterium
  misc_feature (1)..(240): tr|A0A0F2QHR1|A0A0F2QHR1_9RHOB 7-cyano-7-deazaguanine s ynthase OS=Hyphomonadaceae bacterium BRH_c29 OX=1629720 GN=queC PE=3 SV=1
MTQMPSASADARALVLFSGGQDSATCLAWALERYEQVETIGFDYGQRHAVELTCRESVRTGLASLNPAWASRLREDHMVDATVLKSLGETAMTHDVAIETTEAGLPSTFVPGRNLLFLTLAGALAVRRGIGVLVGGMCETDYSGYPDCRNDTIQTQAETLRLGLDKPMQIETPLMYIDKAGTWEMAEQLGGQALVELIVEETHTCYLGDRSHHHAWGYGCGTCPACELRASGWDRWQAAR

SEQ ID NO: 38808 - protein, 240 aa, Hyphomonadaceae bacterium
  misc_feature (1)..(240): tr|A0A2E4S4T1|A0A2E4S4T1_9RHOB 7-cyano-7-deazaguanine s ynthase OS=Hyphomonadaceae bacterium OX=2026748 GN=queC PE=3 SV=1
  misc_feature (236)..(236): Xaa can be any naturally occurring amino acid
MSTSSSALVLFSGGQDSTTCLASALKRYRHVETIGFDYGQRHRVELDAREDVLAAIRQNFPQWAERLGEDHLIDLGVLGQISETSLTRETEITEDEDGLPSTFVPGRNLVFLTLAAALAWRRGISVIIGGMCETDYSGYPDCRRDTIDAQQKALSLGMDRQFTLKTPLMWLDKSETWQLAWDIGGDALVDLIVEKTHSCYVGDHRTRHDWGYGCGKCPACELRAKGYRKWRERQGXKPIR

SEQ ID NO: 38809 - protein, 69 aa, Hyphomonas adhaerens
  misc_feature (1)..(69): tr|A0A3B9H0M0|A0A3B9H0M0_9RHOB 7-cyano-7-deazaguanine s ynthase (Fragment) OS=Hyphomonas adhaerens OX=81029 GN= DCG58_13885 PE=3 SV=1
MTLQTSPSVNRALVLFSGGQDSATCLAWALDRFDAVETIGFDYGQRHAVELSCREKVRIDMASLKESWA

SEQ ID NO: 38810 - protein, 239 aa, Hyphomonas adhaerens
  misc_feature (1)..(239): tr|A0A069E670|A0A069E670_9RHOB 7-cyano-7-deazaguanine s ynthase OS=Hyphomonas adhaerens MHS-3 OX=1280949 GN=que C PE=3 SV=1
MTLQTSPSVTRALVLFSGGQDSATCLAWALDRFDAVETIGFDYGQRHAVELSCREKVRIGMASLKESWASRLGDDHMIDATVLKSLGETAMTHDVAIETTDAGLPSTFVPGRNLLFLTLAGALGVRRGVGVLVGGMCETDYSGYPDCRNDTIQAQAETLRLGLGKPMTIETPLMYIDKAGTWAMALELGGQGLIDLIVEDTHTCYLGDRTHRHDWGYGCGTCPACELRAAGWDRWQVSR

SEQ ID NO: 38811 - protein, 242 aa, Hyphomonas atlantica
  misc_feature (1)..(242): tr|A0A059EAK1|A0A059EAK1_9RHOB 7-cyano-7-deazaguanine s ynthase OS=Hyphomonas atlantica OX=1280948 GN=queC PE=3 SV=1
MPVTGAVMSQLLPAALVLFSGGQDSTTCLAWALSRYERVETVGFDYGQRHRIELECRETVRSGLAALNTDWGARLGADHMLDATVLKSLGETAMTHEVSIEMTEAGLPSTFVPGRNLLFLTLAGALASRRGIAVLVGGMCETDYSGYPDCRADTMAAQAETLRLGLDVPMQIETPLMYIDKAETWALADTLGGQGLVDLIAEDTHTCYLGERGARHEWGYGCGTCPACELRAKGWESWKNAS

SEQ ID NO: 38812 - protein, 235 aa, Hyphomonas beringensis
  misc_feature (1)..(235): tr|A0A062U4T4|A0A062U4T4_9RHOB 7-cyano-7-deazaguanine s ynthase OS=Hyphomonas beringensis OX=1280946 GN=queC PE =3 SV=1
MADPSSSALVLFSGGQDSTTCLASALSRFERVETVGFDYGQRHRIELTCRETVRKGIAAINPLWGDRLGEDHMLDATVLKSLGETAMTHEVSIEMTEAGLPSTFVPGRNLLFLTLAGALASRRGIGVLVGGMCETDYSGYPDCRADTMAAQAETLRLGLDVPIQIDTPLMYIDKAETWALAHQLGGYALVRLIVEDTHTCYLGERGELHDWGHGCGTCPACELRARGWEKWAASR

SEQ ID NO: 38813 - protein, 201 aa, Hyphomonas chukchiensis
  misc_feature (1)..(201): tr|A0A062UMJ2|A0A062UMJ2_9RHOB 7-cyano-7-deazaguanine s ynthase OS=Hyphomonas chukchiensis OX=1280947 GN=queC P E=3 SV=1
MGFDYGQRHRVELACRTRFIDSLRAQFPAWGERLGVDHMLDASVLKSLGESAMTDDVAIEMTEAGLPSTFVPGRNLLFFTLAGALAYRRGIDVLVGGMCETDYSGYPDCRAATLAAQEQTLQLGLDSTVRIETPLMYVDKAGTWALAEATGGQALVDLVTEETHTCYLGDRTHRHEWGYGCGTCPACELRSSGWQRWKAGA

SEQ ID NO: 38814 - protein, 188 aa, Hyphomonas hirschiana
  misc_feature (1)..(188): tr|A0A059FXX0|A0A059FXX0_9RHOB 7-cyano-7-deazaguanine s ynthase OS=Hyphomonas hirschiana VP5 OX=1280951 GN=HHI_ 06619 PE=3 SV=1
MTADDSIETVVLVSGGIDSAACAAMYANNGGSTTGVFVDYGHPAAIEEFASAEKVCAALGIPLLKTSFSTDRITGPGEIVGRNALLIWSAVFASGIKKGVIAIGVHAGTTYYDCSSTFITRMDNMLAESTNGLVRISAPFVNASKSEVFSYLQRSKVEASLTYSCESGSKEPCGICASCQDRTKLGLR

SEQ ID NO: 38815 - protein, 456 aa, Hyphomonas hirschiana
  misc_feature (1)..(456): tr|A0A059FY57|A0A059FY57_9RHOB Uncharacterized protein OS=Hyphomonas hirschiana VP5 OX=1280951 GN=HHI_04825 PE =4 SV=1
MVSDYAIERPDAHVYVCSDGEAAPEHSALCVLGRHLKLEPRALGTFLMRSIPARAEDLLVLAGAVAYIDRLGKRHHSKCWERDLFLSLPVRDFDFWDASDLRDELKSLLEMLTGDSWYLEFRPGRAPLPVDRQGSLSLTDTPPVVIPYSNGLDSFAVARLHAQPRQHIIRVSTGRVGDTEKKVSHARTASTRWVSMPISLPGAGVRLPEQSYRSRGFLFGAVAATAAGIMKGAEIVVPESGQGTFGPALTVIGHEHPDVRMSPIFTSALGRFVSRIFESPIRFVHPRVWSTKGETLAALQIAQLSEGWEVTVSCSRSSRRKIQGSVAKHCGVCANCLLRRQSLQVAGLVSSSQEPYIWPDLGQSPPWTSRDHPVPGKSVVQQAISAILAMRDFAMISPESPLVLREAAAIAEALGEPRESTLHGMHHVMAKHREEWSALLSTFPPTSLFRALGAVA

SEQ ID NO: 38816 - protein, 239 aa, Hyphomonas jannaschiana
  misc_feature (1)..(239): tr|A0A059FES2|A0A059FES2_9RHOB 7-cyano-7-deazaguanine s ynthase OS=Hyphomonas jannaschiana VP2 OX=1280952 GN=qu eC PE=3 SV=1
MTSQTSPTVTRALVLFSGGQDSATCLAWALDRFDQVETIGFDYGQRHAVELTCREKVRIGMASLKESWASRLGEDHMIDATVLKSLGETAMTHDVVIETTEAGLPSTFVPGRNLLFLTLAGALAVRRGISVLVGGMCETDYSGYPDCRNDTIQAQAETLRLGLGKPMSIETPLMYIDKAGTWEMAHGLAGQALIDLIVEDTHTCYLGDRSQRHVWGYGCGSCPACELRAAGWDRWQAAK

SEQ ID NO: 38817 - protein, 235 aa, Hyphomonas johnsonii
  misc_feature (1)..(235): tr|A0A059FQZ2|A0A059FQZ2_9RHOB 7-cyano-7-deazaguanine s ynthase OS=Hyphomonas johnsonii MHS-2 OX=1280950 GN=que C PE=3 SV=1
MIENRTSALVLFSGGQDSATCLAGALARFRRVETVGFDYGQRHRVELDCRTRFLQAIRDDFPRWGEHLGADHMLDASVLKGLGQSAMTDDVAIEMTKAGLPSTFVPGRNLLFFTLAGALAYRRGIDVLVGGMCETDYSGYPDCRAATLAAQEQTLRLGLDMDIRIDAPLMNIDKAETWAMANRLGGARLVDLIVEETHTCYLGDRTQRHAWGYGCGTCPACELRANGWARWKATA

SEQ ID NO: 38818 - protein, 456 aa, Hyphomonas neptunium; identical to SEQ ID NO: 38815
  misc_feature (1)..(456): tr|Q0C5H6|Q0C5H6_HYPNA Uncharacterized protein OS=Hypho monas neptunium (strain ATCC 15444) OX=228405 GN=HNE_02 87 PE=4 SV=1

SEQ ID NO: 38819 - protein, 239 aa, Hyphomonas neptunium
  misc_feature (1)..(239): sp|Q0C4T2|QUEC_HYPNA 7-cyano-7-deazaguanine synthase OS =Hyphomonas neptunium (strain ATCC 15444) OX=228405 GN= queC PE=3 SV=1
MTQPISSALVLFSGGQDSATCLAWALDRFDRVETIGFDYGQRHAIELACRPKVRAAIRQMSPVWAEKLGEDHMIDAGVLKSLGATAMTHEVEISMTAAGLPNTFVPGRNLLFFTLAGALAVRRGIGVLVGGMCETDYSGYPDCRADTLKAQEQTLRLGLDADIRIDAPLMYLDKAATWQLAQELGGDALVALIGEETHTCYLGERGARHDWGYGCGTCPACELRSNGWQRWQDGKAAAP

SEQ ID NO: 38820 - protein, 198 aa, Hyphomonas oceanitis
  misc_feature (1)..(198): tr|A0A059GCI4|A0A059GCI4_9RHOB 7-cyano-7-deazaguanine s ynthase OS=Hyphomonas oceanitis SCH89 OX=1280953 GN=HOC _01445 PE=3 SV=1
MKTALLLSGGMDSVSIAYWKMPNIAITIDYGQRPAPGEIRAASAVCSSLGIEHQILTVDIAALGSGDLSDQPPVSGAPASEWWPYRNQFLLTVAAMRCHAEGVNRMMIGALKSDGFHADGTRVFVDAMNELFALQEGELAVEAPAIGFDAVELVRTSKVPMDILAWSHSCHVAEFACGFCRGCRKHYDTMEAVNGSAY

SEQ ID NO: 38821 - protein, 201 aa, Hyphomonas oceanitis
  misc_feature (1)..(201): tr|A0A059GA13|A0A059GA13_9RHOB 7-cyano-7-deazaguanine s ynthase OS=Hyphomonas oceanitis SCH89 OX=1280953 GN=que C PE=3 SV=1
MGFDYGQRHRVELECRTRFIDSIRAQFPEWGERLGADHMLDASVLKSLGESAMTDDVAIEMTEAGLPSTFVPGRNLLFFTLAGALAYRRGIDVLVGGMCETDYSGYPDCRAATLAAQEQTLQLGLDSTVRIETPLMYVDKAGTWALAEETGGQALVDLITEETHTCYLGDRTRRHEWGYGCGTCPACELRSSGWQRWKAGA

SEQ ID NO: 38822 - protein, 239 aa, Hyphomonas polymorpha
  misc_feature (1)..(239): tr|A0A062VCI6|A0A062VCI6_9RHOB 7-cyano-7-deazaguanine s ynthase OS=Hyphomonas polymorpha PS728 OX=1280954 GN=qu eC PE=3 SV=1
MTQPFSSALVLFSGGQDSATCLAWALTRFDRVETIGFDYGQRHAVELACRPKFLDAIRRNFPAWGEKLDGDHIIDASVLKALGATAMTHDVEITLTAAGLPNTFVPGRNLLFFTLAGALAVRRGHGVLVGGMCETDYSGYPDCRADTLKAQEETLRLGLDADIRIDTPLMYLDKAATWQLAQDLGGDALVDLIAEETHTCYLGQRGARHAWGYGCGACPACELRANGWQRWQAGKGSAA

SEQ ID NO: 38823 - protein, 235 aa, Hyphomonas sp.
  misc_feature (1)..(235): tr|A0A1Z9Y0E2|A0A1Z9Y0E2_9RHOB 7-cyano-7-deazaguanine s ynthase OS=Hyphomonas sp. TMED17 OX=1986605 GN=queC PE= 3 SV=1
MAGDSALVLVSGGQDSTVCLAFALERYAHVETVGFDYGQRHDVEISCRQAVLQAFRDHFPEWSAKLGDDHMCDLRGFGAVSNTSLTRETEIEMDQTGLPSTFVPGRNLVFFNYAAAVSWRRGINRLIGGMCETDYSGYPDCRRATLDAQELALQKGTERPFKIETPLMDLDKAQTWMLAKELGGDKLVEIIVQHTHTCYLGARETLHDWGYGCGRCPACELRAAGFEAWKSECGA

SEQ ID NO: 38824 - protein, 239 aa, Hyphomonas sp.
  misc_feature (1)..(239): tr|A0A258BZP4|A0A258BZP4_9RHOB 7-cyano-7-deazaguanine s ynthase OS=Hyphomonas sp. 32-62-5 OX=1970391 GN=queC PE =3 SV=1
MKHAPSSALVLFSGGQDSATCLAWALDRFDRVETIGFDYGQRHAIELACRPKFLAAIRAAFPAWGAKLGDDHMIDASVLKALGATAMTHDVAITMTAAGLPNTFVPGRNLLFFTLAGALAVRRGAGHLVGGMCETDYSGYPDCRADTMKAQEETLRLGLDADVRIETPLMYLDKAATWQLAQDLGGDTLVDLIAEETHTCYLGERGTRHAWGYGCGACPACELRANGWQRWQAGKGTAP

SEQ ID NO: 38825 - protein, 225 aa, Hypnocyclicus thermotrophus
  misc_feature (1)..(225): tr|A0A4R7KZI6|A0A4R7KZI6_9FUSO 7-cyano-7-deazaguanine s ynthase OS=Hypnocyclicus thermotrophus OX=1627895 GN=qu eC PE=3 SV=1
MKERINKNRAVVVFSGGQDSTTLLFKAKKEYKEVIALSFDYGQKHKLELECAQEITKKHGIEHHILDMSLLNQLAPNALTRVDVNVPKGEVEGIPNTFVDGRNMIFLTFAAVFAKQRDINIIITGVSQSDFSGYPDCRDHFIKSLNTTLNLAMDYQFVVETPLMWLDKAETWNMAYELGVLDIIKNDTLTCYNGIKGDGCGECPSCVLRKKGYEEFEQKFLKKNF

SEQ ID NO: 38826 - protein, 1381 aa, Hyunsoonleella pacifica
  misc_feature (1)..(1381): tr|A0A4V2JBD5|A0A4V2JBD5_9FLAO Amino acid adenylation d omain-containing protein OS=Hyunsoonleella pacifica OX= 1080224 GN=EYD46_01945 PE=4 SV=1
MDKSKIELLPLTKSQTSLWLTDKLHLNLPINNDPYAFYIKGEIDIKIFKLAFKELLGNTDVLRAIILEVDGKPYQKIAACLEEDLLYLDFEDKKLAEVEEWLRTKSKLVLDTSKKLFDSALIRLKNDDFIWYLNLHHLITDATSRTILFNRMSYIYEELLNFGTSSFTEEYKYNMFIDFEEKSRDQHKEKTKYWENKIKSFTDPPSFYGLKKVGNVTEKSHRIEVQLSKDDIDKLTKFSENPEIKIWNKDVTLLTVFASVLFSYLYRVSGQRKLIIGIPIHNRINKAFQETVGLFIEIFPLTVEIDENETFISLLKKIQLDTIHCFKNGLIGTSSANLSRSYNVILNYINSSYNNFANHETITRWIHPECSDPAHKLRFHIHDFNNTNQLNLIFDFNEDILVASTPETFLEHFENVFNAFLADINQPIDKPSIISKVEKSVFTETLIDTSPELQTVIDAFEDNVKTTPNAIALQFKSETLTYKALNKKANQLANYLIVKGAKVNDNVVVHSYRNSNYIISVLAILKIGGTFIPIASDQTKNRIDFILENCDCAFVLTQNELLKNFSEDIRIPIINLQEIGDDLANQSEENIDIIKNESTLAYVLYTSGSTGLPKGVLISNRALSNYIFWAKEHYGFSSKSVFALFTSIGFDLTITSTFLPLVSGGRMIVYEEDESGIDISVLNVIKDNLADTIKLTPSHLSLFQNKNLQDSNIKTMIVGGEDFKVNMGKAMKLTFGNDVKIFNEYGPTEATVGCIVSEFNPEKHKQSSIPIGLPITNMNAYILDEFNNLVPKGVVGELYLSGSSLASGYLGLDDLTTSKFIDNPFVQSTKMYKTGDLARINSKGEYEYLGRVDEQVKLRGYRIELPDIESNLLDFEGIDNCAVVLTENTKKQINDDEVFNCIECGLPSNYPQTDFDAHGVCNLCNAFKGYKNKAQKYFKTESELHSILTSRKGKSPSYDCLTLLSGGKDSTYILAQLVSMGLKVLAFTLDNGYISEQAKDNINRIVSKLGVDHIYGQTEHMNAIFVDSLYRHKNVCNGCFKTIYTLSTKIAMERQIPFIVTGLSRGQFFETRLTEELFWDEDLDVTKIDDTILEVRKLYHREEDAIKELLDVSIFEGDDIFETVQFVDFYRYSDVSLENMIKYLEEKVGWIRPTDTGRSTNCLINQVGIYVHKRQRGYSNYSFPYSWDVRLGHKTRDESLEEINEYIDEVEVKRIMAEIGYEEPIDIHNNQKLVAYYTGDKALMSQELKMYLSNKIPDYMIPSNFKYLEEIPLTKNGKIDKKTLRSLTTDQLELEVSYVAPRNEIEQLVESIWKEVLRLERIGVHDDFIALGGHSLAAIRVTSRINEELELNVPLNKIFNLPTIERYSEYIEDIITKLLNE

SEQ ID NO: 38827 - protein, 240 aa, Ideonella sp.
  misc_feature (1)..(240): tr|A0A437RRX9|A0A437RRX9_9BURK 7-cyano-7-deazaguanine s ynthase OS=Ideonella sp. KYPY4 OX=1862385 GN=queC PE=3 SV=1
MSDARPVHTQALVLFSGGQDSATCLAWALSRYERVETIGFDYGQRHKVELTCRGRFLEALKQRYPQWARKIGDDHLLDLALLGQISDTALTQDKAIAFASTGLPNTFVPARNLVFLTLAAAIAYRRGLTVLVGGMCETDYSGYPDCRDDTLKALQVALSLGMDSRFLLDTPLMWLSKAQTWHLAESLGGRPLVELIREETHTCYAGDRQTRHAWGYGCGSCPACELRRKGHDTYLEAPAP

SEQ ID NO: 38828 - protein, 239 aa, Ideonella sp.
  misc_feature (1)..(239): tr|A0A523Q5T7|A0A523Q5T7_9BURK 7-cyano-7-deazaguanine s ynthase OS=Ideonella sp. MAG2 OX=2083017 GN=queC PE=3 S V=1
MAAQNRTALVLFSGGQDSTVCLAWALQRFARVETLGFDYGQRHRIELDCRLTVRQELARHFPQWAAKLGEDHVLDLSLLGQISACALTEHRAIELEANGLPNTFVPGRNLLFLSFAATLAYRRGASVLVGGMCETDYSGYPDCRDNTLKALQVALSLGLDTPMTLETPLMFLTKGQTWALAHELGGEALNALIAEHTHTCYLGERGTRHPWGYGCGECPACQLRAAGHAAWLQHDEAGL

SEQ ID NO: 38829 - protein, 218 aa, Idiomarina abyssalis
  misc_feature (1)..(218): tr|A0A370QDA9|A0A370QDA9_9GAMM 7-cyano-7-deazaguanine s ynthase OS=Idiomarina abyssalis OX=86102 GN=queC PE=3 S V=1
MSQKVVVIYSGGMDSFTVLHKALAEGNEVLALSFNYGQRHVKELEVAAKVCKQHGIPHKVVDITAINSLLSGSSLTDDIDIPEGHYEEESMKSTVVPNRNMILLSLAIGYAVSEEASAVYYGAHSGDHAIYPDCRPEFVRQMDVVSKMANYEPVAVHAPYLDVDKNAILADGIKMDLDYSQTWTCYNGRDKACGKCGACQERLEAFAANGIEDPLSYE

SEQ ID NO: 38830 - protein, 241 aa, Idiomarina aestuarii
  misc_feature (1)..(241): tr|A0A2T4D161|A0A2T4D161_9GAMM 7-cyano-7-deazaguanine s ynthase OS=Idiomarina aestuarii OX=624146 GN=queC PE=3 SV=1
MKTIVVCSGGLDSVTLAHKVAAEHNLHYLISFNYGQRHKKELDYAARAARDLGVKHHIVDLTPVGALLTGSSLTSDDIAVPDGHYAEETMRITVVPNRNAIMLAVAFGAAASAGADAVAAAVHGGDHFIYPDCRPDFIKSFQTMQNHALEGMRDVSLYTPFLHGSKADIAAEAGRLGLPIDRTWSCYKGGETHCGRCGTCVERREALELARVPDPTVYVDRDYWKQARAAHMARSLGASGN

SEQ ID NO: 38831 - protein, 222 aa, Idiomarina aestuarii
  misc_feature (1)..(222): tr|A0A2T4CXK3|A0A2T4CXK3_9GAMM 7-cyano-7-deazaguanine s ynthase OS=Idiomarina aestuarii OX=624146 GN=queC PE=3 SV=1
MTKRAVILLSGGLDSVTALAIAKAEGYECFTISFDYGQRHKTELFAAENLAKKSGVASHKVIQIDLRAIGGSALTDDIDVPETEQQGIPITYVPARNTVFLSIALGWAEVLNAEAIFVGVNAVDYSGYPDCRPEFIDAFEKLANLATKSAVEGSAIYIKAPLMHLSKSEIVKLGTELGIDYSETVSCYQADAQGRACGQCDSCRFRRQGFIDAGLADPTRYQ

SEQ ID NO: 38832 - protein, 218 aa, Idiomarina aquatica
  misc_feature (1)..(218): tr|A0A4R6PMI5|A0A4R6PMI5_9GAMM 7-cyano-7-deazaguanine s ynthase OS=Idiomarina aquatica OX=1327752 GN=queC PE=3 SV=1
MSQKVVVIYSGGMDSFTVLNKALQQGLDVSALSFNYGQRHVKELDVAANVCKSLEIPHKIVDITAINSLLAGSSLTDDIDIPEGHYEQESMKSTVVPNRNMILLSLAIGYAVSENAQAVYYGAHSGDHAIYPDCRPEFVRQMNVVSKLANYDPVEVVAPYLDVDKNAILADGLKMGLDYSNTWTCYNGRDKACGKCGACIERLEAFAANEQSDPLSYE

SEQ ID NO: 38833 - protein, 206 aa, Idiomarina aquatica
  misc_feature (1)..(206): tr|A0A4R6P7U7|A0A4R6P7U7_9GAMM 7-cyano-7-deazaguanine s ynthase OS=Idiomarina aquatica OX=1327752 GN=DEU29_1117 9 PE=3 SV=1
MKQAMLIASGGLDSTTVAYELVNQGVVVKPVFFDYGQHCVETEWKRLNEVLPNGVEPPERIDISGIFKGSSSRLVLEANLWKDPVKDDDLYIPYRTMLFFAAAAARAQTLGIFDVFTGFINSNHAKEIDCSASFLNGLDELAENVGVVRFHSPFRYSSKRDVLEKALELKVPVGRTFSCQAASLFPCGACPNCVERLNALHELNLI

SEQ ID NO: 38834 - protein, 219 aa, Idiomarina aquimaris
  misc_feature (1)..(219): tr|A0A432XAX5|A0A432XAX5_9GAMM 7-cyano-7-deazaguanine s ynthase OS=Idiomarina aquimaris OX=641841 GN=queC PE=3 SV=1
MAKVVVIYSGGMDSFTVLHRALRDGHEVYGLSFNYGQRHVKELEVARKVTNALNVPHKVVDITAINELIANSSLTSNTTDIPEGHYEEASMQSTVVPNRNMILLSLAIGYAVSIGAEAVYYGAHSGDHAIYPDCRPEFVQRMNEVSKIANYEPVEIAVPYLANDKAEILRDGLAMGLDYSNTWTCYNGREKACGKCGACVERLEAFAANNATDPLSYES

SEQ ID NO: 38835 - protein, 221 aa, Idiomarina atlantica
  misc_feature (1)..(221): tr|A0A094J5P7|A0A094J5P7_9GAMM 7-cyano-7-deazaguanine s ynthase OS=Idiomarina atlantica OX=1517416 GN=queC PE=3 SV=1
MAKVVVIYSGGMDSFTVLHRAIKDGHEVYALSFNYGQRHVKELDVARQVTNQLGVPHKIVDISAINELIANSSLTSDAAAIPEGHYEEASMQSTVVPNRNMILLSLAIGYAVSIGAEAVYYGAHSGDHAIYPDCRPEFVQKMNDVSRIANYEPIEIAVPYLHCNKGEILADGLAMGLDYGHTWTCYNGRERACGKCGACVERLEAFASNNCVDPLAYESTT

SEQ ID NO: 38836 - protein, 72 aa, Idiomarina baltica
  misc_feature (1)..(72): tr|A0A348WLR8|A0A348WLR8_9GAMM 7-cyano-7-deazaguanine s ynthase (Fragment) OS=Idiomarina baltica OX=190892 GN=D CR58_01700 PE=3 SV=1
NRNMILLSLAIGYAVSEGASAVYYGAHSGDHAIYPDCRPEFVRQMNVVSQLANYEPVEVVAPYLDVDKNAIL

SEQ ID NO: 38837 - protein, 103 aa, Idiomarina baltica
  misc_feature (1)..(103): tr|A0A348WLR9|A0A348WLR9_9GAMM 7-cyano-7-deazaguanine s ynthase (Fragment) OS=Idiomarina baltica OX=190892 GN=D CR58_01705 PE=3 SV=1
MSQKVVVIYSGGMDSFTVLNRALEQGHEVSALSFNYGQRHVRELDVAAKVCEALNIPHKIVDITAINTLLAGSSLTDDIEIPEGHYEESSMKSTVVPNRNMIL

SEQ ID NO: 38838 - protein, 217 aa, Idiomarina donghaiensis
  misc_feature (1)..(217): tr|A0A432XBC2|A0A432XBC2_9GAMM 7-cyano-7-deazaguanine s ynthase OS=Idiomarina donghaiensis OX=519452 GN=queC PE =3 SV=1
MAKVVVIYSGGMDSFTVLNHAIHAGHDVYALSFNYGQRHVRELDAAAKICDSLKLSHKIVDITAMNSLMAGSSLTSDIDIPEGHYEAESMQSTVVPNRNMILLSLAIGYAVSIDAEAVYYGAHSGDHAIYPDCRPEFVEKMNAVSLIANYQPVRIEVPFLHNNKAEILAAGLAMGLDYSQTWTCYNGRDKACGKCGACIERLEAFAANQQTDPLPYE

SEQ ID NO: 38839 - protein, 219 aa, Idiomarina fontislapidosi
  misc_feature (1)..(219): tr|A0A432YBA1|A0A432YBA1_9GAMM 7-cyano-7-deazaguanine s ynthase OS=Idiomarina fontislapidosi OX=263723 GN=queC PE=3 SV=1
MSQKVVVIYSGGMDSFTVLNKALQQGHEVSALSFNYGQRHVRELDVAAKVCKDLGIPHKVVDITAINGLLAGSSLTDDIDIPEGHYEESSMKSTVVPNRNMILLSLAIGYAVSEGASAVYYGAHSGDHAIYPDCRPEFVRQMNVVSQLANYEPIEVVAPYLDVDKNAILADGLRMALNYADTWTCYNGRDKACGKCGACVERLEAFAANGVKDPLPYEA

SEQ ID NO: 38840 - protein, 217 aa, Idiomarina halophila
  misc_feature (1)..(217): tr|A0A432XRK6|A0A432XRK6_9GAMM 7-cyano-7-deazaguanine s ynthase OS=Idiomarina halophila OX=1449799 GN=queC PE=3 SV=1
MAKVVVIYSGGMDSFTVLNRAIRDGHEVHALSFNYGQRHVKELDVAAKVTSELGVSHKIVDIRAINELLASSLTSADAAIPEGHYQEDSMKSTVVPNRNMILLSLAIGYAVSLEANAVYYGAHSGDHAIYPDCRPEFVKRMNDVSLIANYEPVAIEVPYLDNDKAQILADGLAMGLDYSQTWTCYNGRHLACGKCGACVERLEAFAANQTRDPLPYE

SEQ ID NO: 38841 - protein, 218 aa, Idiomarina homiensis
  misc_feature (1)..(218): tr|A0A432XSU3|A0A432XSU3_9GAMM 7-cyano-7-deazaguanine s ynthase OS=Idiomarina homiensis OX=364198 GN=queC PE=3 SV=1
MAKVVVIYSGGMDSFTVLHRAIRDGHDVYALSFDYGQRHVKELTVAAEVTRGLNIPHKIVDITAINELISNSSLTSTSTAIPEGHYEEASMQSTVVPNRNMILLSLAIGYAVSIGAEAVYYGAHSGDHAIYPDCRPEFVQRMNDVSRIANYEPIEIAVPYLTNDKAEILRDGLAMGLDYKNTWTCYNGRDKACGKCGACVERLEAFAANNTVDPLAYE

SEQ ID NO: 38842 - protein, 221 aa, Idiomarina indica
  misc_feature (1)..(221): tr|A0A1G6E1H7|A0A1G6E1H7_9GAMM 7-cyano-7-deazaguanine s ynthase OS=Idiomarina indica OX=1159017 GN=queC PE=3 SV =1
MAKVVVIYSGGMDSFTVLHHALQQGHEIFAISFNYGQRHVRELDAAAQVCQQLNIPHKVVDITAINSLLAGSSLTSDIAIPEGEYAEDNMRSTVVPNRNMILLSLAIGYAVSIEAEAVYYGAHSGDHDIYPDCRPEFVEKMNAVSLIANYEPIRIEVPYLHSDKAEILAAGLAMDLDYSQTWTCYNGREKACGKCSACSERLAAFAANQVVDPLAYEEESA

SEQ ID NO: 38843 - protein, 218 aa, Idiomarina insulisalsae
  misc_feature (1)..(218): tr|A0A432Y8M4|A0A432Y8M4_9GAMM 7-cyano-7-deazaguanine s ynthase OS=Idiomarina insulisalsae OX=575789 GN=queC PE =3 SV=1
MAKVVVIYSGGMDSFTVLHRALRDGHEVYALSFNYGQRHVKELEVAHQVTTQLGLPHKIVDITAINELIANSSLTSSDVDIPEGHYEEVSMKSTVVPNRNMILLSLAIGYAVSIEAQAVYYGAHSGDHAIYPDCRPEFVKRMNDVSQIANYQPIEIAVPYLDCDKGEILKDGLAMGLDYRQTWTCYNGREKACGKCGACVERLEAFAANQVTDPLPYE

SEQ ID NO: 38844 - protein, 218 aa, Idiomarina loihiensis
  misc_feature (1)..(218): sp|Q5QUZ6|QUEC_IDILO 7-cyano-7-deazaguanine synthase OS =Idiomarina loihiensis (strain ATCC BAA-735 / DSM 15497 / L2-TR) OX=283942 GN=queC PE=3 SV=1
MSQKVVVIYSGGMDSFTVLHRALAEGNEVLALSFNYGQRHVKELEVAGNVCKQHGIPHKVVDITAINSLLSGSSLTDDIDIPEGHYEEESMKSTVVPNRNMILLSLAIGYAVSEEASAVYYGAHSGDHAIYPDCRPEFVRQMDVVSKMANYEPVAVHAPYLDVDKNAILADGIKMGLDYSQTWTCYNGRDKACGKCGACQERLEAFAANGIEDPIAYE

SEQ ID NO: 38845 - protein, 185 aa, Idiomarina loihiensis
  misc_feature (1)..(185): tr|A0A349C4J0|A0A349C4J0_9GAMM 7-cyano-7-deazaguanine s ynthase (Fragment) OS=Idiomarina loihiensis OX=135577 G N=queC PE=3 SV=1
FNYGQRHVKELEVAANVCKQHGIPHKVVDITAINSLLSGSSLTDDIDIPEGHYEEESMKSTVVPNRNMILLSLAIGYAVSEEASAVYYGAHSGDHAIYPDCRPEFVRQMDVVSKMANYEPVAVHAPYLDVDKNAILADGIKMGLDYSQTWTCYNGRDKACGKCGACQERLEAFAANGIEDPIAYE

SEQ ID NO: 38846 - protein, 218 aa, Idiomarina marina
  misc_feature (1)..(218): tr|A0A432YAN7|A0A432YAN7_9GAMM 7-cyano-7-deazaguanine s ynthase OS=Idiomarina marina OX=502366 GN=queC PE=3 SV= 1
MAKVVVIYSGGMDSFTVLHHAVRHGHEVYALSFNYGQRHVRELDAAARVCQQLGIPHKVVDITAINSLLAGSSLTSDIEIPEGHYAEASMQSTVVPNRNMILLSLAIGYAVSLGAEAVYYGAHSGDHAIYPDCRPEFVEKMNAVSLIANYEPVRIEVPYLRNNKAEILADGLRMNLDYSQTWTCYNGREKACGKCGACVERLEAFATNQVTDPLQYES

SEQ ID NO: 38847 - protein, 218 aa, Idiomarina maritima
  misc_feature (1)..(218): tr|A0A1I6I240|A0A1I6I240_9GAMM 7-cyano-7-deazaguanine s ynthase OS=Idiomarina maritima OX=519453 GN=queC PE=3 S V=1
MAKVVVIYSGGMDSFTVLHHAVQQGHEVYALSFNYGQRHVRELDAAAAVCLQLDIPHKVVDITAINSLLAGSSLTSDIDIPEGHYAEASMQSTVVPNRNMILLSLAIGYAVSIGAEAVYYGAHSGDHAIYPDCRPEFVEKMNAVSLIANYEPIRIEVPYLRNDKAEILADGLRMNLDYSQTWTCYNGRDKACGKCGACVERLEAFAANQVTDPLPYES

SEQ ID NO: 38848 - protein, 217 aa, Idiomarina maritima
  misc_feature (1)..(217): tr|A0A317Q6X0|A0A317Q6X0_9GAMM 7-cyano-7-deazaguanine s ynthase OS=Idiomarina maritima OX=519453 GN=queC PE=3 S V=1
MAKVVVIYSGGMDSFTVLHHALAHGHEVYALSFNYGQRHVKELEVAAQVCQQLNVNHKVVDITAINQLLAGSSLTSDIAIPEGHYEAQSMKSTVVPNRNMILLSLAIGYAVSLEAEAVYYGAHSGDHFIYPDCRPEFVEKMNEVSLIANYEPVRIEVPYLHQDKAAILADGISMSLDYSQTWTCYNGRDKACGKCGACVERLEAFAANHQVDPLPYE

SEQ ID NO: 38849 - protein, 219 aa, Idiomarina piscisalsi
  misc_feature (1)..(219): tr|A0A432YVM6|A0A432YVM6_9GAMM 7-cyano-7-deazaguanine s ynthase OS=Idiomarina piscisalsi OX=1096243 GN=queC PE= 3 SV=1
MSQKVVVIYSGGMDSFTVLHKALQEGNEVLALSFNYGQRHVKELEVAANVCKQHGIPHKVVDITTINQLLSGSSLTDDIDIPEGHYEEESMKSTVVPNRNMILLSLAIGYAVSQKASAVYYGAHSGDHAIYPDCRPEFVRQMDVVSKMANYEPVAVHAPYLDVDKNAILADGLKMGLDYSQTWTCYNGRDKACGKCGACVERLEAFAANGVEDPIPYEA

SEQ ID NO: 38850 - protein, 218 aa, Idiomarina planktonica
  misc_feature (1)..(218): tr|A0A1Y6EN10|A0A1Y6EN10_9GAMM 7-cyano-7-deazaguanine s ynthase OS=Idiomarina planktonica OX=1323738 GN=queC PE =3 SV=1
MAQKVVVIYSGGMDSFTVLHRALADGCEVYALSFDYGQRHSKELKYAANVCEKQGIPHKIVDITAINQLLAGSSLTDNIDIPEGHYEEDSMKSTVVPNRNMILLSLAIGYAVSLKADAVYYGAHSGDHAIYPDCRPEFVLKMNEVSLLANYELVAVHSPYLEQDKAAILADGIAMGLDYANTWTCYNGREKACGKCGACVERMEAFAANQQTDPIPYE

SEQ ID NO: 38851 - protein, 218 aa, Idiomarina ramblicola
  misc_feature (1)..(218): tr|A0A432YZ19|A0A432YZ19_9GAMM 7-cyano-7-deazaguanine s ynthase OS=Idiomarina ramblicola OX=263724 GN=queC PE=3 SV=1
MSQKVVVIYSGGMDSFTVLHKALAEGNEVLALSFNYGQRHVKELEVAANVCKQHGIPHKLVDITAINSLLSGSSLTDNIDIPEGHYEEESMKSTVVPNRNMILLSLAIGYAVSENASAVYYGAHSGDHAIYPDCRPEFVRQMDVVSKMANYEPVAVHAPYLDVDKNAILADGIKMGLDYSQTWTCYNGRHEACGKCGACQERLEAFAANGIEDPLSYE

SEQ ID NO: 38852 - protein, 217 aa, Idiomarina salinarum
  misc_feature (1)..(217): tr|A0A094IWA3|A0A094IWA3_9GAMM 7-cyano-7-deazaguanine s ynthase OS=Idiomarina salinarum OX=435908 GN=queC PE=3 SV=1
MAKVVVIYSGGMDSFTVLHHALQQGHEVYALSFNYGQRHVRELDSAAAVCKQANIPHKIVDITAINQLLAGSSLTDDIDIPEGHYESVSMQSTVVPNRNMILLSLAIGYAVSIEAEAVCYGAHSGDHAIYPDCRPEFVLKMNDVSQIANYQPVTIDVPFLQNNKAEILAAGLAMGLDYGQTWTCYNGRELACGKCGACIERLEAFAANNQTDPLAYE

SEQ ID NO: 38853 - protein, 223 aa, Idiomarina sediminum
  misc_feature (1)..(223): tr|A0A432YZM5|A0A432YZM5_9GAMM 7-cyano-7-deazaguanine s ynthase OS=Idiomarina sediminum OX=431675 GN=queC PE=3 SV=1
MAKVVVIYSGGMDSFTVLNRALKDGHEVYALSFNYGQRHVKELEVAAEVTQRLNIPHKIVDITAINQLLAGSSLTSDAIAIPEGDYEEESMKSTVVPNRNMILLSLAIGYAVSLEAQAVYYGAHSGDHAIYPDCRPEFVKRMQEVSAIANYEPIAIEVPYLNADKGEILRDGLAMGLDYKQTWTCYNGREKACGKCGACVERLDAFAANQVTDPLEYEATSAS

SEQ ID NO: 38854 - protein, 218 aa, Idiomarina seosinensis
  misc_feature (1)..(218): tr|A0A432ZH00|A0A432ZH00_9GAMM 7-cyano-7-deazaguanine s ynthase OS=Idiomarina seosinensis OX=281739 GN=queC PE= 3 SV=1
MSQKVVVIYSGGMDSFTVLNKALQQGHEVSALSFNYGQRHVKELDVAAKVCAELGVPHKVVDITAINTLLAGSSLTDDIEIPEGHYQEQSMQSTVVPNRNMILLSLAIGYAVSEQASAVYYGAHSGDHAIYPDCRPEFVRQMNVVSQLANYEPVAVVAPYLEDDKNEILADGIRMGLDYEKTWTCYNGRDKACGKCGACIERLEAFAANGLNDPLPYE

SEQ ID NO: 38855 - protein, 218 aa, Idiomarina sp.
  misc_feature (1)..(218): tr|A0A2D9G214|A0A2D9G214_9GAMM 7-cyano-7-deazaguanine s ynthase OS=Idiomarina sp. OX=1874361 GN=queC PE=3 SV=1
MSQKVVVIYSGGMDSFTVLHKALQEGNEVLALSFNYGQRHVKELEVAANVCKQHGIPHKVVDITAINSLLSGSSLTDDIDIPEGHYEEESMKSTVVPNRNMILLSLAIGYAVSENASAVYYGAHSGDHAIYPDCRPEFVRQMDVVSKMANYDPVAVHAPYLDVDKNAILADGLKMGLDYSQTWTCYNGRDKACGKCGACQERLEAFAANGMEDPIPYE

SEQ ID NO: 38856 - protein, 219 aa, Idiomarina sp.
  misc_feature (1)..(219): tr|A0A139C459|A0A139C459_9GAMM 7-cyano-7-deazaguanine s ynthase OS=Idiomarina sp. T82-3 OX=1794809 GN=queC PE=3 SV=1
MSQKVVVIYSGGMDSFTVLNRALEQGHEVSALSFNYGQRHVRELDVAAKVCEALNIPHKIVDITAINTLLAGSSLTDDIEIPEGHYEESSMKSTVVPNRNMILLSLAIGYAVSEGASAVYYGAHSGDHAIYPDCRPEFVRQMNVVSQLANYEPVEVVAPYLDVDKNAILADGLRMELNYADTWTCYNGRDKACGKCGACVERLEAFAANGVTDPLPYEA

SEQ ID NO: 38857 - protein, 217 aa, Idiomarina tainanensis; identical to SEQ ID NO: 38848
  misc_feature (1)..(217): tr|A0A368UNZ6|A0A368UNZ6_9GAMM 7-cyano-7-deazaguanine s ynthase OS=Idiomarina tainanensis OX=502365 GN=queC PE= 3 SV=1

SEQ ID NO: 38858 - protein, 218 aa, Idiomarina taiwanensis
  misc_feature (1)..(218): tr|A0A432ZC40|A0A432ZC40_9GAMM 7-cyano-7-deazaguanine s ynthase OS=Idiomarina taiwanensis OX=337250 GN=queC PE= 3 SV=1
MMAKVVVIYSGGMDSFTVLHRAIQDGHDVHAISFNYGQRHVKELDYARSVCREHGIPHKVVDISAINELLAGSSLTDDIEIPEGHYEEESMKSTVVPNRNMILLSLAIGYAVSLEASAVYYGAHSGDHAIYPDCRPEFVQKMQAVSAIANYEPISIEVPFLHDDKAQILAAGLAMGLDYSQTWTCYKGLEQACGHCGACVERLEAFAANNTQDPLSYL

SEQ ID NO: 38859 - protein, 198 aa, Idiomarina tyrosinivorans
  misc_feature (1)..(198): tr|A0A432ZSR4|A0A432ZSR4_9GAMM 7-cyano-7-deazaguanine s ynthase OS=Idiomarina tyrosinivorans OX=1445662 GN=CWI8 4_02220 PE=3 SV=1
MTNSVLLLSGGLDSIALAYWLRPSRCLFVNYGQLPASAEHAAAGQICNSLNIPLEELTLPLENLGAGDMSGNSSSEHSPHSEFWPFRNQILITLGAMMALRYELDSVLIGTVSTDSKHKDGTVDFRDACNKLLGIQEGSVSVEAPAASMTTEQLIHESGVPVSLMGWAHSCHTSNVACGECPGCYKQSELMGSMGINR

SEQ ID NO: 38860 - protein, 220 aa, Idiomarina tyrosinivorans
  misc_feature (1)..(220): tr|A0A432ZRN0|A0A432ZRN0_9GAMM 7-cyano-7-deazaguanine s ynthase OS=Idiomarina tyrosinivorans OX=1445662 GN=queC PE=3 SV=1
MAQKVVVIYSGGMDSFTVLHHALQQGKSVYALSFDYGQRHVKELDVARSVCENLEIPHKIVDITSINQLLKGSSLTDDMAIPEGHYEEASMQSTVVPNRNMILLSLAIGYAASIEAEAVYYGAHSGDHAIYPDCRPEFVRQMDVASRLANYQPIAVEAPFLTQSKDDILAAGLAMGLDYSATWTCYNGREKACGRCGACNERLEAFRNNGATDPLPYEDA

SEQ ID NO: 38861 - protein, 217 aa, Idiomarina woesei
  misc_feature (1)..(217): tr|A0A0K6HC70|A0A0K6HC70_9GAMM 7-cyano-7-deazaguanine s ynthase OS=Idiomarina woesei OX=1381080 GN=queC PE=3 SV =1
MAKVVVIYSGGMDSFTVLNHAIHAGHDVFALSFNYGQRHVRELDAAAEVCQSLKVPHKIVDITAMNSLMAGSSLTSDIDIPEGHYEEKSMQSTVVPNRNMILLSLAIGYAVSIGAEAVYYGAHSGDHAIYPDCRPEFVKKMNDVSLIANYEPVRIEVPFLHNDKTEILAAGLAMGLDYSHTWTCYNGRDKACGKCGACVERLEAFAANQQTDPLPYE

SEQ ID NO: 38862 - protein, 220 aa, Idiomarina xiamenensis
  misc_feature (1)..(220): tr|K2KYK2|K2KYK2_9GAMM 7-cyano-7-deazaguanine synthase OS=Idiomarina xiamenensis 10-D-4 OX=740709 GN=queC PE=3 SV=1
MTKSVVVIYSGGMDSFTVLHRAIADGFDVYALSFDYGQRHKKELDVAAKVCKSNGISHKIVDITAINSLVGGSALTDDIDVPEGHYQEQSMKSTVVPNRNMILLSLAIGYAVSVGAEAVYYGAHSGDHAIYPDCRPEFVEKMNDVSLIANYEAIRVHSPYLYQDKSDILADGLAMGLDYANTWTCYNGREQACGRCGACVERLEAFAAQGVSDPLSYAAT

SEQ ID NO: 38863 - protein, 219 aa, Idiomarina zobellii
  misc_feature (1)..(219): tr|A0A1G7LIA6|A0A1G7LIA6_9GAMM 7-cyano-7-deazaguanine s ynthase OS=Idiomarina zobellii OX=86103 GN=queC PE=3 SV =1
MSQKVVVIYSGGMDSFTVLHKALQEGNEVLALSFNYGQRHVKELEVASNVCKQHGIPHKVVDITAINQLLSGSSLTDDIEIPEGHYEEESMKSTVVPNRNMILLSLAIGYAVSQEASAVYYGAHSGDHAIYPDCRPEFVRQMDVVSKMANYEPVAVHAPYLDVDKNAILADGLKMGLDYSQTWTCYNGRDKACGKCGACVERLEAFAANGVEDPIPYEA

SEQ ID NO: 38864 - protein, 219 aa, Idiomarinaceae bacterium
  misc_feature (1)..(219): tr|A0A2D6I6V5|A0A2D6I6V5_9GAMM 7-cyano-7-deazaguanine s ynthase OS=Idiomarinaceae bacterium OX=1898113 GN=queC PE=3 SV=1
  misc_feature (71)..(71): Xaa can be any naturally occurring amino acid
  misc_feature (100)..(100): Xaa can be any naturally occurring amino acid
MSQKVVVIYSGGMDSFTVLNRALEQGHEVSALSFNYGQRHVRELDVAAKVCEALNIPHKIVDITAINTLLXGSSLTDDIEIPEGHYEESSMKSTVVPNRXMILLSLAIGYAVSEGASAVYYGAHSGDHAIYPDCRPEFVRQMNVVSQLANYEPVEVVAPYLDVDKNAILADGLRMDLNYADTWTCYNGRDKACGKCGACVERLEAFAANGVTDPLPYEA

SEQ ID NO: 38865 - protein, 223 aa, Idiomarinaceae bacterium
  misc_feature (1)..(223): tr|A0A0P7XAL2|A0A0P7XAL2_9GAMM 7-cyano-7-deazaguanine s ynthase OS=Idiomarinaceae bacterium HL-53 OX=1298881 GN =queC PE=3 SV=1
MSQSDAKNALVVIYSGGMDSFTVLNKAVATGKAVYALSFNYGQRHKKELEYAVNVCKKLGISHKVVDISAINSLLAGSSLTDDIDVPDAEYAESNMKSTVVPNRNMILLSLAIGYAVSIQAQEVWYGAHSGDHAIYPDCRPEFVEAMNQVSLIANYEPIPVISPYLYQSKSEILADGIAMGLDYAQTWTCYNGRDKACGRCSACRERLQAFAENQLTDPLAYE

SEQ ID NO: 38866 - protein, 218 aa, Ignatzschineria cameli
  misc_feature (1)..(218): tr|A0A2U2ATW5|A0A2U2ATW5_9GAMM 7-cyano-7-deazaguanine s ynthase OS=Ignatzschineria cameli OX=2182793 GN=queC PE =3 SV=1
MNQNRAIVVFSGGQDSTTCLFWAKEQFEEVIALTFDYGQRHCNEVDHAKAIAEELDVELIVFELDLFSRLTKNALIDENLAIESHDGEPPSTFVPGRNHLFFSIAAMVAYQRMAQHIIVGVSETDFSGYPDCRDNFIKSLNVTLNLAMDASFELHAPLMWRDKAGVWALADQLGAFDYIQDRTLTCYNGIPASGCGECPACILRNNGLNQYLAQRKEK

SEQ ID NO: 38867 - protein, 218 aa, Ignatzschineria indica
  misc_feature (1)..(218): tr|A0A2U2ALP6|A0A2U2ALP6_9GAMM 7-cyano-7-deazaguanine s ynthase OS=Ignatzschineria indica OX=472583 GN=queC PE= 3 SV=1
MNQNRAIVVFSGGQDSTTCLFWAKERFEDVIALTFDYGQRHSNEVDHARAIAEELGVELIVFELDLFSRLTKNALTDESLTIESHDGEPPSTFVPGRNHLFFSIAAMVAYQRMAKHIVVGVSETDFSGYPDCRDNFIKSLNVTLNLAMDAAFELHTPLMWRDKAEVWALSDELGAFDYVRERTLTCYNGIPASGCGECPACILRNNGLNHYLAQRKEK

SEQ ID NO: 38868 - protein, 218 aa, Ignatzschineria sp.
  misc_feature (1)..(218): tr|A0A256CIW4|A0A256CIW4_9GAMM 7-cyano-7-deazaguanine s ynthase OS=Ignatzschineria sp. F8392 OX=1980117 GN=queC PE=3 SV=1
MNQNRAIVVFSGGQDSTTCLFWAKERFKDVIALTFDYGQRHSNEVDHAKAIAKELDVELIVFELDLFSRLTKNALTDENLAIESHDGEPPSTFVPGRNHLFFSIAAMVAYQRMAQHIIVGVSETDFSGYPDCRDNFIKSLNVTLNLAMDASFELHAPLMWRDKAAVWALADQLGAFDYIQDRTLTCYNGIPASGCGECPACILRNNGLNQYLAQCKEK

SEQ ID NO: 38869 - protein, 217 aa, Ignatzschineria ureiclastica
  misc_feature (1)..(217): tr|A0A2U2ACY4|A0A2U2ACY4_9GAMM 7-cyano-7-deazaguanine s ynthase OS=Ignatzschineria ureiclastica OX=472582 GN=qu eC PE=3 SV=1
MKQQRAIVVFSGGQDSTTCLFWAKERFQEVIALTFDYGQRHQQEVQHAKAIAKELGVEWLPFQLDLFSKLTQNALTSNQVNIEQKEGELPSTFVPGRNHLFFSIAAMVAYQREAQHIIVGVSQTDFSGYPDCRDNFVKSLNVTLNLAMEADFQIHTPLMWLDKKEVWALSDQLGAFDYIQQKTLTCYEGIPASGCGVCPACILRQKGLEAYLAEKGE

SEQ ID NO: 38870 - protein, 227 aa, Ignavibacteria bacterium
  misc_feature (1)..(227): tr|A0A2M7MLV8|A0A2M7MLV8_9BACT 7-cyano-7-deazaguanine s ynthase OS=Ignavibacteria bacterium CG_4_10_14_3_um_fil ter_37_18 OX=1974037 GN=queC PE=3 SV=1
MNKPLAVIAVSGGMDSCVTAAILNEKYELAFAHFNYGQRTETRELKAFNDVADFYNVQHRLLIDFSHFHKIGGSSLTDFHLAVEKADLENKEVPSSYVPFRNANILSACVSWAEVIKAEAVGIGAVYEDASGYPDCRPQFYSAFEKMVDEGTKPETKIKILTPIINLSKAEIVKKGTELKAPLHLTWSCYQSEDEACGVCDSCAFRLRGFQQAGVEDPIPYKVKPKY

SEQ ID NO: 38871 - protein, 579 aa, Ignavibacteria bacterium
  misc_feature (1)..(579): tr|A0A1G0VKD4|A0A1G0VKD4_9BACT Uncharacterized protein OS=Ignavibacteria bacterium RIFOXYB2_FULL_37_11 OX=1798 448 GN=A2299_00835 PE=4 SV=1
MSNFIEHVVWCNGVKVKKQKGDAKCLILDHRDGAKDKNVNLNLRSFVTDIYKLSNRGKDLLEIAGYVFAADRLSYRGHERDLEYHSWSRTFHFNIAVRDLNFWKKAEVQELLSEALCFMSGDHSYSFTFCKAEEDLPTNFFDNDSFKIDKPNNLKVALYSGGLDSLAGIIESLETTDAEVCMVSHQSGQPGVINTQQNLYEVLANIYPNRCKHYKFHCGFSHTKSIDETQRTRSFLYTATAFAIANTYEQDCIYVYENGITSINFADTQDLMNARASRTTHPKTIGLLEKLFTKIAEKPFKIQHPYLFKTKTEVVDILKKYNREFTLDVAVSCSSTRNHPSGFSHCGICSQCIDRRFAVYAAEVEKFDEGGLYHTDFVKNGIDEIPHIKALTDYIRLAQEFKDIDIDGFYLNRAREIVDVEEYIEGADDQERLMKIYELTQKHSKNIEHALNQMRRIFDSPLAHPNPNSIFNTIIAPRTYQNVKLVVEDDYLEGKEIPPKTMKKLATEACESLVRKELITDVLDETRKNRPISTLVVTELRRKGYKVTQRQANTINDYFRKAQIQIKKENNGGLKVVSE

SEQ ID NO: 38872 - protein, 234 aa, Ignavibacteriae bacterium
  misc_feature (1)..(234): tr|A0A3N5JWI1|A0A3N5JWI1_9BACT 7-cyano-7-deazaguanine s ynthase OS=Ignavibacteriae bacterium OX=2026749 GN=queC PE=3 SV=1
MSKPRAVVLVSGGMDSCVTAAIAHLQYNCAFLHVNYGQRTERRELKAFHALADYYGVEHRLIADLTHLKSIGGSSLTDISMKVATADPETLFHSKHNDIPTSYVPFRNANILSVAVSWAEVVGAEQIFIGAVEEDSSGYPDCRKEFYDAFNSVIRLGTKPETTISINTPVIQLKKSEIVQRGMELHAPFHLTWSCYTNEDRACGVCDSCALRLRAFQIAGIEDPIPYILKPDYR

SEQ ID NO: 38873 - protein, 228 aa, Ignavibacteriae bacterium
  misc_feature (1)..(228): tr|A0A2N1V6I7|A0A2N1V6I7_9BACT 7-cyano-7-deazaguanine s ynthase OS=Ignavibacteriae bacterium HGW-Ignavibacteria e-4 OX=2013811 GN=queC PE=3 SV=1
MSKLAVVLLSGGMDSAVTAAIAKESGYDIACLHLNYGQRTEKRELKQFDELCNHFGAVSSMVTDVRFLSQIGGSSLTDERIEITDANLDSNEIPSSYVPFRNANILAMATSWAEVIGATALYIGAVYEDSSGYPDTRRDFFDAFEKIIEKGTKPETNIKIITPIIDMGKDEIISKGLELGVPFDKTWSCYKNNEKACGKCDSCGLRLRAFEKLGISDPVEYEIRLSYK

SEQ ID NO: 38874 - protein, 229 aa, Ignavibacteriales bacterium
  misc_feature (1)..(229): tr|A0A2M7ZFC2|A0A2M7ZFC2_9BACT 7-cyano-7-deazaguanine s ynthase OS=Ignavibacteriales bacterium CG_4_9_14_3_um_f ilter_34_10 OX=1974044 GN=queC PE=3 SV=1
MKSKLAVVAASGGMDSCVTAAIANQKYELALAHFNYGQRTEKRELKAFNDIADFYNAKHRLVIDFSHFAKIGGSSLTDKSIEVTKADLSSKEVPNSYVPFRNANILSACVSWAEVIGAEAIFIGAVYEDASGYPDCRPDFYSAFEKMIDIGTKPETKIKIETPIINLSKAEIVKKGIELNAPLHLTWSCYQNEDEACGVCDSCAFRLRGFQQAEIEDPIPYKVKPKYNL

SEQ ID NO: 38875 - protein, 235 aa, Ignavibacteriales bacterium
  misc_feature (1)..(235): tr|A0A2M7I267|A0A2M7I267_9BACT 7-cyano-7-deazaguanine s ynthase OS=Ignavibacteriales bacterium CG12_big_fil_rev _8_21_14_0_65_30_8 OX=1974046 GN=queC PE=3 SV=1
MENKKTAVVALSGGMDSCVTAAIASQKFDLALIHINYGQRTQERELKAFHDIADFYGIEKKLVIDFTHFNKIGGSSLTDKKIKVAKADLKNKSSLSAERQIPSSYVPFRNANILSVCVSWAEVIGAEAVFIGAVYEDSSGYPDCRPVFFESFEKAVNNGTRPETKIKIITPIIHMSKKDIVLKGYELKAPLQLTWSCYQNENEACGVCDSCALRLRGFIQAGKEDPIKYKIRPEY

SEQ ID NO: 38876 - protein, 231 aa, Ignavibacterium album
  misc_feature (1)..(231): tr|I0AG95|I0AG95_IGNAJ 7-cyano-7-deazaguanine synthase OS=Ignavibacterium album (strain DSM 19864 / JCM 16511 / NBRC 101810 / Mat9-16) OX=945713 GN=queC PE=3 SV=1
METDKRKIAVVAVSGGMDSCVTAAIANRNYELAFAHINYGQRTEKRELKAFNDIADYFNVKYRLIIDYTHLSKIGGSSLTDFNIDVSKANLNNKEIPSSYVPFRNANILAACVSWAEVIGAEAVFIGAVYEDSSGYPDCRPEFFEAFEKMVELGTKPETHIKIKTPIINFSKEQIVKKGIELNAPLHLTWSCYQNEDEACGICDSCALRLRGFQKAGINDPIPYKTKPIYV

SEQ ID NO: 38877 - protein, 231 aa, Ilumatobacter fluminis
  misc_feature (1)..(231): tr|A0A4R7HVR2|A0A4R7HVR2_9ACTN 7-cyano-7-deazaguanine s ynthase OS=Ilumatobacter fluminis OX=467091 GN=queC PE= 3 SV=1
MKTKPRAVVLLSGGLDSTTVLAAAQNEGYECYALSFDYGQRHDVELEAARKVAEAMGAADHVIAKIDLRSFGGSALTADLEVPKGRAIDEMESGIPITYVPARNTIFLSFAMAWAETLEASDIFVGVNALDYSGYPDCRPEFIEAFERMANLATKGGVEGTTKTVIHAPLMELTKAGIIELGQTLGVDYGLTHSCYDPDDAGRPCGQCDSCLLRAKGFAEAGLSDPALNVA

SEQ ID NO: 38878 - protein, 222 aa, Ilyobacter polytropus
  misc_feature (1)..(222): tr|E3HCY0|E3HCY0_ILYPC 7-cyano-7-deazaguanine synthase OS=Ilyobacter polytropus (strain DSM 2926 / CuHBu1) OX= 572544 GN=queC PE=3 SV=1
MQNIIDKDRCVLVFSGGQDSSTLLFWAKKKFKEVIALSFNYGQKHDLELQCAKDICKKYDVEHHILDMGLLSQLAPNALTRTDIKVDKEAPEGGLPNTFVDGRNMIFLTFASIFAKQRNINHVITGVSQSDFSGYPDCRDIFIKSISTTLSLAMDYQFVIDTPLMWLDKAETWKMADDLGVLDIIKNETLTCYNGIIGNGCGECPACKLRKNGYVEFKRKFK

SEQ ID NO: 38879 - protein, 237 aa, Imhoffiella purpurea
  misc_feature (1)..(237): tr|W9V7B6|W9V7B6_9GAMM 7-cyano-7-deazaguanine synthase OS=Imhoffiella purpurea OX=1249627 GN=queC PE=3 SV=1
MKRAVVLLSGGLDSATALAIAKSEGYAPYALSFRYGQRHAVELRSAARIAESMGVAEHVIADIDLRRFGGSALTDDLEVPKGRETDAMASGIPVTYVPARNTVFLSFALAWAEVLKASDLFIGVNALDYSGYPDCRPEYIDAFERMANLATAAGVEGRQHFHVHAPLIELSKADIIRRGLRLGVDYGLTSSCYDPGEDGRPCGACDSCSLRAKGFAEARLRDPLLARFDISISEKDS

SEQ ID NO: 38880 - protein, 229 aa, Immundisolibacter cernigliae
  misc_feature (1)..(229): tr|A0A1B1YVD2|A0A1B1YVD2_9GAMM 7-cyano-7-deazaguanine s ynthase OS=Immundisolibacter cernigliae OX=1810504 GN=q ueC PE=3 SV=1
MNESARGPAVVLLSGGLDSATVLAMARADGYLCHALSIDYGQRHGAELAAAARVAAAGGAASHRTVSVNLDAIGGSALTDVSIDVPSSPSAGIPVTYVPARNTVFLAIALGYAEVLAASAIFVGVNAVDYSGYPDCRPAFIDAFQALADVATKAGVEGQGPRIAAPLLRLSKADIVRRGQELGVDYGLTVSCYNADPQGRACGQCDACRLRAEGFRVAGVADPTVYFPA

SEQ ID NO: 38881 - protein, 254 aa, Inhella sp.
  misc_feature (1)..(254): tr|A0A3S2VFW0|A0A3S2VFW0_9BURK 7-cyano-7-deazaguanine s ynthase OS=Inhella sp. CCP-18 OX=2499851 GN=queC PE=3 S V=1
MLARGRAGTLRRTVSKRNPDPRTALVLFSGGQDSTACLAWALDRYTNVETLGFDYRQRHRIELDCRLVVRDQIAAQFPAWRARLGPDHLLDLALLSQLSDTALTSERAIEMQANGLPNTFVPGRNLLFLTLAATVAYRRGASVLVGGMCETDYSGYPDCRDNTIKAQQLALSLGLDTPMTVETPLMFLTKAATWHLAEQLGGEALVELTREHTHTCYLGERGARHAWGHGCGHCPACELRASGHAQYLQERAGC

SEQ ID NO: 38882 - protein, 223 aa, Inmirania thermothiophila
  misc_feature (1)..(223): tr|A0A3N1XUD2|A0A3N1XUD2_9GAMM 7-cyano-7-deazaguanine s ynthase OS=Inmirania thermothiophila OX=1750597 GN=queC PE=3 SV=1
MSTPAVVLLSGGLDSATTLAIARARGFACHALSVRYGQRHDAELAAAARIAAALGAVAHKVVAIDLGAIGGSALTDPAIAVPTAPTEGIPVTYVPARNTVLLALALGWAEVLGAADIFVGVNAVDYSGYPDCRPAFVEAFERLANLATRAGVEGRRFRIHAPLLRLRKAEIIREGVRLGVDYALTVSCYQADAEGRACGRCDACRLRAQGFAEAGLPDPTRYR

SEQ ID NO: 38883 - protein, 228 aa, Inquilinus limosus
  misc_feature (1)..(228): tr|A0A0A0D152|A0A0A0D152_9PROT 7-cyano-7-deazaguanine s ynthase OS=Inquilinus limosus MP06 OX=1398085 GN=queC P E=3 SV=1
MVLFSGGQDSATCLAWALQRFGRVETVGFDYGQRHRVELDVRPVVLDAIRDRFPAWAGKLGDDHMLDLSVLGQVSDTALTRDVEIAMQDNGLPNTFVPGRNLVFVTFAAALAYRRGLRHLVAGVCETDYSGYPDCRDDTMKAMQLALNLGMETRFVLHTPLMWIDKAETWGLAESLGGEALVELIRDETHSCYRGDRSQMHDWGHGCGECPACDLRAEGWRRFRAPAG

SEQ ID NO: 38884 - protein, 241 aa, Inquilinus limosus
  misc_feature (1)..(241): tr|A0A211ZNE0|A0A211ZNE0_9PROT 7-cyano-7-deazaguanine s ynthase OS=Inquilinus limosus OX=171674 GN=queC PE=3 SV =1
MVADQGERAAAEGALVLFSGGQDSATCLAWALERFGRVETVGFDYGQRHRVELDVRPVVLEAIRARFPDWAGRLGDDHMLDLSVLGQVSDTALTRDVEIAMQDNGLPNTFVPGRNLVFMTFAAALAYRRGLRHLVVGVCETDYSGYPDCRDDTMKAMQLALNLGMETRFVLHTPLMWIDKAETWRLTESLGGEALVGLIRDETHSCYRGDRSQVHDWGHGCGECPACDLRAEGWRRFRATP

SEQ ID NO: 38885 - protein, 240 aa, Insolitispirillum peregrinum
  misc_feature (1)..(240): tr|A0A1N7MVZ4|A0A1N7MVZ4_9PROT 7-cyano-7-deazaguanine s ynthase OS=Insolitispirillum peregrinum OX=80876 GN=que C PE=3 SV=1
MVGCTMTLDPSSALVLFSGGQDSATCLAWALDRFTRVETLAFDYNQRHRIELEVRQDFLAALRADFIPWAERLGQDHFIDATGLSAIGATAMTENVAIEMGSNGLPTTFVPGRNLLFLTYAAALAYRRGIKHIITGVCETDFSGYPDCRDDTIKALQVALNLGMESRFVLHTPLMWIDKAQTWALAETLGGRALVDAIVDKTHTCYLGDRSTRHPWGHGCGQCPACTLRANGWWQWEQGA

SEQ ID NO: 38886 - protein, 224 aa, Intestinibacter bartlettii; identical to SEQ ID NO: 37484
  misc_feature (1)..(224): tr|B0A668|B0A668_9FIRM 7-cyano-7-deazaguanine synthase OS=Intestinibacter bartlettii DSM 16795 OX=445973 GN=qu eC PE=3 SV=1

SEQ ID NO: 38887 - protein, 228 aa, Iodobacter fluviatilis
  misc_feature (1)..(228): tr|A0A377SUQ2|A0A377SUQ2_9NEIS 7-cyano-7-deazaguanine s ynthase OS=Iodobacter fluviatilis OX=537 GN=queC PE=3 S V=1
MTKKPAVILLSGGLDSATCLAIAKAEGFAPYCLSFDYGQKHNAELKAAARVAEALGAVEHRILKIDLAGFGGSALTDATIDVPTDGGKPGEIPVTYVPARNTVLLSYALAWSEVLKADDIFIGVNAVDYSGYPDCRPEYIASFQAMARLATKVGVEGSNLTIHTPLLKLTKAEIAQKGTELGVDYALTVTCYKADEDGQACGECEACRLRSAGFAQAGLADPTRYQGE

SEQ ID NO: 38888 - protein, 227 aa, Iodobacter sp.
  misc_feature (1)..(227): tr|A0A3S8ZVC8|A0A3S8ZVC8_9NEIS 7-cyano-7-deazaguanine s ynthase OS=Iodobacter sp. H11R3 OX=2496266 GN=queC PE=3 SV=1
MTKKPAVILLSGGLDSATCLAIAKAEGFAPYCLSFDYGQKHNAELKAAARVAKALGAVEHRILKIDLAGFGGSALTDATIDVPVGGGKPGEIPVTYVPARNTVLLSYALAWSEVLKADDIFIGVNAVDYSGYPDCRPEYIASFQAMARLATKVGVEGSNLTIHTPLLKLTKAGIAQKGTELGVDYALTVTCYKADFEGRACGQCEACRLRSAGFANAGLADPTRYQK

SEQ ID NO: 38889 - protein, 227 aa, Iodobacter sp.
  misc_feature (1)..(227): tr|A0A2G3JFN7|A0A2G3JFN7_9NEIS 7-cyano-7-deazaguanine s ynthase OS=Iodobacter sp. BJB302 OX=1506510 GN=queC PE= 3 SV=1
MTKKPAVILLSGGLDSATCLAIAKAEGFAPYCLSFDYGQKHNAELKAAARVAEALGAVEHRILKIDLAGFGGSALTDSSIEVPVDGGKPGEIPVTYVPARNTVLLSYALAWSEVLKADDIFIGVNAVDYSGYPDCRPEYIASFQAMARLATKVGVEGSNLTIHTPLLKLTKAEIAQKGTELGVDYALTVTCYKADDEGRACGECEACRLRSAGFAHAGLADPTRYQK

SEQ ID NO: 38890 - protein, 246 aa, Isosphaera pallida
  misc_feature (1)..(246): tr|E8R0T0|E8R0T0_ISOPI 7-cyano-7-deazaguanine synthase OS=Isosphaera pallida (strain ATCC 43644 / DSM 9630 / I S1B) OX=575540 GN=queC PE=3 SV=1
MSDGASGKSLPSKRLDVPVVVLLSGGLDSTTVLAEAVSKYSMPHALTIHYGQRHQIEREAARRVARAFNVVRHVELEVDLRAFGRSALTDDLEVPKDRSDTEIARGIPITYVPARNTIFLSLALAFAESIGSTDLFVGVNCVDYSGYPDCRPEYLRAFEALANLATKVGVEGTGRFRVHAPFLHATKADIIRRGLELGVDYSLTHSCYDPDDQGRACGRCDSCRLRLAAFRQVGRPDPAPYQPGAV

SEQ ID NO: 38891 - protein, 235 aa, Isosphaeraceae bacterium
  misc_feature (1)..(235): tr|A0A432MMX0|A0A432MMX0_9BACT 7-cyano-7-deazaguanine s ynthase OS=Isosphaeraceae bacterium GM2012 OX=2080755 G N=queC PE=3 SV=1
MSNRPKAVVLLSGGLDSTTVLAESLALGYAPYALTILYGQRHAVEREAARRVASAMGVERHVELEIDLRAFGGSALTDAIAVPKDREEDEMAAGIPVTYVPARNTIFLSMALAWAEAIGAFDLFIGVNCVDYSGYPDCRPEFLAAFERLAGLATKAGVEGSGRYRIHAPLLKKTKDEIILRGVELGVDYGLTHSCYDPDGQGRSCGRCDSCRLRLAAFGRLGLKDPVEYRPDVGG

SEQ ID NO: 38892 - protein, 231 aa, Izhakiella australiensis
  misc_feature (1)..(231): tr|A0A1S8YF96|A0A1S8YF96_9ENTR 7-cyano-7-deazaguanine s ynthase OS=Izhakiella australiensis OX=1926881 GN=queC PE=3 SV=1
MKRAVVVFSGGQDSTTCLIQALKQYDDVHCITFDYGQRHRAEIDTARQLSQQLGASAHKVLDVTLLNELAISSLTRDNIPVPDYDPDASGLPSTFVPGRNILFLTLSAIYAYQVNAEAVITGVCETDFSGYPDCRDEFVKALNHAVELGMARPVRFETPLMWLNKAETWALADYWQRLDLVRKQTLTCYNGIQGDGCGECAACHLRANGLQQYQQAPAAVMQAMKSKTGLA

SEQ ID NO: 38893 - protein, 231 aa, Izhakiella capsodis
  misc_feature (1)..(231): tr|A0A1I4YFW8|A0A1I4YFW8_9ENTR 7-cyano-7-deazaguanine s ynthase OS=Izhakiella capsodis OX=1367852 GN=queC PE=3 SV=1
MKRAVVVFSGGQDSTTCLIQALAQYEDVHCITFDYGQRHRAEIDTARHLSAHLGVSAHKVLDVTLLNELAISSLTRDNIPIPNYDPDANSLPNTFVPGRNILFLTLSSIYAYQVDAEAVITGVCETDFSGYPDCRDEFVKALNHAVKLGMARTIRFETPLMWLNKAETWALADYWQQLDLVRTKTLTCYNGIQGDGCGECAACHLRANGLQQYQQNPTTIMQAMKSKTGLT

SEQ ID NO: 38894 - protein, 231 aa, Izhakiella sp.
  misc_feature (1)..(231): tr|A0A4P8YJM2|A0A4P8YJM2_9ENTR 7-cyano-7-deazaguanine s ynthase OS=Izhakiella sp. KSNA2 OX=2579935 GN=queC PE=3 SV=1
MKRAVVVFSGGQDSTTCLIQALAQYDEVHCVTFDYGQRHHAEIDVARELALELGAAAHKVLDVTLLNELAISSLTRDSIPVPDYEPEADGIPNTFVPGRNILFLTLAAIYAYQVKAEAVITGVCETDFSGYPDCRDEFVKALNHAVTLGMARDVRFETPLMWLNKAETWALADYWGRLDLVREHTLTCYNGIRGDGCGECAACHLRANGLSGYLNDKAVILAAMKEKIGLA

SEQ ID NO: 38895 - protein, 241 aa, Janthinobacterium agaricidamnosum
  misc_feature (1)..(241): tr|A0A3G2EGE2|A0A3G2EGE2_9BURK 7-cyano-7-deazaguanine s ynthase OS=Janthinobacterium agaricidamnosum OX=55508 G N=queC PE=3 SV=1
MLATDSALVLFSGGQDSTTCLAWALKHYSRVETIGFDYGQRHAIELTVRPGVLEQMRRQSPEWDSRLGQDHMIDLSLISAISDTAMTQNVEIVMQENGLPNTFVPGRNLLFMTVAATVAYRRGLTVLVGGMCETDFSGYPDCRDDTMKALQVALNLGMNTRLKLETPLMWLDKAQSWDLAEDLGGQPLVDLIRSGTHTCYLGERGELHDWGYGCGTCPACSLRANGYQQYAARKAAKPALK

SEQ ID NO: 38896 - protein, 237 aa, Janthinobacterium agaricidamnosum
  misc_feature (1)..(237): tr|W0VBX0|W0VBX0_9BURK 7-cyano-7-deazaguanine synthase OS=Janthinobacterium agaricidamnosum NBRC 102515 = DSM 9628 OX=1349767 GN=queC PE=3 SV=1
MLATDSALVLFSGGQDSTTCLAWALEHYARVETIGFDYGQRHAIELTVRPTLLEQMRGQSAEWHSRLGQDHMIDLSLIAAISDTALTQNVEIAMQENGLPNTFVPGRNLLFMTVAATVAYRRGLTVLVGGMCETDFSGYPDCRDDTMKALQVALNLGMATRLKVETPLMWLDKSQTWDLAHGLGGQPLVDLIRSGTHTCYLGERGQLHDWGYGCGTCPACALRAKGYQEYAARSGAV

SEQ ID NO: 38897 - protein, 253 aa, Janthinobacterium lividum
  misc_feature (1)..(253): tr|A0A377RMC8|A0A377RMC8_9BURK 7-cyano-7-deazaguanine s ynthase OS=Janthinobacterium lividum OX=29581 GN=queC P E=3 SV=1
MFSRALGQNKTEKKEIMLATDSALVLFSGGQDSTTCLAWALKHYSRVETIGFDYGQRHAIELTVRPGVLEQMRQQSPEWDSRLGQDHMIDLSLISAISDTAMTQNVEIVMQENGLPNTFVPGRNLLFMTVAATVAYRRGLTVLVGGMCETDFSGYPDCRDDTMKALQVALNLGMDTRLKLETPLMWLDKAQSWDLAEDLGGQPLVDLIRSGTHTCYLGERGQLHDWGYGCGTCPACALRANGYQQYAARKGLK

SEQ ID NO: 38898 - protein, 237 aa, Janthinobacterium lividum
  misc_feature (1)..(237): tr|A0A1E8PQI1|A0A1E8PQI1_9BURK 7-cyano-7-deazaguanine s ynthase OS=Janthinobacterium lividum OX=29581 GN=queC P E=3 SV=1
MLATDSALVLFSGGQDSTTCLAWALKHYSRVETIGFDYGQRHAIELTVRPGLLAQIREQSPEWDSRLGQDHMIDLSLISAISDTAMTQNVEIVMQENGLPNTFVPGRNLLFMTVAATVAYRRGLTVLVGGMCETDFSGYPDCRDDTMKALQVALNLGMNTRLKLETPLMWLDKAQSWDLAQDLGGQPLVDLIRSGTHTCYLGERGELHDWGYGCGTCPACALRANGYQQYAARKAAK

SEQ ID NO: 38899 - protein, 241 aa, Janthinobacterium sp.
  misc_feature (1)..(241): tr|A0A2N0HWX7|A0A2N0HWX7_9BURK 7-cyano-7-deazaguanine s ynthase OS=Janthinobacterium sp. 64 OX=2035208 GN=queC PE=3 SV=1
MLATDSALVLFSGGQDSTTCLAWALKHYNRVETIGFDYGQRHAIELTVRPGVLEQMRQQSPEWDRRLGQDHMIDLSLIAAISDTAMTQNVEIVMQENGLPNTFVPGRNLLFMTVAATVAYRRGLTVLVGGMCETDFSGYPDCRDDTMKALQVALNLGMNTRLKLETPLMWLDKAQSWDLAQDLGGQPLVDLIRSGTHTCYLGERGELHDWGYGCGTCPACALRANGYQHYAARKAAKQAAN

SEQ ID NO: 38900 - protein, 235 aa, Janthinobacterium sp.
  misc_feature (1)..(235): sp|A6T2X9|QUEC_JANMA 7-cyano-7-deazaguanine synthase OS =Janthinobacterium sp. (strain Marseille) OX=375286 GN= queC PE=3 SV=1
MSSADGALVLFSGGQDSTTCVAWALKRYAKVETIGFDYGQRHAVELEVRPDVLRSLRDINPEWNKKLGEDHMIDLSLISKISNTAMTQDVEITMMENGLPNTFVPGRNLLFMTVAATVAYRRGLDVLVGGMCETDFSGYPDCRDDTMKALQVALNLGMATRLKLETPLMWIDKAETWKMAQDLGGKPLVDLIRAGTHTCYLGERGALHDWGYGCGTCPACELRARGYANFAAQEK

SEQ ID NO: 38901 - protein, 237 aa, Janthinobacterium svalbardensis
  misc_feature (1)..(237): tr|A0A290WRE2|A0A290WRE2_9BURK 7-cyano-7-deazaguanine s ynthase OS=Janthinobacterium svalbardensis OX=368607 GN =queC PE=3 SV=1
MLATDSALVLFSGGQDSTTCLAWALKHYSRVETIGFDYGQRHAIELTVRPGVLEQMRQQSPEWDSRLGQDHMIDLSLIAAISDTAMTQNVEIVMQENGLPNTFVPGRNLLFMTVAATVAYRRGLTVLVGGMCETDFSGYPDCRDDTMKALQVALNLGMNTRLKLETPLMWLDKAQSWDLAQDLGGQPLVDLIRSGTHTCYLGERGQLHDWGYGCGTCPACALRANGYQQYAARKAAK

SEQ ID NO: 38902 - protein, 227 aa, Jeongeupia sp.
  misc_feature (1)..(227): tr|A0A1D9BFI4|A0A1D9BFI4_9NEIS 7-cyano-7-deazaguanine s ynthase OS=Jeongeupia sp. USM3 OX=1906741 GN=queC PE=3 SV=1
MTRPAVILLSGGLDSATCLAIARDQGFAPYCLSFNYGQRHNAELKAAERVTRALGAVEHRVVTIDLASFGGSALTDANIAVPEEAPQQGEIPLTYVPARNTILLSYALAWAEVLKSDDIFIGVNAVDYSGYPDCRPDYIAAYQAMARLATRTGVEGSPLTIHTPLISLSKAEIVQTGTRLGVDYGLTVTCYQADDDGRACGVCDACRLRREGFAVAGLPDPTRYRPA

SEQ ID NO: 38903 - protein, 217 aa, Jeotgalibacillus alimentarius
  misc_feature (1)..(217): tr|A0A0C2VIS7|A0A0C2VIS7_9BACL 7-cyano-7-deazaguanine s ynthase OS=Jeotgalibacillus alimentarius OX=135826 GN=q ueC PE=3 SV=1
MDKNKAIVVFSGGQDSTTCLFWAMKNFDSVEAVTFSYGQRHATEIEAAKEIASELGIRHHILDMSLLNQLSPSALTRDEEIVEKEGELPSTFVPGRNLMFLSFASVLAHQRGAKHIVTGVCETDFSGYPDCRDAFVKSLNVSVNLSMDKDFVFHTPLMWLDKKETWALADQLNQFDFVRNRTITCYNGVKGDGCGECPACRLRLKGMNEYLSEREGS

SEQ ID NO: 38904 - protein, 221 aa, Jeotgalibacillus campisalis
  misc_feature (1)..(221): tr|A0A0C2VV60|A0A0C2VV60_9BACL 7-cyano-7-deazaguanine s ynthase OS=Jeotgalibacillus campisalis OX=220754 GN=que C PE=3 SV=1
MDKNQKALVVFSGGQDSTTCLFWAKKHFDQVEAVTFEYGQRHNNEIEVAKQITEELGVAHHVLDMSLLNQLAPSSLTRKDQPIVETEGELPSTFVPGRNLLFMSFAAVLAKQIGARHLITGVCETDFSGYPDCRDIFMKSLNVTINLSMEEDFVLHTPLMWLDKAQTWELADDLQVFEYIRDHTLTCYNGLQGTGCGECPACKLRNKGMIQFLEKKEAKTT

SEQ ID NO: 38905 - protein, 218 aa, Jeotgalibacillus malaysiensis
  misc_feature (1)..(218): tr|A0A0B5ARH3|A0A0B5ARH3_9BACL 7-cyano-7-deazaguanine s ynthase OS=Jeotgalibacillus malaysiensis OX=1508404 GN= queC PE=3 SV=1
MDKNKAIVVFSGGQDSTTCLFWALEKFDSVEAVTFAYGQRHASEIEAAKEIASDLNVRHHILDMSLLNQLAPSALTRDEEIVQKEGELPSTFVPGRNLMFLSFASVLAHQSGAKHIVTGVCETDFSGYPDCRDAFVKSLNVSVNLSMDKDFVFHTPLMWLDKKETWELADQLNRFEYVRNHTITCYNGVKGDGCGECPACKLRLKGMNEYLNEKEGIR

SEQ ID NO: 38906 - protein, 219 aa, Jeotgalibacillus marinus; identical to SEQ ID NO: 36273
  misc_feature (1)..(219): tr|A0A0M0L172|A0A0M0L172_9BACL 7-cyano-7-deazaguanine s ynthase OS=Jeotgalibacillus marinus OX=86667 GN=queC PE =3 SV=1

SEQ ID NO: 38907 - protein, 220 aa, Jeotgalibacillus proteolyticus
  misc_feature (1)..(220): tr|A0A2S5GFR4|A0A2S5GFR4_9BACL 7-cyano-7-deazaguanine s ynthase OS=Jeotgalibacillus proteolyticus OX=2082395 GN =queC PE=3 SV=1
MNKNRKALVVFSGGQDSTTCLFWAKANFEEVEAVTFEYGQRHYQEIEVAKSIANDLGVRHHVLDMSLLNQLAPSALTRKDQKIEHDEGELPSTFVPGRNLLFMSFAAVLAKQIGARHLVTGVCETDFSGYPDCRDIFIKSLNVTINLSMSEDFVIHTPLMWLNKEQTWELADHLDALEYVRDRTLTCYNGVQGEGCRECPACLLRNQGMVNYLNRKEEKI

SEQ ID NO: 38908 - protein, 218 aa, Jeotgalibacillus salarius
  misc_feature (1)..(218): tr|A0A4Y8LKL2|A0A4Y8LKL2_9BACL 7-cyano-7-deazaguanine s ynthase OS=Jeotgalibacillus salarius OX=546023 GN=queC PE=3 SV=1
MDKNKAIVVFSGGQDSTTCLFWALEKFDSVEAVTFAYGQRHASEIEAAKEIASDLGVKHHLLDMSLLNQLAPSALTRDEEITEKEGELPSTFVPGRNLMFLSFASVLAHQVNAKHVVTGVCETDFSGYPDCRDAFVKSLNVSVNLSMDKDFVFHTPLMWLDKKETWALADELNRFDYIRNHTITCYNGIKGDGCGDCPSCKLRLNGMNEYLNSKEGMR

SEQ ID NO: 38909 - protein, 221 aa, Jeotgalibacillus soli
  misc_feature (1)..(221): tr|A0A0C2RUC7|A0A0C2RUC7_9BACL 7-cyano-7-deazaguanine s ynthase OS=Jeotgalibacillus soli OX=889306 GN=queC PE=3 SV=1
MERNRKALVVFSGGQDSTTCLFWAKQHFDEVEVVTFKYGQRHIEEINCAREIANDQGVNHHVLDMSLLNQLAPSALTREDQAIIQEEGQLPSTFVPGRNLLFMSFAAVLAKQIGARHLVTGVCETDFSGYPDCRDIFIKSLNVTVNLSMEEDFVIHTPLMWLDKEQTWELADSLNAFDYIRTKTLTCYNGIKGDGCGTCPACELRRRGMEQFLMKKGEGLR

SEQ ID NO: 38910 - protein, 231 aa, Jeotgalibacillus sp.
  misc_feature (1)..(231): tr|A0A4R5XVD6|A0A4R5XVD6_9BACL 7-cyano-7-deazaguanine s ynthase OS=Jeotgalibacillus sp. S-D1 OX=2552189 GN=queC PE=3 SV=1
MDKNKKALVVFSGGQDSTTCLFWALRKFDDVEVVTFEYGQRHIKEIEVAKTIAKDLGVNQHVLDMSLLNQLAPSALTRNDQEIKQKEGDLPSTFVPGRNLLFMSFAAVLAKQIEARHLITGVCETDFSGYPDCRDVFMKSLNVTINLSMEEDFVIHTPLMWLDKAETWELADKLEAFDYVQKNTLTCYNGIQGEGCGTCPACELRNRGMKIYLEKREANTDDTANLSRSHT

SEQ ID NO: 38911 - protein, 219 aa, Jeotgalibacillus sp.
  misc_feature (1)..(219): tr|A0A4Y8LK86|A0A4Y8LK86_9BACL 7-cyano-7-deazaguanine s ynthase OS=Jeotgalibacillus sp. R-1-5s-1 OX=2555897 GN= queC PE=3 SV=1
MDKNNKAIVVFSGGQDSTTCLFWALEKFDEVEAVTFKYGQRHENEIVCAEKIAEELGVKHHVLDMSLLNQLAPSALTRDEEIVEKEGELPSTFVPGRNLLFLSFAAVLAKQRHARHLVTGVCETDFSGYPDCRDIFIKSLNVTVNLSMEENFVIHTPLMWLDKKETWALADQLGRFDYIRTKTLTCYNGVQGDGCGDCPACRLRLNGMTEYLHEKEGQK

SEQ ID NO: 38912 - protein, 241 aa, Jonesia denitrificans
  misc_feature (1)..(241): tr|C7R591|C7R591_JONDD 7-cyano-7-deazaguanine synthase OS=Jonesia denitrificans (strain ATCC 14870 / DSM 20603 / CIP 55134) OX=471856 GN=Jden_0093 PE=3 SV=1
MSKNKVALLLSGGPDSVTLLYDLLAQGHEVVALTYNFGEAEAQNERDAATAIAAELEVEHHFFDFSGPLKEFYHLPQPQFLRMAMMRSSEAGPVSKSEDVQPFGSAIALLLTASWAVKNDISSVFYAVHADDSHFTDNHREYFDKLSDVTRECEGQDFAVEFHTPYLDTRKFDVINKGITLGVPFGRTWSCAAGGSTHCGQCAPCINRSGAFAVIGEQDPVAYLHDPQEHLENRFAGSAQL

SEQ ID NO: 38913 - protein, 231 aa, Kalamiella piersonii
  misc_feature (1)..(231): tr|A0A3A9J1B5|A0A3A9J1B5_9GAMM 7-cyano-7-deazaguanine s ynthase OS=Kalamiella piersonii OX=2364647 GN=queC PE=3 SV=1
MKRAVVVFSGGQDSTTCLIQALQQYDEVHCVTFDYGQRHREEIDVARALALKLGARAHKVLDVTLLNELAVSSLTRDNIPVPSYDPAASGLPSTFVPGRNILFLTLASVYAYQVEAEAVITGVCETDFSGYPDCRDEFVKALNHAVALGMAREVRFETPLMWLNKAETWALADYWQSLTLVREETLTCYNGVKGDGCGECAACHLRARGLNDYLADRDGVMAAMKSKSGLA

SEQ ID NO: 38914 - protein, 229 aa, Kandleria vitulina
  misc_feature (1)..(229): tr|A0A0R2HEQ9|A0A0R2HEQ9_9FIRM 7-cyano-7-deazaguanine s ynthase OS=Kandleria vitulina DSM 20405 OX=1410657 GN=q ueC PE=3 SV=1
MKALVLSSGGIDSTTCLAMAVEKYGADNVIGLCMYYGQKHQKEIESAKKVANYYGTELYELNLSKIFAYSKCTLLNQSEDEIPHESYDEQLKHTDGAPVSTYVPFRNGLFLSAAASFALSKECSVIYYGAHADDAAGSAYPDCSPAFNNAINEAIYLGSGQQLKVEAPFINKTKADVVKIGLDLHVPYELTWSCYEGGDEPCHTCGTCVDREKAFELNGTIDPLLKGDK

SEQ ID NO: 38915 - protein, 229 aa, Kandleria vitulina
  misc_feature (1)..(229): tr|A0A1H2Q990|A0A1H2Q990_9FIRM 7-cyano-7-deazaguanine s ynthase OS=Kandleria vitulina OX=1630 GN=queC PE=3 SV=1
MKALVLSSGGIDSTTCLAMAVEKYGADNVIGLCMYYGQKHQKEIESAKKVANYYGTELYELNLSKIFAYSKCTLLNQSEDEIPHESYDEQLKHTDGAPVSTYVPFRNGLFLSAAASFALSKECSVIYYGAHADDAAGSAYPDCSPAFNNAINEAIYLGSGQQLKVEAPFINKTKADVVKIGLDLHVPYELTWSCYEGGDEPCHTCGTCVDREKAFELNGTVDPLLKGDK

SEQ ID NO: 38916 - protein, 227 aa, Kangiella geojedonensis
  misc_feature (1)..(227): tr|A0A0F6TRJ1|A0A0F6TRJ1_9GAMM 7-cyano-7-deazaguanine s ynthase OS=Kangiella geojedonensis OX=914150 GN=queC PE =3 SV=1
MTKRAVILLSGGLDSTTALAIAKERGFECYTMSFNYGQRTVAELKAAAKVSAQFGATKHIEVNLDMSEIGGSALTDHSIDVPTGEAIAAEEAIPVTYVPARNTVFLSIALGWAEVLQAHHIFVGVNAVDYSGYPDCRPEFIEAFENMANLATKAGVEGQKVHIDAPLIDMTKAQIIAKGIELGVDYAKTVSCYDADNDGKACGECDSCVLRRQGFKSQGFSDPTIYQ

SEQ ID NO: 38917 - protein, 224 aa, Kangiella koreensis
  misc_feature (1)..(224): tr|C7R5T2|C7R5T2_KANKD 7-cyano-7-deazaguanine synthase OS=Kangiella koreensis (strain DSM 16069 / KCTC 12182 / SW-125) OX=523791 GN=queC PE=3 SV=1
MQKRAVVLLSGGLDSTTALAMAKSQGYDCYAMSFNYGQRSLAELNAAKKIAQSLDAKEHIVVNLDMSQIGGSALTDHSIDVPTEGLEEGIPVTYVPARNTVFLSIALGWAEVLKADHIFIGVNAVDYSGYPDCRPEFIKAFETMANLATKAGVEGQKLTIEAPLINLTKAQIIAEGMTLGVDYSQTVSCYKATDDGKACGVCDSCRLRKQGFESQGFADPTRYI

SEQ ID NO: 38918 - protein, 224 aa, Kangiella profundi
  misc_feature (1)..(224): tr|A0A2K9A992|A0A2K9A992_9GAMM 7-cyano-7-deazaguanine s ynthase OS=Kangiella profundi OX=1561924 GN=queC PE=3 S V=1
MNKRAVVLLSGGLDSTTALAIAKSQGYDCYAMSFNYGQRSLAELNAAKKVAESMDAKEHIVVNLDMSQIGGSALTDHSIDVPTEGLEEGIPVTYVPARNTVFLSIALGWAEVLKADHIFIGVNAVDYSGYPDCRPEFIKAFEAMANLATKAGVEGQKLTIEAPLINLTKAQIIAEGMKLGVDYSQTVSCYKATDDGKACGVCDSCRLRKQGFVGQGFADPTRYV

SEQ ID NO: 38919 - protein, 227 aa, Kangiella sediminilitoris
  misc_feature (1)..(227): tr|A0A1B3BBY1|A0A1B3BBY1_9GAMM 7-cyano-7-deazaguanine s ynthase OS=Kangiella sediminilitoris OX=1144748 GN=queC PE=3 SV=1
MNKRAVILLSGGLDSTTALAIAKEKGFECYTMSFNYGQRTVAELEAAKKVSAQHGAKKHIEVNLDMTEIGGSALTDHSIDVPVGEALEQEEDIPVTYVPARNTVFLSIALGWAEVLQANHIFVGVNAVDYSGYPDCRPEFVEAFEQMANLATKAGVNGHKMHIEAPLIDMTKAQIIKKGIELGVDYGLTVSCYNATADGRACGQCDSCILRKQGFEEQGFNDPTPYQ

SEQ ID NO: 38920 - protein, 227 aa, Kangiella sp.
  misc_feature (1)..(227): tr|A0A3D8UNF8|A0A3D8UNF8_9GAMM 7-cyano-7-deazaguanine s ynthase OS=Kangiella sp. HD9-110m-PIT-SAG07 OX=2283595 GN=queC PE=3 SV=1
MTKRAVILFSGGLDSTTALAIAKERGFECYTMSFNYGQRTVAELKAAKNISAHFGAKKHIEVNLDMSEIGGSALTDHSIDVPTGEAIAAEEAIPVTYVPARNTVFLSIALGWAEVLEAHHIFLGVNAVDYSGYPDCRPEFIQSFEDMANLATKAGVEGRKVHIESPLIDMTKAEIIARGIQLGVDYQTTVSCYKADDAGRACGECDSCMLRKQGFETQGFTDPTLYQ

SEQ ID NO: 38921 - protein, 228 aa, Kangiella sp.
  misc_feature (1)..(228): tr|A0A2G2KXT2|A0A2G2KXT2_9GAMM 7-cyano-7-deazaguanine s ynthase OS=Kangiella sp. OX=1920245 GN=queC PE=3 SV=1
MAKKAIILFSGGLDSTTCLAIAKSQKYDCYALSFSYGQKHSSELDAAKRIAKSSNVKAHKIIDLDLASFGGSALTDDSIDVPIVSENSTLETNIPITYVPARNTIFFSIALAWAEVLEADVIIAGVNAVDYSGYPDCRPEYIKAFQAMADLATKAGIEGKGVKLETPLIDLSKVEIIRKGYSLGVNYAETVSCYKADEKGAACGECDSCIIRKDAFEKAIKKDPTIYV

SEQ ID NO: 38922 - protein, 227 aa, Kangiella spongicola
  misc_feature (1)..(227): tr|A0A318D1Q0|A0A318D1Q0_9GAMM 7-cyano-7-deazaguanine s ynthase OS=Kangiella spongicola OX=796379 GN=queC PE=3 SV=1
MTKRAVILLSGGLDSTTVLAMAKEQGYECYTMSFNYGQRTVAELKAAKAVSTQFGAKKHIEVKLDMTEIGGSALTDHDIDVPVGDAIAEEADIPVTYVPARNTVFLSIALGWAEVLEAQHIFVGVNSVDYSGYPDCRPEFIQAFEDMANLATKAGVEGRKVHIEAPLSDMTKAQIIASGVALGVDYQQTVSCYMSDDDGRACGECDSCILRRKGFEEQGFTDPTIYQ

SEQ ID NO: 38923 - protein, 239 aa, Kerstersia gyiorum; identical to SEQ ID NO: 36701
  misc_feature (1)..(239): tr|A0A171KQ74|A0A171KQ74_9BURK 7-cyano-7-deazaguanine s ynthase OS=Kerstersia gyiorum OX=206506 GN=queC PE=3 SV =1

SEQ ID NO: 38924 - protein, 239 aa, Kerstersia gyiorum
  misc_feature (1)..(239): tr|A0A4Q7MVQ2|A0A4Q7MVQ2_9BURK 7-cyano-7-deazaguanine s ynthase OS=Kerstersia gyiorum OX=206506 GN=queC PE=3 SV =1
MIPLREKRALVLFSGGQDSATCLAWALSRYQHVETLGFDYGQRHRVELDCRTRLRTLVADMNPDWAPRLAEDHLLPVDFFRHLGQTAMTDDVAITMQADGLPNTFVPGRNLLFLTLAAALAYRRNLNVLIGGMTEADYSGYPDCRDNTMKALQVALSLGIDRQLTIETPLMWLDKTEIWDLAWRLGGDVLVETIRQESHTCYLGTRDTLHSWGYGCGSCPACTLRARGYVRWAANRLAA

SEQ ID NO: 38925 - protein, 229 aa, Ketobacter alkanivorans
  misc_feature (1)..(229): tr|A0A2K9LR06|A0A2K9LR06_9GAMM 7-cyano-7-deazaguanine s ynthase OS=Ketobacter alkanivorans OX=1917421 GN=queC P E=3 SV=1
MAEHTSDKKIALVLLSGGLDSATCLAIARSQGYECYAISFEYGQRHDSELQAAERVVNALGAKELKTIHINMGDIGGSALTDKAIDVPESPTEGIPVTYVPARNTVFLSLALGWAEVLDADAIFIGVNAVDYSGYPDCRPEFIEAFERLAALATKRGVEGNPISIQAPLLHLSKSQIIHKGIALGVDYGLTVSCYQADAEGRACGKCDSCRLRQEGFRQAGVADPTRYC

SEQ ID NO: 38926 - protein, 225 aa, Ketobacter sp.; identical to SEQ ID NO: 35792
  misc_feature (1)..(225): tr|A0A3L8BSC8|A0A3L8BSC8_9GAMM 7-cyano-7-deazaguanine s ynthase OS=Ketobacter sp. OX=2083498 GN=queC PE=3 SV=1

SEQ ID NO: 38927 - protein, 225 aa, Ketobacter sp.
  misc_feature (1)..(225): tr|A0A3L8BZ41|A0A3L8BZ41_9GAMM 7-cyano-7-deazaguanine s ynthase OS=Ketobacter sp. OX=2083498 GN=queC PE=3 SV=1
MSDSKRAVVLLSGGLDSATCLAIARSQGYACYALSFHYGQRHDSELAAAQRVVAALGAEELKTIHINMGDIGGSALTDPAIDVPEAPTEGIPVTYVPARNTVFLSLALGWAEVLDADAIFIGVNAVDYSGYPDCRPEFISAFERLATLATKRGVEGHPISIQAPLLKLSKAEIIQQGVALGLDYGLTVSCYQADHQGRACGVCDSCRLRKEGFAQAGVADPTPYR

SEQ ID NO: 38928 - protein, 236 aa, Kibdelosporangium phytohabitans
  misc_feature (1)..(236): tr|A0A0N9I630|A0A0N9I630_9PSEU 7-cyano-7-deazaguanine s ynthase OS=Kibdelosporangium phytohabitans OX=860235 GN =queC PE=3 SV=1
MNGNGDRHDSTLVLLSGGLDSTVLATELVRRGAAVQAVSVHYGQRHAVELEAAAVVASRLGIPHDIIDLSVLRHHLRSALTGTGEIPHGHYAADTMSATVVPNRNAIMLMVACGVASARGLRVVATAVHSGDHPIYPDCRPEFIAAATLTAMLGTETVRVEAPYIRLTKAEIAAKGVQFDAPMELSWSCYEGGDSTGRHCGRCGTCVERAEAFHLAGVRDPTDYADTAFWREQVTV

SEQ ID NO: 38929 - protein, 233 aa, Kiloniella litopenaei
  misc_feature (1)..(233): tr|A0A0M2RDK4|A0A0M2RDK4_9PROT 7-cyano-7-deazaguanine s ynthase OS=Kiloniella litopenaei OX=1549748 GN=queC PE= 3 SV=1
MKTLVICSGGLDSVTLAHKVAAEAELTRLISFDYGQRHKKELDYARRCAERLGVPHNIIDIANVGALLSGSALTDDVDVPDGHYEEETMKVTVVPNRNAIMLAIAFGAAAAEKADAVAAAVHGGDHFIYPDCRPTFIDSFEEMQRHALDGYASVKLYTPFVHLPKSDIAAEGSRLKVPFEETWSCYKGYEHHCGRCGTCVERREAFHVAKVEDPTIYQDPDYWLEAVEKAKGV

SEQ ID NO: 38930 - protein, 233 aa, Kiloniella spongiae
  misc_feature (1)..(233): tr|A0A0H2N0T9|A0A0H2N0T9_9PROT 7-cyano-7-deazaguanine s ynthase OS=Kiloniella spongiae OX=1489064 GN=queC PE=3 SV=1
MKTLVICSGGLDSVTLAHKVAAEAELTRLISFDYGQRHKKELDYARRCAERLGVPHNVIDIANVGALLSGSALTDDVDVPDGHYEEETMKVTVVPNRNAIMLAIAFGAAAAENADAVAAAVHGGDHFIYPDCRPAFIDSFEEMQRHALDGYAAVKLYTPFVHLPKSDIAAEGSRLKVPFEETWSCYKGYEHHCGRCGTCVERREAFHVANVEDPTIYQDPDYWLEAVEKAKGA

SEQ ID NO: 38931 - protein, 229 aa, Kineococcus radiotolerans
  misc_feature (1)..(229): sp|A6WGA4|QUEC_KINRD 7-cyano-7-deazaguanine synthase OS =Kineococcus radiotolerans (strain ATCC BAA-149 / DSM 1 4245 / SRS30216) OX=266940 GN=queC PE=3 SV=1
MDRPAVVLLSGGLDSTTVLAIAKSQGFTPYALSFAYGQRHAVELDAARRVATALGAAGHVIATIDLTVFGGSALTADIAVPKHDTVEDLQADIPITYVPARNTIFLSYALAYAEVVGAGDIFIGVNALDYSGYPDCRPEYVDAFQAMGRLATRAGVQGTELTIHAPLMQMTKADIVRAGLALGVDYGMTSSCYDPDAAGHPCGHCDSCLLRLNGFAEAGSTDPLPYRGA

SEQ ID NO: 38932 - protein, 217 aa, Kingella denitrificans
  misc_feature (1)..(217): tr|F0F1F1|F0F1F1_9NEIS 7-cyano-7-deazaguanine synthase OS=Kingella denitrificans ATCC 33394 OX=888741 GN=exsB PE=3 SV=1
MTQALVVFSGGQDSTTCLFQAMQQYGAENVQAITFAYGQRHGIELERAASIAQELGIRQTVLDLSLITAITHNALTDAQAAIETDAQGMPNTFVDGRNALFLLYAAIYAKSQNIRDIFIGVCETDFSGYPDCRQIFVQSMNVTLNLAMAYDFRLHTPLMYLTKKETWALADELGVLDYIRTRTHTCYLGVDGGCHECPSCVLRERGLAEYLAEKSAA

SEQ ID NO: 38933 - protein, 226 aa, Kingella kingae
  misc_feature (1)..(226): tr|F5S8Q9|F5S8Q9_9NEIS 7-cyano-7-deazaguanine synthase OS=Kingella kingae ATCC 23330 OX=887327 GN=exsB PE=3 SV =1
MTQNKRVLVIFSGGQDSTTCLIQAIAQYGKDHVQAMTFAYGQRHAIELQRATEIAQELGIAQTVLDLSLVGSITHNALMDSQARIQTQDNGLPNTFVDGRNALFLLYAAIYAKSQQIHDIVIGVCETDFSGYPDCRQVFIDSMQQTLQLAMDYEFRLHTPLMYLTKKQTWALADELGALDFVRTRTHTCYMGVDGGCHECPSCVLRERGLQEYWAECEQNKKQPAL

SEQ ID NO: 38934 - protein, 227 aa, Kingella negevensis
  misc_feature (1)..(227): tr|A0A238HFS2|A0A238HFS2_9NEIS 7-cyano-7-deazaguanine s ynthase OS=Kingella negevensis OX=1522312 GN=queC PE=3 SV=1
MHRPTTNRKPQMSQKQALVIFSGGQDSTTCLFQAIAQYGAENVQAITFAYGQRHKIELERAAWIAKDLNIKQTVLDLSLMTSITHNALMDDTATIQTENNLPNTFVDGRNALFLLYAAIYAKSQNIHDIFVGVCETDFSGYPDCRDVFVKSMNVTLNLAMAYDFNIHTPLMWLTKKETWALADQLGAFEYVRNHTHTCYLGVEGGCHECPSCVLRERGLQEYLAERI

SEQ ID NO: 38935 - protein, 217 aa, Kingella oralis
  misc_feature (1)..(217): tr|C4GN20|C4GN20_9NEIS 7-cyano-7-deazaguanine synthase OS=Kingella oralis ATCC 51147 OX=629741 GN=queC PE=3 SV =1
MSPNTALVIFSGGQDSTTCLFQAIADCGAGNVQTISFQYGQRHAVELQRAAWIAQDLGVPHTVLDLSAIGNITHNALMDSSAPIQQAGNTPNTFVDGRNALFLLYAAIHAKAQGIHRIYTGVCETDFSGYPDCRDVFIKSMNVTLNLAMDYPFDIRTPLMWLTKKQTWALADQLGAFDYIRAHTHTCYMGVAGGCHQCPACILRERGLREYLAERGG

SEQ ID NO: 38936 - protein, 222 aa, Kingella potus
  misc_feature (1)..(222): tr|A0A377QXG4|A0A377QXG4_9NEIS 7-cyano-7-deazaguanine s ynthase OS=Kingella potus OX=265175 GN=queC PE=3 SV=1
MNSEKALVIFSGGQDSTTCLIQALHTYGRENVEALSFRYGQRHAVELERAAAIAQDLGVKQTLLDLSLIRQITSNALMDGTAAIQTGPGGLPNTFVDGRNALFLLYAAIYAKGQGIRHIIAGVCETDFSGYPDCRDVFVKSMNVSLNLAMDYAFQIHTPLMYLTKAQTWALADKLGYLDYIREHTHTCYNGITGGCHECPSCILRERGLAEYLAGKTAAASA

SEQ ID NO: 38937 - protein, 245 aa, Kinneretia asaccharophila
  misc_feature (1)..(245): tr|A0A4R6NC55|A0A4R6NC55_9BURK 7-cyano-7-deazaguanine s ynthase OS=Kinneretia asaccharophila OX=582607 GN=queC PE=3 SV=1
MSTTAAAPLPPQANRQRKALVLFSGGQDSTACLAWALDRYAEVETLGFDYGQRHRIELDCRQTVRREIAAQFPAWGAKLGEDHVLDLSLLGQISDTALTSERAIELQANGLPNTFVPGRNLLFLTFAATLAYRRGASVLVGGMCETDFSGYPDCRDNTLKALQVALSLGLDTPMTLETPLMFITKAETWALTQRLGGPALNALIAEHTHTCYLGERGQRHDWGYGCGHCPACELRARGYQEFVAA

SEQ ID NO: 38938 - protein, 235 aa, Kiritimatiella glycovorans
  misc_feature (1)..(235): tr|A0A0G3ED20|A0A0G3ED20_9BACT 7-cyano-7-deazaguanine s ynthase OS=Kiritimatiella glycovorans OX=1307763 GN=que C PE=3 SV=1
MRATNRRAVVLLSGGLDSATVLAEARSHDLECYALTLRYGQRHELELDAARAVADDLGVKEHLVMDLDLRRIGGSALTADLDVPRGEKRPGGGTAAAIPVTYVPARNTIFLSIALGWAEVLGTGDIYIGVNAVDYSGYPDCRPEFIDAFEAMASLATRESVEGRIRVQIHTPLIGMSKAEIIARGRRLGVDYGLTRTCYDPEGDGRACGQCEACRLRRKGFEEAGLQDPIEYAKG

SEQ ID NO: 38939 - protein, 231 aa, Kiritimatiellaceae bacterium
  misc_feature (1)..(231): tr|A0A2D7D742|A0A2D7D742_9BACT 7-cyano-7-deazaguanine s ynthase OS=Kiritimatiellaceae bacterium OX=2026752 GN=q ueC PE=3 SV=1
  misc_feature (52)..(52): Xaa can be any naturally occurring amino acid
  misc_feature (177)..(177): Xaa can be any naturally occurring amino acid
  misc_feature (220)..(220): Xaa can be any naturally occurring amino acid
MGRKAVVLLSGGLDSATVLAMAAADGFEIYAMSFRYGQRHAVELSCARALAXGAGVVEQREVEIDLGSLGGSALTTSAAVPKHDSVDELSDEIPSTYVPARNTIFLSYALAWAEVLGANDLFIGVNALDYSGYPDCRPEYIAAFETMANLATAAGVNGERLVVHTPLIHLTKAAIIXRGLALGVDYGMTTSCYDPLPGGVACGHCDSCLLRLKGFAEAGXVDPRRYADKEN

SEQ ID NO: 38940 - protein, 237 aa, Kiritimatiellaceae bacterium
  misc_feature (1)..(237): tr|A0A2E3TKL6|A0A2E3TKL6_9BACT 7-cyano-7-deazaguanine s ynthase OS=Kiritimatiellaceae bacterium OX=2026752 GN=q ueC PE=3 SV=1
  misc_feature (4)..(4): Xaa can be any naturally occurring amino acid
  misc_feature (24)..(24): Xaa can be any naturally occurring amino acid
  misc_feature (47)..(47): Xaa can be any naturally occurring amino acid
  misc_feature (86)..(86): Xaa can be any naturally occurring amino acid
  misc_feature (141)..(141): Xaa can be any naturally occurring amino acid
  misc_feature (171)..(171): Xaa can be any naturally occurring amino acid
  misc_feature (190)..(190): Xaa can be any naturally occurring amino acid
  misc_feature (210)..(210): Xaa can be any naturally occurring amino acid
  misc_feature (225)..(225): Xaa can be any naturally occurring amino acid
MMKXNKKAVILLSGGLDSATVLAXVKSLNYEIYALSFRYGQKHDIEXEFAERLANNTVREHKVVDIDLAMFGGSALTTDKLVPKHXNVDEIGSEIPITYVPARNTIFLSFALAYAEVIDSKDIFIGVNALDYSGYPDCRPXFIDSFQKTANLATAKGVKNKNISIHSPLIXLTKSQIIRKGIELGVDYSXTISCYDPVNGLACGFCDACXLRLKGFSEAGFNDPXKYSTNRINYSKE

SEQ ID NO: 38941 - protein, 887 aa, Kitasatospora albolonga
  misc_feature (1)..(887): tr|A0A1V0VHD8|A0A1V0VHD8_9ACTN Condensation domain-cont aining protein OS=Kitasatospora albolonga OX=68173 GN=B 7C62_33360 PE=4 SV=1
MGSDTRDSALDADRARLVTRQVEEAVRQQPHATDCAVVLHGAEDPDGPAPAELRCVNCGIGDAFPGLAFDTGGVCSLCARLDAHREEIQVYFRQPEELAPRLRGAARARGSDIDCLLLFSGGKDSTYVLYRLVELGLRVMTFTFDNGFISRTALRNVEDVTSELGIEHVTATRADQRTVFLRSLQEHKSVCNGCFRSLLDLSTTLAHERGIPSIVTGLSRGQIMDERLSWFHEHGVYDVAEIEEKLRVGRRVYHQASGDLGAAVDSVDVVDFFRYSEVTKEGIRAYLRQRSSLWAQPTDTGFCSSNCMINDVGVYVHAAERGYHNYEAPTRWEVRLGHLDRAEADEELRVPVDTERVRRMLARIGYPDPADLRRLGARMTAYYVPAPGTAAQELPGAVAGVLPESLLPATWVPVPRIPRTAGRVDRRALLALRTVGPSASRAPEAGGVPPADGPLLAVQQRLLRQHTEELKGHARALPLVAPGVLDPAAVRRAVLRLLQHHDALRLRFAESEGRWSQRRGGIAGAVPVGVLDLTGRDPADEARLLGKAVDRMRAGTDPVGGRPLRIAVLDRRPRPSGLLVVVHGLVADTRSWRVLLEDLSEAVRQLQAGEAVALPPAGSFLDRLPPHDPAPASASQEAAATSPGEPRTSREPLGEPLRVHCDATVPARAAATAIQRELTRLFDGAGQPLELLDHTARSGEDRTVGPLTAPETVRGGSGAGAAGPEPVTTGPEPVPTDRETGAAGSGPVTTDPEPVPTDRETAPTAPETTPAGSETAPTAPEPVPPPPPAAHDRRSHPPHRYEHFGDLSAELLAPGTLWALAPGAEDTFTRPLGGLPEGVVVTGSVRGGRLVLDWWAAEPLRTGLRAAGVPERVAARLAAGRTQGDGA

SEQ ID NO: 38942 - protein, 224 aa, Kitasatospora aureofaciens
  misc_feature (1)..(224): tr|A0A0L8P779|A0A0L8P779_KITAU 7-cyano-7-deazaguanine s ynthase OS=Kitasatospora aureofaciens OX=1894 GN=ADK78_ 27905 PE=3 SV=1
MTSAKTLVVLSGGIDSVVLAHACKAEGREISAIAIDYGQRHRKELEYAGRAAGKLNIDLTVADLGGYSRLMRGFSLTDADVTVPDEHYTRTGSVNVVPNRNPVFMTVAYAHAVLAGAQEMCLGFLAEDAATAPDTSPAFLTAFNAMEARALEGLADPPPRVTAPLITLRKADVLLLGTELGVDWRETWTCFKGERFHCGSCASCHDRRNAFAEADLPDPTRYQR

SEQ ID NO: 38943 - protein, 371 aa, Kitasatospora cineracea
  misc_feature (1)..(371): tr|A0A3N1YHG5|A0A3N1YHG5_9ACTN 7-cyano-7-deazaguanine s ynthase in queuosine biosynthesis OS=Kitasatospora cine racea OX=88074 GN=EDD39_6358 PE=4 SV=1
MAADLTRIAAAAYLADRSTPRPTTFSRTIALTVHTVDPEPWNAQPGRLVEDLLTWLTGDQWQLTAAAASAPDNAPAPIATADDVMLLSGGMDSLCGAADHLADGRSRIHLSHYDASTAIRHAQTTAVSWLNTRATQPIRHLALKVCQTGTPREASSRSRSLLFAALASTVAASASSPHVIVPENGFTSINPPLTAARGGALSTRSTHPGTFARLNQLLTTLSLPIHISNPYAYLTKGQLLTRAHQRTDGGVLAATAATLSCSKLDGARYTGGNPNHNCGLCLACLVRRAAFTDGPYPDPTPYLVDTLADDARGNLLRRRRRDMRDIQQLLLTGIDDTDLLAVGDVPLDTDIDAVMDLCQRGLQELSRVPLP

SEQ ID NO: 38944 - protein, 231 aa, Kitasatospora niigatensis
  misc_feature (1)..(231): tr|A0A3N4RYF9|A0A3N4RYF9_9ACTN 7-cyano-7-deazaguanine s ynthase OS=Kitasatospora niigatensis OX=88075 GN=queC P E=3 SV=1
MGRPAIVLLSGGLDSTTVLAIAKEQGFTPYALSFRYGQRHSVELEAAKRVAEAQGVERHVIADIDLRVFGGSALTDDIAVPKHDTVEEAESSSVPITYVPARNTIFLSFALAYAEVVGATDIFTGVTAVDYSGYPDCRPEYMDAYAKMANLATRAGIEGTQELKLHSPLIALSKADIVREGLRLGVDYSLTSSCYDPDEQGRACGRCDTCLMRLKGFAEAGATDPVQYQGA

SEQ ID NO: 38945 - protein, 244 aa, Kitasatospora sp.
  misc_feature (1)..(244): tr|A0A540W9E8|A0A540W9E8_9ACTN 7-cyano-7-deazaguanine s ynthase OS=Kitasatospora sp. MMS16-CNU292 OX=2567942 GN =queC PE=3 SV=1
MRGTTESTEMTDKSPCHAIVIASGGLDSTTVAYWLADRGAILTMLSFDYGQRHRTELQYAGRIAGHLGASHEVVDLSGLGRLLTGSALTDLGVRVPDGHYTAETMRSTVVPNRNTIMLSVAVAGAVATGADAVAFGAHSGDHAIYPDCRASFFDQFAAMTREGNEGFLADGFELLAPFIGLTKADIVEIGRQLGVPFEDTWSCYKGGQVHCGTCGTCTERIEAFALAGVSDPTVYASATPGAAS

SEQ ID NO: 38946 - protein, 236 aa, Kitasatospora xanthocidica
  misc_feature (1)..(236): tr|A0A373A5D3|A0A373A5D3_9ACTN 7-cyano-7-deazaguanine s ynthase OS=Kitasatospora xanthocidica OX=83382 GN=queC PE=3 SV=1
MTEHAPPQHAVVIASGGLDSTTVAYWLADSGSRLTLLSFDYGQRHRKELDFARQAAGRLNARHEVVDLSGLGRLLSGSALTDPAVEVPDGHYTAESMRSTVVPNRNAIMLSVAVGAAVAVGADAVAFGAHAGDHAVYPDCRTEFFDVFGEVARVGNEGFIAEGFRLLAPFIDQTKADIVRVAGQVGVPFADTWSCYRGGELHCGTCGTCAERIEAFALAEVEDPTEYATAPTGVAR

SEQ ID NO: 38947 - protein, 233 aa, Klebsiella aerogenes
  misc_feature (1)..(233): tr|A0A3S5DT61|A0A3S5DT61_KLEAE 7-cyano-7-deazaguanine s ynthase OS=Klebsiella aerogenes OX=548 GN=queC PE=3 SV= 1
MKRAVVVFSGGQDSTTCLVQALQQYDEVHCVTFDYGQRHRAEIDVARELALKLGAVAHKVLDVTLLNELAVSSLTRDNIPVPDYQPDAEGIPNTFVPGRNILFLTLTAIYAYQVKAEAIITGVCETDFSGYPDCRDEFVKALHHAVSLGMAKDIRFETPLMWLNKAETWALADYWGQLDLVRRETLTCYNGIKGDGCGQCAACNLRANGLNQYLADKVGVMAVMQQKTGLAQA

SEQ ID NO: 38948 - protein, 236 aa, Klebsiella aerogenes
  misc_feature (1)..(236): tr|A0A0M3H7X9|A0A0M3H7X9_KLEAE 7-cyano-7-deazaguanine s ynthase OS=Klebsiella aerogenes OX=548 GN=queC PE=3 SV= 1
MKRAVVVFSGGQDSTTCLVQALEQYDEVHCVTFDYGQRHRAEIDVARELALKLGAVAHKVLDVTLLNELAVSSLTRDSIPVPDYEPDADGIPNTFVPGRNILFLTLTAIYAYQVKAEAIITGVCETDFSGYPDCRDEFVKALHHAVSLGMAKDIRFETPLMWLNKAETWALADYWGQLDLVRRETLTCYNGIKGDGCGQCAACNLRANGLNQYLGDQAGVMAQMKQKTGLGQGHEA

SEQ ID NO: 38949 - protein, 231 aa, Klebsiella grimontii
  misc_feature (1)..(231): tr|A0A4R4DLT4|A0A4R4DLT4_9ENTR 7-cyano-7-deazaguanine s ynthase OS=Klebsiella grimontii OX=2058152 GN=queC PE=3 SV=1
MKRAVVVFSGGQDSTTCLVQALQQYDEVHCVTFDYGQRHRVEIDVARELALKLGAVAHKILDVTLLNELAVSSLTRDSIPVPDYEPDASGIPNTFVPGRNILFLTLTAIYAYQVKAEAIITGVCETDFSGYPDCRDEFVQALHHAVSLGMAKDIRFETPLMWLNKAETWALADYWGQLALVRHETLTCYNGIKGDGCGQCAACNLRANGLHHYLGDKVGVMTVMKQKTGLQ

SEQ ID NO: 38950 - protein, 231 aa, Klebsiella grimontii
  misc_feature (1)..(231): tr|A0A564GSF2|A0A564GSF2_9ENTR 7-cyano-7-deazaguanine s ynthase OS=Klebsiella grimontii OX=2058152 GN=queC PE=3 SV=1
MKRAVVVFSGGQDSTTCLVQALQQYDEVHCVTFDYGQRHRAEIDVARELALKLGAVAHKVLDVTLLNELAVSSLTRDSIPIPDYEPDASGIPNTFVPGRNILFLTLTAIYAYQVKAEAIITGVCETDFSGYPDCRDEFVKALHHAVSLGMAKDIRFETPLMWLNKAETWALADYWGQLELVRHETLTCYNGIKGDGCGQCAACNLRANGLSHYLGDKVGVMTVMKQKTGLQ

SEQ ID NO: 38951 - protein, 231 aa, Klebsiella michiganensis
  misc_feature (1)..(231): tr|A0A341E8C0|A0A341E8C0_9ENTR 7-cyano-7-deazaguanine s ynthase OS=Klebsiella michiganensis OX=1134687 GN=queC PE=3 SV=1
MKRAVVVFSGGQDSTTCLVQALQQYDEVHCVTFDYGQRHRAEIDVARELALKLGAVAHKILDVTLLNELAVSSLTRDSIPVPDYEPDASGIPNTFVPGRNILFLTLTAIYAYQVKAEAIITGVCETDFSGYPDCRDEFVQALHHAVSLGMAKDIRFETPLMWLNKAETWALADYWGQLALVRHETLTCYNGIKGDGCGQCAACNLRANGLHHYLGDKVGVMTVMKQKTGLQ

SEQ ID NO: 38952 - protein, 231 aa, Klebsiella michiganensis
  misc_feature (1)..(231): tr|A0A0J2LE24|A0A0J2LE24_9ENTR 7-cyano-7-deazaguanine s ynthase OS=Klebsiella michiganensis OX=1134687 GN=queC PE=3 SV=1
MKRAVVVFSGGQDSTTCLVQALQQYDEVHCVTFDYGQRHRAEIDVARELALKLGAVAHKVLDVTLLNELAVSSLTRDSIPVPDYEPDASGIPNTFVPGRNILFLTLTAIYAYQVKAEAIITGVCETDFSGYPDCRDEFVKALHHAVSLGMAKDIRFETPLMWLNKAETWALADYWGQLDLVRHETLTCYNGIKGDGCGQCAACNLRANGLSQYLGDKVGVMTVMKQKTGLQ

SEQ ID NO: 38953 - protein, 103 aa, Klebsiella oxytoca
  misc_feature (1)..(103): tr|A0A377SHC5|A0A377SHC5_KLEOX 7-cyano-7-deazaguanine s ynthase OS=Klebsiella oxytoca OX=571 GN=queC_1 PE=3 SV= 1
MKRAVVVFSGGQDSTTCLVQALQQYDEVHCVTFDYGQRHRAEIDVARELALKLGAVAHKVLDVTLLNELAVSSLTAIAFRFRIMNRTPAAFRIPSYPGATFCF

SEQ ID NO: 38954 - protein, 231 aa, Klebsiella oxytoca; identical to SEQ ID NO: 38952
  misc_feature (1)..(231): tr|A0A0G3SDE2|A0A0G3SDE2_KLEOX 7-cyano-7-deazaguanine s ynthase OS=Klebsiella oxytoca OX=571 GN=queC_1 PE=3 SV= 1

SEQ ID NO: 38955 - protein, 84 aa, Klebsiella pneumoniae
  misc_feature (1)..(84): tr|A0A378E636|A0A378E636_KLEPR 7-cyano-7-deazaguanine s ynthase OS=Klebsiella pneumoniae subsp. rhinoscleromati s OX=39831 GN=queC_1 PE=3 SV=1
MAKDIRFETPLMWLNKAETWALADYWGQLDLVRRETLTCYNGIKGDGCGQCAACNLRANGLNQYLADKVGVMAVMQQKTGLAQA

SEQ ID NO: 38956 - protein, 233 aa, Klebsiella pneumoniae; identical to SEQ ID NO: 38947
  misc_feature (1)..(233): sp|A6T5I7|QUEC_KLEP7 7-cyano-7-deazaguanine synthase OS =Klebsiella pneumoniae subsp. pneumoniae (strain ATCC 7 00721 / MGH 78578) OX=272620 GN=queC PE=3 SV=1

SEQ ID NO: 38957 - protein, 233 aa, Klebsiella quasipneumoniae
  misc_feature (1)..(233): tr|A0A2Z3FFW0|A0A2Z3FFW0_9ENTR 7-cyano-7-deazaguanine s ynthase OS=Klebsiella quasipneumoniae OX=1463165 GN=que C PE=3 SV=1
MKRAVVVFSGGQDSTTCLVQALQQYDEVHCVTFDYGQRHRAEIDVARELALKLGAVAHKVLDVTLLNELAVSSLTRDNIPVPDYQPDAEGIPNTFVPGRNILFLTLTAIYAYQVKADAIITGVCETDFSGYPDCRDEFVKALHHAVSLGMAKDIRFETPLMWLNKAETWALADYWGQLDLVRRETLTCYNGIKGDGCGQCAACNLRANGLNQYLADKVGVMAVMKQKTGLTQA

SEQ ID NO: 38958 - protein, 233 aa, Klebsiella quasipneumoniae
  misc_feature (1)..(233): tr|A0A5C6IL75|A0A5C6IL75_9ENTR 7-cyano-7-deazaguanine s ynthase OS=Klebsiella quasipneumoniae subsp. similipneu moniae OX=1463164 GN=queC PE=3 SV=1
MKRAVVVFSGGQDSTTCLVQALQQYDEVHCVTFDYGQRHRAEIDVARELALKLGAVAHKVLDVTLLNELAVSSLTRDNIPVPDYQPDAEGIPNTFVPGRNILFLTLTAIYAYQVKAEAIITGVCETDFSGYPDCRDEFVKALHHAVSLGMAKDIRFETPLMWLNKAETWALADYWGQLDLVRRETLTCYNGIKGDGCGQCAACNLRANGLNQYLADKVGVMAVMKQKTGLTQA

SEQ ID NO: 38959 - protein, 233 aa, Klebsiella quasivariicola
  misc_feature (1)..(233): tr|A0A223UF94|A0A223UF94_9ENTR 7-cyano-7-deazaguanine s ynthase OS=Klebsiella quasivariicola OX=2026240 GN=queC PE=3 SV=1
MKRAVVVFSGGQDSTTCLVQALQQYDEVHCVTFDYGQRHRAEIDVARELALKLGAVAHKVLDVTLLNELAVSSLTRDNIPVPDYQPDAEGIPNTFVPGRNILFLTLTAIYAYQVKAEAIITGVCETDFSGYPDCRDEFVKALHHAVSLGMAKDIRFETPLMWLNKAETWALADYWGQLDLVRRETLTCYNGIKGDGCGQCAACNLRANGLNQYLGDKVGVMAVMKQKTGLTQA

SEQ ID NO: 38960 - protein, 231 aa, Klebsiella sp.
  misc_feature (1)..(231): tr|A0A564GV74|A0A564GV74_9ENTR 7-cyano-7-deazaguanine s ynthase OS=Klebsiella sp. WCHKl090001 OX=2153354 GN=que C PE=3 SV=1
MKRAVVVFSGGQDSTTCLVQALQQYDEVHCVTFDYGQRHRAEIDVARELAMKLGAVAHKVLDVTLLNELAISSLTRDSIPVPDYEPDANGIPNTFVPGRNILFLTLTAIYAYQVKAEAIITGVCETDFSGYPDCRDEFVKALHHAVSLGMAKDIRFETPLMWLNKAETWALADYWGQLDLVRQETLTCYNGIKGDGCGQCAACHLRANGLNQYQADKPGIMAVMKRKTGLE

SEQ ID NO: 38961 - protein, 233 aa, Klebsiella sp.
  misc_feature (1)..(233): tr|A0A3G5D710|A0A3G5D710_9ENTR 7-cyano-7-deazaguanine s ynthase OS=Klebsiella sp. P1CD1 OX=2267618 GN=queC PE=3 SV=1
MKRAVVVFSGGQDSTTCLVQALQQYDEVHCVTFDYGQRHRAEIDVARELALKLGAVAHKVLDVTLLNELAVSSLTRDNIPVPDYQPDAEGIPNTFVPGRNILFLTLTAIYAYQVKAEAIITGVCETDFSGYPDCRDEFVKALHHAVSLGMAKDIRFETPLMWLNKAETWALADFWGQLDLVRQETLTCYNGIKGDGCGQCAACNLRANGLNQYLGDKVGVMAVMKQKTGLAQA

SEQ ID NO: 38962 - protein, 215 aa, Klebsiella variicola
  misc_feature (1)..(215): tr|A0A2N5A7U0|A0A2N5A7U0_KLEVA 7-cyano-7-deazaguanine s ynthase (Fragment) OS=Klebsiella variicola OX=244366 GN =CWM98_29855 PE=3 SV=1
MKRAVVVFSGGQDSTTCLVQALQQYDEVHCVTFDYGQRHRAEIDVARELALKLGAVAHKVLDVTLLNELAVSSLTRDNIPVPDYQPDAEGIPNTFVPGRNILFLTLTAIYAYQVKAEAIITGVCETDFSGYPDCRDEFVKALHHAVSLGMAKDIRFETPLMWLNKAETWALADFWGQLDLVRQETLTCYNGIKGDGCGQCAACNLRANGLNQYLG

SEQ ID NO: 38963 - protein, 233 aa, Klebsiella variicola; identical to SEQ ID NO: 38961
  misc_feature (1)..(233): tr|A0A087FUH7|A0A087FUH7_KLEVA 7-cyano-7-deazaguanine s ynthase OS=Klebsiella variicola OX=244366 GN=queC PE=3 SV=1

SEQ ID NO: 38964 - protein, 231 aa, Kluyvera ascorbata
  misc_feature (1)..(231): tr|A0A378GLM7|A0A378GLM7_9ENTR 7-cyano-7-deazaguanine s ynthase OS=Kluyvera ascorbata OX=51288 GN=queC PE=3 SV= 1
MKRAVVVFSGGQDSTTCLVQALHQYDEVHCVTFDYGQRHRAEIDVARELALTLGARAHKVLDVTLLNELAVSSLTRDSIPVPDYEPDADGIPNTFVPGRNILFLTLAAIYAYQVKAEAVITGVCETDFSGYPDCRDEFVKALNHAVSLGMAKDIRFETPLMWLDKAQTWALADYWDKLELVRTETLTCYNGIKGNGCGHCAACNLRANGLNHYLADKPGVMAAMKQKTGLK

SEQ ID NO: 38965 - protein, 231 aa, Kluyvera ascorbata
  misc_feature (1)..(231): tr|A0A3N2SFB3|A0A3N2SFB3_9ENTR 7-cyano-7-deazaguanine s ynthase OS=Kluyvera ascorbata OX=51288 GN=queC PE=3 SV= 1
MKRAVVVFSGGQDSTTCLVQALHQYDEVHCVTFDYGQRHRAEIDVARELALTLGARAHKVLDVTLLNELAVSSLTRDSIPVPDYEPDADGIPNTFVPGRNILFLTLAAIYAYQVKAEAVITGVCETDFSGYPDCRDEFVKALNHAVSLGMAKDIRFETPLMWLDKAQTWALADYWNKLELVRTETLTCYNGIKGNGCGHCAACNLRANGLNHYLADKPGVMAAMKQKTGLK

SEQ ID NO: 38966 - protein, 233 aa, Kluyvera cryocrescens
  misc_feature (1)..(233): tr|A0A2X3EB35|A0A2X3EB35_KLUCR 7-cyano-7-deazaguanine s ynthase OS=Kluyvera cryocrescens OX=580 GN=queC PE=3 SV =1
MKRAVVVFSGGQDSTTCLVQALHQYDEVHCVTFDYGQRHRAEIDVARELALTLGARAHKVLDVTLLNELAVSSLTRDSIPVPDYEPDADGIPNTFVPGRNILFLTLAAIYAYQVKAEAVITGVCETDFSGYPDCRDEFVKALNHAVSLGMAKDIRFETPLMWLDKAQTWALADYWGKLDLVRTETLTCYNGIKGDGCGHCAACNLRANGLHHYLADKPGVMATMKQKTGLKSV

SEQ ID NO: 38967 - protein, 98 aa, Kluyvera cryocrescens
  misc_feature (1)..(98): tr|A0A485CZ09|A0A485CZ09_KLUCR 7-cyano-7-deazaguanine s ynthase OS=Kluyvera cryocrescens OX=580 GN=queC_1 PE=3 SV=1
MSLWKALNHAVSLGMAKDIRFETPLMWLDKAQTWALADYWGKLDLVRTETLTCYNGIKGDGCGHCAACNLRANGLHHYLADKPGVMATMKQKTGLKSV

SEQ ID NO: 38968 - protein, 231 aa, Kluyvera georgiana
  misc_feature (1)..(231): tr|A0A1B7JI52|A0A1B7JI52_9ENTR 7-cyano-7-deazaguanine s ynthase OS=Kluyvera georgiana ATCC 51603 OX=1354264 GN= queC PE=3 SV=1
MKRAVVVFSGGQDSTTCLVQALHQYDEVHCVTFDYGQRHRAEIDVARELALKLGARAHKVLDVTLLNELAVSSLTRDSIPVPDYEPSAAGIPNTFVPGRNILFLTLTAIYAYQVQAEAVITGVCETDFSGYPDCRDEFVKALNHAVNLGMAKDIRFETPLMWLDKAQTWALADYWGKLDMVRGETLTCYNGIKGDGCGHCAACNLRANGLNHYLADKPGVMAAMKQKTGLK

SEQ ID NO: 38969 - protein, 231 aa, Kluyvera intermedia
  misc_feature (1)..(231): tr|A0A1X0X802|A0A1X0X802_KLUIN 7-cyano-7-deazaguanine s ynthase OS=Kluyvera intermedia OX=61648 GN=queC PE=3 SV =1
MKRAVVVFSGGQDSTTCLIQALQQYDEVHCVTFDYGQRHRAEIDVARELALQSGARAHKVLDVTLLNELAVSSLTRDSIPVPDYQPDASGIPNTFVPGRNILFLTLTAIYAYQVQAEAVITGVCETDFSGYPDCRDEFVKALNHAVNLGMAKDIRFETPLMWIDKAETWALADYWGKLELVRNETLTCYNGIKGDGCGHCAACNLRANGLRHYLADKAGVMAAMKKKTGLK

SEQ ID NO: 38970 - protein, 231 aa, Kluyvera intermedia
  misc_feature (1)..(231): tr|A0A447MKF8|A0A447MKF8_KLUIN 7-cyano-7-deazaguanine s ynthase OS=Kluyvera intermedia OX=61648 GN=queC PE=3 SV =1
MKRAVVVFSGGQDSTTCLVQALHQYDEVHCVTFDYGQRHRAEIDVARELALTLGARAHKVLDVTLLNELAVSSLTRDSIPVPDYEPDADGIPNTFVPGRNILFLTLTAIYAYQVKAEAIITGVCETDFSGYPDCRDEFVKALHHAVSLGMAKDIRFETPLMWLDKAQTWALADYWGKLDLVRSETLTCYNGIKGDGCGHCAACSLRANGLNHYLADKPAVMAAMKQKTGLK

SEQ ID NO: 38971 - protein, 231 aa, Kluyvera sp.
  misc_feature (1)..(231): tr|A0A2T3XJD7|A0A2T3XJD7_9ENTR 7-cyano-7-deazaguanine s ynthase OS=Kluyvera sp. Nf5 OX=2116543 GN=queC PE=3 SV= 1
MKRAVVVFSGGQDSTTCLVQALQQYDEVHCVTFDYGQRHRAEIDVARELALQLGARAHKVLDVTLLNELAVSSLTRDSIPVPDYQPDASGIPNTFVPGRNILFLTLAAIYAYQVQAEAVITGVCETDFSGYPDCRDEFVKALNHAVTLGMAKDIRFETPLMWIDKAETWALADYWGKLELVRNETLTCYNGIKGDGCGQCAACNLRANGLSHYLADKTAVMAAMKKKTGLK

SEQ ID NO: 38972 - protein, 425 aa, Kocuria indica
  misc_feature (1)..(425): tr|A0A4P6RQ64|A0A4P6RQ64_9MICC 7-cyano-7-deazaguanine s ynthase OS=Kocuria indica OX=1049583 GN=KocCE7_07195 PE =3 SV=1
MKYLSVPKLEGADRGGDQTPILLFGRGGAGDVLTAGWSAAERIRRQKLMPDAAAWDLLAIALSVVVADGTTLRSASPDGWTRQIDLEIALSDPDRWTPYADAIGTALRFLTTDLWTISFRDGGTIPAPPKKPRYPTSEAVALLSGGLDSLIGAIDLTASGTTLLAVSQTVRGDAAKQDRFAQRIGGGIDHLQLNHNASTPRGQKETSQRSRSLIFLAFAVLAATATRRYAYGHPVPLYVCENGFIAINPPLTAARVGSLSTRTAHPEFLGRMQSIFEAVGLNIQIKNPYAEKTKGEMLRECLDQDLLSIEAPLSTSCGRFQRFNYKHCGRCVPCQIRRASFEAWGRPDPTEYVYDNLAIQDEDHAAFDDVRSVAIALLTIEQDGFDRWLGPTLSSPLIHNRLELRDMLQRGFGELRTIHERYGLV

SEQ ID NO: 38973 - protein, 241 aa, Komagataeibacter cocois
  misc_feature (1)..(241): tr|A0A365YZV6|A0A365YZV6_9PROT 7-cyano-7-deazaguanine s ynthase OS=Komagataeibacter cocois OX=1747507 GN=queC P E=3 SV=1
MTLSALSPDTALVVFSGGQDSATCLAWALSRFAHVETLGFDYGQRHSIELSCREKLRDGMTRLDPEWGARLGPDHTLSLDALGAVSDTALTREAEITMGENGLPTTFVPGRNLIFLTFAAALAARRNARHIITGVCETDYSGYPDCRDDTIKSLQVTLNLGMASRLVLHTPLMWIDKARTWQMARDLGGDDLVNLINRESHSCYLGTRGVMHAWGHGCGTCPACQLRRAGWERFRLLSSDA

SEQ ID NO: 38974 - protein, 245 aa, Komagataeibacter europaeus
  misc_feature (1)..(245): tr|A0A0M0ELJ5|A0A0M0ELJ5_KOMEU 7-cyano-7-deazaguanine s ynthase OS=Komagataeibacter europaeus OX=33995 GN=queC PE=3 SV=1
MSVPPPPSHPENEAALVLFSGGQDSATCLAWALARFGRVETLGFDYGQRHAVELECRATLRDGMATENALWAQRLGADHTLDLAALGTVSDTALTREAEITMNENGLPNTFVPGRNLIFLTFAAALAARRNIRHIVTGVCETDYSGYPDCRDDTIKSLQVTLNLGMDAHYVLHTPLMWIDKAQTWELAHQLGGETLVRLINRESHSCYMGTRGTLHAWGHGCGTCPACQLRKAGWAQYMAARQHV

SEQ ID NO: 38975 - protein, 245 aa, Komagataeibacter europaeus; identical to SEQ ID NO: 38974
  misc_feature (1)..(245): tr|A0A0D6PX04|A0A0D6PX04_KOMEU 7-cyano-7-deazaguanine s ynthase OS=Komagataeibacter europaeus NBRC 3261 OX=1234 669 GN=queC PE=3 SV=1

SEQ ID NO: 38976 - protein, 248 aa, Komagataeibacter hansenii
  misc_feature (1)..(248): tr|A0A318Q1B6|A0A318Q1B6_KOMHA 7-cyano-7-deazaguanine s ynthase OS=Komagataeibacter hansenii OX=436 GN=queC PE= 3 SV=1
MTIPATSAAGPSGDSALVVFSGGQDSATCLAWALSRFAHVETLGFDYGQRHSVELSCRAALRDGMARLDPAWAARLGPDHTLSLDALGAVSDTALTREAEITLGENGLPTTFVPGRNIIFLTFAAALAARRNARHIVTGVCETDYSGYPDCRDDTIKALQVTLNLGMASRLVLHTPLMWIDKAQTWLMAQELGGDALVGLINRESHSCYLGTRGVMHPWGHGCGTCPACQLRRAGWERFRAMTQGHDI

SEQ ID NO: 38977 - protein, 248 aa, Komagataeibacter hansenii; identical to SEQ ID NO: 38976
  misc_feature (1)..(248): tr|D5QDE2|D5QDE2_KOMHA 7-cyano-7-deazaguanine synthase OS=Komagataeibacter hansenii ATCC 23769 OX=714995 GN=qu eC PE=3 SV=1

SEQ ID NO: 38978 - protein, 245 aa, Komagataeibacter intermedius
  misc_feature (1)..(245): tr|A0A0N0MF10|A0A0N0MF10_9PROT 7-cyano-7-deazaguanine s ynthase OS=Komagataeibacter intermedius AF2 OX=1458464 GN=queC PE=3 SV=1
MSVSPPPSHPENEAALVLFSGGQDSATCLAWALSRFGRVETLGFDYGQRHAVELECRDALRDGMATENAQWAQRLGADHTLDLAALGTVSDTALTREAEITMNENGLPNTFVPGRNLIFLTFAAALAARRHIRHIVTGVCETDYSGYPDCRDDTIKSLQVTLNLGMDSHYVLHTPLMWIDKAQTWELARQLGGNALVRLINRESHSCYLGTRGTLHAWGHGCGTCPACQLRKAGWEQFMAARQHV

SEQ ID NO: 38979 - protein, 246 aa, Komagataeibacter maltaceti
  misc_feature (1)..(246): tr|A0A2S3W554|A0A2S3W554_9PROT 7-cyano-7-deazaguanine s ynthase OS=Komagataeibacter maltaceti OX=1203393 GN=que C PE=3 SV=1
MTIPAPSPAGPSGERALVVFSGGQDSATCLAWALSRFAHVETLGFDYGQRHSIELSCREKLRAGMAALDPAWGVRLGPDHTLSLDALGAVSDTALTREAEITLGENGLPTTFVPGRNIIFLTFAAALAARRNARHIITGVCETDYSGYPDCRDDTIKALQVTLNLGMASRLVLHTPLMWIDKAQTWMMARELGGDALVDLINRESHSCYLGTRGVMHPWGHGCGTCPACQLRRAGWERFEAMTSDA

SEQ ID NO: 38980 - protein, 245 aa, Komagataeibacter medellinensis
  misc_feature (1)..(245): tr|G2I225|G2I225_KOMMN 7-cyano-7-deazaguanine synthase OS=Komagataeibacter medellinensis (strain NBRC 3288 / B CRC 11682 / LMG 1693 / Kondo 51) OX=634177 GN=queC PE=3 SV=1
MSVSPPPSIPAREAALVLFSGGQDSATCLAWALARFGRVETLGFDYGQRHAVELECRDTLRRGMASEKPHWAQRLGADHTLDLAALGHVSDTALTREAEITLNENGLPNTFVPGRNLIFLTFAAALAARRNIRHIITGVCETDYSGYPDCRDDTIKSLQVTLNLGMASHYVLHTPLMWLDKAQTWELAQTLGGEALVGLINRESHSCYLGTRGTLHAWGHGCGTCPACQLRQAGWERFAEKSRHV

SEQ ID NO: 38981 - protein, 246 aa, Komagataeibacter nataicola
  misc_feature (1)..(246): tr|A0A1U9RNN6|A0A1U9RNN6_9PROT 7-cyano-7-deazaguanine s ynthase OS=Komagataeibacter nataicola OX=265960 GN=queC PE=3 SV=1
MSVSPPPPSRSENEAALVLFSGGQDSATCLAWALARFGRVETLGFDYGQRHAVELECRATLRDGMARLNPSWAQRLGADHTLDLAALGTVSDTALTREAEIALTEDGLPNTFVPGRNIIFLTFAAALAARRNIRHIVTGVCETDYSGYPDCRDDTIKSLQVTLNLGMASHYILHTPLMWIDKAQTWDLTEQLGGDALVRLINHESHSCYLGTRGALHAWGHGCGTCPACLLRKAGWERFMAQKHHV

SEQ ID NO: 38982 - protein, 245 aa, Komagataeibacter oboediens
  misc_feature (1)..(245): tr|A0A318QYF1|A0A318QYF1_9PROT 7-cyano-7-deazaguanine s ynthase OS=Komagataeibacter oboediens OX=65958 GN=queC PE=3 SV=1
MSVPPPPSHPENEAALVLFSGGQDSATCLAWALSRFGRVETLGFDYGQRHAVELECRDALRDGMATENPQWAQRLGADHTLDLAALGTVSDTALTREAEITMNENGLPNTFVPGRNLIFLTFAAALAARRHIRHIVTGVCETDYSGYPDCRDDTIKSLQVTLNLGMDSHYVLHTPLMWIDKAQTWELARQLGGNALVRLINRESHSCYLGSRGTLHAWGHGCGTCPACQLRKAGWEQFMAARQHV

SEQ ID NO: 38983 - protein, 241 aa, Komagataeibacter pomaceti
  misc_feature (1)..(241): tr|A0A318QAJ5|A0A318QAJ5_9PROT 7-cyano-7-deazaguanine s ynthase OS=Komagataeibacter pomaceti OX=2021998 GN=queC PE=3 SV=1
MTLSALSPDTALVVFSGGQDSATCLAWALSRFAHVETLGFDYGQRHSIELSCREKLRDGMARLDPAWGARLGPDHTLSLDALGAVSDTALTREAEITMGENGLPTTFVPGRNLIFLTFAAALAARRNARHIITGVCETDYSGYPDCRDDTIKSLQVTLNLGMASRLVLHTPLMWIDKARTWQMARDLGGDALVNLINRESHSCYLGTRGVMHPWGHGCGTCPACQLRRAGWERFQSLSSDA

SEQ ID NO: 38984 - protein, 245 aa, Komagataeibacter rhaeticus; identical to SEQ ID NO: 38486
  misc_feature (1)..(245): tr|A0A181C974|A0A181C974_9PROT 7-cyano-7-deazaguanine s ynthase OS=Komagataeibacter rhaeticus OX=215221 GN=queC PE=3 SV=1

SEQ ID NO: 38985 - protein, 245 aa, Komagataeibacter rhaeticus
  misc_feature (1)..(245): tr|A0A070ABK1|A0A070ABK1_9PROT 7-cyano-7-deazaguanine s ynthase OS=Komagataeibacter rhaeticus AF1 OX=1432055 GN =queC PE=3 SV=1
MSVSPPPSTPAREAALVLFSGGQDSATCLAWALARFGRVETLGFDYGQRHAVELECRATLREGMATENPQWAARLGADHTLDLAVLGTLSDTALTREAEITLNENGLPNTFVPGRNLLFLTFAAALAARRNIRHIITGVCETDYSGYPDCRDDTIKSLQVTLNLGMASHYVLHTPLMWLDKARTWELARTLGGDALVGLINRESHSCYLGTRGTLHPWGHGCGTCPACQLRKAGWERFLAECSHV

SEQ ID NO: 38986 - protein, 245 aa, Komagataeibacter saccharivorans
  misc_feature (1)..(245): tr|A0A347W803|A0A347W803_9PROT 7-cyano-7-deazaguanine s ynthase OS=Komagataeibacter saccharivorans OX=265959 GN =queC PE=3 SV=1
MSVPPPPSRPENEAALVLFSGGQDSATCLAWALSRFGRVETLGFDYGQRHAVELECRTALRDGMAIENPDWAARLGADHTLDLAALGTVSDTALTREAEIALTEGGLPNTFVPGRNIIFLTFAAALAARRNIRHIVTGVCETDYSGYPDCRDDTMKSLQVTLNLGMDSHYIIHTPLMWIDKAETWDLALQLGGNALVRLINHESHSCYLGTRGTLHAWGHGCGTCPACQLRKAGWERFVAQHPHV

SEQ ID NO: 38987 - protein, 245 aa, Komagataeibacter sp.
  misc_feature (1)..(245): tr|A0A371Z3D6|A0A371Z3D6_9PROT 7-cyano-7-deazaguanine s ynthase OS=Komagataeibacter sp. AV 382 OX=2301223 GN=qu eC PE=3 SV=1
MSVPPPLSRPEDEAALVLFSGGQDSATCLAWALSRFGRVETLGFDYGQRHAVELECRATLREGMATENPTWAQRLGADHTLDLAALGTVSDTALTREAEIAMTEGGLPNTFVPGRNLIFLTFAAALAARRNVRHIVTGVCETDYSGYPDCRDDTIKSLQVTLNLGMDSHYIIHTPLMWIDKAQTWELALQLGGNALVRLINHESHSCYLGTRGTLHAWGHGCGTCPACLLRKAGWERFMAERHHV

SEQ ID NO: 38988 - protein, 245 aa, Komagataeibacter sp.
  misc_feature (1)..(245): tr|A0A4P5NJW5|A0A4P5NJW5_9PROT 7-cyano-7-deazaguanine s ynthase OS=Komagataeibacter sp. MSKU9 OX=1932662 GN=que C PE=3 SV=1
MSVPPPPSHPENEAALVLFSGGQDSATCLAWALARFGRVETLGFDYGQRHAVELECRAALRDGMARQNARWAERLGADHTLDLAALGTVSDTALTREAKITMSENGLPNTFVPGRNLIFLTFAAALAARRNIRHIVTGVCETDYSGYPDCRDDTIKSLQVTLNLGMDAHYVLHTPLMWIDKAQTWELAHQLGGDALVHLINRESHSCYLGTRGTLHAWGHGCGTCPACRLRKAGWEQYMAARQHV

SEQ ID NO: 38989 - protein, 246 aa, Komagataeibacter sucrofermentans
  misc_feature (1)..(246): tr|A0A318QJ46|A0A318QJ46_9PROT 7-cyano-7-deazaguanine s ynthase OS=Komagataeibacter sucrofermentans OX=1053551 GN=queC PE=3 SV=1
MSVSPPPPSRPENEAALVLFSGGQDSATCLAWALARFGRVETLGFDYGQRHAVELECRATLRDGMARLNPTWAQRLGADHTLDLAALGTVSDTALTREAEIALTEGGLPNTFVPGRNIIFLTFAAALAARRNIRHIVTGVCETDYSGYPDCRDDTIKSLQVTLNLGMASHYILHTPLMWIDKAQTWDLAGQLGGDALVQLINHESHSCYLGTRGVLHDWGHGCGTCPACLLRKAGWERFMAQKHHV

SEQ ID NO: 38990 - protein, 245 aa, Komagataeibacter swingsii
  misc_feature (1)..(245): tr|A0A2V4RKM7|A0A2V4RKM7_9PROT 7-cyano-7-deazaguanine s ynthase OS=Komagataeibacter swingsii OX=215220 GN=queC PE=3 SV=1
MRAPPPPSHPENEAALVLFSGGQDSATCLAWALARFGRVETLGFDYGQRHAVELECRAALRDGMATQNALWAQRLGADHTLDLAALGTVSDTALTREAEITMNENGLPNTFVPGRNLIFLTFAAALAARRNIRHIVTGVCETDYSGYPDCRDDTIKSLQVTLNLGMDAHYVLHTPLMWIDKAQTWELAHQLGGDALVRLINRESHSCYLGTRGTLHAWGHGCGTCPACTLRRAGWEQYMAARQHV

SEQ ID NO: 38991 - protein, 245 aa, Komagataeibacter xylinus; identical to SEQ ID NO: 38486
  misc_feature (1)..(245): tr|A0A2D3HC80|A0A2D3HC80_KOMXY 7-cyano-7-deazaguanine s ynthase OS=Komagataeibacter xylinus OX=28448 GN=queC PE =3 SV=1

SEQ ID NO: 38992 - protein, 248 aa, Komagataeibacter xylinus; identical to SEQ ID NO: 38976
  misc_feature (1)..(248): tr|A0A143WGN1|A0A143WGN1_KOMXY 7-cyano-7-deazaguanine s ynthase OS=Komagataeibacter xylinus OX=28448 GN=queC PE =3 SV=1

SEQ ID NO: 38993 - protein, 237 aa, Kordiimonadales bacterium
  misc_feature (1)..(237): tr|A0A5A7N9W8|A0A5A7N9W8_9PROT 7-cyano-7-deazaguanine s ynthase OS=Kordiimonadales bacterium JCM 17846 OX=12369 68 GN=queC PE=3 SV=1
MTKGSSSPGTPAILLLSGGLDSATVGAMARADGFALHALSFDYGQRHKAELQAADRVAKSLDVVEHKVAHIDLALFGGSALTADIDVPKGRTDSDRDAGIPITYVPARNTIFLSYALAFAEVREARHIFIGVNAVDFSGYPDCRPDYIKAYETMANLATVLGRSGTARIEIRTPLLHMSKAEIVAAGTRLDVDYAQTTSCYDPDEYGRACGACDACFLRREGFAAAGIADPTRYKAS

SEQ ID NO: 38994 - protein, 206 aa, Kordiimonadales bacterium
  misc_feature (1)..(206): tr|A0A5A7MU55|A0A5A7MU55_9PROT 7-cyano-7-deazaguanine s ynthase OS=Kordiimonadales bacterium JCM 17844 OX=12369 66 GN=exsB PE=3 SV=1
MNQAVVMVSGGLDSTTVCYLLVREGIEVYPIFFDYGQHCAKTEWAKVREVLPQKALPPERLNISDLFKGSSSRMIQEADLWKEAVSDDDLYVPYRTMLFFAAAAARAQTLQVLNVYSGFINSNHAKEIDCSTAFMNGLEELSSGVGAVRFHAPFREKTKADVVRQALELGVPIGRTFSCQASSSFPCGACPNCVERLNALVEAGIA

SEQ ID NO: 38995 - protein, 231 aa, Kordiimonas lacus
  misc_feature (1)..(231): tr|A0A1G6VMJ1|A0A1G6VMJ1_9PROT 7-cyano-7-deazaguanine s ynthase OS=Kordiimonas lacus OX=637679 GN=queC PE=3 SV= 1
MSDRKKAVVLLSGGLDSATCVAIAQEQGFEVYALSFRYGQRHSVELEAADRIADHLGVTEHKTAVIDLTLFGGSALTADIDVPKDRSDDDMSHDIPVTYVPARNTIFLSFALAYAEVVGAKDIFIGVNALDYSGYPDCRPEFIKSYEETANLGTKVGVTDAERIRIRTPLLDMTKAEIAAAGTKLGVDYGLTISCYDPDTAGKACGHCDSCLLRKKGFKEAGLADPTRYQD

SEQ ID NO: 38996 - protein, 232 aa, Kordiimonas sp.
  misc_feature (1)..(232): tr|A0A2E1CYE1|A0A2E1CYE1_9PROT 7-cyano-7-deazaguanine s ynthase OS=Kordiimonas sp. OX=1970157 GN=queC PE=3 SV=1
MNNPEKRKAVVLLSGGLDSSTCLAMALQQGYETYALSFQYGQRHTIELDAAANIAVKQGAAKHVIANIDLRGFGGSALTDDIPVPKGRTESEMDVEIPVTYVPARNTIFLSYALAWAEVLKAYDIFIGVNAMDYSGYPDCRPEYIRSYEQMANLATKSGVSGEKVTIHAPLIDMTKAEIIQKGLSLGVDYSLTTSCYDPDEKGASCGQCDACKLRLKGFRENGIIDPIKYIT

SEQ ID NO: 38997 - protein, 237 aa, Koribacter versatilis
  misc_feature (1)..(237): sp|Q1IHK6|QUEC_KORVE 7-cyano-7-deazaguanine synthase OS =Koribacter versatilis (strain Ellin345) OX=204669 GN=q ueC PE=3 SV=2
MKVQRGDTGKAVVVLSGGMDSTVCATLAVREYGAENIGALHVSYGQRTAAREKQAFAAVAERLGIQTRLAVETPFFRAIGGSALTDANIAVPDAGELIGHEIPVTYVPFRNAHLLAMAVSWAEVLGASKIYIGAVAQDSSGYPDCRPEFYEAYNLAVRRGTKAGDIEVVTPLIALRKHEIVSLGLELGAPFDLTWSCYSREDCACGVCDSCVLRLRAFEGAGAVDPVPYAPRLAGHD

SEQ ID NO: 38998 - protein, 231 aa, Kosakonia arachidis
  misc_feature (1)..(231): tr|A0A1I6XVV6|A0A1I6XVV6_9ENTR 7-cyano-7-deazaguanine s ynthase OS=Kosakonia arachidis OX=551989 GN=queC PE=3 S V=1
MKRAVVVFSGGQDSTTCLVQALQQYDEVHCVTFDYGQRHRAEIDVARELALTLGARAHKVLDVTLLNELAVSSLTRDSIPVPDYEPDATGIPNTFVPGRNILFLTLAAVYAYQVQAEAVITGVCETDFSGYPDCRDEFVTALNHAVNLGLAKDIRFETPLMWINKAETWALADYWEKLDLVRGETLTCYNGIKGDGCGHCAACNLRANGLQHYLADKSGVMATMKQKTGLK

SEQ ID NO: 38999 - protein, 231 aa, Kosakonia cowanii
  misc_feature (1)..(231): tr|A0A3R5VJN0|A0A3R5VJN0_9ENTR 7-cyano-7-deazaguanine s ynthase OS=Kosakonia cowanii OX=208223 GN=queC PE=3 SV= 1
MKRAVVVFSGGQDSTTCLVQALQQYDEVHCVTFDYGQRHRAEIDVARELAQKLGARAHKVLDVTLLNELAVSSLTRDSIPVPDYEESADGIPNTFVPGRNILFLTLAAVYAYQVQAEAVITGVCETDFSGYPDCRDEFVKALNHAVSLGLAKDIRFETPLMWIDKAQTWALADYWGALDMVRSETLTCYNGIKGDGCGHCAACHLRANGLQQYLADKASVLSAMKAKTGLK

SEQ ID NO: 39000 - protein, 231 aa, Kosakonia oryzae
  misc_feature (1)..(231): tr|A0A1T5FTX0|A0A1T5FTX0_9ENTR 7-cyano-7-deazaguanine s ynthase OS=Kosakonia oryzae OX=497725 GN=queC PE=3 SV=1
MKRAVVVFSGGQDSTTCLVQALQQYDEVHCVTFDYGQRHRAEIDVARELALTLGARAHKVLDVTLLNELAVSSLTRDSIPVPDYEPDATGIPNTFVPGRNILFLTLAAVYAYQVQAEAVITGVCETDFSGYPDCRDEFVKALNHAVNLGLAKDIRFETPLMWIDKAETWALADYWGKLDLVRSETLTCYNGIKGDGCGHCAACNLRANGLQHYLADKSGVMAAMKQKTGLK

SEQ ID NO: 39001 - protein, 231 aa, Kosakonia oryzendophytica
  misc_feature (1)..(231): tr|A0A1C4ANL5|A0A1C4ANL5_9ENTR 7-cyano-7-deazaguanine s ynthase OS=Kosakonia oryzendophytica OX=1005665 GN=queC PE=3 SV=1
MKRAVVVFSGGQDSTTCLVQALQQYDEVHCVTFDYGQRHRAEIDVARELAQVLGARAHKVLDVTLLNELAVSSLTRDSIPVPDYQPDATGIPSTFVPGRNILFLTLAAVYAYQVQAEAVITGVCETDFSGYPDCRDEFVKALNHAVNLGLAKDIRFETPLMWIDKAETWAQADYWGKLDLVRSETLTCYNGIKGDGCGHCAACNLRANGLQHYLADKSGVMATMKQKTGLK

SEQ ID NO: 39002 - protein, 231 aa, Kosakonia oryziphila
  misc_feature (1)..(231): tr|A0A1C4F569|A0A1C4F569_9ENTR 7-cyano-7-deazaguanine s ynthase OS=Kosakonia oryziphila OX=1005667 GN=queC PE=3 SV=1
MKRAVVVFSGGQDSTTCLVQALQQYDEVHCVTFDYGQRHRAEIDVARELALTLGARAHKVLDVTLLNELAVSSLTRDSIPVPDYEPDATGIPNTFVPGRNILFLTLAAVYAYQVQAEAVITGVCETDFSGYPDCRDEFVKALNHAVNLGLAKDIRFETPLMWIDKAETWALADYWGKLDLVRSETLTCYNGIKGDGCGHCAACNLRANGLQHYLADKSAVMAAMKQKTGLK

SEQ ID NO: 39003 - protein, 231 aa, Kosakonia radicincitans; identical to SEQ ID NO: 39000
  misc_feature (1)..(231): tr|A0A1V0LHW1|A0A1V0LHW1_9ENTR 7-cyano-7-deazaguanine s ynthase OS=Kosakonia radicincitans DSM 16656 OX=1177180 GN=queC PE=3 SV=1

SEQ ID NO: 39004 - protein, 231 aa, Kosakonia radicincitans; identical to SEQ ID NO: 39000
  misc_feature (1)..(231): tr|A0A5E8BGS0|A0A5E8BGS0_9ENTR 7-cyano-7-deazaguanine s ynthase OS=Kosakonia radicincitans OX=283686 GN=queC PE =3 SV=1

SEQ ID NO: 39005 - protein, 231 aa, Kosakonia sp.
  misc_feature (1)..(231): tr|A0A1I1WRW6|A0A1I1WRW6_9ENTR 7-cyano-7-deazaguanine s ynthase OS=Kosakonia sp. S29 OX=1855371 GN=queC PE=3 SV =1
MKRAVVVFSGGQDSTTCLVQALQQYDEVHCVTFDYGQRHRAEIDVARELALQSGARAHKVLDVTLLNELAVSSLTRDSIPVPDYQPDASGIPNTFVPGRNILFLTLAAIYAYQVQAEAVITGVCETDFSGYPDCRDEFVKALNHAVNLGMAKDIRFETPLMWIDKAETWALADYWGKLDLVRNETLTCYNGIKGDGCGQCAACNLRANGLRHYLADKTGVMATMKKKIGLL

SEQ ID NO: 39006 - protein, 231 aa, Kosakonia sp.
  misc_feature (1)..(231): tr|A0A368ZYH0|A0A368ZYH0_9ENTR 7-cyano-7-deazaguanine s ynthase OS=Kosakonia sp. AG348 OX=2183906 GN=queC PE=3 SV=1
MKRAVVVFSGGQDSTTCLVQALQQYDEVHCVTFDYGQRHRAEIDVARELALTLGARAHKVLDVTLLNELAVSSLTRDSIPVPDYEPDATGIPNTFVPGRNILFLTLAAVYAYQVQAEAVITGVCETDFSGYPDCRDEFVKALNHAVNLGLAKEIRFETPLMWIDKAETWALADYWGKLDLVRSETLTCYNGIKGDGCGHCAACNLRANGLQHYLADKPAVMAAMKQKTGLK

SEQ ID NO: 39007 - protein, 88 aa, Kosmotoga sp.
  misc_feature (1)..(88): tr|A0A5D0RLX7|A0A5D0RLX7_9BACT 7-cyano-7-deazaguanine s ynthase (Fragment) OS=Kosmotoga sp. OX=1955248 GN=FXF54 _14680 PE=3 SV=1
MKKAVVLMSGGLDSCVTAGIASLDYELYFLHVNYGQKTENRELQSFYDLYKYFNGKDKLVVDIGYLKKIGGSSLVDDTENIEEGNINR

SEQ ID NO: 39008 - protein, 233 aa, Kozakia baliensis
  misc_feature (1)..(233): tr|A0A1D8UV80|A0A1D8UV80_9PROT 7-cyano-7-deazaguanine s ynthase OS=Kozakia baliensis OX=153496 GN=queC PE=3 SV= 1
MLSNDAALVLFSGGQDSATCLAWALSRFSRVETVGFDYGQRHAVELECRELLRRDMIALAPDWEQRLGPDHTLDLRVLGALSETALTREAEIELTESGLPSTFVPGRNLIFLNFAAALGVRRNARHIVTGVCETDYSGYPDCRDDTIKALQVALNLGMEQRFVLHTPLMWLDKTQTWELAESLGGEALVQAINHDSHSCYLGDREHRHPWGYGCGTCPACELRAKGWSAYVGH

SEQ ID NO: 39009 - protein, 230 aa, Krasilnikovia cinnamomea
  misc_feature (1)..(230): tr|A0A4Q7ZJL3|A0A4Q7ZJL3_9ACTN 7-cyano-7-deazaguanine s ynthase OS=Krasilnikovia cinnamomea OX=349313 GN=queC P E=3 SV=1
MARIVQTFSGGMDSATLLRYLSRGGHELRTIGFDYGQRHKKELQFASKMAADLGVPYTIVSLDSLTCLLSESALTNADVAVPDGHYAEESMKITVVPNRNMIMLAVAIGYAENLHYDAVAIANHTGDHTIYPDCRPAFVEALDVAARLATYGGIRVLSPFKHISKTEIVAIGNAIGVDYRDTWSCYKGGDEHCGTCGTCVERQEALDEAGGVAVPAALDQVSAAMNEALT

SEQ ID NO: 39010 - protein, 228 aa, Krasilnikoviella flava
  misc_feature (1)..(228): tr|A0A1T5KRQ7|A0A1T5KRQ7_9MICO 7-cyano-7-deazaguanine s ynthase OS=Krasilnikoviella flava OX=526729 GN=queC PE= 3 SV=1
MTKPAVVLLSGGLDSTTTLALAKDQGYAPYALSFSYGQRHATELEAAKRVAAAQGVERHVVAEIDLRVFGGSALTSDVAVPKHDSADELAADIPVTYVPARNTIFLSFALAYAETVGASDIFIGVNALDYSGYPDCRPEYIRSYEVMANLATRAGVEGSKLAIHTPLMELTKAGTIRAGLALGVDYGLTSSCYDPDATGHPCGHCDSCLLRLKGFDEAGAVDPLEYQA

SEQ ID NO: 39011 - protein, 235 aa, Kribbella flavida
  misc_feature (1)..(235): tr|D2PYU4|D2PYU4_KRIFD 7-cyano-7-deazaguanine synthase OS=Kribbella flavida (strain DSM 17836 / JCM 10339 / NB RC 14399) OX=479435 GN=queC PE=3 SV=1
MEVEEKMDRPAVVLLSGGLDSTTVLAIARSEGFTPYALSFRYGQRHVVELAAATRVAEAQGVARHVIADIDLRVFGGSALTSDIDVPKHDDVSDVDESIPLTYVPARNTIFLSFALAYAETVGAIDVFIGVSALDYSGYPDCRPEYIEAYEAMANLATRAGVDGHRLKIHTPLIEMTKGQTVELGLKLGVDYALTSSCYDPDLDGRPCGHCDSCLLRRKGFAEAGSEDPLVYQAG

SEQ ID NO: 39012 - protein, 231 aa, Kribbella sp.
  misc_feature (1)..(231): tr|A0A4R0IU85|A0A4R0IU85_9ACTN 7-cyano-7-deazaguanine s ynthase OS=Kribbella sp. YM55 OX=1572660 GN=queC PE=3 S V=1
MSNEPAVVLLSGGLDSSTVLAIAKQEGYRLYALSFRYGQRHQAELDAARRVAEALGAERHVVADIDLRLFGGSALTADIDVPRHAHVDELDDSIPITYVPARNTIFLSFALAWAETLGAADVFIGVNALDYSGYPDCRPEYIAAFERMATLATKAGVEGDQRLRIHTPLIDLTKAETIERGLALGVDYSLTHSCYDPDAAGRACGSCDSCLLRRRGFAEVGLRDPALAGRL

SEQ ID NO: 39013 - protein, 232 aa, Kribbella sp.
  misc_feature (1)..(232): tr|A0A4U3M070|A0A4U3M070_9ACTN 7-cyano-7-deazaguanine s ynthase OS=Kribbella sp. NEAU-THZ 27 OX=2575441 GN=queC PE=3 SV=1
MSQKAVVLLSGGLDSTTVLAMAKDQGYETYALSFRYGQRHAVELEAARRVALAAGVQRHVVCDIDLRVFGGSALTAELDVPKHDATDELAENEIPITYVPARNTVFLSFALAYAEVVGSTDIFIGVSALDYSGYPDCRPEYIAAYEQMANLATRAGVEGQRLRIHTPLIELTKAQTVEVGTRLGVDYSLTSSCYDPDADGRPCGHCDSCLLRLKGFAEAGMKDPLRYQESGA

SEQ ID NO: 39014 - protein, 1381 aa, Kriegella aquimaris
  misc_feature (1)..(1381): tr|A0A1G9IR33|A0A1G9IR33_9FLAO Amino acid adenylation d omain-containing protein OS=Kriegella aquimaris OX=1929 04 GN=SAMN04488514_101237 PE=4 SV=1
MDNTDSNHIELSQGQMSLWTGQKLNPDVPLHNTAYSFEIDGEIDPEVFKEAFRQVVSKIDALRTVFFEKEGIPYQTVLSKISNGLEFIDLAMESDAGVKAYLQERSLKEIDISKCIFDSILVKSPVRKYIWLLNIHHLVIDVVSLKTIFESTSKCYTGIIENNLEEIEPTPLFTEYVHFEKVFQKNPKNENIKNYWAERIKTIKKQPELYGVYNKFDKTKSTRVFLELGFERSQRLREIAQNPAIRSWTPHLTLFNIFSSLLFVYLYRVSGQRTLSIGAPNHNRATKQFQKTVGCFIQIFPLVSEILESDTFNSVLQRVKLETNNYLKYAKPGMATSEINRSFSTILNYIHTGFPDFCGFPTKTEWIPSEHIDVTHQMRCHIVDFDATGEIEVLFDYNRAIFDEDLISRAPHHFLNLVDAFLGNIYQPIDRPELLSDSEKLNTNSEGKTDLDAFISLIDQFNKIQNSNPNDIALRHKKEIYTYADINERANQLASFLVTKGIGKGTSVALYLERSPEYIIGVLAILKSGGTFIPIPSDQPSQRVAFILEDSGCALLLTDTQLKNNIKSVDIETIDLNLLSESIKNQSGIDTKIVIGPSDIAYVIYTSGSTGNPKGVLISQCAIFNYLNWAKKAYTTGDKFIFPLFTSIGFDLTITSTFLPLLTGGEVIIYKESGQGPDISLMEVLADNKVNSIKLTPSHLALLQGTDLSHSKINTMIVGGEDFKANLAANTQKTFGKGLKIYNEYGPTEATVGCIVAQFDSNKHKDVSVPIGTPIDNMHAYILDSYKNLVPKGVIGELYLGGTGLAEGYANLPSLTEDKFIKNPFLKGTKVYRTGDLARENSYGELEYLGRADDQVKLRGFRIEPSDIEANMLGHEEITNAAVVLIENEKSVSENEVINCTECGLPSNYPNTDFDENGVCHLCNAFKGYKDEAQRYFKTTDELRDILISKRGKNPNYDCLSLLSGGKDSTYILAQLIGMGLKVLAFTLDNGYISDQAKGNIDKIVQKLGVDHIYGTTEYMNKIFVDSLNRHQNVCNGCFKTIYTLSTQIALDKQIPFVVTGLSRGQFFETRLTEELFWDKNVDVSTIDKTILEARKLYHQEEDAVKNLLDVSMFNTDETFEKVQFIDFYRYSDVKLEEMLTYLKEKVDWVRPTDTGRSTNCLINQVGIYVHKKQKGYSNYSFPYSWDVRMGHKTRKETLEEINEVIDEKEVKRIINEIGYQEIGEDESNQKRLVAYYTGKKRLASKELSEYLKKELPEYMVPTFFKFIDEMPLTKNGKIDKSALRALNSSQLDMDTPFVAPNGEIEELLAAIWKEVLRLKQVGVHDDFIALGGHSLAAIRVTARINEEIEMNFPLNKIFDLPTIAEYAKYIEDTLVELLKE

SEQ ID NO: 39015 - protein, 235 aa, Kroppenstedtia eburnea
  misc_feature (1)..(235): tr|A0A1N7Q325|A0A1N7Q325_9BACL 7-cyano-7-deazaguanine s ynthase OS=Kroppenstedtia eburnea OX=714067 GN=queC PE= 3 SV=1
MSENMAEKAVVVLSGGLDSTTCMGLAREAGYELYPLTFHYGQRHDREVEQARKVAKHFGVKKHRVVDMGFLRQIGGSALTDDKMEVPVPDGSGEEIPSTYVPARNLIFLSLATAYAEVIGAVKVYIGVSAVDYSGYPDCRPEFIRSMEETVRRGTKAGVNGNPIRLEAPLLHLSKGETIREGLRLQVPYHLTTSCYRGDRVACGLCDSCRLRLKGFRDVGAEDPIPYAEQVNRVN

SEQ ID NO: 39016 - protein, 252 aa, Ktedonobacter racemifer
  misc_feature (1)..(252): tr|D6TZN4|D6TZN4_9CHLR 7-cyano-7-deazaguanine synthase OS=Ktedonobacter racemifer DSM 44963 OX=485913 GN=queC PE=3 SV=1
MTTKRRGESAVLIVSGGMDSCVLSHYYAAAGFDLHLLSFNYGQKHVKELTYAERYISALRERYSNLEIQHQVVALPIAHLSPNSGSALLNPDQSMPHGHYTDDSMKATVVPYRNPNMLLQAATVAWNENARVVAFAAHYGDYAQYPDCRQEFVDAFNTMLNRAMDSDQVTVEVPFMRFSKAQIARFGASLDVPFELTWSCYEGGSEGFGDKHCGHCGTCVERYEAFKHAGVEDPTQYANDPELFLNIPGQRA

SEQ ID NO: 39017 - protein, 225 aa, Ktedonobacter sp.
  misc_feature (1)..(225): tr|A0A1Q6YY27|A0A1Q6YY27_9CHLR 7-cyano-7-deazaguanine s ynthase OS=Ktedonobacter sp. 13_2_20CM_53_11 OX=1805233 GN=queC PE=3 SV=1
MPKAMAIVSGGLDSTTLAYLLHAEGYDLHVLSFDYGQRHKKELAFAERCAKRLDAAFDIVDLSNLGRFLKGSALTDTIPVPDGHYAAPTMAITVVPNRNAMMLSVAYAVAVAEQAQVVAIGVHAGDHFIYPDCRPEFITSFERMQRIATEGFGDPHLRLEAPFMHLGKHQIVQLGTALQVPYADTWSCYKGEDRHCGTCGTCFERKEAFELAGIPDPTEYEGEGQ

SEQ ID NO: 39018 - protein, 225 aa, Ktedonobacter sp.
  misc_feature (1)..(225): tr|A0A352XZ21|A0A352XZ21_9CHLR 7-cyano-7-deazaguanine s ynthase OS=Ktedonobacter sp. OX=1932716 GN=queC PE=3 SV =1
MPKAIAIVSGGLDSVTLAYLLHAEGYELQILSFDYGQRHKKELAYAERCAKRLNAPFDIVDLSTLGRFLKGSALTDTIPVPDGHYAAPTMAITVVPNRNAMMLSIAYAVAVAEKAQVVAMGVHAGDHFIYPDCRPEFITSFDSMQRIATAGFGDPHLRLEAPFMHLGKHQIVQLGTTLQVPYADTWSCYKGGERHCGTCGTCFERKEAFELAGVPDPTIYEEEGT

SEQ ID NO: 39019 - protein, 254 aa, Ktedonobacterales bacterium
  misc_feature (1)..(254): tr|A0A4P6K5A1|A0A4P6K5A1_9CHLR 7-cyano-7-deazaguanine s ynthase OS=Ktedonobacterales bacterium SCAWS-G2 OX=2509 675 GN=queC PE=3 SV=1
MTTTRERDQAVLVVSGGMDSCVLAYYYAAAGFDLHLLSFDYGQKHVKELEYAHKYIARLRERFAQGEQGLRVQHEILSLPIASLLPDSTCALLNDEEPMPYGHYSDESMKTTVVPYRNPNMLLQAATVAWGEGASVVAYAAHQGDHAIYPDCRPAFVNAFNAMLAAAMDGPAPIVQTPFLQFSKAQIARLGASLDVPFELTWSCYEGGRKGYGELHCGRCGTCVERRWSFAQAGLSDPTHYASEALDEDEGFHA

SEQ ID NO: 39020 - protein, 225 aa, Kuenenia stuttgartiensis
  misc_feature (1)..(225): tr|Q1Q0K0|Q1Q0K0_KUEST 7-cyano-7-deazaguanine synthase OS=Kuenenia stuttgartiensis OX=174633 GN=exsB PE=3 SV=1
MKGKDTAIVLASGGLDSCVTAAIANETYDLALLHINYGQRTESKELSAFHEIAAYYKVPAEQILIANIDYLKKIGGSSLTDTMIPVQEAEPDSKEIPTTYVPFRNTLFLSVAVSWAEVIGAEKVFIGAVSHDTPGYPDCKPFYYEVFNKLIDAGTKPETRIAVETPLIFKTKAEIVTLGISLKAPLHLSWSCYKNTDKACGVCNSCYLRRKAFEESGYKDPVEYA

SEQ ID NO: 39021 - protein, 220 aa, Kurthia sp.
  misc_feature (1)..(220): tr|A0A433RXP7|A0A433RXP7_9BACL 7-cyano-7-deazaguanine s ynthase OS=Kurthia sp. 3B1D OX=1562256 GN=queC PE=3 SV= 1
MEKRDKALVVFSGGQDSTTCLFWALKRFKEVAVVTFDYGQRHALEIDCATKIANEQQVKQYILNMDLLNQLAPNALTRDDIDVQAGENGGLPNTFVPGRNLVFFSFAGILARQIGAQHIITGVSEADFSGYPDCRDNFMKSLNVTINLAMDEQLLLHTPLMWRNKAEVWALADELGVLDYIRQNTLTCYNGIIADGCGECPSCLLRKHGLELYLEKKVKA

SEQ ID NO: 39022 - protein, 227 aa, Kushneria avicenniae
  misc_feature (1)..(227): tr|A0A1I1FQK5|A0A1I1FQK5_9GAMM 7-cyano-7-deazaguanine s ynthase OS=Kushneria avicenniae OX=402385 GN=queC PE=3 SV=1
MTQQTASRAVVIYSGGMDSYTVLHRALREGHEVHALSFHYGQRHARELDVASRVCQSLGIAHQVVDIRAIHGLIGASALTDATQAMPRADYAEDNMKATVVPNRNMILLSLAIAHAVNLEAEICYYGAHGGDHAIYPDCRPEFVERINDVAAIANYTPVEIRAPYLHASKDDILAEGLQMGLDYAQSWTCYLGETLACGECGSCRERLQAFAAMGMTDPLPYRTREA

SEQ ID NO: 39023 - protein, 250 aa, Kushneria avicenniae
  misc_feature (1)..(250): tr|A0A1I1I262|A0A1I1I262_9GAMM Queuosine biosynthesis p rotein QueC OS=Kushneria avicenniae OX=402385 GN=SAMN05 421848_0967 PE=4 SV=1
MQSRIDVLWTGGWDSTYRVLSAATIEKRTVVPHYIVDLGRGSSLRELQAISEVRATLAGIDPKAAARIEPLRITPVTEIAEDTELSAAYHRLTQQAHLGSQYDWLARYASSKGINHLELSVHVDDKAYHFLEGRVVATGNGSWTFDDRAEGDEAIFRFFDFPLLQISKMQMKAEAERHGFIKALEKSWFCYSPIDQAPCGLCNPCRYTIEEGMEYRLPEKALRRHRTRHLRRLARAPRALWRRASAALSS

SEQ ID NO: 39024 - protein, 232 aa, Kushneria indalinina
  misc_feature (1)..(232): tr|A0A3D9DZR4|A0A3D9DZR4_9GAMM 7-cyano-7-deazaguanine s ynthase OS=Kushneria indalinina DSM 14324 OX=1122140 GN =queC PE=3 SV=1
MTSQTASRAVVIYSGGMDSYTVLHRALREGHEVHALSFHYGQRHARELDVASEVCQSLGVAHQVVDIRAIHGLIGASALTDATQQMPRADYAEDNMKATVVPNRNMILLSLAIGHAVNLEAEICYYGAHGGDHAIYPDCRPEFVERMNDVAAIANYTPVEIRAPYLHASKDDILAEGLQMGLDYANSWTCYLGEALACGECGSCRERLQAFASQGLVDPLPYHMQSSRTREV

SEQ ID NO: 39025 - protein, 232 aa, Kushneria konosiri
  misc_feature (1)..(232): tr|A0A2Z2H8Z2|A0A2Z2H8Z2_9GAMM 7-cyano-7-deazaguanine s ynthase OS=Kushneria konosiri OX=698828 GN=queC PE=3 SV =1
MTLQTASRAVVIYSGGMDSYTVLHRALREGYEVHALSFHYGQRHARELDVARQVCESLGVAHQVVDIRAIHGLIGASALTDTTQQMPRADYAEDNMKATVVPNRNMILLSLAIGHAVNLEAELCYYGAHGGDHAIYPDCRPEFVKRMNDVAAIANYTPVEIRAPYLHASKHDILAEGLQMGLDYAQTWTCYLGEALACGECGSCRERLQAFALQGLVDPLPYRGNPSHTREV

SEQ ID NO: 39026 - protein, 250 aa, Kushneria konosiri
  misc_feature (1)..(250): tr|A0A2Z2H3T9|A0A2Z2H3T9_9GAMM Uncharacterized protein OS=Kushneria konosiri OX=698828 GN=B9G99_02270 PE=4 SV= 1
MQPRIDVLWTGGWDSTYRVLSAAMVDQRTVVPHYIVDLGRGSSLRELQAISEVRAALNSIDPEAAARIEPLRITPVTEIVEDHELSAAYHRLTQQAHLGSQYDWLARYAKSEDLHHLELSVHVDDKAYHFLKGRVVATEEGSWTFDERVDTDEAIFRFFDFPLLEISKTQMKAEAERYGFIEALEKSWFCYSPIDQAPCGLCNPCRYTIEEGMEYRLPTKALRRHRTRHLRRVARAPRALWRRAARALSS

SEQ ID NO: 39027 - protein, 232 aa, Kushneria marisflavi
  misc_feature (1)..(232): tr|A0A240UJT3|A0A240UJT3_9GAMM 7-cyano-7-deazaguanine s ynthase OS=Kushneria marisflavi OX=157779 GN=queC PE=3 SV=1
MTLQTASRAVVIYSGGMDSYTVLHRALREGYEVHALSFHYGQRHARELDVAREVCESLGVAHQVVDIRAIHGLIGASALTDATQQMPRADYAEDNMKATVVPNRNMILLSLAIGHAVNLEAELCYYGAHGGDHAIYPDCRPEFVARMNDVAAIANYTPVEIRAPYLHASKSDILAEGLRMGLDYAHTWTCYLGEALACGECGSCRERLQAFASQGLVDPLPYRDQTSQTREV

SEQ ID NO: 39028 - protein, 250 aa, Kushneria marisflavi
  misc_feature (1)..(250): tr|A0A240US43|A0A240US43_9GAMM Uncharacterized protein OS=Kushneria marisflavi OX=157779 GN=B9H00_12910 PE=4 S V=1
MQPRIDVLWTGGWDSTYRVLSAAMVDQRTVVPHYIVDLGRGSSLRELQAISEVRAALNSIDPEAAARIEPLRITPVTEIVEDHELSAAYHRLTQQAHLGSQYDWLARYAKSEDLHHLELSVHVDDKAYHFLKGRVVATEEGSWTFDERVDTDEAIFRFFDFPLLEISKTQMKAEAERHGFIEALEKSWFCYSPIDQAPCGLCNPCRYTIEEGMEYRLPAKALRRHRTRHLRRVARAPRALWRRAARALSS

SEQ ID NO: 39029 - protein, 250 aa, Kushneria phyllosphaerae
  misc_feature (1)..(250): tr|A0A2R8CNA8|A0A2R8CNA8_9GAMM 7-cyano-7-deazaguanine s ynthase OS=Kushneria phyllosphaerae OX=2100822 GN=queC_ 1 PE=4 SV=1
MRPRIDVLWTGGWDSTYRVISAAMVNHQTVVPHYIVDLGRGSSLRELQAISEVRAVLAGIDPEAAARIEPLRITPVTEIPKNHELTGAWQRLTQQAHLGSQYDWLARYASSEDIRHLELSVHVDDKAYHFLKGRVMATEDGSWTFDDRIDADEAIFRFFDFPLLQISKTQMKAEAERHGFIEALERSWFCYSPIDQAPCGLCNPCRYTIEEGMAYRLPEKALRRHRTRHLRRLARAPRALWRRASAALSS

SEQ ID NO: 39030 - protein, 232 aa, Kushneria phyllosphaerae
  misc_feature (1)..(232): tr|A0A2R8CP38|A0A2R8CP38_9GAMM 7-cyano-7-deazaguanine s ynthase OS=Kushneria phyllosphaerae OX=2100822 GN=queC_ 2 PE=3 SV=1
MTLQNASRAVVIYSGGMDSYTVLHRALREGYDVHALSFHYGQRHARELDVASQVCQTLGVAHQVVDIRAIHGLIGASALTDASQPMPRADYAEDNMKATVVPNRNMILLSLAIGHAVNLEAEICYYGAHGGDHAIYPDCRPEFVARMNDVAAIANYTPVEIRAPYLHASKDDILAEGLQMGLDYAHTWTCYLGEALACGECGSCRERLQAFASQGIKDPLPYRSQTSRTREV

SEQ ID NO: 39031 - protein, 236 aa, Kushneria sinocarnis
  misc_feature (1)..(236): tr|A0A420WYM1|A0A420WYM1_9GAMM 7-cyano-7-deazaguanine s ynthase OS=Kushneria sinocarnis OX=595502 GN=queC PE=3 SV=1
MTQPSTTPRAVVIYSGGMDSLTVLHNALEAGFEVHALSFHYGQRHARELDAARRVCEQLNIAHQVIDIRAIHSLIGNSALTDSEREMPRADYAEDNMQDTVVPNRNMILLSLAIGHAVNTGARVCYYGAHGGDHAIYPDCRPEFVERMNDVAAIANYEPVEVRTPWLHADKSDILADGVRMGIDYAASWTCYIGDELACGECGSCRERLKAFQALGMTDPLPYRQRTPSATDSQTD

SEQ ID NO: 39032 - protein, 228 aa, Kushneria sp.
  misc_feature (1)..(228): tr|A0A1S1NWP9|A0A1S1NWP9_9GAMM 7-cyano-7-deazaguanine s ynthase OS=Kushneria sp. YCWA18 OX=657387 GN=queC PE=3 SV=1
MTQPNTLPRAVVIYSGGMDSLTVLHNALEAGFEVHALSFHYGQRHARELDVARKVCERLHVDHQIIDIRAIHSLIGNSALTDNDREMPRADYDEDNMQDTVVPNRNMILLSLAIGHAVNIGARVCYYGAHGGDHAIYPDCRPEFVERMNSVAAIANYEPVEIRTPWLHADKSDILADGMRMGIDYADSWTCYIGDELACGECGSCRERLNAFAALGMTDPLAYKKRTS

SEQ ID NO: 39033 - protein, 238 aa, Kutzneria albida
  misc_feature (1)..(238): tr|W5W902|W5W902_9PSEU 7-cyano-7-deazaguanine synthase OS=Kutzneria albida DSM 43870 OX=1449976 GN=queC PE=3 S V=1
MDQDNNTPDSFTAVVVLSGGMDSTTLMAHYAALHHDLIAVTVDYGQRHRREIDSASQVAAHYGAEHLLVDLSGLGAVLGGSALTDASVPVPDGHYAEQSMRATVVPNRNAVLANVAVAVGVARRAGTVALGMHTGDHFIYPDCRPEFHTALRQLVAVANEGFPTPQLEAPFLNWSKADIATHGTRLKAPLGLSWSCYKGGELHCGTCGTCYERREAFRVAGVADPTRYVDDVTLFAAP

SEQ ID NO: 39034 - protein, 427 aa, Kutzneria albida
  misc_feature (1)..(427): tr|W5WBN3|W5WBN3_9PSEU Uncharacterized protein OS=Kutzn eria albida DSM 43870 OX=1449976 GN=KALB_5226 PE=4 SV=1
MSNQRSYRYAFTATGKYPATGNWRRVGEADFRSSLQRVRHAVLPAAATPEWADDLLRIARAVYLVDKLSPRPHERDPWTRELCLWVQVTDPDRWLGEPLDRLNTLLRVLTSDVWDVAVAGGALPIDEQQRLGEYGTASEVALFSGGLDSTAYAAQQACTPGGPLLLLGYDMADAQLPQRSLYSAITELDARQRPVNYCGVAATLAKKGRKLEPSTRSRGFLFATTAVYAAAAHGVAQAMVPENGQLAINPPLTPARLAACSTRSVHPWILQQLNELITAVHGSVTVYNPFLYRTKGEVCTAAHANGLSHADLARTVSCGSYSIHRQIGNCGYCYPCLIRRSGLHAALGTDPTDYEHDLHHLSTLKTAQHLLDLHQWLSHEFTAHDLIADMPLPAGTSMYELLAMLQRGRAEIGSMLTASSPWGGICD

SEQ ID NO: 39035 - protein, 229 aa, Kutzneria buriramensis
  misc_feature (1)..(229): tr|A0A3E0HKY5|A0A3E0HKY5_9PSEU 7-cyano-7-deazaguanine s ynthase OS=Kutzneria buriramensis OX=1045776 GN=queC PE =3 SV=1
MPKTVAIVSGGLDSVTMAYHLQAQGHTLHLLSVNYGQRHLVEHEFAEKTARTLGVPHDVVDLSTVGKFLSGSSLTDATVDVPDHQDGSSGTSPNVVPNRNALLLSVAFAVAVAETAEAVAVGVVDDLNAAPDSNAAFIDSFIAMERIATRGYAHPDLALIAPLVRLRKSEVVSLGEELGVPWAETWSCFRGDALQCGRCAACRERQAAFRDAGVTDPTTYQTSDSKELA

SEQ ID NO: 39036 - protein, 240 aa, Kyrpidia spormannii
  misc_feature (1)..(240): tr|A0A2K8NAR6|A0A2K8NAR6_9BACL 7-cyano-7-deazaguanine s ynthase OS=Kyrpidia spormannii OX=2055160 GN=queC PE=3 SV=1
MEHRAPRAVVILSGGLDSTTCMAIADHEGYELYPITFSYGQKHAVELESAKQVAAHYRVGDRHRVVDLGNFIRGSSLTDPDQSIPVGRSLEEIGTGVPSTYVPGRNTVFLSLALSFAERIDARAIFIGVNALDYSGYPDCRPEFLQAFQRVIDTGTVAGSEGAGIRLKAPLVHLTKAEIIRWGSQLGAPYALTHSCYQGTVPACGVCDSCRLRIQGFREAGLVDPIPYAVPIAWQAGRPN

SEQ ID NO: 39037 - protein, 240 aa, Kyrpidia tusciae
  misc_feature (1)..(240): tr|D5WTQ5|D5WTQ5_KYRT2 7-cyano-7-deazaguanine synthase OS=Kyrpidia tusciae (strain DSM 2912 / NBRC 15312 / T2) OX=562970 GN=queC PE=3 SV=1
MEHRALRAVVILSGGLDSTTCMAIADHEGYELYPITFSYGQKHAVELESAKQVAAHYRVGDRHRVVDLGNFIRGSSLTDPDQSIPVGRSLEEIGTGVPSTYVPGRNTVFLSLALSFAERIDAQAIFIGVNALDYSGYPDCRPEFLQAFQRVIDTGTVAGTEGAGIRLKAPLVHLTKAEIIRRGSQLGAPYALTHSCYQGTVPACGVCDSCRIRIQGFREAGLVDPIPYAVPIAWQSDRPN

SEQ ID NO: 39038 - protein, 219 aa, Labrenzia aggregata
  misc_feature (1)..(219): tr|A0A0M6Y7T4|A0A0M6Y7T4_9RHOB 7-cyano-7-deazaguanine s ynthase OS=Labrenzia aggregata OX=187304 GN=queC PE=3 S V=1
MDSVTLAHKVAREHELIGLVSFDYGQRHKKELDYAKACADELNTEHILIDISNIGRQLTGSALTDNVDVPDGHYAEETMKITVVPNRNAIMLSIAFGIASARGAEAVATAVHGGDHFIYPDCRPAFTESFETMQRHALEGMGEISLFTPYVHTSKADIAAEGLRLGVDYRKTWSCYKGGEVHCGRCGTCVERREAFHLAGGIDPTVYADEAFWKEACNV

SEQ ID NO: 39039 - protein, 219 aa, Labrenzia aggregata
  misc_feature (1)..(219): tr|A0NZ69|A0NZ69_LABAI 7-cyano-7-deazaguanine synthase OS=Labrenzia aggregata (strain ATCC 25650 / DSM 13394 / JCM 20685 / NBRC 16684 / NCIMB 2208 / IAM 12614) OX=38 4765 GN=queC PE=3 SV=1
MDSVTLAHKVAREHELIGLVSFDYGQRHKKELDYAKACADELKTEHILIDISNIGRQLTGSALTDNLDVPDGHYAEETMKITVVPNRNAIMLSIAFGIASARGAEAVATAVHGGDHFIYPDCRPAFTESFETMQRHALEGMGEISLFTPYVHTSKADIAAEGLRLGVDYRKTWSCYKGGEVHCGRCGTCVERREAFHLAGGVDPTVYADEAFWKEACNV

SEQ ID NO: 39040 - protein, 219 aa, Labrenzia alba
  misc_feature (1)..(219): tr|A0A0M6ZTR9|A0A0M6ZTR9_9RHOB 7-cyano-7-deazaguanine s ynthase OS=Labrenzia alba OX=311410 GN=queC PE=3 SV=1
MDSVTLAHKMAQDHELTGLISFDYGQRHRKELDYARACADELDTEHILMDIANIGRQLTGSALTDDLDVPDGHYAEDTMKITVVPNRNAIMLTIAYGIAASRGADAVATAVHGGDHFIYPDCRPAFTSSFETMQRHALDGYAEISLFTPYVHVSKADIASEGLRLGVDYRKTWSCYKGGEKHCGRCGTCVERREAFHLAGGIDPTEYTDADFWKAACNV

SEQ ID NO: 39041 - protein, 229 aa, Labrenzia alba
  misc_feature (1)..(229): tr|A0A0M6Z271|A0A0M6Z271_9RHOB 7-cyano-7-deazaguanine s ynthase OS=Labrenzia alba OX=311410 GN=queC PE=3 SV=1
MKALVICSGGMDSVTLAHKIAQDHKLVGLISFDYGQRHKKELDYAKACAEELNTDFILMDIANIGRQLTGSALTDDVDVPDGHYAEDSMKITVVPNRNAIMLTIAYGIAASRGADTVATAVHGGDHFIYPDCRPDFTQSFEAMQRHALDGVAEISLFTPYVHISKADIAAEGLKLGIDYRTTWSCYKGGEKHCGRCGTCVERREAFHLAGGIDPTDYADPEFWKAACNV

SEQ ID NO: 39042 - protein, 457 aa, Labrenzia alexandrii
  misc_feature (1)..(457): tr|A0A5E8H839|A0A5E8H839_LABAD Uncharacterized protein OS=Labrenzia alexandrii (strain DSM 17067 / NCIMB 14079 / DFL-11) OX=244592 GN=SADFL11_106 PE=4 SV=1
MSSGATQIWIPERSIEVVESGGAASCGWVPFDLGRDFEFSTEALETYAFASWEPLIYDAMVVAAAIEYGDRILKRPPRGWARRISLRIPVHDPDRWNESELSEALLDTAGFLTGDYWSVEFVARAKAAPSPQSAYLNLPVATEAIMAFSDGMDSRAVAGLIGSGLGPKLVRVRVGSNDIGRPDKKNRREPFTMVPYDVPCNMPNREASARSRGFKFALISGIAAYLSGASEIIIPESGQGAIGPAIAPVVHAYPDYRNHPRFTQRMERLLKALFGKEIRYVFPRLWNTKGETLRSFATLPEGSNWHTTRSCWRSNRWCSVNGKRRQCGVCAACMLRRLSVHAAGLTEADDAYVCTDLTAASLDEAVDRDFTRMTPAYRQYAIAGVLHLDHLADLASKDGLPVVRRHAALLGPALGLGKEQTKESLTRMLSEHTGEWKEFVRSMGSNSFVRQWVRAGL

SEQ ID NO: 39043 - protein, 229 aa, Labrenzia alexandrii
  misc_feature (1)..(229): tr|A0A5E8GZ50|A0A5E8GZ50_LABAD 7-cyano-7-deazaguanine s ynthase OS=Labrenzia alexandrii (strain DSM 17067 / NCI MB 14079 / DFL-11) OX=244592 GN=queC PE=3 SV=1
MKTLVICSGGMDSVTLAHKIAQENELIGLISFDYGQRHKKELDYAKACADALNTEHILIDITNIGRQLTGSALTDNIDVPDGHYAEDTMKITVVPNRNAIMLTIAYGIASARGAEAVATAVHGGDHFIYPDCRPAFTESFEEMQRNALEGMGEIKLYTPYVRVSKADIAAEGAKLGVDHTKSWSCYKGGDIHCGRCGTCVERREAFHLAGVDDPTTYADPNFWKGACNV

SEQ ID NO: 39044 - protein, 240 aa, Labrenzia marina
  misc_feature (1)..(240): tr|A0A2S3UXZ9|A0A2S3UXZ9_9RHOB 7-cyano-7-deazaguanine s ynthase OS=Labrenzia marina OX=281252 GN=queC PE=3 SV=1
MNEGDAIVLFSGGQDSTTCLAWALERFERIETVGFDYGQRHRIELDTRPVILEAVRNGFPRWASKLGVDHMIDLSVLGQVSETSLTRDVEISMQQNGLPNTFVPGRNLLFMTFAATIAYRRGAKHIVTGVCETDFSGYPDCRDDTMKALQLALNLGMDTRFVIHTPLMWIDKAETWRLSRDLGGDALVDLIREESHTCYQGDRTPHEWGRGCGTCPACDLRAKGYLRFKGEPSSEARDPK

SEQ ID NO: 39045 - protein, 229 aa, Labrenzia sp.
  misc_feature (1)..(229): tr|A0A4R7RM76|A0A4R7RM76_9RHOB 7-cyano-7-deazaguanine s ynthase OS=Labrenzia sp. PT13C1 OX=2135612 GN=queC PE=3 SV=1
MKTLVICSGGMDSVTLAHKIAQEHELIGLISFDYGQRHKKELDYAKACADALNTEHILIDITNIGRQLTGSALTDNIDVPDGHYAEDTMKITVVPNRNAIMLTVAYGVASARGAEAVATAVHGGDHFIYPDCRPAFTESFEEMQRHALEGMGEIKLYTPYVRVSKADIAAEGAKLGVDHTKSWSCYKGGEIHCGRCGTCVERREAFHLSGVDDPTTYADPDFWKGACNV

SEQ ID NO: 39046 - protein, 233 aa, Labrenzia sp.
  misc_feature (1)..(233): tr|A0A161XMZ3|A0A161XMZ3_9RHOB 7-cyano-7-deazaguanine s ynthase OS=Labrenzia sp. OB1 OX=1561204 GN=queC PE=3 SV =1
MKTLVICSGGLDSVSLAHITASEHQLTRLVSFDYGQRHRKEVDFAEAAAKRLGVQFHLIDMRGIGAALSGSALTDDIDVPDGHYAEETMKVTVVPNRNAIMLSIGFGIAAAQGDEAVATAVHGGDHFIYPDCRPGFTCAFDAMQQAALEGYAAVRLHTPFVEQSKAEIVRQGARHGTPFAETWSCYKGGELHCGRCGTCVERREAFHLAEVSDPTAYVDPDYWTTALATRRES

SEQ ID NO: 39047 - protein, 229 aa, Labrenzia suaedae
  misc_feature (1)..(229): tr|A0A1M7N3C2|A0A1M7N3C2_9RHOB 7-cyano-7-deazaguanine s ynthase OS=Labrenzia suaedae OX=735517 GN=queC PE=3 SV= 1
MKTLVICSGGLDSVTLAHKVAQENELIGLVSFDYGQRHKKELAYAKACADALNTEHTLIDISNVGRLLSGSALTDNVDVPDGHYAEESMRITVVPNRNAIMLAIAFGVASSKGAEAVAAAVHGGDHFIYPDCRPGFVDAFDAMQRHALEGMGEIRLYTPFVHKTKGDIAAEAVRLGVDVTGTWSCYKGGEHHCGRCGTCVERREAFHLASAEDPTVYEDPEFWKTACHV

SEQ ID NO: 39048 - protein, 234 aa, Labrys neptuniae
  misc_feature (1)..(234): tr|A0A5C1WCV2|A0A5C1WCV2_9RHIZ 7-cyano-7-deazaguanine s ynthase OS=Labrys neptuniae OX=376174 GN=queC PE=3 SV=1
MSNKALVLFSAGQDSTTCLAWALKRFDSVETVGFDYGQRHGIELAMRPVVLAAFREAFPAWAARLGEDHLVDLGILGRISETSLTRDVEIAMQENGLPNSFVPGRNLLFLTFAATLAYRRGARHLVTGVCETDFSGYPDCRDDTMKAMQLALNLGMESRFVIHTPLMWIDKAQTWALARELGGDRLVDLVREQTHTCYNGDRSHRHDWGYGCGTCPACELRSSGYRRFMTESVS

SEQ ID NO: 39049 - protein, 234 aa, Labrys okinawensis
  misc_feature (1)..(234): tr|A0A2S9QD62|A0A2S9QD62_9RHIZ 7-cyano-7-deazaguanine s ynthase OS=Labrys okinawensis OX=346911 GN=queC PE=3 SV =1
MSDKALVLFSAGQDSTTCLAWALERFDSVETVGFDYGQRHGVELAMRPVVLAALREAFPAWAGRLGEDHLVDLGILGRISETSLTRDVEITMQENGLPNSFVPGRNLLFLTFAATLAYRRGARHLVTGVCETDFSGYPDCRDDTMKAMQLALNLGMESRFVIHTPLMWIDKAQTWALARELGGELLVDLVREHTHTCYNGDRSHRHDWGYGCGTCPACELRSSGYRRFVAESAS

SEQ ID NO: 39050 - protein, 229 aa, Laceyella sacchari
  misc_feature (1)..(229): tr|A0A4R4AJ56|A0A4R4AJ56_LACSH 7-cyano-7-deazaguanine s ynthase OS=Laceyella sacchari OX=37482 GN=queC PE=3 SV= 1
MSKKAVIVLSGGLDSTTCMGIALAEGYELYPITFHYNQRHDKEVEHARKVAAHYGVAERHKVVDVSFLGQIGGSSLTDTAMEVPTEGVGEGIPSTYVPARNLIFLSLATAYAEVIGAQVLYTGVTAVDYSGYPDCRPEFIKSMEETINLATKLGVTSDEKLRIATPLISLTKGEIIARGLELGVPYELTTSCYQGEEEACGECDSCLLRLKGFKENGVQDPIPYKTKIG

SEQ ID NO: 39051 - protein, 229 aa, Laceyella sacchari
  misc_feature (1)..(229): tr|A0A2I7SV44|A0A2I7SV44_LACSH 7-cyano-7-deazaguanine s ynthase OS=Laceyella sacchari OX=37482 GN=queC PE=3 SV= 1
MSKKAVIVLSGGLDSTTCMGIALAEGYELYPITFHYNQRHDKEVEHARKVAAHYGVAERHKVVDVSFLGQIGGSSLTDTAMEVPTEGVGEGIPSTYVPARNLIFLSLATAYAEVIGAQVLYTGVTAVDYSGYPDCRPEFIKSMEETINLATKLGVTSDEKLRIATPLISLTKGEIIARGLELGVPYELTTSCYQGEAEACGECDSCLLRLKGFKENGVQDPIPYKTKIG

SEQ ID NO: 39052 - protein, 229 aa, Laceyella sediminis
  misc_feature (1)..(229): tr|A0A2T0YHU9|A0A2T0YHU9_9BACL 7-cyano-7-deazaguanine s ynthase OS=Laceyella sediminis OX=573074 GN=queC PE=3 S V=1
MSKKAVIVLSGGLDSTTCMGIALAEGYELYPITFHYNQRHDKEVEHARKVAAHYGVAERHKVVDVSFLGQIGGSSLTDTAMEVPTEGVGEGIPSTYVPARNLIFLSLATAYAEVIGAQVLYTGVTAVDYSGYPDCRPEFIKSMEETINLATKLGVTSDAKLRIATPLISLTKGEIIARGLELGVPYELTTSCYQGEAEACGECDSCLLRLKGFKENGVQDPIPYKTKIG

SEQ ID NO: 39053 - protein, 230 aa, Lachnobacterium bovis
  misc_feature (1)..(230): tr|A0A1H3LS29|A0A1H3LS29_9FIRM 7-cyano-7-deazaguanine s ynthase OS=Lachnobacterium bovis DSM 14045 OX=1122142 G N=queC PE=3 SV=1
MRALVLCSGGIDSSTCLALAVDKYGKDNVVALSMSYGQKHKKEIESAEKICKYYGVELYKLDLKKIFQYSNCSLLENSTESIPKETYAKQLEKTHSQPVSTYVPFRNGLFLSSAASFALSKDCDVIYYGAHADDAAGNAYPDCSEAFNNAMNTAIYEGSGKKLKIEAPFIKENKAGVVKKGLELKVPYELTWSCYEGKDEPCLKCGTCIDRMKAFELNGTVDPLLKNSIN

SEQ ID NO: 39054 - protein, 230 aa, Lachnobacterium bovis
  misc_feature (1)..(230): tr|A0A1H9UMR5|A0A1H9UMR5_9FIRM 7-cyano-7-deazaguanine s ynthase OS=Lachnobacterium bovis OX=140626 GN=queC PE=3 SV=1
MKALVLCSGGIDSSTCLALAVDKYGKDNVVALSMSYGQKHKKEIESAEKICKYYGVELYKLDLHKIFQYSNCSLLETSTEDIPKETYAKQLEKTNSQPVSTYVPFRNGLFLSSAASFALSKDCEVIYYGAHSDDAAGNAYPDCSEEFNNAMNTAIYEGSGKKLRIEAPFLKENKAGVVKKGLELKVPYELTWSCYEGKDEPCLKCGTCIDRMKAFEINGTVDPILKKDNK

SEQ ID NO: 39055 - protein, 254 aa, Lachnoclostridium sp.
  misc_feature (1)..(254): tr|A0A1Y4TQW0|A0A1Y4TQW0_9FIRM TIGR00268 family protein OS=Lachnoclostridium sp. An118 OX=1965547 GN=B5E62_152 00 PE=4 SV=1
MTLETFFREVPRAAVAFSGGTDSAFLLWAAKKYGCQIQAYYIHTAFQPEFELEDARRLAGELDIPMQVIDMDILGVQQAAENGPRRCYYCKRALFTRLKEQAAEDGYTVLLDGTNASDDAGDRPGMRALRELQVRSPLRECGITKDRVRSLSREAGLFTWEKPAYACLATRIPTGTKITRGDLQRAEQAEMALMALGFQDFRVRLSREGARLQMTGDQMSLAVERRNDIMQALKPLFPAVFLDLEERSPSVQRR

SEQ ID NO: 39056 - protein, 227 aa, Lachnoclostridium sp.
  misc_feature (1)..(227): tr|A0A3B9K4Q3|A0A3B9K4Q3_9FIRM 7-cyano-7-deazaguanine s ynthase OS=Lachnoclostridium sp. OX=2028282 GN=queC PE= 3 SV=1
MKALVLSSGGVDSTTALGLAVQKYGKDNVYALSVSYGQKHDKEIEAAKAVAEYYGVEQMFLDLSLIFQYSDCSLLKQSEEAVPEKSYAEQIQETGGEAPVSTYVPFRNGLFLSSAASIALSRGCGEIWYGAHADDAAGAAYPDCSPVFNKAMGDAIWEGSGHQLRICAPFVEVNKAEVVRIGLSIGVPYELTWSCYEGGEVPCGKCGTCIDRAAAFAANGVKDPALK

SEQ ID NO: 39057 - protein, 236 aa, Lachnospira multipara
  misc_feature (1)..(236): tr|A0A1H5UE39|A0A1H5UE39_9FIRM 7-cyano-7-deazaguanine s ynthase OS=Lachnospira multipara OX=28051 GN=queC PE=3 SV=1
MAEKKEKALVLCSGGIDSTTCLGMAVDKYGKENVVALSISYGQKHDREVKSAKKVCEFYGVELYTLDLAKIFTYSNCSLLKGSEEEIPKESYAEQLKETDGKPVSTYVPFRNGLFLSSAASFALSKECSVIYYGAHADDAAGSAYPDCSTVFNDAMNKAIYEGSGKQLKIVAPFINSHKADVVKEGLRLGVPYKYTWSCYEGKDKPCGVCGTCIDRAEAFRLNGVPDPALTYEFED

SEQ ID NO: 39058 - protein, 225 aa, Lachnospira pectinoschiza
  misc_feature (1)..(225): tr|A0A174YUX0|A0A174YUX0_9FIRM 7-cyano-7-deazaguanine s ynthase OS=Lachnospira pectinoschiza OX=28052 GN=queC P E=3 SV=1
MKAMVLCSGGVDSTTCLGIAVDKYGAENVVALSIYYGQRHTKEIESADKVTEYYGVEHISLDLEKIFQYSDCSLLAHSDKEIPEESYAEQIKKTNGSPVSTYVPFRNGLFLSSAASIALSKGCEVIYYGAHSDDAAGSAYPDCSDEFNKAMNEAIYLGSGKQLKIEAPFINKTKSQVVKIGLDLKVPYEYTWSCYEGADKPCGVCGTCIDRAKAFEANGVKDPAL

SEQ ID NO: 39059 - protein, 236 aa, Lachnospira pectinoschiza; identical to SEQ ID NO: 39057
  misc_feature (1)..(236): tr|A0A1G9WXG1|A0A1G9WXG1_9FIRM 7-cyano-7-deazaguanine s ynthase OS=Lachnospira pectinoschiza OX=28052 GN=queC P E=3 SV=1

SEQ ID NO: 39060 - protein, 230 aa, Lachnospiraceae bacterium
  misc_feature (1)..(230): tr|A0A1I2Q5E9|A0A1I2Q5E9_9FIRM 7-cyano-7-deazaguanine s ynthase OS=Lachnospiraceae bacterium C7 OX=1792306 GN=q ueC PE=3 SV=1
MNKEKNALVLCSGGVDSTTCLGLAVEKYGKEHVVALSMSYGQKHVKEIESAKAVCKHYGVELFTLDLSKIFQYSDCSLLSHSEGEIPKESYAQQLEETDHAPVSTYVPFRNGLFLSSAASFALSKNCEVIYYGAHADDAAGNAYPDCSTVFNEAMNKAIYEGSGQQLHIEAPFINSTKAEVVKAGLAINVPYELTWSCYEGQDKPCMKCGTCLDRIKAFELNGTVDPLLK

SEQ ID NO: 39061 - protein, 230 aa, Lachnospiraceae bacterium
  misc_feature (1)..(230): tr|R9IWQ1|R9IWQ1_9FIRM 7-cyano-7-deazaguanine synthase OS=Lachnospiraceae bacterium 3-1 OX=397288 GN=queC PE=3 SV=1
MKVLVLSSGGIDSTVCLALAVEKYGYENVLSLSVSYGQKHSNELKAAQRIAQHYHVRHKELDMGMIFAGSDCTLLEGRGEIPKGTYASQLQESTGKPISTYVPFRNGLFLAAAASVALADGCEKIYYGAHADDSAGNAYPDTSEAFHEAISRAVYEGSGKQLEIEAPFLYSHKADVVRTGMGLQAPFAFTWSCYEGGEKPCGKCATCMDRRKAFELNEIQDPAEYEEEKK

SEQ ID NO: 39062 - protein, 226 aa, Lachnotalea glycerini
  misc_feature (1)..(226): tr|A0A255IT04|A0A255IT04_9FIRM 7-cyano-7-deazaguanine s ynthase OS=Lachnotalea glycerini OX=1763509 GN=queC PE= 3 SV=1
MKALVLLSGGVDSSTCLGLAIEKYGRKNVVTLTVSYGQKHTKEIEAARKIADYYQVELIYLDLSKIFEYSDCSLLEHSKQEIPKETYVKQLEKRYGKPVSTYVPFRNGLFLSSAASIALSKGCGIIYYGAHSDDAAGNAYPDCSSAFQEAMNQAIYIGSGNQLKIEAPFVMWTKKKIVQEGLALKVPYELTWSCYEGDEKPCGKCGTCIDRINAFAENGVCDPANV

SEQ ID NO: 39063 - protein, 218 aa, Lacimicrobium alkaliphilum
  misc_feature (1)..(218): tr|A0A0U3B552|A0A0U3B552_9ALTE 7-cyano-7-deazaguanine s ynthase OS=Lacimicrobium alkaliphilum OX=1526571 GN=que C PE=3 SV=1
MTQRAVVIFSGGMDSFTVLNKAYRQGLELYALSFDYGQRHRKELDYARAVCQELGIAHKIVDISAINSLIGGSSLTDNMEVAEGHYAAENMKNTVVPNRNMILLSMAVGYAVSLNASQVFYGAHSGDHAIYPDCRPEFVHKMNDVCAIANYEPVEIACPYLDVSKTDILTDGLAMGLDYSKTWTCYNGREKACGKCGACNERLEAFAENGATDPLEYE

SEQ ID NO: 39064 - protein, 233 aa, Lactobacillus allii
  misc_feature (1)..(233): tr|A0A1P8Q2H7|A0A1P8Q2H7_9LACO 7-cyano-7-deazaguanine s ynthase OS=Lactobacillus allii OX=1847728 GN=queC PE=3 SV=1
MKAVVLLSGGMDSAVCLAKIIEEYGNNNVMAVGFRYGQKHQQNHYYAKKIADYFNVKMIDLDIDVRAFKGSDSTLLNDKKIKHESYAQVLKDSDTGIADTYVPFRNGLMLSQVAALAYSQKANYVVYGAHKDDYAGNAYPDTSPAFYKAMNEAINVGTNGKINVIAPLINMDKAGVVKLGTQLGVPFEFTRTCYEGDDVSCGECATCLDRINAFKQNDLVDPIPYAINIDWNN

SEQ ID NO: 39065 - protein, 234 aa, Lactobacillus aquaticus
  misc_feature (1)..(234): tr|A0A0R2CU56|A0A0R2CU56_9LACO 7-cyano-7-deazaguanine s ynthase OS=Lactobacillus aquaticus DSM 21051 OX=1423725 GN=queC PE=3 SV=1
MGQVVLLSGGMDSATCLALAIKKYGVEHVITLAFTYGQKHDLEIINARQVARFFGVKLLEAAVDRKIFTGSDSTLLKGNGAIEEKSYSEIMREKGAKIVDTYVPFRNGLMLSQAAALAYSSHLDEVAYGAHADDAAGNAYPDCSPAFYESMRAAIVAGTDGKVTMTAPLIELTKAGVVSLGHQLGVPFELTRSCYEGREYACGKCGTCRDRISAFKQNGLKDPIKYEQTPDWNA

SEQ ID NO: 39066 - protein, 241 aa, Lactobacillus capillatus
  misc_feature (1)..(241): tr|A0A0R1MCM1|A0A0R1MCM1_9LACO 7-cyano-7-deazaguanine s ynthase OS=Lactobacillus capillatus DSM 19910 OX=142373 1 GN=queC PE=3 SV=1
MGQVVLLSGGMDSATCLALAVKQYGTKQVLALAFTYGQKHDAEIINARRVAQFFDVKLIEAAVDHKIFTGSDSTLLKGNGAIAEKSYAEIIEEQGEQVVDTYVPFRNGLMLSQAAALAYSSHLEEVVYGAHADDAAGNAYPDCSPAFYSAMNTAISTGTAGKIKVIAPLIKLNKAGVVKLGRQLKVPFELTRSCYEGREDACGKCGTCRDRINAFKENGLKDPIKYEQEPDWDNERYENEE

SEQ ID NO: 39067 - protein, 235 aa, Lactobacillus hordei
  misc_feature (1)..(235): tr|A0A3Q8CZ02|A0A3Q8CZ02_9LACO 7-cyano-7-deazaguanine s ynthase OS=Lactobacillus hordei OX=468911 GN=queC PE=3 SV=1
MGQVVLLSGGMDSAVCLALAIKKYGKENIIALAFSYGQKHSREIQNAQNVANYFDVKIVVANIDAQIFQGSSSTLLQGNGPIEHRSYGEIIKESGEGTVDTYVPFRNGLMLSQAAALAYSQELAEVSYGAHSDDAAGSAYPDCSPLFFESMAKAISAGTGGKVTLVAPLIRNNKAGVVKMGTKLSVPFELTRSCYETDSVSCGQCGTCRDRIEAFKKNGLKDPIEYAIKIEWNKD

SEQ ID NO: 39068 - protein, 235 aa, Lactobacillus hordei
  misc_feature (1)..(235): tr|A0A0R1MI46|A0A0R1MI46_9LACO 7-cyano-7-deazaguanine s ynthase OS=Lactobacillus hordei DSM 19519 OX=1423759 GN =queC PE=3 SV=1
MGQVVLLSGGMDSAVCLALAIRKYGKENIIALAFSYGQKHSREIQNAQNVANYFDVKIVVANIDAQIFQGSSSTLLQGNGPIEHRSYGEIIKESGEGTVDTYVPFRNGLMLSQAAALAYSQELAEVSYGAHSDDAAGSAYPDCSPLFFESMAKAISAGTGGNVTLVAPLIRNNKAGVVKMGIKLSVPFELTRSCYETDSVSCGQCGTCRDRIEAFKKNGLKDPIEYAIKIEWNKD

SEQ ID NO: 39069 - protein, 233 aa, Lactobacillus mali
  misc_feature (1)..(233): tr|J0UP68|J0UP68_9LACO 7-cyano-7-deazaguanine synthase OS=Lactobacillus mali KCTC 3596 = DSM 20444 OX=1046596 GN=FD00_GL000780 PE=3 SV=1
MGQVVLLSGGMDSAVCLALAVKKYNKENVIALAFGYGQKHASEIQNARNVANYFGVKIVIASVDTQIFQGSDSTLLQGNGPIEHKSYGEILKESGGGTVDTYVPFRNGLMLSQAAALAYSQELAEVSYGAHSDDAAGSAYPDCSPLFFGAMASAISAGTAGKITLIAPLIENNKAGVVKLGTDLNVPFELTRSCYETDSVSCGKCGTCRDRIRAFKENGLKDPIEYATQIDWE

SEQ ID NO: 39070 - protein, 233 aa, Lactobacillus mali
  misc_feature (1)..(233): tr|A0A0R2FSR6|A0A0R2FSR6_9LACO 7-cyano-7-deazaguanine s ynthase OS=Lactobacillus mali OX=1618 GN=queC PE=3 SV=1
MGQVVLLSGGMDSAVCLALAIKKYNKENVIALAFSYGQKHASEIQNARNVANYFGVKIVIASVDTQIFQGSDSTLLQGNGPIEHKSYGEILKESGGGTVDTYVPFRNGLMLSQAAALAYSQELAEVSYGAHSDDAAGSAYPDCSPLFFGAMASAISAGTAGKVTLIAPLIENNKAGVVKLGTDLNVPFELTRSCYETDSVSCGKCGTCRDRIRAFKENGLKDPIEYATQIDWE

SEQ ID NO: 39071 - protein, 233 aa, Lactobacillus satsumensis
  misc_feature (1)..(233): tr|A0A0R1V1G4|A0A0R1V1G4_9LACO 7-cyano-7-deazaguanine s ynthase OS=Lactobacillus satsumensis DSM 16230 = JCM 12 392 OX=1423801 GN=queC PE=3 SV=1
MDEIILLSGGLDSAVCLAQAVATHGKNNVLALSFAYGQKHQLELENARKVAAYYQVEYVVAHIDHQLFNGSTSTLLTGNGAIAQQSYAAIIAEQGSGTVDTYVPFRNGLMLSQATALAYSQQAAQVCYGAHADDAAGQAYPDCTPEFYHAMNAAISAGTAGKVSLAAPLIKLNKAGVVKLGIALHVPFALTRSCYAGQQAACGKCATCRDRIAAFKANKLKDPIAYQTSITWS

SEQ ID NO: 39072 - protein, 136 aa, Lactobacillus sp.
  misc_feature (1)..(136): tr|A0A2A7QUA0|A0A2A7QUA0_9LACO 7-cyano-7-deazaguanine s ynthase (Fragment) OS=Lactobacillus sp. UMNPBX6 OX=2042 041 GN=queC PE=3 SV=1
SITHNALMDNNETIQQKQGELPNTFVDGRNALFLLYAAIYAKGQGISDIITGVCETDFSGYPDCRDVFIKSMNVTLNLAMDYRFNIITPLMWLTKKETWALADQLGRLEYVMQHTHTCYEGVEGGCHHCPSCLLRE

SEQ ID NO: 39073 - protein, 234 aa, Lactobacillus sucicola
  misc_feature (1)..(234): tr|A0A023CXJ4|A0A023CXJ4_9LACO 7-cyano-7-deazaguanine s ynthase OS=Lactobacillus sucicola DSM 21376 = JCM 15457 OX=1423806 GN=queC PE=3 SV=1
MGQVVLLSGGMDSATCLALAVRKYGAEQVCALAFTYGQKHDLEIVNARQVAHFFDVKLVEAAIDRKIFTGSNSTLLKGNGDIEEKSYAEIIQEKGTGIVDTYVPFRNGLMLSQAAALAYSIQLDEVAYGAHKDDAAGDVYPDCSPGFYQSMNAAVAAGTAGKVTLIAPLIELNKAGVVRLGRKLGVPFELTRSCYEGRKYACGKCGTCRDRIKAFRDNGLKDPIRYEKEPDWDK

SEQ ID NO: 39074 - protein, 235 aa, Lactobacillus uvarum
  misc_feature (1)..(235): tr|A0A0R1PWZ2|A0A0R1PWZ2_9LACO 7-cyano-7-deazaguanine s ynthase OS=Lactobacillus uvarum DSM 19971 OX=1423812 GN =queC PE=3 SV=1
MMGQVVLLSGGMDSATCLALAIKKYGIEHVIALAFTYGQKHDLEIVNARQVARFFGAKLVEAAVDHKIFTGSDSTLLKGNGAIEEKSYAEIMQEKGAKVVDTYVPFRNGLMLSQAAALAYSSHLDEVAYGAHADDAAGNAYPDCSPVFFEAMRDAVVAGTAGKVTMAAPLIELTKAGVVSLGHKLGVPFELTRSCYEGHKYACGKCGTCRDRINAFKQNGLRDPIKYEKSPNWNN

SEQ ID NO: 39075 - protein, 235 aa, Lactobacillus vini
  misc_feature (1)..(235): tr|A0A0R2CMT1|A0A0R2CMT1_9LACO 7-cyano-7-deazaguanine s ynthase OS=Lactobacillus vini DSM 20605 OX=1133569 GN=q ueC PE=3 SV=1
MMKQVILLSGGLDSAVCLAQAVKAQGKENVIALSFAYGQKHQLELQTAQQVAQFYKVEHLIAKIDPQIFSGSSSTLLQGNGQIAQLSYQAIMQKNGSGIVDTYVPFRNGLMISQAAALAYSRRCSRIVYGAHVDDAAGNAYPDCSPSFYHAMNQAIVLGTDNQVHLAAPLITRNKAGVVQFGQQLKVPFELTRSCYEGQQFSCGKCATCRDRIKAFKINGLKDPIKYEIKIDWEH

SEQ ID NO: 39076 - protein, 145 aa, Lactococcus lactis
  misc_feature (1)..(145): tr|A0A0M2ZSZ6|A0A0M2ZSZ6_LACLC Queuosine biosynthesis p rotein QueC, queC OS=Lactococcus lactis subsp. cremoris OX=1359 GN=VN96_1044 PE=4 SV=1
MKIIKKIDETLTEVQVLIYAPNELAFSSLAEKIDERISFATVEGIIFLQRRELLYIKAQNNYLELGTEKKVYKMRSPLYQLEKRLGNKFIRVSRSFLINFDRLEKLDTDIFLGIKAQVGNIKVPVSKTYLKNINAKISEIERGEI

SEQ ID NO: 39077 - protein, 207 aa, Lacunisphaera limnophila
  misc_feature (1)..(207): tr|A0A1D8AZW1|A0A1D8AZW1_9BACT 7-cyano-7-deazaguanine s ynthase OS=Lacunisphaera limnophila OX=1838286 GN=queC_ 3 PE=3 SV=1
MRKVSVLLASGGLDSTTLAYWMMAKRVQFYPLFVNYGQHCATTELNTLRQVLPKRILRKLEIVDVAAIYAGSQSRLIRETNLWEESITKEDLYLPYRNILLLSIAAARVQSAGGGTVYTAFINSNHAEEIDCSARFFGRLSELLKSFGGVRVKMPFRYKSKAQVARIGIRLGAPIGETFSCQVNSRVPCGACPNCVDRLQGLAALGG

SEQ ID NO: 39078 - protein, 235 aa, Lacunisphaera limnophila
  misc_feature (1)..(235): tr|A0A1D8AZ02|A0A1D8AZ02_9BACT 7-cyano-7-deazaguanine s ynthase OS=Lacunisphaera limnophila OX=1838286 GN=queC_ 2 PE=3 SV=1
MKTVVIFSGGMDSTILVYDLIARGDTVKVLSVDYGQRHAKEIVCAKGIAAQLGIEHRVADLRSITPLLAGSSLTSADIAVPEGHYAEDNMKATVVPNRNMIMLAVATGWAISMRFDAVAFGAHSGDHTIYPDCRPEFASLMDSAIRLADWNEVRLIRPFVGQTKAELAKRGAELKVPFERTWSCYKGGEFHCGVCGTCVERREAFHLAGLADPTTYDTKAPTVAMMVRDNWRITA

SEQ ID NO: 39079 - protein, 233 aa, Lacunisphaera sp.
  misc_feature (1)..(233): tr|A0A4Q1C6E6|A0A4Q1C6E6_9BACT 7-cyano-7-deazaguanine s ynthase OS=Lacunisphaera sp. TWA-58 OX=2508720 GN=queC PE=3 SV=1
MKVVVLCSGGMDSVAALYWARAHHAVSAVLSFDYGSKHNHQEIPRAVEHARLLGFPHRTIRLDFIGQLFASDLLKSGGDIPEGHYADDNMRRTVVPFRNGIMLAAAAGFAESAEAQGLVIAAHTGDHTIYPDCREDFMRAMGDAMKAGTYAGIELLRPFIALTKGQIAAEGARLGVDFARTWSCYKGGAIHCGKCGTCVERREAFLQAGLVDPTEYEATPPLPDKPVEHKGAK

SEQ ID NO: 39080 - protein, 251 aa, Lampropedia cohaerens
  misc_feature (1)..(251): tr|A0A0U1Q266|A0A0U1Q266_9BURK 7-cyano-7-deazaguanine s ynthase OS=Lampropedia cohaerens OX=1610491 GN=queC PE= 3 SV=1
MSATADSAQPQRALVLLSGGQDSATTLAWALARFAHVETIGFDYGQRHHVELACRQRLRDGMRALSPAWSQTLGEDHLLHVDVLKQLGTTAMTDDVAITLQDDGLPNTFVPGRNLLFFTLAAALAYRRGLTVLVGGMSQTDFSGYPDCRDNTLKALQVALSLGVDRPLVLATPLMWRDKAATWELAHALGGKPLVELIRTESHTCYLGSREHLHDWGYGCGACPACVLRAQGFARWRTHCALQATETAGNA

SEQ ID NO: 39081 - protein, 244 aa, Lampropedia hyalina
  misc_feature (1)..(244): tr|A0A1M4WY66|A0A1M4WY66_9BURK 7-cyano-7-deazaguanine s ynthase OS=Lampropedia hyalina DSM 16112 OX=1122156 GN= queC PE=3 SV=1
MSPSPCRAPRTLVLFSGGQDSATCLAWALHRYAHVETLGFDYGQRHRVELECRHRLREGMLALQPAWAERLGADHVLPVEVLAAVGSTAMTDDIAIQMQADGLPNTFVPGRNLLFFTLAAAMAYRRDLTVLVGGMSETDYSGYPDCRDNTLKALQVALSLGIDRPLRLETPLMWRDKAQTWALAHALGGTGLVELLRTQSHTCYLGQRDTLHDWGYGCGSCPACELRATGYRLWQAGKVARPTA

SEQ ID NO: 39082 - protein, 233 aa, Lampropedia sp.
  misc_feature (1)..(233): tr|A0A4S5BPL9|A0A4S5BPL9_9BURK 7-cyano-7-deazaguanine s ynthase OS=Lampropedia sp. YIM MLB12 OX=2562762 GN=queC PE=3 SV=1
MHTSALVLFSGGQDSATCLAWALERYAHVETLGFNYGQRHAVELECRSTFTQVLRQQFPQWAHKLGEDHLLDMGLLGQISDTALTQAKAIEFEQSGLPNTFVPGRNLLFFTFAAALAYRRGLTVLVGGMCETDYSGYPDCRDNTLKSLQVSLSLGLDTPLVLETPLMWLDKAATWQMAEQLGGPELVALIEEHTHTCYMGERSQRHAWGYGCGQCPACDLRRSGFEAYRGEAA

SEQ ID NO: 39083 - protein, 200 aa, Lampropedia sp.
  misc_feature (1)..(200): tr|A0A4V3YWD4|A0A4V3YWD4_9BURK 7-cyano-7-deazaguanine s ynthase OS=Lampropedia sp. YIM MLB12 OX=2562762 GN=E8K8 8_16655 PE=3 SV=1
MTSALLLSGGMDSLSIAWWKRPTHAITIDYGQKAAITERTVSAAICAEIGIVHHVVSVDCRSLGSGDMAGAAADAAAPASDWWPYRNQLLITLAAMKAIGLGAKVLYIGTVASDEGHRDGTKDFVRMIDELVLYQEGGLRIEAPAIGLTTVELVNEAKVPARVLAYAHSCHKADIPCGNCRGCNKYVESMDSLGYGCRTS

SEQ ID NO: 39084 - protein, 713 aa, Laribacter hongkongensis
  misc_feature (1)..(713): tr|A0A248LH54|A0A248LH54_9NEIS 7-cyano-7-deazaguanine s ynthase OS=Laribacter hongkongensis OX=168471 GN=LHGZ1_ 0968 PE=4 SV=1
MQDKRYILCGNASAKGVSEDPERDLRLRLSGKEGKGNITLRIEDVHRKMFQPVPSLFNDLLEVATYVYSADQVIRRGADDVDTFGDGWRRDLHFVVPVRNPDFWNSAPVQEVLCATLGFLSDDQYQFDFVKLDQDHPFQEYLGFDDTQQMYRKPEQVVMFSGGLDSLAGAIDEVVNQKRRVLLVTHKSTNKLNKRHQTLENLLAEKANGNAPPRISVRVHKSKELNHEYTQRSRSFLYVSIGATIAKMLGLNSVRFYENGVISLNLPVCAQVVGGRATRTTHPRVMKGFQDIISLVAGEAFTVENPYIWKTKADVVKVITDAGCEDLIRHSMTCTHTWEMTNQHTHCGGCSQCIDRRFAVLAAKADQYDPVDHYKFDVFTQSRDAQDQKKNVDKIMAAAYLERANQVRNLTDVAQFVSSYPDVGRVFKFLGGDTAQAAQRVFDLYKRHANEVMGALDELLSRHRTAIRERTLPGDSLVRTAYESASVVSMPTVVSAEKLPDNLFRKRGNVWEARFQGRGRHPILIQGADKGAEYINLLLAFPDRETSVYAIAVGSAANAIDLPANTGVAPEDIEEGFHVTQGIPLGDAGDVADRQALHEWRQRARELLGEIEEAREAGDHARIEEIEEEMAFLTKAMESGKGLGGRQRKSGDKRKNVRDAFRNAVDRAIKQIEKYDKPLGEHLKASIKHGNEVVYRPGVPIVWDVRPITNGQG

SEQ ID NO: 39085 - protein, 229 aa, Laribacter hongkongensis
  misc_feature (1)..(229): sp|C1D6L0|QUEC_LARHH 7-cyano-7-deazaguanine synthase OS =Laribacter hongkongensis (strain HLHK9) OX=557598 GN=q ueC PE=3 SV=1
MDSLRDPEHALVVLSGGQDSTTCLYWALSRFAQVSAISFDYGQRHRVELDAARTIAAMAGVGHTIIPINTFSALGGNALTDQQMSPDTGPDAETLLPNTFVPGRNLVFLTFAAAWAWPRGIRHIVTGVAQTDYSGYPDCRENTLRALELAINLGMESRMRLHMPLMFLSKADTVTLARTVGAMPALAFSHTCYAGAVPPCGQCAACVLRAKGFAEAGIPDPLLNRLAGV

SEQ ID NO: 39086 - protein, 632 aa, Larkinella sp.
  misc_feature (1)..(632): tr|A0A368JHK4|A0A368JHK4_9BACT Uncharacterized protein OS=Larkinella sp. ZZJ9 OX=2315727 GN=DUE52_23480 PE=4 S V=1
MKTDTRHIILCDGVALPDSLIGMLPPHRVLTLTNREELPDRNMTVKIHDFASRLIARIPDRTRDLIEIAAFIYAADRLIKRGETNQVEYENWARELTFCIPVRDFNFWQQAEVSNKLAEALVFVSGDKSYKFHFTSRIGIDPLTGLFHNMDTNPTSSDSNEHYPIALYSGGLDSLAGVVSLLETTSSKVVITSHRSNPSTTQVQKRVYAALSKAYPGRLRYHPLDCNLTHGERASEETQRTRFFLYTSVGFALAQAYSQHELNIFENGITSINLSKRQDLINGRASRTTHPKTLGLLQAVFSSISGQSFVINHPFIHLTKTEVVSLLKQYERPELITATVTCTKTFQKFKNRSGASHCGYCSQCVDRRFAMYAARLEKYDAVYDFDLATEAFPGKDAQTHVVDYIRHAHTFATTHFGEFCNTYLEPLADLTEYCQPDQAEEEVNALHQLYQRHSMAIERAYRRMVATHDSIFKPPKPNSIYEIVNARRFQRDRAECLATDVAQMLSTTLPIALASTVINHENALNNQIQALLRRDQADYEREYPAVRFSFATVVPDHSSTKADADLFIEAKYVRKTMMPSRITDQIAADLMKYPLGAYKLFIVYDPERRIKDDNGFKRDYEQRSNCTICVIR

SEQ ID NO: 39087 - protein, 228 aa, Lautropia mirabilis
  misc_feature (1)..(228): tr|E7S062|E7S062_9BURK 7-cyano-7-deazaguanine synthase OS=Lautropia mirabilis ATCC 51599 OX=887898 GN=queC PE= 3 SV=1
MSSPQKAAVIFSGGQDSTTCLFLALHEFGPGNVEAITFQYGQRHAIELDKARWIAEDLGVKQTLIDTSVIKAITHNALLDESATISQEDGQPPNTFVDGRNALFLLYAAIHAKAQGIRTLYTGVCETDFSGYPDCRDVFVKSMNVTLNLAMDYTFDIRTPLMWLTKKDTWALADRLGAFDYIRQHTHTCYLGVEGGCGQCPSCVLRERGLHEYLTERDAAQTKEQRHA

SEQ ID NO: 39088 - protein, 286 aa, Lautropia sp.
  misc_feature (1)..(286): tr|A0A3R8LMU3|A0A3R8LMU3_9BURK 7-cyano-7-deazaguanine s ynthase OS=Lautropia sp. KCOM 2505 OX=2490857 GN=queC P E=3 SV=1
MQAGSSESAAAPAQASRPEKAAVIFSGGQDSTTCLFLALRDFGRDNVEVITFQYGQRHAIELEKARWIAQDLGVKQTVIDTSVIRAITHNALLDGSVPIEQHGSEPPNTFVDGRNALFLLYAAIYAKGQGIHTLYTGVCENDFSGYPDCRDVFIKSMNVTLNLAMDYPFDIRTPLMWLTKKQTWALADELGAFDYIREHTHTCYLGVPGGCHECPSCVLRERGLQAYLAERTPAKAAASAATRTPATQPESQSKETRGAAPSPATATSPTSHGLVSHDAPPSGAAS

SEQ ID NO: 39089 - protein, 223 aa, Lautropia sp.
  misc_feature (1)..(223): tr|A0A1D2SJW1|A0A1D2SJW1_9BURK 7-cyano-7-deazaguanine s ynthase OS=Lautropia sp. SCN 69-89 OX=1660104 GN=queC P E=3 SV=1
MRAVVLLSGGLDSATVLAMAREQGRECYALSLRYGQRHAAELDAAVRIAVALGAVRHEIIDLDLSRFGGSALTDASIAVPERPGAPGTIPVTYVPARNTIMLSIALGWAETLDAREIHFGANAVDYSGYPDCRPEYVAAFEQMANLATKAGAEGRPLRIAAPIIDMTKARIIREGVRLGVDYAMTVSCYQADDEGRACGGCDACRIRRDGFAAAGVGDPTRYR

SEQ ID NO: 39090 - protein, 238 aa, Lawsonia intracellularis
  misc_feature (1)..(238): sp|Q1MQ73|QUEC_LAWIP 7-cyano-7-deazaguanine synthase OS =Lawsonia intracellularis (strain PHE/MN1-00) OX=363253 GN=queC PE=3 SV=1
MYHLNQKALLLFSGGQDSGTCLGWALSNFSHIITIGFSYGQRHSVEMQCRTNIRNKISKLSKIWEQRLGEDYIFSLDIFSQLGETAITSELEIVFDKQGLPNTFVPGRNIFFLTIAAAFAWRNSIRHLIIGTCETDFSGYPDCQDNSIKATQLALSLGLGEDITIHTPLMWLTKAQTWELALHLGGSKFVDLIRNETHSCYLNDHTTSHEWGYGCGTCPACKLRKNGWETFLMKKRAN

SEQ ID NO: 39091 - protein, 224 aa, Lebetimonas natsushimae
  misc_feature (1)..(224): tr|A0A292YDM2|A0A292YDM2_9PROT 7-cyano-7-deazaguanine s ynthase OS=Lebetimonas natsushimae OX=1936991 GN=queC P E=3 SV=1
MKAIVILSGGMDSTTTLFIALHQGYEVIPVHFNYGQRTEKRELKSFNDICEYAGIKNRYIIDIPFFKQIGASALVDENLEVPTGGLKPGIPITYVPFRNGIFLSIAAAIAEKEGANAIFIGVVEEDSSGYPDCREDFIKKMQDAINEGTKPETQIEIKTPLIHLKKEDIVKEAIKYNVPLELTWSCYQNEDEACGVCDSCRLRLKGFEKAGVKDKIPYKKMKEK

SEQ ID NO: 39092 - protein, 233 aa, Lechevalieria deserti
  misc_feature (1)..(233): tr|A0A316HWM0|A0A316HWM0_9PSEU 7-cyano-7-deazaguanine s ynthase OS=Lechevalieria deserti OX=531939 GN=queC PE=3 SV=1
MTIDPEHRHPEHAVVIASGGLDSTVLAYWLAARHSRLTLVSFDYGQRHRVELDHAAEIARLLLSPHRIIDLTSLGALLTGSALTDASVAVPDGHYTDESMAATVVPNRNAIMLDIAVAVAIAVRADAVAFGAHAGDHTIYPDCRPEFVERFARSVQAANEGLLVPGFQVLAPFLTLTKTDIVRVGEALEVPFARTWSCYRGRAVHCGTCGTCTERQEAFRDNGIADPTVYQAA

SEQ ID NO: 39093 - protein, 231 aa, Leclercia adecarboxylata
  misc_feature (1)..(231): tr|A0A514VE40|A0A514VE40_9ENTR 7-cyano-7-deazaguanine s ynthase OS=Leclercia adecarboxylata OX=83655 GN=queC PE =3 SV=1
MKRAVVVFSGGQDSTTCLVQALQQYDEVHCVTFDYGQRHSEEIEVAQKLAVKLGARAHKVLDVTLLNELAVSSLTRDSIPVPDYEPDAEGIPNTFVPGRNILFLTLTAIYAYQVKAEAIITGVCETDFSGYPDCRDEFVKALNHAVNLGMAKDIRFETPLMWLDKAETWALADYWGKLELIRNETLTCYNGIQGDGCGQCAACNLRANGLNHYLADKAGVMAALKKKTGLN

SEQ ID NO: 39094 - protein, 231 aa, Leclercia adecarboxylata
  misc_feature (1)..(231): tr|A0A358ZMK1|A0A358ZMK1_9ENTR 7-cyano-7-deazaguanine s ynthase OS=Leclercia adecarboxylata OX=83655 GN=queC PE =3 SV=1
MKRAVVVFSGGQDSTTCLVQALQQYDEVHCVTFDYGQRHSEEIEVAQKLAVKLGARAHKVLDVTLLNELAVSSLTRDSIPVPDYEPDAEGIPNTFVPGRNILFLTLTAIYAYQVKAEAVITGVCETDFSGYPDCRDEFVKALNHAVNLGMAKDIRFETPLMWLDKAETWALADYWGKLDLVRNETLTCYNGIQGDGCGQCAACNLRANGLNHYLADKAGVMAALKKKTGLN

SEQ ID NO: 39095 - protein, 231 aa, Leclercia sp.
  misc_feature (1)..(231): tr|A0A345CDV0|A0A345CDV0_9ENTR 7-cyano-7-deazaguanine s ynthase OS=Leclercia sp. W17 OX=2282309 GN=queC PE=3 SV =1
MKRAVVVFSGGQDSTTCLVQALQQYDEVHCVTFDYGQRHSEEIEVAQKLAVKLGARAHKVLDVTLLNELAVSSLTRDSIPVPDYEPDAEGIPNTFVPGRNILFLTLTAIYAYQVKAEAIITGVCETDFSGYPDCRDEFVKALNHAVNLGMAKDIRFETPLMWLDKAETWALADYWGKLDLVRNETLTCYNGIKGDGCGQCAACNLRANGLNHYLADKAGVMAALKKKTGLN

SEQ ID NO: 39096 - protein, 231 aa, Leclercia sp.; identical to SEQ ID NO: 38098
  misc_feature (1)..(231): tr|A0A0J6M6D5|A0A0J6M6D5_9ENTR 7-cyano-7-deazaguanine s ynthase OS=Leclercia sp. LK8 OX=1628210 GN=queC PE=3 SV =1

SEQ ID NO: 39097 - protein, 199 aa, Leeuwenhoekiella palythoae
  misc_feature (1)..(199): tr|A0A1M5ZCK4|A0A1M5ZCK4_9FLAO 7-cyano-7-deazaguanine s ynthase OS=Leeuwenhoekiella palythoae OX=573501 GN=SAMN 04487999_2936 PE=3 SV=1
MQKNNSAILLSGGMDSIALAYLKRPKYAFTLDYGQKAALAEINAARQVSKELSIDHHIIRVDCGSLGSGDMSSKPSISMSPVSEWWPYRNQLLVTLACMKGVVLGINELIVGSVKTDDAHKDGTMEFYSYLSTLVQYQEGAIKISCPAIDLTTIELIRKSKLPESLLLWAHSCHTSNEPCMNCNGCKKYLFTLQSLNLD

SEQ ID NO: 39098 - protein, 209 aa, Leeuwenhoekiella sp.
  misc_feature (1)..(209): tr|A0A4Q0NT77|A0A4Q0NT77_9FLAO 7-cyano-7-deazaguanine s ynthase OS=Leeuwenhoekiella sp. R-50232 OX=2249425 GN=D SM04_104310 PE=3 SV=1
MQDFKKGVILVSGGLDSTTLCYLFMKKCVEFVPLIINYGQHCFKTELDRLNKVLPEQYVSKIEILDISDIYKYSNSKFIKASNLWEESITADDLYIPYRNVLILTVAASFARTLGLNNVYSAFINSNHAKEIDCSNDFFNNLESLLKDYGSVKIEMPFRDYSKFEVAKLGIELGAPIGKTFSCQASPDVPCGACPNCVDRLEALKRLSE

SEQ ID NO: 39099 - protein, 223 aa, Legionella adelaidensis
  misc_feature (1)..(223): tr|A0A0W0R1I2|A0A0W0R1I2_9GAMM 7-cyano-7-deazaguanine s ynthase OS=Legionella adelaidensis OX=45056 GN=queC PE= 3 SV=1
MKKAVILLSGGLDSATCLAIAKQQGFACYALSFAYGQRHDFELEAAKKLAQSMHAVDHRIISLDIGQFGASALTDSSIVVEDYKGDNKIPVTYVPARNTVFLSIALSLAESINAFDIFIGANFIDYSGYPDCRPEYIEAFEKLANLATKAGVEGNQYTIHAPLLYLSKAEIIKTGTHLHVPYELTVSCYRLDKNGAACGKCDSCIFRARGFNEANIADPTHYF

SEQ ID NO: 39100 - protein, 227 aa, Legionella anisa
  misc_feature (1)..(227): tr|A0A2Z3KJ41|A0A2Z3KJ41_9GAMM 7-cyano-7-deazaguanine s ynthase OS=Legionella anisa OX=28082 GN=queC PE=3 SV=1
MKKAVVLLSGGLDSTTCLALARSKGFSCYAISFSYGQRHSAELLAAQRIAQHYHVVTHQIVTLDTALFRNSALTDSNIEVPSFQEGSDIPVTYVPARNTIFLAMALGFAESIGAREIFIGASSVDYSHYPDCRPEFIQAFQTLANLATKAGVSGDRFSIHAPLQHLSKVETIQLGLSLGVDYSLTVSCYQANDAGEACGQCDSCTFRKRGFLGAGIDDPTLYRRSDY

SEQ ID NO: 39101 - protein, 269 aa, Legionella beliardensis
  misc_feature (1)..(269): tr|A0A378HY26|A0A378HY26_9GAMM 7-cyano-7-deazaguanine s ynthase OS=Legionella beliardensis OX=91822 GN=queC PE= 3 SV=1
MQDSTKFAYLSLSGGLDSTTLLLHLLARGYQVTAISFLYGQKHNIEIERAQDLIQYLNLKGFAIKHHIIHLNGLSNLLFSALVEGGNTVPEGLYSGENMAATVVPNRNKIFISILQAAALSCAIENNTTVHVALGIHAGDHAVYPDCRPEFIDADYQAFQLGNWHAEKVAPYMPYLNADKGGILQDGIKACKQLNLDFKEIYKRTITSYKPNTDGISDYKSASSIQRIAAFIKLNCIDPIIYADDRGIVDWETVKAHVLSVLDTADKQK

SEQ ID NO: 39102 - protein, 223 aa, Legionella birminghamensis
  misc_feature (1)..(223): tr|A0A378IMA5|A0A378IMA5_9GAMM 7-cyano-7-deazaguanine s ynthase OS=Legionella birminghamensis OX=28083 GN=queC PE=3 SV=1
MKNAVVLLSGGLDSTTCLAIAKAAGYQCHALSFSYGQRHNSEIEAARRVAAFFDVAEHRIVNLDINQFGGSALTDETISVPDYQPSQSIPVTYVPARNTIFLSIALGYAEVIGASDIFIGISSVDYSNYPDCRPDYMDAFKKMAALATRAGVEGKPLEIHTPLVSLSKCETIKLGASLGADYALTISCYQADSQGKACGRCDSCTFRRKGFIEAGLSDPTIYQ

SEQ ID NO: 39103 - protein, 223 aa, Legionella brunensis
  misc_feature (1)..(223): tr|A0A0W0SVI3|A0A0W0SVI3_9GAMM 7-cyano-7-deazaguanine s ynthase OS=Legionella brunensis OX=29422 GN=queC PE=3 S V=1
MKKAVVLLSGGLDSATCLAIAKAEGFTCYTLSFMYGQRHTAELAAASRVATHLQAAEHRIINLDIGQFGGSALTDKAIAVPEYTGSKAIPITYVPARNTIFLAMALAFAETLEAHDIFIGASSIDYSGYPDCRPEFMTAFEKVANLATKAGVAGDEFKIHAPLQYLTKAETILKGSSLGVDYSLTVSCYQATETGKACGYCDSCTFRKQGFKTANLPDPTPYK

SEQ ID NO: 39104 - protein, 271 aa, Legionella busanensis
  misc_feature (1)..(271): tr|A0A378JSM8|A0A378JSM8_9GAMM 7-cyano-7-deazaguanine s ynthase OS=Legionella busanensis OX=190655 GN=queC_2 PE =3 SV=1
MPNLKKSAYLALSGGMDSSTLLLHLLARDYQVNAISFLYGQKHKVEIDCAINLVKYLAEKGYKINHHLVHLDGLSELLFSALVDGGDVVPEGLYDGENMAATVVPNRNKIFISILQAAALSRAVEDNTTVCVALGIHSEDHAVYPDCRPEFVNTDYQAFQAGNWDAHKVINYMPYLHSDKYGILKDGEEACRQLNLDFNEIYKRTITSYKPNTEGISDYKSASSVQRIAAFIQLNRIDPVLYADENGIADWNTVKAHVLSVLEENKIKINL

SEQ ID NO: 39105 - protein, 225 aa, Legionella busanensis
  misc_feature (1)..(225): tr|A0A378JP82|A0A378JP82_9GAMM 7-cyano-7-deazaguanine s ynthase OS=Legionella busanensis OX=190655 GN=queC_1 PE =3 SV=1
MNKRVIVLLSGGMDSSTCLALVKSKNYDCYAISFDYGQPHQGELAAAKRVAEHIGVQEHKIFTFNMAAFGGTVLNNHNYGKTRTYLSKTLPVVQAPSHNPIFLAIAIGWGELIDAYDIFIGATTVDWANNPDCTPKFLNAFEKAANYGTKAGISGMRFKIHAPFNSMSKGEIVKKGLALDFDYSLTLSCYQPEKNNRACGVCHSCRERKEGFQEAGVFDPVLYAR

SEQ ID NO: 39106 - protein, 228 aa, Legionella cherrii
  misc_feature (1)..(228): tr|A0A0W0SB95|A0A0W0SB95_9GAMM 7-cyano-7-deazaguanine s ynthase OS=Legionella cherrii OX=28084 GN=queC PE=3 SV= 1
MKKAVVLLSGGLDSTTCLALATSKGFSCYAISFAYGQRHSAELLAAQRIAQHYKVAKHHIVTLDTALFRNSALTDSSVEVPAFQGGSEIPVTYVPARNTIFLAMALGLAESIGARDIFIGASSVDYSHYPDCRPEFIDAFQTLANLATKAGVTGDHFSIHAPLQHLSKVQTIQLGTSLGVDYSLTVSCYQANDAGEACGECDSCTFRRRGFIGAGVADPTLYRNSSHR

SEQ ID NO: 39107 - protein, 226 aa, Legionella cincinnatiensis
  misc_feature (1)..(226): tr|A0A378IEH8|A0A378IEH8_9GAMM 7-cyano-7-deazaguanine s ynthase OS=Legionella cincinnatiensis OX=28085 GN=queC PE=3 SV=1
MKKSVILLSGGLDSTTCLALAASKGFTCYALSFSYGQRHSAELFAAQRIAKHYKVAEHHIVTLDTELFRNSALTDSNLNVPAFKEDTEIPVTYVPARNTIFLAMALGFAESIGARDIFIGASSVDYSHYPDCRPEFISTFQTLANLATKAGVTGDPFTIHAPLQYLSKVQTIQLGISLGVDYSLTVSCYQANDAGEACGQCDSCTFRQRGFIGAGIDDPTLYRRQE

SEQ ID NO: 39108 - protein, 223 aa, Legionella clemsonensis
  misc_feature (1)..(223): tr|A0A222P6A0|A0A222P6A0_9GAMM 7-cyano-7-deazaguanine s ynthase OS=Legionella clemsonensis OX=1867846 GN=queC P E=3 SV=1
MKKAVVLLSGGLDSATCLAIARQEGYACYALSFQYGQRHTAELVAATRVAQHLNVVEHRIVNLDIGQLAGSALTDQSIAVPEYSGAQEIPVTYVPARNTIFLALALAYAETIVANAIFIGVNSIDYSHYPDCRPEFIAAFEKAANLATKAAVSGHAVKIHAPLQFLNKAEIILKGTSLGVNYALTVSCYQATENGEACGVCDSCTFRKQGFKAAKLPDPTYYK

SEQ ID NO: 39109 - protein, 223 aa, Legionella donaldsonii
  misc_feature (1)..(223): tr|A0A378IZ31|A0A378IZ31_9GAMM 7-cyano-7-deazaguanine s ynthase OS=Legionella donaldsonii OX=45060 GN=queC PE=3 SV=1
MKKAVVLLSGGLDSTTCLAMAKAQGFACYALSFAYGQRHSVELSAARRVAAHFSVVEHRVVTLDLGQFGGSALTDETRSVPDYKGDGLIPVTYVPARNTVFLSIALSFAEVIGARDIFIGVSAVDYSGYPDCRPEYIAAFEHMANLATKAGVEGEGVKLHTPLQHLSKAETILAGKHLGVDYALTVSCYQATESGHACGRCDSCTYRRQGFEAAGVADPTLYL

SEQ ID NO: 39110 - protein, 223 aa, Legionella drancourtii
  misc_feature (1)..(223): tr|G9ETN9|G9ETN9_9GAMM 7-cyano-7-deazaguanine synthase OS=Legionella drancourtii LLAP12 OX=658187 GN=queC PE=3 SV=1
MKNAVVLLSGGLDSTTCLALAKAKGFACYAMSFSYGQRHTAELSAATRIAQHYAVKEHKIVTLDTQLFRNSALTDASMAVPDFQESAEIPITYVPARNTIFLSMALGFAESIGARDIYIGASSVDYSHYPDCRPEFIAAFQTLANLATKAGVSGDPFTIHAPLQHLSKVKTIELGLSLGVDYSLTVSCYQANDAGEACGQCDSCTFRKRGFANAGVADPTLYK

SEQ ID NO: 39111 - protein, 223 aa, Legionella drozanskii
  misc_feature (1)..(223): tr|A0A0W0SXL1|A0A0W0SXL1_9GAMM 7-cyano-7-deazaguanine s ynthase OS=Legionella drozanskii LLAP-1 OX=1212489 GN=q ueC PE=3 SV=1
MKKAVILLSGGLDSTTCLAIAKAESFECHALSFAYGQRHSAELAAARRVASHFRVAEHRIINLDLGQLGGSALTDESIQVPDYSASEEIPVTYVPARNTVFLSYALGYAEIIGARDIFIGVSSVDYSHYPDCRPEYISAFQAVANLATKAGVEGDYIQLHAPLQDLSKAETILLGSKLGVNYSLTVSCYQASDNGSACGRCDSCCFRKQGFETAGLADPTFYA

SEQ ID NO: 39112 - protein, 225 aa, Legionella erythra
  misc_feature (1)..(225): tr|A0A0W0TSM5|A0A0W0TSM5_LEGER 7-cyano-7-deazaguanine s ynthase OS=Legionella erythra OX=448 GN=queC PE=3 SV=1
MKKAIVLLSGGLDSTTCLAIAKSQGYACYALSFDYGQRHQAELEAAKRVADQLGAIEHRIFTLDIGQFKGSALTDASVAVPDYRGDGKIPVTYVPARNTIFLAVALGFAETLEAFDLFIGVSQIDYSGYPDCRPDYIAAFEAMANLATKAGVEGRKTVIHTPLIALSKAETIRQGLASGADYSLTVSCYQATPEGLACGRCDSCTYRKKGFKEAGIADPTRYVRD

SEQ ID NO: 39113 - protein, 224 aa, Legionella fallonii
  misc_feature (1)..(224): tr|A0A098GBT4|A0A098GBT4_9GAMM 7-cyano-7-deazaguanine s ynthase OS=Legionella fallonii LLAP-10 OX=1212491 GN=qu eC PE=3 SV=1
MKKAVVLFSGGLDSTTCLALAKSQGFHCYGLSFSYGQRHSAELLAAARIAQHMGIEHKIIKLDVNLFGGSALTDTTIEVPNYQESEAIPVTYVPARNTIFLSMALGLAESINARDIFIGVSSIDYSHYPDCRPEFIQAFQTLANLATKAGVEGDRFSIHAPLQHLSKAKTIELGNKLGVNYSLTVSCYQANDAGEACGQCDSCTFRRQGFAAAHVNDPTIYQKA

SEQ ID NO: 39114 - protein, 223 aa, Legionella feeleii
  misc_feature (1)..(223): tr|A0A378IP54|A0A378IP54_9GAMM 7-cyano-7-deazaguanine s ynthase OS=Legionella feeleii OX=453 GN=queC PE=3 SV=1
MKKAVVLLSGGLDSTTCLAMAKAQGFACYALSFAYGQRHSVELSAARRVAAHFSVVEHRVVTLDLGQFGGSALTDETLSVPDYKGDGLIPVTYVPARNTVFLSIALGFAEVIGARDIFIGVSAVDYSGYPDCRPEYIAAFEHMANLATKAGLEGEGVKLHTPLQHLSKAETILAGKHLGVDYALTVSCYQATECGHACGRCDSCTYRRQGFEAAGVADPTLYL

SEQ ID NO: 39115 - protein, 226 aa, Legionella feeleii
  misc_feature (1)..(226): tr|A0A0W0THY0|A0A0W0THY0_9GAMM 7-cyano-7-deazaguanine s ynthase OS=Legionella feeleii OX=453 GN=queC_2 PE=3 SV= 1
MKKKAVVLLSGGLDSTTCLAFANSKSYECNALSFDYGQRHSSELNAAKKIAQHFNANQHEIISLDSLGKLGGSSLTDQTKKIEEYSGKTGIPSTYVPARNTIMLSIALGWAEIINADSIFIGVSSVDYSGYPDCRPEFIEAFMKMANLATKNSVLGEKINIETPLLYLSKADTVKLGKSLDVDYSMTVSCYQANQDGEACGKCDSCYLRKKGFQDADIQDPTRYIS

SEQ ID NO: 39116 - protein, 229 aa, Legionella geestiana
  misc_feature (1)..(229): tr|A0A0W0TP35|A0A0W0TP35_9GAMM 7-cyano-7-deazaguanine s ynthase OS=Legionella geestiana OX=45065 GN=queC PE=3 S V=1
MKKAVVLLSGGLDSATCLAMAREAGYETHALSFDYGQRHAGELHAARAVAAALGAAEHRVVTLDIGQFGGSALTDSRIAVPDHGEAGSGIPVTYVPARNTVFLAIALGFAESIGADVLYIGVNSVDYSGYPDCRPAFIEAFERLANLATKSGVEGQAFRIHAPLQHLDKADIIREGVRLGVDYALTVSCYRATPDNRACGRCDSCTFRREGFLRAGLSDPTRYQVEQVF

SEQ ID NO: 39117 - protein, 226 aa, Legionella gratiana
  misc_feature (1)..(226): tr|A0A378J053|A0A378J053_9GAMM 7-cyano-7-deazaguanine s ynthase OS=Legionella gratiana OX=45066 GN=queC PE=3 SV =1
MKKAVILLSGGLDSTTCLALAAAKGFSCYAISFSYGQRHSAELLAAQRIAAHYKVAEHQIVPLDTKLFRNSALTDPNLNVPAFKEGTEIPVTYVPARNTIFLAMALGFAESISARDIFIGASSVDYSHYPDCRPEFISAFQTLANLATQAGVSGDLFTIHAPLQQLSKVQTIQLGISLGVDYSLTVSCYQANDTGEACGQCDSCTFRHRGFIGAGIDDPTLYRHSE

SEQ ID NO: 39118 - protein, 223 aa, Legionella hackeliae
  misc_feature (1)..(223): tr|A0A0A8UP39|A0A0A8UP39_LEGHA 7-cyano-7-deazaguanine s ynthase OS=Legionella hackeliae OX=449 GN=queC PE=3 SV= 1
MKKAVILLSGGLDSATCLALAKQEGYACYALSFRYGQRHPAELAAATRVAKHLSAVEHRITDLDIGQFGGSALTNNAIPVPEYSGSKEIPITYVPARNTIFLAMALAYAEILEARDIFIGVNAVDYSGYPDCRPEFVAAFEKMANLATKAGVSGDTVKIHAPLQFLTKEEIILKGTNLGLDYSLTVSCYQATEAGEACGICDSCTFRKQGFKAANLTDPTRYK

SEQ ID NO: 39119 - protein, 226 aa, Legionella israelensis
  misc_feature (1)..(226): tr|A0A516MYH0|A0A516MYH0_9GAMM 7-cyano-7-deazaguanine s ynthase OS=Legionella israelensis OX=454 GN=queC PE=3 S V=1
MKKKAIVLLSGGLDSTTCLAIARNQGYQCIALSFAYGQRHAVELMAAKRIAQSLGAHEHRVVHLDLGQFGASALTDNSLDVPSYQGNTEIPVTYVPARNTVFLSIALGLAEALCARDIFIGVSSIDYSHYPDCRPEFIKAFEQLSNLATKAGVEGDSFRIHAPLQYMSKAETILSGTKLGVDYALTISCYQANSEGAACGQCDSCTFRKQGFLQAGVPDPTVYLNI

SEQ ID NO: 39120 - protein, 226 aa, Legionella israelensis
  misc_feature (1)..(226): tr|A0A0W0WGW1|A0A0W0WGW1_9GAMM 7-cyano-7-deazaguanine s ynthase OS=Legionella israelensis OX=454 GN=queC PE=3 S V=1
MKKKAIVLLSGGLDSSTCLAIARNQGYQCIALSFAYGQRHAVELMAAKRIAQSLGAHEHRVVHLDLGQFGASALTDNSLDVPSYQGNTEIPVTYVPARNTVFLSIALGLAEALCARDIFIGVSSIDYSHYPDCRPEFIKAFEQLSNLATKAGVEGDSFRIHAPLQYMSKAETILSGTKLGVDYALTISCYQANSEGAACGQCDSCTFRKQGFLQAGVPDPTVYLNI

SEQ ID NO: 39121 - protein, 222 aa, Legionella jamestowniensis
  misc_feature (1)..(222): tr|A0A0W0UJM5|A0A0W0UJM5_9GAMM 7-cyano-7-deazaguanine s ynthase OS=Legionella jamestowniensis OX=455 GN=queC PE =3 SV=1
MKKAVVLLSGGLDSATCLAIARQEGYACYALSFQYGQRHTAELAAATRVAQQLHVAEHRIVNLDIGQLGGSALTDQSIAVPKYSGTQDIPVTYVPARNTIFLAMALAYAETIAASDIFIGVNSIDYSHYPDCRPEFITAFENVANLATKAAVSGHAVKIHAPLQFLNKADIILKGTHLGIDYALTVSCYQATDSGEACGICDSCTFRKQGFRAAHLPDPTRY

SEQ ID NO: 39122 - protein, 223 aa, Legionella jordanis
  misc_feature (1)..(223): tr|A0A0W0VD84|A0A0W0VD84_9GAMM 7-cyano-7-deazaguanine s ynthase OS=Legionella jordanis OX=456 GN=queC PE=3 SV=1
MKKAVVLLSGGLDSATVLAIAKAEGFACYALSFAYGQRHNAELLAAKRIAEVLSVAEHRIVQLDLSAFGGSALTDKSIAVPDYSGSKEIPITYVPARNTIFLSIALAMAEVIGARDIFIGVNSIDYSHYADCRPEFIDAFQQVANLGTKAGVEGDKFHLHAPLQHLDKSEIIRTGLRLGLDYSLTVSCYQATEEGRACGRCDSCIFRKQGFLMAGYPDPTKYL

SEQ ID NO: 39123 - protein, 223 aa, Legionella lansingensis
  misc_feature (1)..(223): tr|A0A0W0VLP4|A0A0W0VLP4_9GAMM 7-cyano-7-deazaguanine s ynthase OS=Legionella lansingensis OX=45067 GN=queC PE= 3 SV=1
MKKAVVLLSGGLDSATCLAIAKTQGFACYALSFAYGQRHTAELTAACRVAKHLEAVEHRIVNLDIGQFGGSALTDKSIAVPNYSGAQTIPVTYVPARNTIFLAIAVGFAEVIDARDIFIGVSAIDYSGYPDCRSEFIEAFQKVANLGTKAGVAGDLFTLHAPLQFLSKAETILKGTSLGLDYSLTVSCYQATETGEACGRCDSCIFRKQGFAAAKWPDPTKYK

SEQ ID NO: 39124 - protein, 224 aa, Legionella londiniensis
  misc_feature (1)..(224): tr|A0A0W0VIE0|A0A0W0VIE0_9GAMM 7-cyano-7-deazaguanine s ynthase OS=Legionella londiniensis OX=45068 GN=queC PE= 3 SV=1
MKKAVVLLSGGLDSATCLALAKAQGFSCYALSFDYGQRHAYELLAAKRIAERSAVCEHRIVKLDMEQFGGSALTDMSIDVPNYNASQNIPVTYVPARNTTFLAIALGYAEALGAFDIFIGVNAVDYSGYPDCRPEYIKAFEAMANLATKAAVEGARIRIAAPLLHLSKAEIIKTGTELLVDYSLTVSCYRLNNEGEACGACDSCVFRAEGFAKANVPDPTRYQK

SEQ ID NO: 39125 - protein, 223 aa, Legionella longbeachae
  misc_feature (1)..(223): tr|A0A378L3P3|A0A378L3P3_LEGLO 7-cyano-7-deazaguanine s ynthase OS=Legionella longbeachae OX=450 GN=queC PE=3 S V=1
MKKAVVLLSGGLDSATCLAIAKNQGFKCFALSFMYGQRHEYELNAARRIAVNMAAFEHRVVHLDIGQFGASALTDKRIDVPDYEGLGKIPVTYVPARNTVFLATALGLAEAVGAYDIFIGANAVDYSGYPDCRPEFITAFQHLANVATKAGVEGRAFTIQAPLLHLTKADIIRTGMQLGVDYSLTVSCYQLNQEGAACGHCDSCVLRAQGFKAAGVEDPTYYQ

SEQ ID NO: 39126 - protein, 226 aa, Legionella longbeachae
  misc_feature (1)..(226): tr|D3HNR3|D3HNR3_LEGLN 7-cyano-7-deazaguanine synthase OS=Legionella longbeachae serogroup 1 (strain NSW150) O X=661367 GN=queC PE=3 SV=1
MKKAVILLSGGLDSTTCLALAASKGFACYAISFSYGQRHSAELFAAQRIAKHYKAKTHQIVTLDTELFHNSALTDPSVDVPDFKEGSEIPVTYVPARNTIFLSMALGFAESIGARDIFIGASSVDYSHYPDCRPEFISAFQTLANLATKAGVTGDSFTIHAPLQYLSKVQTIQLGISLGVDYSLTVSCYQANEAGEACGQCDSCTFRKRGFIGAGIDDPTLYRHPE

SEQ ID NO: 39127 - protein, 223 aa, Legionella maceachernii
  misc_feature (1)..(223): tr|A0A0W0W1U1|A0A0W0W1U1_9GAMM 7-cyano-7-deazaguanine s ynthase OS=Legionella maceachernii OX=466 GN=queC PE=3 SV=1
MKKAVVLLSGGLDSTTCLAIAHKEGFACYALSFAYGQRHSAELAAARRVAQHFAVADHRIIALDIGQLGGSALTDESIQVPDYTGSSEIPVTYVPARNTIFLSYALGYAETIGARDIFIGVSAVDYSHYPDCRPEFIAAFQTLANLATKAGVEGDAFRLHAPLLHLSKAEAVRIGNRLNVDYALTVSCYQATESGKACGRCDSCCIRKQGFRAAGFKDPTIYV

SEQ ID NO: 39128 - protein, 223 aa, Legionella massiliensis
  misc_feature (1)..(223): tr|A0A078KXA7|A0A078KXA7_9GAMM 7-cyano-7-deazaguanine s ynthase OS=Legionella massiliensis OX=1034943 GN=queC P E=3 SV=1
MKKAVVLISGGLDSTTCLAIAKAEGFDCYALSFAYGQRHTAELIAAQRIAKHFAVSEHRIINLDIGQFGGSALTDQSIQVPEYSGSKEIPVTYVPARNTVFLAISLGYAEVLDAQDLFIGVSSVDYSGYPDCRPEYIAAFQNLANLATKSAVEGSPFRLHTPLLHLSKAETIRQGIKLGVDYSMTVSCYQATEDGKACGHCDSCTLRKQGFLEAYITDQTIYA

SEQ ID NO: 39129 - protein, 228 aa, Legionella moravica
  misc_feature (1)..(228): tr|A0A378K474|A0A378K474_9GAMM 7-cyano-7-deazaguanine s ynthase OS=Legionella moravica OX=39962 GN=queC PE=3 SV =1
MNKAVVLLSGGLDSTTCLALAKSRGFACYAISFSYGQRHSAELLAAARIAQHYGVVEHKIVNLDTQLFSGSALTDQSIDVPDYLDSPKIPVTYVPARNTIFLSMALGLAESIGARDIFIGASSVDFSHYPDCRPEFIQAFQNMANLATKAGIEGDSFRINTPLQHLSKIETIQLGIQLGVDYGMTVSCYQANNKGEACGSCDSCTFRKRGFSGSGIDDPTIYQIAGHN

SEQ ID NO: 39130 - protein, 223 aa, Legionella nautarum
  misc_feature (1)..(223): tr|A0A0W0WWK2|A0A0W0WWK2_9GAMM 7-cyano-7-deazaguanine s ynthase OS=Legionella nautarum OX=45070 GN=queC PE=3 SV =1
MKKAVILLSGGLDSTTCLAIAKAEGFACHALSFAYGQRHSAELAAARRVANHFKVAEHRIINLDIGQLGGSALTDETIQVPDYSASEEIPVTYVPARNTVFLAYALGYAESIGAQDIFIGVSSVDYSHYPDCRPEYISAFQAVANLATKVAVEGAPVQLHAPLQYLSKAETILRGSQLGVDYSLTVSCYQANEKGAACGRCDSCCFRKQGFKAAGLADPTFYI

SEQ ID NO: 39131 - protein, 228 aa, Legionella norrlandica
  misc_feature (1)..(228): tr|A0A0A2STF6|A0A0A2STF6_9GAMM 7-cyano-7-deazaguanine s ynthase OS=Legionella norrlandica OX=1498499 GN=queC PE =3 SV=1
MKKAIVLLSGGLDSTTCLALAKSQGFACYALSFSYGQRHSTELFASTRIAKRMGVVEHKIVTLDLTAFGGSALTDSAIEVPQFRESAEIPVTYVPARNTIFLAIALGYAESIDARDIFIGASSVDYSHYPDCRPEFIQVFQTLANLATKAGIEGDEFTIQAPLQHLSKAQTIQLGQELGVDYSLTISCYQANDAGEACGQCDSCAFRKRGFQSAGVADPTLYQKHVHI

SEQ ID NO: 39132 - protein, 223 aa, Legionella oakridgensis; identical to SEQ ID NO: 39125
  misc_feature (1)..(223): tr|A0A0W0X1I8|A0A0W0X1I8_9GAMM 7-cyano-7-deazaguanine s ynthase OS=Legionella oakridgensis OX=29423 GN=queC PE= 3 SV=1

SEQ ID NO: 39133 - protein, 223 aa, Legionella oakridgensis; identical to SEQ ID NO: 39125
  misc_feature (1)..(223): tr|W0BD52|W0BD52_9GAMM 7-cyano-7-deazaguanine synthase OS=Legionella oakridgensis ATCC 33761 = DSM 21215 OX=12 68635 GN=queC PE=3 SV=1

SEQ ID NO: 39134 - protein, 227 aa, Legionella parisiensis
  misc_feature (1)..(227): tr|A0A1E5JM31|A0A1E5JM31_9GAMM 7-cyano-7-deazaguanine s ynthase OS=Legionella parisiensis OX=45071 GN=queC PE=3 SV=1
MKKAVVLLSGGLDSTTCLALARSKGFSCYAISFSYGQRHSAELLAAQRIAQHYQVVTHQIVPLDTALFRNSALTDSNIEVPSFQDGSDIPVTYVPARNTIFLAMALGFAESIGAREIFIGASSVDYSYYPDCRPEFIQAFQTLANLATKAGVSGDPFTIHAPLQHLSKVETIQLGIHLGIDYSLTVSCYQANDAGEACGQCDSCTFRKRGFLGAGIDDPTLYRHSDH

SEQ ID NO: 39135 - protein, 228 aa, Legionella pneumophila
  misc_feature (1)..(228): sp|Q5ZRJ5|QUEC_LEGPH 7-cyano-7-deazaguanine synthase OS =Legionella pneumophila subsp. pneumophila (strain Phil adelphia 1 / ATCC 33152 / DSM 7513) OX=272624 GN=queC P E=3 SV=2
MKKAVVLLSGGLDSTTCLALAKSQGFACYALSFSYGQRHSAELCAATRIAKHMGAADHKIVTLDIALFGGSALTDASIEVPEFKESPEIPVTYVPARNTIFLAMALGYAESIGARDIFIGASSVDYSHYPDCRPEFIESFQSLANLATKAGIEGDRFTINAPLQYLSKVQTIQLGTELGVDYGLTVSCYQANEAGEACGQCDSCTFRKRGFKSAGVDDPTRYQKCVHI

SEQ ID NO: 39136 - protein, 228 aa, Legionella pneumophila
  misc_feature (1)..(228): sp|A5II59|QUEC_LEGPC 7-cyano-7-deazaguanine synthase OS =Legionella pneumophila (strain Corby) OX=400673 GN=que C PE=3 SV=1
MKKAVVLLSGGLDSTTCLALAKSQGFACYALSFSYGQRHSAELCAATRIAKHMDAADHKIVTLDTALFGGSALTDASIEVPEFKESPEIPVTYVPARNTIFLAMALGYAESIGARDIFIGASSVDYSHYPDCRPEFIESFQSLANLATKAGIEGDRFTINAPLQYLSKVQTIQLGTELGVDYGLTVSCYQANEAGEACGQCDSCTFRKRGFKSAGVNDPTRYQKCVHI

SEQ ID NO: 39137 - protein, 228 aa, Legionella quateirensis
  misc_feature (1)..(228): tr|A0A378L0L4|A0A378L0L4_9GAMM 7-cyano-7-deazaguanine s ynthase OS=Legionella quateirensis OX=45072 GN=queC PE= 3 SV=1
MKKAVVLLSGGLDSTTCLALAKSKGFACFALSFSYGQRHSAELLAAARIAQHLGVVEHKTVTLDTQLFGGSALTDQSIDVPDFQDNSKIPVTYVPARNTIFLSMALGFAESIGARDIFIGASSVDFSHYPDCRPEFIQAFQDMANLATKAGIEGDSFRINAPLQYLSKIETIQLGMQLGVEYRLTVSCYQANNQGEACGSCDSCTFRKRGFSGAGIDDPTIYQRSVHN

SEQ ID NO: 39138 - protein, 225 aa, Legionella quinlivanii
  misc_feature (1)..(225): tr|A0A0W0Y5W8|A0A0W0Y5W8_9GAMM 7-cyano-7-deazaguanine s ynthase OS=Legionella quinlivanii OX=45073 GN=queC PE=3 SV=1
MRKAVVLLSGGLDSTTCLAVAKAAGYQCFALSFSYGQRHNSEIEAAKRVATWFEVAEHRIVNLDINQFGGSALTDETINVPDYQPTEGIPLTYVPARNTIFLAIALGYAEVIGANDLFIGISSVDYSNYPDCRPEYMEAFKKMAGLATRAGVEGNPLEIHTPLIKLSKAETVRLGAALGVDYALTVSCYQADEKGRACGRCDSCTFRQKGFVEAGIADPTLYKHN

SEQ ID NO: 39139 - protein, 225 aa, Legionella quinlivanii
  misc_feature (1)..(225): tr|A0A364LKW8|A0A364LKW8_9GAMM 7-cyano-7-deazaguanine s ynthase OS=Legionella quinlivanii OX=45073 GN=queC PE=3 SV=1
MRKAVVLLSGGLDSTTCLAVAKAAGYQCFALSFSYGQRHNSEIEAAKRVAACFKVAEHRIVNLDINQFGGSALTDETIEVPDYQPTDSIPLTYVPARNTIFLAIALGYAEVIGANDLFIGISSVDYSNYPDCRPEYMDAFKKMAGLATRAGVEGNPLEIHTPLIHLSKAETVRLGAGLGVDYALTVSCYQADEKGRACGRCDSCTFRQKGFVEAGIADPTLYQNN

SEQ ID NO: 39140 - protein, 225 aa, Legionella rubrilucens
  misc_feature (1)..(225): tr|A0A0W0XMV6|A0A0W0XMV6_9GAMM 7-cyano-7-deazaguanine s ynthase OS=Legionella rubrilucens OX=458 GN=queC PE=3 S V=1
MKKALVLLSGGLDSTTCLAIAKSQGYACYALSFDYGQRHNAELEAAKRVARQLGVIEHRVFTLDIGQFKGSALTDASVAVPDYCGDGKIPVTYVPARNTIFLAVALGFAETLEAFDLFIGVSQIDYSGYPDCRPEYIAAFEAMANLATKAGIEGHKTMIHTPLIAWSKAETIRQGIACGVDYSLTVSCYQATPEGLACGRCDSCAYRRKGFNEAGIIDPTRYVTD

SEQ ID NO: 39141 - protein, 226 aa, Legionella sainthelensi
  misc_feature (1)..(226): tr|A0A0W0YN14|A0A0W0YN14_9GAMM 7-cyano-7-deazaguanine s ynthase OS=Legionella sainthelensi OX=28087 GN=queC PE= 3 SV=1
MKKAVILLSGGLDSTTCLALAASKGFTCYPISFSYGQRHSAELFAAQRIAAHYKAREHQIVTLDTELFRNSALTDTNLDVPEFKEGSEIPVTYVPARNTIFLAMALGYAESIGARDIFIGASSVDYSHYPDCRPEFITAFQTLANLATKAGVAGNSFTIHAPLQYLSKVQTIQLGISLGVDYSLTVSCYQANDAGEACGHCDSCTFRQRGFIGAGIDDPTRYRHLK

SEQ ID NO: 39142 - protein, 226 aa, Legionella sainthelensi
  misc_feature (1)..(226): tr|A0A2H5FIY1|A0A2H5FIY1_9GAMM 7-cyano-7-deazaguanine s ynthase OS=Legionella sainthelensi OX=28087 GN=queC PE= 3 SV=1
MKKAVILLSGGLDSTTCLALAASKGFTCYTISFSYGQRHSAELLAAQRVATHYKAREHQIVTLDTELFRNSALTDVNLDVPEFKEGSEIPVTYVPARNTIFLAMALGFAESIGARDIFIGASSVDYSHYPDCRPEFISAFQTLANLATKAGVGGDSFTIHAPLQYLSKVQTIQLGISLGVDYSLTVSCYQASDAGEACGHCDSCTFRQRGFIGAGIDDPTRYRHNK

SEQ ID NO: 39143 - protein, 226 aa, Legionella santicrucis
  misc_feature (1)..(226): tr|A0A0W0ZDY0|A0A0W0ZDY0_9GAMM 7-cyano-7-deazaguanine s ynthase OS=Legionella santicrucis OX=45074 GN=queC PE=3 SV=1
MKKAVILLSGGLDSTTCLALAASKGFSCYAISFSYGQRHSAELFAAQRIAKHYKVAEHHIVTLDTELFRNSALTDTNLNVPAFKEDTEIPVTYVPARNTIFLAMALGFAESIGARDIFIGASSVDYSHYPDCRPEFISAFQTLANLATKAGVTGDSFTIHAPLQYLSKVQTIQLGISLGVDYSLTVSCYQANDAGEACGQCDSCTFRQRGFIGAGIDDPTLYRHPE

SEQ ID NO: 39144 - protein, 229 aa, Legionella shakespearei
  misc_feature (1)..(229): tr|A0A0W0YKT9|A0A0W0YKT9_9GAMM 7-cyano-7-deazaguanine s ynthase OS=Legionella shakespearei DSM 23087 OX=1122169 GN=queC PE=3 SV=1
MMKKAVVLLSGGLDSTTCLALAKSEGYECFALSFSYGQRHGAELLAAARIARHFAVKEHKIVNLDTGLFAGSALTDDTISVPDFQESTEIPVTYVPARNTIFLSMALGFAESIGARDIFIGASSVDFSHYPDCRPEFIQAFQTLANLATKAGVEGDSFVIHAPLQYLSKVQTIELGVTLGVDYGLTLSCYQANEAGEACGQCDSCTFRKRGFAKAGIADPTKYHNFDHK

SEQ ID NO: 39145 - protein, 225 aa, Legionella sp.
  misc_feature (1)..(225): tr|A0A1Q4D519|A0A1Q4D519_9GAMM 7-cyano-7-deazaguanine s ynthase OS=Legionella sp. 40-6 OX=1895903 GN=queC PE=3 SV=1
MKKAVVLLSGGLDSTTCLAFAQAQGFSCYALSFAYGQRHSVELQAAKRIASHFAVTEHFITQIDTGLFRNNALTNTQIEVPAYNGDTQIPVTYVPAHNTIFLAMALGLAESVGARDIFIGVSSIDYSHYPDCRPEFIDAFTQMANLATKAGVEGDLFTVHAPLQHLSKIQTIELGIKLGVDYGMTISCYQADEEGRACGVCDSCSFRKQGFFGAGISDPTRYVSS

SEQ ID NO: 39146 - protein, 228 aa, Legionella sp.
  misc_feature (1)..(228): tr|A0A1Q3TWK8|A0A1Q3TWK8_9GAMM 7-cyano-7-deazaguanine s ynthase OS=Legionella sp. 39-23 OX=1895902 GN=queC PE=3 SV=1
MKKAVVLLSGGLDSTTCLALATAKGFACAAISFAYGQRHSAELQAAQRIAHHYKVIKHHIVTLDTELFRNSALTDTNLDVPAFQEGSEIPVTYVPARNTIFLAMALGLAESIGARDLFIGASSVDYSHYPDCRPEFIEAFQTLANLATKAGVTGDRFSIHAPLQHLSKVQTIQLGISLGVDYSLTVSCYQANDAGEACGECDSCTFRRRGFSGAGVADPTLYHHATTK

SEQ ID NO: 39147 - protein, 224 aa, Legionella spiritensis
  misc_feature (1)..(224): tr|A0A0W0YW79|A0A0W0YW79_LEGSP 7-cyano-7-deazaguanine s ynthase OS=Legionella spiritensis OX=452 GN=queC PE=3 S V=1
MSKNAVVLLSGGLDSTTCLAVAREQGFACYALSFAYGQRHQAELQAAERVARAACVAEHRVVNLDISQFKGSALTDPDTAVPDYNGDGQIPSTYVPARNTVFLAIALGYAEVTGARDIFIGVSEVDYSGYPDCRPEFIAAFQNMANLATKAGIEGQKTIIHAPLQHLSKADTIRLGTRLGVDYGLTVSCYQASLSGAACGRCDSCVYRKKGFLAAGVPDPTPYM

SEQ ID NO: 39148 - protein, 228 aa, Legionella steelei; identical to SEQ ID NO: 39146
  misc_feature (1)..(228): tr|A0A0W0ZKC6|A0A0W0ZKC6_9GAMM 7-cyano-7-deazaguanine s ynthase OS=Legionella steelei OX=947033 GN=queC PE=3 SV =1

SEQ ID NO: 39149 - protein, 228 aa, Legionella steigerwaltii
  misc_feature (1)..(228): tr|A0A378L4G8|A0A378L4G8_9GAMM 7-cyano-7-deazaguanine s ynthase OS=Legionella steigerwaltii OX=460 GN=queC PE=3 SV=1
MKKAVVLLSGGLDSTTCLALATSKGFSCDAISFSYGQRHSAELHAAQRIAQHYKVLKHHIVTLDTELFRNSALTDSNMEVPAFQGGSEIPVTYVPARNTIFLAMALGLAESIGARDIFIGASSVDYSHYPDCRPEFIEAFQTLANLATKAGVTGDHFSIHAPLQHLSKVQTIQLGISLGVDYSLTVSCYQANDAGEACGECDSCTFRRRGFIGAGVADPTLYRHSTPK

SEQ ID NO: 39150 - protein, 225 aa, Legionella taurinensis
  misc_feature (1)..(225): tr|A0A3A5L9B3|A0A3A5L9B3_9GAMM 7-cyano-7-deazaguanine s ynthase OS=Legionella taurinensis OX=70611 GN=queC PE=3 SV=1
MKKAIVLLSGGLDSTTCLAIAKSQGYACYALSFDYGQRHNAELEAAKRVARQLGAIEHHVFTLDIGQFKGSALTDASVAVPDYCGDGKIPVTYVPARNTIFLSVALGFAETLAAFNLFIGVSQIDYSGYPDCRPEYIAAFETMANLATKAGIEGRKTVIHTPLIAWSKAETIRQGVACGADYSLTVSCYQATPEGVACGRCDSCTYRRKGFNEAGIIDPTRYVSG

SEQ ID NO: 39151 - protein, 226 aa, Legionella tucsonensis
  misc_feature (1)..(226): tr|A0A0W0ZSV9|A0A0W0ZSV9_9GAMM 7-cyano-7-deazaguanine s ynthase OS=Legionella tucsonensis OX=40335 GN=queC PE=3 SV=1
MKKAVVLLSGGLDSTTCLALAHSKGFSCYAISFSYGQRHSAELLAAQRIAQHYNVKHQIVTLDTALFRNSALTDSNMEVPSFQSGSDIPVTYVPARNTIFLAMALGFAESIGAREIFIGASSVDYSHYPDCRPEFIQAFQTLANLATKAGVNGEQFTIHAPLQHLSKVETIQLGISLNVDYSLTISCYQANDAGEACGQCDSCTFRKRGFLGAGIDDPTLYRRCNH

SEQ ID NO: 39152 - protein, 227 aa, Legionella wadsworthii
  misc_feature (1)..(227): tr|A0A378LMJ8|A0A378LMJ8_9GAMM 7-cyano-7-deazaguanine s ynthase OS=Legionella wadsworthii OX=28088 GN=queC PE=3 SV=1
MKKAVILLSGGLDSTTCLALAISKGFTCHAISFSYGQRHSAELLAAQRIARFYGVTHHILCLDTELFRNSALTDSNIEVPSFKGGSDIPVTYVPARNTIFLSMALGLAESIGARDIFIGASSVDYSHYPDCRPEFIEAFQTLANLATKAGVTGDQFTIHAPLQHLSKVQTIQLGINLNVDYSLTVSCYQANESGEACGHCDSCTFRHQGFAGAGIDDPTRYHNSHPK

SEQ ID NO: 39153 - protein, 238 aa, Legionella waltersii
  misc_feature (1)..(238): tr|A0A0W1A4U8|A0A0W1A4U8_9GAMM 7-cyano-7-deazaguanine s ynthase OS=Legionella waltersii OX=66969 GN=queC PE=3 S V=1
MSRQYLDLWGSYTMKKAVVLLSGGLDSTTCLALAKSKGFACYALSFSYGQRHSTELKAAARIAKQMDVIEHKIVNLDTGLFGGSALTDQAIDVPEFKESMDIPVTYVPARNTIFLAMALGYAESIAARDIYIGASSVDYSHYPDCRPEFIHAFETLANLATKAGIEGDLFSIHAPLQHLSKVQTIQLGAQLNVDYSMTVSCYQANDAGEACGSCDSCTFRKRGFLGAGVVDPTKYRHD

SEQ ID NO: 39154 - protein, 227 aa, Legionella worsleiensis
  misc_feature (1)..(227): tr|A0A0W1AKR7|A0A0W1AKR7_9GAMM 7-cyano-7-deazaguanine s ynthase OS=Legionella worsleiensis OX=45076 GN=queC PE= 3 SV=1
MKKAVLLFSGGLDSTTVLAYAKNNGYECHPISFYYGQRHAAELNASQKIAEYFKVKEHKIITLPNDMFGSSALTRDDVHVPDFLENNSNTIPVTYVPARNTIFLSIALGYAESIGAHDIFLGVSFIDYSGYPDCRPEYISAFEKLANLATKDGVEGKKISIHTPLLYLTKAQTIELGIKNGVDYAMTVSCYNADPDTGAACGTCDSCSFRKKGFIDAGIKDPTVYRK

SEQ ID NO: 39155 - protein, 264 aa, Legionellaceae bacterium
  misc_feature (1)..(264): tr|A0A2E5Y954|A0A2E5Y954_9GAMM 7-cyano-7-deazaguanine s ynthase OS=Legionellaceae bacterium OX=2026753 GN=CMF38 _03280 PE=3 SV=1
MTVKKTAILALSGGLDSSSLLLHLLREQYEVHAISFLYGQKHQVELEKAQELIGYLREHQLSVKHSLLHLEGLKALLFSALTTESAEIPEGHYSQESMRATVVPNRNKIFLSILQAAALSHANLHQEPVKIALGIHAGDEHTYPDCRGDFITQDFAAFHSGNWQSTKVEPYLPYLNYVKYDILKDGMRSCEVLGLSFDEVYRRTITSYHPNARGISDYKSGASVARIEAFMQLNRQDPITYADDTGLVTWETVQQYVSAVLKHP

SEQ ID NO: 39156 - protein, 224 aa, Legionellales bacterium
  misc_feature (1)..(224): tr|A0A2E2TKQ9|A0A2E2TKQ9_9GAMM 7-cyano-7-deazaguanine s ynthase OS=Legionellales bacterium OX=2026754 GN=queC P E=3 SV=1
MKKKAVILLSGGLDSTTCLAYAKAKGYECFALSFDYAQRHRTELNAAKHIAQYFNVNEHKIIPLDLSLIGGSALTDKKMNIEKYSAEQLIPTTYVPARNTIFFSVALGYAEVINADYIITGISAVDYSGYPDCRPECLNAFQTMADYATKKGVMDKSIRFLAPLIYLTKAETIKLGTKLGVNYAMTVSCYQANAQGAACGECDSCVLRKQGFEKAQLADPTCYR

SEQ ID NO: 39157 - protein, 225 aa, Legionellales bacterium
  misc_feature (1)..(225): tr|A0A2E0PYT5|A0A2E0PYT5_9GAMM 7-cyano-7-deazaguanine s ynthase OS=Legionellales bacterium OX=2026754 GN=queC P E=3 SV=1
MRNSKKAIILLSGGLDSATTLAIAKKLGFDCYALSFNYKQRHMSELNAAKNVAKKLKLTEHKIIEIDLTQIGGSALTDSKIDVPNSPTKGIPITYVPARNTMFLSYALAWAEVIGSSDIFIGVNAVDYSGYPDCRPEYIEAYEKLAALATKAGVEGVGFKIHAPLIKLSKSEIIKEGLALGVDFSQTVSCYQANDMGFACGLCDSCMFRKEGFDSAGVSDPTKYQ

SEQ ID NO: 39158 - protein, 210 aa, Leifsonia aquatica
  misc_feature (1)..(210): tr|U2TEY1|U2TEY1_LEIAQ 7-cyano-7-deazaguanine synthase OS=Leifsonia aquatica ATCC 14665 OX=1358026 GN=N136_003 78 PE=3 SV=1
MAKLVGDAVVLLSGGVDSAALAAFTRPALALFVDYGQIPARAEARASRAIADRLGVPYRAVRLPLNDFGGGLLLDGVPLDDAPSPEWWPYRNQFLGTAGAAIALQHNLTKVLLGSVRGDGDRHMDGSPQFYRALTTLTSLQEGSVQVEAPALELTTVELVRKARLDSAILALTVSCHRAARPCGDCPGCWKRQQVFAELDVFQPTVTSNA

SEQ ID NO: 39159 - protein, 231 aa, Leifsonia flava
  misc_feature (1)..(231): tr|A0A4Y9QWG7|A0A4Y9QWG7_9MICO 7-cyano-7-deazaguanine s ynthase OS=Leifsonia flava OX=2561933 GN=queC PE=3 SV=1
MSKRKAVVLLSGGLDSTTVLAIAKNEGYEPYALSFRYGQRHVVELEAAKRVAEAQGVAQHVVCDIDLRTFGGSALTSATDVPKHDRAEDLSPDEIPVTYVPARNTIFLSFALAFAEVVGASDVFIGVNALDYSGYPDCRPEYIEAYETMANLATRAGVEGARLKIHTPLISMTKADIVRAGMELGVDYSLTLSCYDPDDEGKSCGHCDSCLLRIRGFQEAGSSDPVAYQAV

SEQ ID NO: 39160 - protein, 221 aa, Leifsonia sp.
  misc_feature (1)..(221): tr|A0A1H4E4W6|A0A1H4E4W6_9MICO 7-cyano-7-deazaguanine s ynthase OS=Leifsonia sp. 21MFCrub1.1 OX=1798223 GN=SAMN 04515680_1604 PE=3 SV=1
MTAVMLSGGPDSTVLTYELVRAGTRPLAIVFDLGDEEAPRSVIFARRIAADLDLEILEVDLAAGMRDAYRKPFPQFLRAAQVMSHEIEPFGSGVALSIAASLAASRGHSELHYGVHRDDTMYRDNNAEYFSLLSRAISIETGRRFDIRAPFLNRTKAEVLQHGARLGVDLSGTWSCAHAGAIQCGTCLPCTLRQEAFSAAGLTDRTAYSHERLTPPTLVTT

SEQ ID NO: 39161 - protein, 244 aa, Leifsonia xyli
  misc_feature (1)..(244): tr|A0A2W5RC57|A0A2W5RC57_9MICO 7-cyano-7-deazaguanine s ynthase OS=Leifsonia xyli OX=1575 GN=queC PE=3 SV=1
MKVSALKVKEVVDYVKGKSAVVVLSGGQDSVTCLGLALRNFETVHAIGFSYGQKHEVEIHCAAQICAEHDVPFAVFEIPALQSIGNSALIRGTEQTDVSAQHAQNSKLPASFVPNRNALFLTTAHAYAQKVGADCLITGVCETDYSGYPDCRDIFIRSLEETLNLGYETNIKIYTPLMWLNKAETFALAKAVDFLMVVLEDSHTCYNGDHNTNFVWGYGCGECPACKLRAAGFEAFVAANPFNF

SEQ ID NO: 39162 - protein, 233 aa, Leisingera aquaemixtae
  misc_feature (1)..(233): tr|A0A0P1HDV5|A0A0P1HDV5_9RHOB 7-cyano-7-deazaguanine s ynthase OS=Leisingera aquaemixtae OX=1396826 GN=queC PE =3 SV=1
MKTIVICSGGLDSVSLAHMVAEEHQLTRLVSFDYGQRHRKELDYAAAAAKRLGVPHDIIDMRGIGAALSGSALTDDIDVPDGHYEEETMKVTVVPNRNAIMLTIAYGIAAANGDDAVATAVHGGDHFIYPDCRPAFTEAFDAMQRAALDGYADVRLYTPFVHRTKGDIVTAGAAHNTPFAETWSCYKGGEKHCGRCGTCVERREAFHLAGIEDPTDYADPDFWKAAIAAKDGA

SEQ ID NO: 39163 - protein, 233 aa, Leisingera methylohalidivorans
  misc_feature (1)..(233): tr|V9VUC3|V9VUC3_9RHOB 7-cyano-7-deazaguanine synthase OS=Leisingera methylohalidivorans DSM 14336 OX=999552 G N=queC PE=3 SV=1
MKTIVICSGGLDSVSLAHMVAAEQQLTRLVSFDYGQRHRKELDFAAAAARRLGVPHDIIDMRTIGAALSGSALTDDIDVPDGHYAEDTMKVTVVPNRNAIMLTIAYGIAAANGDQAVATAVHGGDHFIYPDCRPAFTEAFDAMQRAALDGYADVRLYTPFVHQTKGDIVTAGAKHNTPFADTWSCYKGGDKHCGRCGTCVERREAFHLAGVKDPTEYADPDFWRQAIAGKDGG

SEQ ID NO: 39164 - protein, 233 aa, Leisingera sp.
  misc_feature (1)..(233): tr|A0A0B4CR82|A0A0B4CR82_9RHOB 7-cyano-7-deazaguanine s ynthase OS=Leisingera sp. ANG-Vp OX=1577896 GN=queC PE= 3 SV=1
MKTIVICSGGLDSVSLAHMVAEEHQLTRLVSFDYGQRHRKELDYAAAAAERLGVPHDIIDMRGIGAALSGSALTDDIDVPDGHYEEETMKVTVVPNRNAIMLAIAYGIAAANGDDAVATAVHGGDHFIYPDCRPAFTEAFDAMQRAALDGYADVRLYTPFVHRTKGDIVTAGAKHSTPFAETWSCYKGGDKHCGRCGTCVERREAFHLAGVEDPTDYADPDFWKAAIAGKDGA

SEQ ID NO: 39165 - protein, 233 aa, Leisingera sp.
  misc_feature (1)..(233): tr|A0A481PJB2|A0A481PJB2_9RHOB 7-cyano-7-deazaguanine s ynthase OS=Leisingera sp. NJS204 OX=2508307 GN=queC PE= 3 SV=1
MKTIVICSGGLDSVSLAHMVADEHQLTRLVSFDYGQRHKKELDYAAAAAVRLGVPHDIIDMRSIGAALSGSALTDDIDVPDGHYEEDSMKVTVVPNRNAIMLTIAYGIAAANGDEAVATAVHGGDHFIYPDCRPAFTEAFDAMQRAALDGYADVRLYTPFVHRSKADIVTAGAKHNTPFADTWSCYKGGEKHCGRCGTCVERREAFHLAGAEDPTDYADPDFWQQAIAAKDGA

SEQ ID NO: 39166 - protein, 231 aa, Lelliottia amnigena
  misc_feature (1)..(231): tr|A0A3S5XYH0|A0A3S5XYH0_LELAM 7-cyano-7-deazaguanine s ynthase OS=Lelliottia amnigena OX=61646 GN=queC PE=3 SV =1
MKRAVVVFSGGQDSTTCLIQALHQYDEVHCVTFDYGQRHRAEIDVAQELALKLGARAHKVLDVTLLNELAVSSLTRDSIPVPDYEPDADGIPNTFVPGRNILFLTLTAIYAYQVKAEAIITGVCETDFSGYPDCRDEFVKALNHAVDLGMAKEIRFETPLMWLDKAETWALADYWEKLELVRTETLTCYNGIKGDGCGQCASCNLRSNGLNHYLTNKPAVMSAMKAKTGLK

SEQ ID NO: 39167 - protein, 231 aa, Lelliottia amnigena
  misc_feature (1)..(231): tr|A0A1A9F8Q6|A0A1A9F8Q6_LELAM 7-cyano-7-deazaguanine s ynthase OS=Lelliottia amnigena OX=61646 GN=queC PE=3 SV =1
MKRAVVVFSGGQDSTTCLIQALHQYDEVHCVTFDYGQRHRAEIDVARELALKLGARAHKVLDVTLLNELAVSSLTRDSIPVPDYEPDASGIPNTFVPGRNILFLTLTAIYAYQVKAEAVITGVCETDFSGYPDCRDEFVKALNHAVDLGMAKETRFETPLMWLDKAETWALADYWGKLDLVRAETLTCYNGIKGDGCGECAACHLRANGLNHYLADKPAIMAAMKQKTGLK

SEQ ID NO: 39168 - protein, 231 aa, Lelliottia nimipressuralis; identical to SEQ ID NO: 38098
  misc_feature (1)..(231): tr|A0A2L2JB34|A0A2L2JB34_9ENTR 7-cyano-7-deazaguanine s ynthase OS=Lelliottia nimipressuralis OX=69220 GN=queC PE=3 SV=1

SEQ ID NO: 39169 - protein, 231 aa, Lelliottia nimipressuralis
  misc_feature (1)..(231): tr|A0A4Y8IZD3|A0A4Y8IZD3_9ENTR 7-cyano-7-deazaguanine s ynthase OS=Lelliottia nimipressuralis OX=69220 GN=queC PE=3 SV=1
MKRAVVVFSGGQDSTTCLVQALHQYDEVHCVTFDYGQRHRAEIDVARELALKLGARAHKVLDVTLLNELAVSSLTRDSIPVPDYEPDASGIPNTFVPGRNILFLTLTAIYAYQVKAEAVITGVCETDFSGYPDCRDEFVKALNHAVNLGMAKDTRFETPLMWLDKAETWALADYWGKLDLVRSETLTCYNGIKGDGCGQCAACNLRANGLNHYLADKVGVMAAMQKKTGLK

SEQ ID NO: 39170 - protein, 231 aa, Lelliottia sp.
  misc_feature (1)..(231): tr|A0A2S5C3Z0|A0A2S5C3Z0_9ENTR 7-cyano-7-deazaguanine s ynthase OS=Lelliottia sp. 7254-16 OX=2080842 GN=queC PE =3 SV=1
MKRAVVVFSGGQDSTTCLIQALQQYDEVHCVTFDYGQRHRAEIDVARELALKLGARAHKVLDVTLLNELAVSSLTRDSIPVPDYEPDSSGIPNTFVPGRNILFLTLTAIYAYQVKAEAVITGVCETDFSGYPDCRDEFVKALNHAVDLGMAKETRFETPLMWLDKAETWALADYWGKLDLVRNETLTCYNGIKGDGCGQCAACNLRANGLNHYLADKPGVMALMKKKTGLK

SEQ ID NO: 39171 - protein, 229 aa, Leminorella grimontii
  misc_feature (1)..(229): tr|A0A085HHE5|A0A085HHE5_9GAMM 7-cyano-7-deazaguanine s ynthase OS=Leminorella grimontii ATCC 33999 = DSM 5078 OX=1005999 GN=queC PE=3 SV=1
MKRAIVVFSGGQDSTTCLIQAMANFDEVHCVTFDYGQRHQAEIDCAKILAKRLGAAAHKVMDVTLLNELAISSLTRDNIPVPTQVENGIPNTFVPGRNILFLTLAGIYAYQVKAQAVITGVCETDFSGYPDCRDEFVKALNHALRLGMDYSLELVTPLMWLNKAETWALADYYDSLELVRQHTLTCYNGIQGDGCGECPACRLRANGLNQYLENRPQILKDVKRKLALA

SEQ ID NO: 39172 - protein, 229 aa, Leminorella grimontii; identical to SEQ ID NO: 39171
  misc_feature (1)..(229): tr|A0A485AM83|A0A485AM83_9GAMM 7-cyano-7-deazaguanine s ynthase OS=Leminorella grimontii OX=82981 GN=queC PE=3 SV=1

SEQ ID NO: 39173 - protein, 229 aa, Leminorella richardii
  misc_feature (1)..(229): tr|A0A2X4USH2|A0A2X4USH2_9GAMM 7-cyano-7-deazaguanine s ynthase OS=Leminorella richardii OX=158841 GN=queC PE=3 SV=1
MKRAVVVFSGGQDSTTCLIQALANYDEVHCVTFDYGQRHRAEIDCAKALALSLKAAAHKVMDVSLLNELAVSSLTRDNIPVPAQVEDGVPNTFVPGRNILFLTLAGIYAYQIKAEAVITGVCETDFSGYPDCRDEFVKALNVALRLGMDYDLKLVTPLMWLNKAETWALADYYDSLDLIRHQTLSCYNGIQGDGCGECAACRLRANGLNRYLENRPVILREVKQKLALP

SEQ ID NO: 39174 - protein, 220 aa, Lentibacillus sp.
  misc_feature (1)..(220): tr|A0A4Q3XCP5|A0A4Q3XCP5_9BACI 7-cyano-7-deazaguanine s ynthase OS=Lentibacillus sp. SSKP1-9 OX=2510307 GN=queC PE=3 SV=1
MFKDEKAVVVFSGGQDSTTCLFWAMQQFEEVVAVTFNYNQKHITEIECAKNITEELGIKHHILDMSLLNQLAPNALTRDDIEIKEGAGGELPSTFVPGRNLLFMSFAGVLASQINAKHIVTGVCETDFSGYPDCKDIFIKSLNVTLNLSMDEQFVIHTPLMWIDKAKTWELADNLGVLDFVRDKTLTCYNGIIANGCGECPACILRQKGLKEYLAKREER

SEQ ID NO: 39175 - protein, 226 aa, Lentisphaera araneosa
  misc_feature (1)..(226): tr|A6DLD5|A6DLD5_9BACT 7-cyano-7-deazaguanine synthase OS=Lentisphaera araneosa HTCC2155 OX=313628 GN=queC PE= 3 SV=1
MKKAAVLISGGLDSTTLLHHVIKSLGYDEVYALSFDYGQKHSRELIVAKAQCDSLPEVKEHNVLDISYMGDFLGSSSALVKGGVEVPDLKDIAEGDLDQPVTYVPNRNMMLLSIAASFAESRDCRQLYYGAQAQDEYGYWDCTESFLARMNDVFSLNRRTGVHVEAPFVNMSKGHVAKIGLALGIDYAQTWTCYRGGDKPCEVCPSCVERALAFKECGIDDPLLKK

SEQ ID NO: 39176 - protein, 227 aa, Lentisphaerae bacterium
  misc_feature (1)..(227): tr|A0A1G0ZAT1|A0A1G0ZAT1_9BACT 7-cyano-7-deazaguanine s ynthase OS=Lentisphaerae bacterium GWF2_44_16 OX=179857 1 GN=queC PE=3 SV=1
MAENKKAVVLLSGGLDSATCLAFALKEGFKAYALSFDYGQRHSFELNAAKKVASSMGIAEHVVINIDLRKWGGSALTSNSIDVPEAGTEKGIPPTYVPARNTIFLSFAVAWAEVLGARDIFIGVNSIDYSGYPDCRPQFIKAFETCATLGTKAADEGWEFTIQTPLQNKNKSEIIKLGHELGVDYSLTHSCYNPSPEGISCGKCDSCSFRLKGFREAGLTDPIKYQN

SEQ ID NO: 39177 - protein, 229 aa, Lentisphaerae bacterium
  misc_feature (1)..(229): tr|A0A1V5H2W6|A0A1V5H2W6_9BACT 7-cyano-7-deazaguanine s ynthase OS=Lentisphaerae bacterium ADurb.BinA184 OX=185 2901 GN=queC PE=3 SV=1
MPTDTPAATVLLSGGLDSTVLLHHVACRLRRRPVYALSFRYGQRHRRELAMARWQAAAAGAEVRHAVLSIPCLAALAGDGSALVGGGPEIPDLAALSPDERRQPPTYVPNRNLILLALAGAFAEAHGCQELYYGAQAQDEYGYWDCTAEFVARLNATLALNRRTPVHVLAPFVGWRKAEIVRLGIELGVDFARTWSCYRGGRRPCGTCPTCVERQRAFREAGHPDPWER

SEQ ID NO: 39178 - protein, 224 aa, Lentisphaerales bacterium
  misc_feature (1)..(224): tr|A0A524N340|A0A524N340_9BACT 7-cyano-7-deazaguanine s ynthase OS=Lentisphaerales bacterium OX=2448604 GN=queC PE=3 SV=1
MKKALVLLSGGVDSSTLLFYVKQRINVASVYALSFLYGQKHARELDAARWQAVKAGVKDHRVVDISFLGELLAGAGCALLDPDVDVPDLSELDRDARSQPPTYVPNRNMILLSIAAAFSETLDISDMFYGAQAQDEYGYWDCSDRFVKRLNNALALNRKKPVLIHAPFASMTKAKVLGIGFDLGVDYAHTWSCYRGADKPCGTCPTCVERAKAFRENDTPDPLS

SEQ ID NO: 39179 - protein, 225 aa, Lentisphaeria bacterium
  misc_feature (1)..(225): tr|A0A3D3JNR0|A0A3D3JNR0_9BACT 7-cyano-7-deazaguanine s ynthase OS=Lentisphaeria bacterium OX=2053569 GN=queC P E=3 SV=1
MQAVVLVSGGMDSATLLYYVVQTLGYDEVYGVSYAYGQKHDREVEMAKWQCEQLAAVKDWRLIDVSVLGDLTLGASALTDRSIDVPALAALTEDELSQPPTYVPNRNMILLSLAAAYSESRGCRTVFYGAQAQDDYGYWDCTVDFLERLNRVLSLNRRHAVEIQAPFMTMRKVDELRIGQELGVDYGRTWSCYRGGEKACGNCPACVERLKAFAEFGTVDPVEYE

SEQ ID NO: 39180 - protein, 227 aa, Lentisphaeria bacterium
  misc_feature (1)..(227): tr|A0A3D1UP40|A0A3D1UP40_9BACT 7-cyano-7-deazaguanine s ynthase OS=Lentisphaeria bacterium OX=2053569 GN=queC P E=3 SV=1
MDAKKKAVVLLSGGLDSVTCLAVAKHEGFEVHALTFDYGQRHKVELDCARRSAEKIGVERFHLISFDLRMWGASALTSDKLEVPDYNPHSHSVPITYVPARNLIFLSFATALAEGLNARDIFIGVNSLDYSGYPDCRPEFIEAFRKCARLGTKAVDEEWEYNIRAPLQHLRKSGIIKLGLSLGVDYSMTHSCYNPGADGRACGRCDSCGLRRDAFHELGLEDPALMK

SEQ ID NO: 39181 - protein, 232 aa, Lentzea aerocolonigenes
  misc_feature (1)..(232): tr|A0A0F0H7Q6|A0A0F0H7Q6_LENAE 7-cyano-7-deazaguanine s ynthase OS=Lentzea aerocolonigenes OX=68170 GN=queC PE= 3 SV=1
MNTPAIVLLSGGLDSTTTLAIAKQRGFLPYALSFSYGQRHSVELEAARRVAEQAGVARHIVADIDLRVFGGSALTDDIAVPKGRDEEQMAGEIPPTYVPGRNTIFLSFALAYAEVVGARDVFTGVNAVDYSGYPDCRPEYIEAYEAMANLATKSAVEGDGRIRVHAPLIDMTKADIIRKGIELGVDYSLTTSCYDPTDDGVSCGTCDTCVLRLKGFHEAGVADPVRYLAVPA

SEQ ID NO: 39182 - protein, 234 aa, Lentzea guizhouensis
  misc_feature (1)..(234): tr|A0A1B2HE32|A0A1B2HE32_9PSEU 7-cyano-7-deazaguanine s ynthase OS=Lentzea guizhouensis OX=1586287 GN=queC PE=3 SV=1
MTIDHPEHRHPEHAVVIASGGLDSTVLAYWLAARHSRLTLVSFDYGQRHRVELDHAAEIARLLLSPHRIIDLTSLGALLTGSALTDTSVAVPDGHYTDESMAATVVPNRNAIMLDIAVAVAIAVRADAVAFGAHAGDHTIYPDCRPPFVERFARSVQAANDGLLVPGFQVLAPFLTLTKADIVRVGEALAVPFARTWSCYRGEGVHCGTCGTCTERQEAFLDNGIPDPTVYRAA

SEQ ID NO: 39183 - protein, 230 aa, Leptolyngbya boryana
  misc_feature (1)..(230): tr|A0A1Z4JQ12|A0A1Z4JQ12_LEPBY 7-cyano-7-deazaguanine s ynthase OS=Leptolyngbya boryana NIES-2135 OX=1973484 GN =queC PE=3 SV=1
MPKAVVLLSGGLDSATVAAQAIADGYDVIALSFRYGQRHDRELQSAQDIVQHLKLLQHFIVDVNLAQWGGSALTDSAIEVPITGVQPDEIPITYVPGRNTVFIAIALSLAEAQNAAAIYLGINAIDYSGYPDCRPEYLAAFQTLAQLSSKAGLEGNAPKLIAPLITDSKTDIVKRAVKLGVPIEKTWSCYQGETEPCGICDSCRIRDRALIEAGYPEFATASGREFYQNY

SEQ ID NO: 39184 - protein, 223 aa, Leptolyngbya foveolarum
  misc_feature (1)..(223): tr|A0A2W4UMR4|A0A2W4UMR4_9CYAN 7-cyano-7-deazaguanine s ynthase OS=Leptolyngbya foveolarum OX=47253 GN=queC PE= 3 SV=1
MIKAVVLLSGGLDSATCAAQAIADGYQVTALSFDYGQRHDRELKAAADIVAALGIAEHRVINVNLAQWGGSSLTDESWSLPTDGVKTDEIPSTYVPGRNTVFIAIALSLAEAIEAKAIYLGINAVDYSGYPDCRPAYLSAFQSLAALSSKAGLAGEAPALVAPLVMDSKVDIVKRALRLGVPIEKTWSCYQGDPQPCGVCDSCRIRDDALIKAGRQDLATRRS

SEQ ID NO: 39185 - protein, 233 aa, Leptolyngbya frigida
  misc_feature (1)..(233): tr|A0A2T1ECG1|A0A2T1ECG1_9CYAN 7-cyano-7-deazaguanine s ynthase OS=Leptolyngbya frigida ULC18 OX=2107698 GN=que C PE=3 SV=1
MMPPIAIVLLSGGLDSATAAAQAIADGYRIIALSLNYGQRHVRELLAAKQIAAQLGIQEHFIMVVNLAQWGGSSLTDQTVTMPHDGVQTNVIPNTYVPGRNTVFIAIALSLAEAKDADAIYLGINAVDYSGYPDCRPAYLEAFQHLARLSSKAGLEGNAPKLVAPLVMDSKADIVRRALKLGVPIAQTWSCYEGKEEPCGLCDSCRIRDRALIEAGHAALATAIGQTLHSPSL

SEQ ID NO: 39186 - protein, 222 aa, Leptolyngbya sp.
  misc_feature (1)..(222): tr|K9ELX2|K9ELX2_9CYAN 7-cyano-7-deazaguanine synthase OS=Leptolyngbya sp. PCC 7375 OX=102129 GN=queC PE=3 SV= 1
MKKAVVLLSGGLDSATVAAQAIADGYGVIALSFRYGQRHSRELVAAKVIASHLGINQHFIVDVNLSQWGGSSLTDTQQTLPQDGVAPDVIPSTYVPGRNTVFISLALSLAEAQGAEAIYLGINAVDYSGYPDCRPEYLDAFQTLANLSSKVGVEGNSITLKAPLVMDSKVDIVKRAVALKVPIPQTWSCYAGGDTPCGRCDSCRIRDQALIEAGYPQWASNP

SEQ ID NO: 39187 - protein, 229 aa, Leptolyngbya sp.
  misc_feature (1)..(229): tr|A0A0S3U7G2|A0A0S3U7G2_9CYAN 7-cyano-7-deazaguanine s ynthase OS=Leptolyngbya sp. NIES-3755 OX=1752064 GN=que C PE=3 SV=1
MPKAIVLLSGGLDSATTTAQAISDGYEPIALSFRYGQRHDRELRAAQVLAKHFNLAQHFVIDVDLGQWGGSALTDRAIGVPTEGIQADVIPITYVPGRNTVFIAIALSLAEAQGAEAIYLGINAVDYSGYPDCRPEYLAAFQTLAQLSSKAGLEGKAPKLVAPLVMDSKTDIVKRAIALGVPIEKTWSCYQGEELPCGVCDSCRIRDRALIEAGHSELATPQGREFYRK

SEQ ID NO: 39188 - protein, 225 aa, Leptolyngbya valderiana
  misc_feature (1)..(225): tr|A0A166ULU9|A0A166ULU9_9CYAN 7-cyano-7-deazaguanine s ynthase OS=Leptolyngbya valderiana BDU 20041 OX=322866 GN=queC PE=3 SV=1
MGERKKAVVLLSGGLDSATVLAIAASEGYECHTLAVDYGQRHRSELEASEALSHSLGAASHRVVKVDLRAIGGSALTDDIDVPTELGEGIPVTYVPARNTLMLALALGHAEVQGALDLFIGVNAVDYSGYPDCRPQFIAAFEDLCSLATKVGDEGGRFSIHTPLIHLTKAEIIQRGTDLGVDYAQTVSCYQADEQGRACGVCDSCRLRRQGFADAGLTDVTRYRD

SEQ ID NO: 39189 - protein, 229 aa, Leptolyngbya valderiana
  misc_feature (1)..(229): tr|A0A166W903|A0A166W903_9CYAN 7-cyano-7-deazaguanine s ynthase OS=Leptolyngbya valderiana BDU 20041 OX=322866 GN=queC PE=3 SV=1
MSRAVVLLSGGLDSATCLALARQEGYECHALSFDYGQRHRGELRCAAAVASSLGAVSHTVYALDVGPFAGSSLTTGGDVPKDQAEPGSDGIPSTYVPARNLVFLSIATAYAETNEAQDVFIGVNAVDYSGYPDCRPDFIDAFARAATLATRRGTQGASPLRVRTPLLELSKADIVRAGAAAGVDFSLTTSCYDPADDGAGPIACGRCDACILRRRGFEAAGVHDPTRYA

SEQ ID NO: 39190 - protein, 247 aa, Leptonema illini
  misc_feature (1)..(247): tr|H2CAI6|H2CAI6_9LEPT 7-cyano-7-deazaguanine synthase OS=Leptonema illini DSM 21528 OX=929563 GN=queC PE=3 SV =1
MYDGSFSVRMAAVVLLSGGLDSVTTLFVAKAEGHEIYCISFDYGQRHRFELQCATEQARRAGALEHHTVKIDPVLFQDRSSHSATALIAGGAAVPENRSELLTGAAEKQIPVTYVPARNLLFLAYALSFAESRSAGYLYIGANALDYSGYPDCRPAFLQSFETTANLGTKAGIEGQGFSLKAPLVDDTKADIIRRGLKLGVDYSMTSSCYQPSDKGRPCGRCDSCLLREKGFAEVGVEDPLLLKDLA

SEQ ID NO: 39191 - protein, 239 aa, Leptospira adleri
  misc_feature (1)..(239): tr|A0A2M9YK08|A0A2M9YK08_9LEPT 7-cyano-7-deazaguanine s ynthase OS=Leptospira adleri OX=2023186 GN=queC PE=3 SV =1
MDSDKSKNSNRKKNDSKVKTSNNKAIVLLSGGLDSTTCLYQAIADGKEVRALSFDYGQRHRIELSYARKITRKLGIPHTIQKLKPELFLGSSLTQKSIKVPKNSLGKDEIPNTYVPGRNILFLSFATSLAEGTGSDSIYIGVNAMDYSGYPDCRPEFIKMFEMAIQLGTKKGSQGSPLKIITPLQNLTKKEIVLLGSKLNVPFQLTFSCYDPQNGKACGKCDACLLRKKGFQETGVSEK

SEQ ID NO: 39192 - protein, 239 aa, Leptospira adleri
  misc_feature (1)..(239): tr|A0A5F2CMG5|A0A5F2CMG5_9LEPT 7-cyano-7-deazaguanine s ynthase OS=Leptospira adleri OX=2023186 GN=queC PE=3 SV =1
MDSDKSKNSNRKKNDSKVKTSNNKAIVLLSGGLDSTTCLYQAIADGKEVRALSFDYGQRHRIELSYAKKITRKLGIPHTIQKLKPELFLGSSLTQKSIKVPKNSLGKDEIPNTYVPGRNILFLSFATSLAEGTGSDSIYIGVNAMDYSGYPDCRPEFIKMFEMAIQLGTKKGSQGSPLKIITPLQNLTKKEIVLLGSKLNVPFQLTFSCYDPQNGKACGKCDACLLRKKGFQETGVSEK

SEQ ID NO: 39193 - protein, 239 aa, Leptospira alexanderi
  misc_feature (1)..(239): tr|V6I1P6|V6I1P6_9LEPT 7-cyano-7-deazaguanine synthase OS=Leptospira alexanderi serovar Manhao 3 str. L 60 OX= 1049759 GN=queC PE=3 SV=1
MNSRENKNSSRKNSDSSSESANDKAVVLLSGGLDSTTCLYQAIADGKKIQALSFDYGQRHKIELSYAKKITRRLGISHAIQKLKPELFLGSSLTQKSLRVPKNSLGKEEIPNTYVPGRNILFLSFAVCLAEGTGSSSIYIGVNAMDYSGYPDCRPEFIKMYETAIQLGTKKGSQGSPIKIVTPLQNLSKKEIVLLGNRLQVPFHLTFSCYDPKNRKACGRCDACLLRKKGFQETGVSEK

SEQ ID NO: 39194 - protein, 242 aa, Leptospira alstonii
  misc_feature (1)..(242): tr|M6CVC0|M6CVC0_9LEPT 7-cyano-7-deazaguanine synthase OS=Leptospira alstonii serovar Sichuan str. 79601 OX=12 18565 GN=queC PE=3 SV=1
MKKAALDSKKNKNVNRKNFKEESSDNKAVVLLSGGLDSTTCLYQAVADGKKVQALSFDYGQRHKIELSYAKKITRKLGIPHTIQKLKPELFLGSSLTQKSIKVPKNSLGKDEIPNTYVPGRNILFLSFAVSLAEGTGSDSIYIGVNAMDYSGYPDCRPEFIKMYEMAIQLGTKKGSQGSPIKIVTPLQNLSKKEIVLLGNQLKVPFHLTFSCYDPKDGKACGKCDACILRKKGFQETGVSEK

SEQ ID NO: 39195 - protein, 242 aa, Leptospira alstonii; identical to SEQ ID NO: 39194
  misc_feature (1)..(242): tr|T0G8U3|T0G8U3_9LEPT 7-cyano-7-deazaguanine synthase OS=Leptospira alstonii serovar Pingchang str. 80-412 OX =1218564 GN=queC PE=3 SV=1

SEQ ID NO: 39196 - protein, 235 aa, Leptospira andrefontaineae
  misc_feature (1)..(235): tr|A0A4R9H0H4|A0A4R9H0H4_9LEPT 7-cyano-7-deazaguanine s ynthase OS=Leptospira andrefontaineae OX=2484976 GN=que C PE=3 SV=1
MSSSSKSNGVRAKSHSKNPKAIVLFSGGLDSTTCLYQAIQDGYSPIALSFDYNQKHKQELKSAKKITKLLEVPHLIQKLNPEFFQGSSLTEKKIKVPKNSLGHSEIPNTYVPGRNILFLSFGVSLAEGIGAQRLYIGVNALDYSGYPDCRPEFIKAYSDAIRIGTKTGSEGHPLEICTPLQFLDKKEIVLLGSKLGVPFSMTHSCYDPVGGKPCGKCDSCLLRKKGFQEAGVPEK

SEQ ID NO: 39197 - protein, 251 aa, Leptospira bandrabouensis
  misc_feature (1)..(251): tr|A0A4Z1ATB0|A0A4Z1ATB0_9LEPT 7-cyano-7-deazaguanine s ynthase OS=Leptospira bandrabouensis OX=2484903 GN=queC PE=3 SV=1
MVSVKDSSLKSKSEKKGAVVLLSGGLDSTTCLYFAAKEFGFPKNKKLPLLALSFDYSQKHKIELIKSKKIAKTLGIKHVIQKLDPGFFLGSSLTEKKIKVRKNAKSLFSGKEEEIPNTYVPGRNILFLSFALSLAEGHGYDSIYIGVNALDYSGYPDCRPEFIESFQKMANLGTKKGVSGDGDSIQIKTPLLHLGKKEIIELGLEVGAPLQLTHSCYDPLKGKPCGKCDSCILRAKGFLEAGILDPALSIR

SEQ ID NO: 39198 - protein, 249 aa, Leptospira barantonii
  misc_feature (1)..(249): tr|A0A5F2AYH7|A0A5F2AYH7_9LEPT 7-cyano-7-deazaguanine s ynthase OS=Leptospira barantonii OX=2023184 GN=queC PE= 3 SV=1
MNSTNDTNLKGKNSDTKNPKKSSKESSKDFSNNKAVVLLSGGLDSTTCLYQALADGKQIQALSFDYGQRHRIELSYAKKITRKLGIPHTIQKLKPELFLGSSLTQKSIKVPKNSLGKDEIPNTYVPGRNILFLSFAVSLAEGTGSDSIYIGVNAMDYSGYPDCRPEFIKMYEMAIQLGTKKGSQGSPIKILTPLQNLTKKEIVLLGNRLKVPFHLTFSCYDPKNGKACGKCDACLLRKKGFQETGVSEK

SEQ ID NO: 39199 - protein, 249 aa, Leptospira barantonii
  misc_feature (1)..(249): tr|A0A2M9Z432|A0A2M9Z432_9LEPT 7-cyano-7-deazaguanine s ynthase OS=Leptospira barantonii OX=2023184 GN=queC PE= 3 SV=1
MNPTNDTNLKRKNSDTKNPKKSSKESSKNFSNNKAVVLLSGGLDSTTCLYQALADGKQIQALSFDYGQRHRIELSYAKKITRKLGIPHTIQKLKPELFLGSSLTQKSIKVPKNSLGKDEIPNTYVPGRNILFLSFAVSLAEGTGSDSIYIGVNAMDYSGYPDCRPEFIKMYEMAIQLGTKKGSQGSPIKILTPLQNLTKKEIVLLGNRLKVPFHLTFSCYDPKNGKACGKCDACLLRKKGFQETGVSEK

SEQ ID NO: 39200 - protein, 248 aa, Leptospira biflexa
  misc_feature (1)..(248): tr|A0A5F2CF49|A0A5F2CF49_LEPBI 7-cyano-7-deazaguanine s ynthase OS=Leptospira biflexa OX=172 GN=queC PE=3 SV=1
MVSILDSSFKSKTEKKGAVVLLSGGLDSTTCLYLAAKDFGYPKNKKLPLLALSFDYSQKHKIELTKSKKIAKTLGIKHVIQKLDPGFFLGSSLTESKIKVRKNAKSLFSGDETEIPNTYVPGRNILFLSFALSLAEGHGYDSIYIGVNALDYSGYPDCRPEFIDSFQKMANLGTKKGVSGTGDSIQIKTPLLHLGKKEIIELGMSVGAPLGLTHSCYDPVSGKPCGKCDSCILRAKGFLEVGLKDPAL

SEQ ID NO: 39201 - protein, 248 aa, Leptospira biflexa
  misc_feature (1)..(248): sp|B0SK77|QUEC_LEPBP 7-cyano-7-deazaguanine synthase OS =Leptospira biflexa serovar Patoc (strain Patoc 1 / ATC C 23582 / Paris) OX=456481 GN=queC PE=3 SV=1
MVSILDSSFKSKTEKKGAIVLLSGGLDSTTCLYLAAKDFGYPKNKKLPLLALSFDYSQKHKIELTKSKKIAKTLGIKHVIQKLDPGFFLGSSLTESKIKVRKNAKSLFSGDETEIPNTYVPGRNILFLSFALSLAEGHGYDSIYIGVNALDYSGYPDCRPEFIDSFQKMANLGTKKGVSGTGDSIQIKTPLLHLGKKEIIELGMSVGAPLGLTHSCYDPVSGKPCGKCDSCILRAKGFLEVGLKDPAL

SEQ ID NO: 39202 - protein, 72 aa, Leptospira borgpetersenii
  misc_feature (1)..(72): tr|M6VW11|M6VW11_LEPBO Queuosine biosynthesis protein Q ueC-like protein OS=Leptospira borgpetersenii serovar P omona str. 200901868 OX=1192866 GN=LEP1GSC133_0437 PE=4 SV=1
MNSRKDKNSKGKNSDTKRKKSSQENDKAVVLLSGGLDSTTCLYQALADGKKSKLFPSTTDKNIKLNCLMRKK

SEQ ID NO: 39203 - protein, 176 aa, Leptospira borgpetersenii
  misc_feature (1)..(176): tr|M6VW92|M6VW92_LEPBO 7-cyano-7-deazaguanine synthase OS=Leptospira borgpetersenii serovar Pomona str. 200901 868 OX=1192866 GN=LEP1GSC133_0438 PE=3 SV=1
MSYAKKITRQLGISHTIQKLKPELFLGSSLTQKSLRVPKNSLGKEEIPNTYVPGRNILFLSFAVCLAEGTGSNSIYIGVNAMDYSGYPDCRPEFIRTYETAIQLGTKKGNQGSPIKIVTPLQNLSKKEIVLLGNQLQVPFHLTFSCYDPKNRKACEKCDACLLRKKGFQETGVSEK

SEQ ID NO: 39204 - protein, 251 aa, Leptospira bourretii
  misc_feature (1)..(251): tr|A0A4R9IPW7|A0A4R9IPW7_9LEPT 7-cyano-7-deazaguanine s ynthase OS=Leptospira bourretii OX=2484962 GN=queC PE=3 SV=1
MVSVKDSSLNSKSEKKGAVVLLSGGLDSTTCLYFAAKEFGYPKNKKLPILALSFDYSQKHKIELIKSKKIAKTLGIKHVIQKLDPGFFLGSSLTEKKIKVRKNAKSLFSGIEEEIPNTYVPGRNILFLSFALSLAEGHGYDSIYIGVNALDYSGYPDCRPEFIESFQKMANLGTKKGVSGDGDSIQIKTPLLHLGKKEIIELGIQVDAPLHLTHSCYDPVRGKPCGKCDSCILRAKGFLEAGILDPAISLR

SEQ ID NO: 39205 - protein, 250 aa, Leptospira bouyouniensis
  misc_feature (1)..(250): tr|A0A4R9HQK9|A0A4R9HQK9_9LEPT 7-cyano-7-deazaguanine s ynthase OS=Leptospira bouyouniensis OX=2484911 GN=queC PE=3 SV=1
MVSVSDSNHKSLSEKKGAVVLLSGGLDSTTCLYIAAKEFGYPKHKKLPLLALSFDYSQKHKIELIKSKKIAKTLGIKHVIQKLDPGFFLGSSLTEKKIKVRKNAKSLFNGDEKEIPNTYVPGRNILFLSFALSLAEGHGYDSIYIGVNALDYSGYPDCRPEFIESFQKMANLGTKKGVSGKGDSIQIKTPLLHLGKKEIIELGMEVGAPLHLTHSCYDPIKGKPCGKCDSCILRAKGFSEIGLEDPALKI

SEQ ID NO: 39206 - protein, 246 aa, Leptospira brenneri
  misc_feature (1)..(246): tr|A0A2M9Y3P9|A0A2M9Y3P9_9LEPT 7-cyano-7-deazaguanine s ynthase OS=Leptospira brenneri OX=2023182 GN=queC PE=3 SV=1
MVSVMDSSPKSNSKGAVVLLSGGLDSTTCLYIAARDYGYPKNKKLPLLALSFDYSQKHKIELIKSKKIAKLLGIKHVTQKLDPGFFLGSSLTEKKIKVRKNAKFLLSGKEEEIPNTYVPGRNILFLSFALSLAEGHGYDSIYIGVNALDYSGYPDCRPEFIESFQKMANLGTKKGVSGKGDSIQIKTPLLHLGKKEIIELGIQVDAPLHLTHSCYDPIKGKPCGKCDSCILRAKGFLEAGLLDPAT

SEQ ID NO: 39207 - protein, 235 aa, Leptospira broomii
  misc_feature (1)..(235): tr|T0FAL5|T0FAL5_9LEPT 7-cyano-7-deazaguanine synthase OS=Leptospira broomii serovar Hurstbridge str. 5399 OX= 1049789 GN=queC PE=3 SV=1
MATKKESNTARRNFSPDKPKAVVLFSGGLDSTTCLYQAIEDGYAPIALSFDYDQRHKVELKSAKKIANRLRIPHLIQKLQPKFFLGSSLTEKKIKVPKNALGKSGIPNTYVPGRNILFLSFGVSLAEGIQADRLYIGVNALDYSGYPDCRPEFLKAYSEAIRIGTKAGAEGHPLEIAAPLQYLGKKEIVLLGAKLGVPFSMTHSCYDPINGKPCGKCDSCLLRKKGFQEAGIPEK

SEQ ID NO: 39208 - protein, 251 aa, Leptospira congkakensis
  misc_feature (1)..(251): tr|A0A4Z1AAD8|A0A4Z1AAD8_9LEPT 7-cyano-7-deazaguanine s ynthase OS=Leptospira congkakensis OX=2484932 GN=queC P E=3 SV=1
MVSVTDSSPKSKSEKKGAVVLLSGGLDSTTCLYVAAKEFGYPKNKKLPILALSFDYSQKHKIELIKSKKIAKTLGIKHVIQKLDPGFFLGSSLTEKKIKVRKNAKFLFSGNEKEIPNTYVPGRNILFLSFALSLAEGHGYDSIYIGVNALDYSGYPDCRPEFIESFQKMANLGTKKGVSGDGDSIQIKTPLLHLGKKEIIELGIQVDAPLHLTHSCYDPVRGKPCGKCDSCILRAKGFLEAGILDPAIQSQ

SEQ ID NO: 39209 - protein, 239 aa, Leptospira dzianensis
  misc_feature (1)..(239): tr|A0A5F2EBY6|A0A5F2EBY6_9LEPT 7-cyano-7-deazaguanine s ynthase OS=Leptospira dzianensis OX=2484905 GN=queC PE= 3 SV=1
MDSAKKKNVNRKRSDFQTTPSNNKAVVLLSGGLDSTTCLYQAIADGKEVQALSFDYGQRHRIELSYAKKITRKLGIPHTIQKLKPELFLGSSLTQKSIKVPKNSLGKDEIPNTYVPGRNILFLSFAVSLAEGTGSDSIYIGVNAMDYSGYPDCRPEFIKMYEMAIQLGTKKGSQGSPIKIVTPLQNLSKKEIVLLGNRLQVPFHLTFSCYDPKGGKACGKCDACLLRKKGFQETGVSEK

SEQ ID NO: 39210 - protein, 239 aa, Leptospira dzianensis
  misc_feature (1)..(239): tr|A0A5F2BPB2|A0A5F2BPB2_9LEPT 7-cyano-7-deazaguanine s ynthase OS=Leptospira dzianensis OX=2484905 GN=queC PE= 3 SV=1
MDSAKKKNVNRKRSDFQTTPSNNKAVVLLSGGLDSTTCLYQAIADGKEVQALSFDYGQRHKIELSYAKKITRKLGIPHTIQKLKPELFLGSSLTQKSIKVPKNSLGKDEIPNTYVPGRNILFLSFAVSLAEGTGSDSIYIGVNAMDYSGYPDCRPEFIKMYEMAIQLGTKKGSQGSPIKIVTPLQNLSKKEIVLLGNRLQVPFHLTFSCYDPKGGKACGKCDACLLRKKGFQETGVSEK

SEQ ID NO: 39211 - protein, 235 aa, Leptospira dzoumogneensis
  misc_feature (1)..(235): tr|A0A4Z1AM21|A0A4Z1AM21_9LEPT 7-cyano-7-deazaguanine s ynthase OS=Leptospira dzoumogneensis OX=2484904 GN=queC PE=3 SV=1
MGPSSKSNSVRTKSHSKNPKAIVLFSGGLDSTTCLYQAIQDGYSPIALSFDYNQKHKQELKSAKKITKLLDIPHLIQKLNPEFFQGSSLTEKKIKVPKNSLGHSEIPNTYVPGRNILFLSFGVSLAEGIGAQRLYIGVNALDYSGYPDCRPEFVKAYSDAVRIGTKTGSEGHPLEICTPLQFLDKKEIVLLGSKLGVPFSMTHSCYDPVGGKPCGKCDSCLLRKKGFQEAGVPEK

SEQ ID NO: 39212 - protein, 250 aa, Leptospira ellinghausenii
  misc_feature (1)..(250): tr|A0A2P2DF63|A0A2P2DF63_9LEPT 7-cyano-7-deazaguanine s ynthase OS=Leptospira ellinghausenii OX=1917822 GN=queC PE=3 SV=1
MVSVSDSSQKSKFEKKGAVVLLSGGLDSTTCLYVAAKEFGYPKNKKLPILALSFDYSQKHKIELIKSKKIAKELGVKHVIQKLDPGFFLGSSLTEKKIKVRKNAKSLFNGNDKEIPNTYVPGRNILFLSFALSLAEGHGYDSIYIGVNALDYSGYPDCRPEFIESFQKMANLGTKKGVSGIGDSIQIRTPLLHLGKKEIIELGIQVDAPLHLTHSCYDPVVGKPCGKCDSCILRAKGFLEVGLPDPALKS

SEQ ID NO: 39213 - protein, 174 aa, Leptospira elllisii
  misc_feature (1)..(174): tr|A0A2N0B3K8|A0A2N0B3K8_9LEPT 7-cyano-7-deazaguanine s ynthase (Fragment) OS=Leptospira elllisii OX=2023197 GN =queC PE=3 SV=1
MASAKDKNSKERNSEPNRKSSKDKNDKAVVLLSGGLDSTTCLYQAIADGKEVRALSFDYGQRHRIELSYAKKIVRKLGIPHTIQKLKPDLFLGSSLTQKSIKVPKNSLGKDEIPNTYVPGRNILFLSFAVSLAEGTGSDSIYIGVNAMDYSGYPDCRPEFIKMYEMAIQLGTKK

SEQ ID NO: 39214 - protein, 242 aa, Leptospira elllisii
  misc_feature (1)..(242): tr|A0A2N0BG23|A0A2N0BG23_9LEPT 7-cyano-7-deazaguanine s ynthase OS=Leptospira elllisii OX=2023197 GN=queC PE=3 SV=1
MASAKDKNSKERNSEPNRKSSKDKNDKAVVLLSGGLDSTTCLYQAIADGKEVRALSFDYGQRHRIELSYAKKIVRKLGIPHTIQKLKPDLFLGSSLTQKSIKVPKNSLGKDEIPNTYVPGRNILFLSFAVSLAEGTGSDSIYIGVNAMDYSGYPDCRPEFIKMYEMAIQLGTKKGSQGSPIKIITPLQNLSKKEIVLLGNKLKVPFHLTFSCYDPQNGKACGKCDACLLRKKGFQETGVSEK

SEQ ID NO: 39215 - protein, 235 aa, Leptospira fainei
  misc_feature (1)..(235): tr|S3UTH8|S3UTH8_9LEPT 7-cyano-7-deazaguanine synthase OS=Leptospira fainei serovar Hurstbridge str. BUT 6 OX= 1193011 GN=queC PE=3 SV=1
MAGKKESNTVRRNFSSEKPKAVVLFSGGLDSTTCLYQAIEDGYAPIALSFDYDQRHKVELKSAKKIANRLGIPHLIQKLQPKFFLGSSLTEKKIKVPKNSLGKSGIPNTYVPGRNILFLSFGVSLAEGTHADRLYIGVNALDYSGYPDCRPEFLKAYSEAIRIGTKAGSEGHPLEISAPLQYLGKKEIVLLGAKLGVPFSMTHSCYDPIDGKPCGKCDSCLLRKKGFQEAGIPEK

SEQ ID NO: 39216 - protein, 235 aa, Leptospira fletcheri
  misc_feature (1)..(235): tr|A0A4R9GGW1|A0A4R9GGW1_9LEPT 7-cyano-7-deazaguanine s ynthase OS=Leptospira fletcheri OX=2484981 GN=queC PE=3 SV=1
MLSKSESNSVLTVSKSERPKAVVLFSGGLDSTTCLYQAIEDGYHPTALSFDYEQKHKIELKSAKQIAKHLGIPHLIQKLQPKFFLGSSLTEKKLKVPKNSLGKAGIPNTYVPGRNILFLSFGVSLAEGIQAKRLYIGVNALDYSGYPDCRPEFLKAYADAVRQGTKAGVEGHPLEICAPLQHLGKKEIVLLGSKLGVPFSMTHSCYDPIGGKPCGRCDSCLLRKKGFQEAGIPEK

SEQ ID NO: 39217 - protein, 235 aa, Leptospira fluminis
  misc_feature (1)..(235): tr|A0A4V3JET2|A0A4V3JET2_9LEPT 7-cyano-7-deazaguanine s ynthase OS=Leptospira fluminis OX=2484979 GN=queC PE=3 SV=1
MLSKSESNSVLTSSKSEKPKAVVLFSGGLDSTTCLYQAIADGYHPTALSFDYEQKHKIELRSAKRIAKNLGIPHLIQKLQPKFFLGSSLTEKKLKVPKNSLGKTGIPNTYVPGRNILFLSFGVSLAEGIQAKRLYIGVNALDYSGYPDCRPEFLKAYADAVRLGTKAGAEGHPLEICAPLQHLGKKEIVLLGSKLGVPFSMTHSCYDPIGGKPCGRCDSCLLRKKGFQEAGIPEK

SEQ ID NO: 39218 - protein, 251 aa, Leptospira gomenensis
  misc_feature (1)..(251): tr|A0A5F1YS03|A0A5F1YS03_9LEPT 7-cyano-7-deazaguanine s ynthase OS=Leptospira gomenensis OX=2484974 GN=queC PE= 3 SV=1
MNSAKDKNSKRKNSESDRKHSSRQTKKDGAKPNRDKAIVLLSGGLDSTTCLYQAIADGKEVRALSFDYGQRHRIELSYAKKITRKLEIPHTIQKLQPELFLGSSLTQRSIQVPKNSLGKDEIPNTYVPGRNILFLSFAVSLAEGTGSDSIYIGVNAMDYSGYPDCRPEFIKMYEMAIQLGTKKGSQGSPIKIVTPLQNLSKKEIVLLGNELNVPFHLTFSCYDPQNGKACGKCDACLLRKKGFQETGVSEK

SEQ ID NO: 39219 - protein, 235 aa, Leptospira haakeii
  misc_feature (1)..(235): tr|A0A2N0BZM4|A0A2N0BZM4_9LEPT 7-cyano-7-deazaguanine s ynthase OS=Leptospira haakeii OX=2023198 GN=queC PE=3 S V=1
MSSSSKSNSVRTKSHSKNPKAIVLFSGGLDSTTCLYQAIQDGYSPIALSFDYNQKHKQELKSAKKITKLLEVPHLIQKLNPEFFQGSSLTEKKIKVPKNSLGHSEIPNTYVPGRNILFLSFGVSLAEGIGAQRLYIGVNALDYSGYPDCRPEFIKAYSDAIRIGTKTGAEGHPLEICTPLQFLDKKEIVLLGSKLGVPFSMTHSCYDPAGGKPCGKCDSCLLRKKGFQEAGVPEK

SEQ ID NO: 39220 - protein, 251 aa, Leptospira harrisiae
  misc_feature (1)..(251): tr|A0A2N0AHG4|A0A2N0AHG4_9LEPT 7-cyano-7-deazaguanine s ynthase OS=Leptospira harrisiae OX=2023189 GN=queC PE=3 SV=1
MVSVKDSSPHSRSEKKGAVVLLSGGLDSTTCLYEAAREYGHPKNKKLPILALSFDYSQKHKIELVKSKKIAKLLGIKHVIQKLDPGFFLGSSLTEKNIKVRKNAKSLFSGVEKEIPNTYVPGRNILFLSFALSLAEGHGYDSIYIGVNALDYSGYPDCRPEFIESFQKMANLGTKKGVSGTGDSIQIKTPLLHLNKKEIIELGIEVDAPLHLTHSCYDPLRGKPCGKCDSCILRAKGFLEAGILDPALSIR

SEQ ID NO: 39221 - protein, 235 aa, Leptospira hartskeerlii
  misc_feature (1)..(235): tr|A0A2M9XIA2|A0A2M9XIA2_9LEPT 7-cyano-7-deazaguanine s ynthase OS=Leptospira hartskeerlii OX=2023177 GN=queC P E=3 SV=1
MSPSSKSNGVRTKSHSKNPQAVVLFSGGLDSTTCLYQAIQDGYSPIALSFDYNQKHKQELKSAKKITKLLEVPHLIQKLNPEFFQGSSLTERKIKVPKNSLGHSEIPNTYVPGRNILFLSFGVSLAEGIGAKRLYIGVNALDYSGYPDCRPEFIKAYADAIRLGTKTGSEGHPLEICTPLQFLDKKEIVLLGSKLGVPFSMTHSCYDPVGGKPCGKCDSCLLRKKGFQEAGVPEK

SEQ ID NO: 39222 - protein, 249 aa, Leptospira idonii
  misc_feature (1)..(249): tr|A0A4R9M395|A0A4R9M395_9LEPT 7-cyano-7-deazaguanine s ynthase OS=Leptospira idonii OX=1193500 GN=queC PE=3 SV =1
MGSQPNPKKENLPEAKGAVVLLSGGLDSTTCLYLAARDYGYPKNKKLPLLALSFDYSQKHKIEIQKSKKIAKLLGIKHLVQKLDPQFFLGSSLTEKKIKVRKNAKSLFSGEDKEIPNTYVPGRNILFLSFALSLAEGHGYDSIYIGVNALDYSGYPDCRPEFIESFQKMANLGTKKGVTGQGDSIRIKTPLLHLNKKEIVLAGLEVGVPFHLTHSCYDPVRGKACGKCDSCILRAKGFAEAGVIDTSLV

SEQ ID NO: 39223 - protein, 238 aa, Leptospira ilyithenensis
  misc_feature (1)..(238): tr|A0A4R9LS62|A0A4R9LS62_9LEPT 7-cyano-7-deazaguanine s ynthase OS=Leptospira ilyithenensis OX=2484901 GN=queC PE=3 SV=1
MSNSKGAVVLLSGGLDSTTCLYYAAKEYGYPKSKKLPLVALSFDYSQKHKIELTKSKKISKLLGIPHFTQKLDPGFFLGSSLTEKKLKVRKQTSVSRIEADKTIPNTYVPGRNILFLSFALSLAEGHGFDSIYIGVNALDYSGYPDCRPDFIEAYQNMANLGTKKGVTSRQENGIKIKTPLISLNKKEIIELGISLGAPFHLTHSCYDPVRGKPCGKCDSCLLRVKGFKEAGLVDPAL

SEQ ID NO: 39224 - protein, 235 aa, Leptospira inadai
  misc_feature (1)..(235): tr|V6HH93|V6HH93_9LEPT 7-cyano-7-deazaguanine synthase OS=Leptospira inadai serovar Lyme str. 10 OX=1049790 GN =queC PE=3 SV=1
MATKKESNAVRRNFSPDKPKAVVLFSGGLDSTTCLYQAIEDGYSPIALSFDYDQRHKVELKSAKKIANRLGIPHLIQKLQPKFFLGSSLTEKKIKVPKNSLGKSGIPNTYVPGRNILFLSFGVSLAEGIHAKRLYIGVNALDYSGYPDCRPEFLKAYSEAIRIGTKAGSEGHPLEIAAPLQYLGKKEIVLLGAKLGVPFSMTHSCYDPINGRPCGICDSCLLRKKGFQEAGIPEK

SEQ ID NO: 39225 - protein, 242 aa, Leptospira interrogans
  misc_feature (1)..(242): sp|Q8F964|QUEC_LEPIN 7-cyano-7-deazaguanine synthase OS =Leptospira interrogans serogroup Icterohaemorrhagiae s erovar Lai (strain 56601) OX=189518 GN=queC PE=3 SV=1
MNSSSNEKNKDLNRKNFSSKTDSSNNKAVVLLSGGLDSTTCLYQAIADGKEIQALSFDYGQRHKIELSYAKKVTRKLGIPHTIQKLKPELFLGSSLTQKSLHVPKNSLRKEEIPNTYVPGRNILFLSFAVSLAEGTGSDSIYIGVNSMDYSGYPDCRPEFIKMFEMAIQLGTKKGSQGPSIKILTPLQNLSKKEIVLLGNQLKVPFHLTFSCYDPKNGKACGKCDACLLRKKGFQETGVSEK

SEQ ID NO: 39226 - protein, 242 aa, Leptospira interrogans; identical to SEQ ID NO: 39225
  misc_feature (1)..(242): sp|Q72VK9|QUEC_LEPIC 7-cyano-7-deazaguanine synthase OS =Leptospira interrogans serogroup Icterohaemorrhagiae s erovar copenhageni (strain Fiocruz L1-130) OX=267671 GN =queC PE=3 SV=1

SEQ ID NO: 39227 - protein, 250 aa, Leptospira jelokensis
  misc_feature (1)..(250): tr|A0A5F2B8N7|A0A5F2B8N7_9LEPT 7-cyano-7-deazaguanine s ynthase OS=Leptospira jelokensis OX=2484931 GN=queC PE= 3 SV=1
MVSASDSNQTSQSNKKGAVVLLSGGLDSTTCLYVAAKEFGYPKNKKLPLLALSFDYSQKHKIELTKSKKIAKTLGIKHVIQKLDPGFFLGSSLTESKIKVRKNAKSLFSGDEKEIPNTYVPGRNILFLSFALSLAEGHGYDSIYIGVNALDYSGYPDCRPEFIESFQKMANLGTKKGVSGNGDSIQIKTPLLHLGKKEIIELGMSVGAPLQLTHSCYDPIKGKACGKCDSCLLRAKGFLELGLEDPALRF

SEQ ID NO: 39228 - protein, 250 aa, Leptospira jelokensis
  misc_feature (1)..(250): tr|A0A4Z1A2H3|A0A4Z1A2H3_9LEPT 7-cyano-7-deazaguanine s ynthase OS=Leptospira jelokensis OX=2484931 GN=queC PE= 3 SV=1
MVSASDSNQTSQSNKKGAVVLLSGGLDSTTCLYVAAKEFGYPKNKKLPLLALSFDYSQKHKIELTKSKKIAKTLGIKHVIQKLDPGFFLGSSLTESKIKVRKNAKSLFSGDEKEIPNTYVPGRNILFLSFALSLAEGHGYDSIYIGVNALDYSGYPDCRPEFIESFQKMANLGTKKGVSGNGDSIQIKTPLLHLGKKEIIELGMSVGAPLQLTHSCYDPIKGKACGKCDSCLLRAKGFLELGLEDPALNS

SEQ ID NO: 39229 - protein, 235 aa, Leptospira johnsonii
  misc_feature (1)..(235): tr|A0A2P2D476|A0A2P2D476_9LEPT 7-cyano-7-deazaguanine s ynthase OS=Leptospira johnsonii OX=1917820 GN=queC PE=3 SV=1
MSSPSKSNSVRTKSHSKNPKAVVLFSGGLDSTTCLYQAIQDGYSPIALSFDYNQKHKQELKSAKKIAKLLDMPHLIQKLNPEFFQGSSLTERKIKVPKNSLGHSEIPNTYVPGRNILFLSFGVSLAEGIGAQRLYIGVNALDYSGYPDCRPEFIKAYSDAIRLGTKTGSEGHPLEICTPLQFLDKKEIVLLGSKLGVPFSMTHSCYDPVGGKPCGKCDSCLLRKKGFQEAGVPEK

SEQ ID NO: 39230 - protein, 251 aa, Leptospira kanakyensis
  misc_feature (1)..(251): tr|A0A4R9HP61|A0A4R9HP61_9LEPT 7-cyano-7-deazaguanine s ynthase OS=Leptospira kanakyensis OX=2484968 GN=queC PE =3 SV=1
MVSVTDSSPKSKSEKKGAVVLLSGGLDSTTCLYVAAKEFGYPKNKKLPILALSFDYSQKHKIELIKSKKIAKTLGIKHVIQKLDPGFFLGSSLTEKKIKVRKNAKSLFSGIEEEIPNTYVPGRNILFLSFALSLAEGHGYDSIYIGVNALDYSGYPDCRPEFIESFQKMANLGTKKGVSGDGDSIQIKTPLLHLGKKEIIELGIQVDAPLHLTHSCYDPIKGKPCGKCDSCILRAKGFLEAGILDPALSRQ

SEQ ID NO: 39231 - protein, 248 aa, Leptospira kemamanensis
  misc_feature (1)..(248): tr|A0A4R9JLB7|A0A4R9JLB7_9LEPT 7-cyano-7-deazaguanine s ynthase OS=Leptospira kemamanensis OX=2484942 GN=queC P E=3 SV=1
MVSDKDSSQKLKSEKKGAVVLLSGGLDSTTCLYVAAKEFGYPKNKKLPILALSFDYSQKHKIELIKSKKIAKTLGIKHVIQKLDPGFFLGSSLTEKKIKVRKNAKSLFSGIEEEIPNTYVPGRNILFLSFALSLAEGHGYDSIYIGVNALDYSGYPDCRPEFIESFQKMANLGTKKGVSGEGDSIQIRTPLLHLGKKEIIELGMEVEAPLHLTHSCYDPVKGKACGKCDSCILRAKGFAELEMTDPSL

SEQ ID NO: 39232 - protein, 220 aa, Leptospira kirschneri
  misc_feature (1)..(220): tr|M6FNW7|M6FNW7_9LEPT 7-cyano-7-deazaguanine synthase OS=Leptospira kirschneri serovar Bulgarica str. Nikolae vo OX=1240687 GN=queC PE=3 SV=1
MSNNKAVVLLSGGLDSTTCLYQAIADGKEIQALSFDYGQRHKIELSYARKVTRKLGIPHTIQKLKPELFLGSSLTQKSLQVPKNSLRKEEIPNTYVPGRNILFLSFAVSLAEGTGSDSIYIGVNSMDYSGYPDCRPEFIKMFEMAIQLGTKKGSQGPSIKILTPLQNLSKKEIVLLGKQLKVPFHLTFSCYDPKNGKACGKCDACLLRKKGFQETGVSEK

SEQ ID NO: 39233 - protein, 237 aa, Leptospira kirschneri
  misc_feature (1)..(237): tr|M6ID19|M6ID19_9LEPT 7-cyano-7-deazaguanine synthase OS=Leptospira kirschneri serovar Bim str. 1051 OX=10499 41 GN=queC PE=3 SV=1
MNSQKNRSLSRKNFKENLSNNKAVVLLSGGLDSTTCLYQAIADGKEIQALSFDYGQRHKIELSYAKKVTHKLGIPHTIQKLKPELFLGSSLTQKSLQVPKNSLRKEEIPNTYVPGRNILFLSFAVSLAEGTGSDSIYIGVNSMDYSGYPDCRPEFIKMFEMAIQLGTKKGSQGPSIKILTPLQNLSKKEIVLLGKQLKVPFHLTFSCYDPKNGKACGKCDACLLRKKGFQETGVSEK

SEQ ID NO: 39234 - protein, 249 aa, Leptospira kmetyi
  misc_feature (1)..(249): tr|A0A2M9XP00|A0A2M9XP00_9LEPT 7-cyano-7-deazaguanine s ynthase OS=Leptospira kmetyi OX=408139 GN=queC PE=3 SV= 1
MNSANDPTLKRKNSETKNRKKSSKESSEEFSNDKAVVLLSGGLDSTTCLYQALADGKQIQALSFDYGQRHRIELSYAKKVTRKLGIPHTIQKLKPELFLGSSLTQKSIKVPKNSLGKDEIPNTYVPGRNILFLSFAVSLAEGTGSDSIYIGVNAMDYSGYPDCRPEFIKMYEMAIQLGTKKGSQGSPIKIVTPLQNLTKKEIVLLGNRLKVPFHLTFSCYDPKNGKACGKCDACLLRKKGFQETGVSEK

SEQ ID NO: 39235 - protein, 244 aa, Leptospira kobayashii
  misc_feature (1)..(244): tr|A0A2P2DT72|A0A2P2DT72_9LEPT 7-cyano-7-deazaguanine s ynthase OS=Leptospira kobayashii OX=1917830 GN=queC PE= 3 SV=1
MSNSKGAVVLLSGGLDSTTCLYYAAKEYGYPKTKKLPLVALSFDYSQKHKIELTKSKKISKLLGIPHFTQKLDPGFFLGSSLTDKKLKVRKQTSVSRIETDKTIPNTYVPGRNILFLSFALSLAEGHGFDSIYIGVNALDYSGYPDCRPDFIEAYQNMANLGTKKGVTSRQENGIQIKTPLISLNKKEIVELGISLGAPFHLTHSCYDPVRGRPCGKCDSCLLRAKGFKEAGIPDPALSFQSRA

SEQ ID NO: 39236 - protein, 235 aa, Leptospira koniamboensis
  misc_feature (1)..(235): tr|A0A4R9J789|A0A4R9J789_9LEPT 7-cyano-7-deazaguanine s ynthase OS=Leptospira koniamboensis OX=2484950 GN=queC PE=3 SV=1
MRSSSKSNSVRTKSHSKNPKAIVLFSGGLDSTTCLYQAIQDGYSPIALSFDYNQKHKQELKSAKKITKLLEVPHLIQKLSPEFFQGSSLTEKKIKVPKNSLGHSEIPNTYVPGRNILFLSFGVSLAEGIGAQRLYIGVNALDYSGYPDCRPEFIKAYSDAIRIGTKTGSEGHPLEICTPLQFLDKKEIVLLGSKLGVPFSMTHSCYDPVGGKPCGKCDSCLLRKKGFQEAGVPEK

SEQ ID NO: 39237 - protein, 236 aa, Leptospira langatensis
  misc_feature (1)..(236): tr|A0A5F1ZV31|A0A5F1ZV31_9LEPT 7-cyano-7-deazaguanine s ynthase OS=Leptospira langatensis OX=2484983 GN=queC PE =3 SV=1
MKSERPSSKSNGVRKSSKLPKAVVLFSGGLDSTTCLYKAIQDGYSPTALSFDYNQKHKEELRSAKKIAKLLGIPHLIQKLQPDFFQGSSLTEKKIRVPKNALGHTKIPNTYVPGRNILFLSFGVSLAEGISAERLYIGVNALDYSGYPDCRPEFIKAYAEAIRLGTKMGAEGNPLEICTPLQYLDKKEIVLLGSRLGVPFSLTHSCYDPIQGKPCGKCDSCLLRKKGFQEAGIPEK

SEQ ID NO: 39238 - protein, 250 aa, Leptospira levettii
  misc_feature (1)..(250): tr|A0A5F2D9I7|A0A5F2D9I7_9LEPT 7-cyano-7-deazaguanine s ynthase OS=Leptospira levettii OX=2023178 GN=queC PE=3 SV=1
MVSVSDSTNKSQFGKKGAVVLLSGGLDSTTCLYVAAKEFGYPKNKKLPILALSFDYSQKHKIELIKSKKIAKELGVKHVIQKLDPGFFLGSSLTEKKIKVRKNAKSLFSGNDKEIPNTYVPGRNILFLSFALSLAEGHGYDSIYIGVNALDYSGYPDCRPEFIESFQKMANLGTKKGVSGIGDSIQIKTPLLHLGKKEIIELGIQVDAPLHLTHSCYDPVLGKPCGKCDSCILRAKGFSEVGLPDPALKN

SEQ ID NO: 39239 - protein, 250 aa, Leptospira levettii
  misc_feature (1)..(250): tr|A0A2N0AX69|A0A2N0AX69_9LEPT 7-cyano-7-deazaguanine s ynthase OS=Leptospira levettii OX=2023178 GN=queC PE=3 SV=1
MVSVSDSTNKSQFGKKGAVVLLSGGLDSTTCLYVAAKEFGYPKNKKLPILALSFDYSQKHKIELIKSKKIAKELGVKHVIQKLDPGFFLGSSLTEKKIKVRKNAKSLFSGNDKEIPNTYVPGRNILFLSFALSLAEGHGYDSIYIGVNALDYSGYPDCRPEFIESFQKMANLGTKKGVSGLGDSIQIKTPLLHLGKKEIIELGLHVNAPLHLTHSCYDPVLGKPCGKCDSCILRAKGFLELGLRDPAGVD

SEQ ID NO: 39240 - protein, 235 aa, Leptospira licerasiae
  misc_feature (1)..(235): tr|A0A5F2DWK3|A0A5F2DWK3_9LEPT 7-cyano-7-deazaguanine s ynthase OS=Leptospira licerasiae OX=447106 GN=queC PE=3 SV=1
MSSSSRSNSVRTKSHSKNPKAVVLFSGGLDSTTCLYQAVQDGYSPIALSFDYNQKHKQELKSAKKITKLLEVPHLIQKLNPEFFQGSSLTEKKIKVPKNSLGHSEIPNTYVPGRNILFLSFGVSLAEGIGAKRLYIGVNALDYSGYPDCRPEFIKAYSDAIRIGTKTGSEGHPLEICTPLQFLDKKEIVLLGSKLGVPFSMTHSCYDPVGGKPCGKCDSCLLRKKGFQEAGVPEK

SEQ ID NO: 39241 - protein, 235 aa, Leptospira licerasiae
  misc_feature (1)..(235): tr|I0XVY9|I0XVY9_9LEPT 7-cyano-7-deazaguanine synthase OS=Leptospira licerasiae serovar Varillal str. VAR 010 OX=1049972 GN=queC PE=3 SV=1
MSSSSRSNSVRTKSHSKNPKAVVLFSGGLDSTTCLYQAVQDGYSPIALSFDYNQKHKQELKSAKKITKLLEVPHLIQKLNPEFFQGSSLTEKKIKVPKNSLGHSEIPNTYVPGRNILFLSFGVSLAEGIGAKRLYIGVNALDYSGYPDCRPEFIKAYSDAIRIGTKTGSEGHPLEICTPLQFLDKKEIVLLGSKLGVPFSMTHSCYDPIGGKPCGKCDSCLLRKKGFQEAGVPEK

SEQ ID NO: 39242 - protein, 250 aa, Leptospira macculloughii
  misc_feature (1)..(250): tr|A0A2N0C6R9|A0A2N0C6R9_9LEPT 7-cyano-7-deazaguanine s ynthase OS=Leptospira macculloughii OX=2023202 GN=queC PE=3 SV=1
MVSVSDSTNKSQFEKKGAVVLLSGGLDSTTCLYVAAKEFGYPKNKKLPILALSFDYSQKHKIELIKSKKIAKELGVKHVIQKLDPGFFLGSSLTEKKIKVRKNAKSLFSGNDKEIPNTYVPGRNILFLSFALSLAEGHGYDSIYIGVNALDYSGYPDCRPEFIESFQKMANLGTKKGVSGIGDSIQIKTPLLHLGKKEIIELGIQVDAPLHLTHSCYDPVLGKPCGKCDSCILRAKGFSEVGLPDPALKS

SEQ ID NO: 39243 - protein, 251 aa, Leptospira macculloughii
  misc_feature (1)..(251): tr|A0A2N0C4Z1|A0A2N0C4Z1_9LEPT 7-cyano-7-deazaguanine s ynthase OS=Leptospira macculloughii OX=2023202 GN=queC PE=3 SV=1
MVSVKDSSPKSKSEKKGAVVLLSGGLDSTTCLYVAAKEFGYSKNKKLPLLALSFDYSQKHKIELIKSKKIAKTLGIKHVIQKLDPGFFLGSSLTEKKIKVRKNAKSLFSGDETEIPNTYVPGRNILFLSFALSLAEGHGYDSIYIGVNALDYSGYPDCRPEFIEAFQKMANLGTKKGVSGEGDSIQIKTPLLYLGKKEIIELGIQVDAPLHLTHSCYDPIKGKPCGKCDSCILRAKGFLEAGILDPTISLR

SEQ ID NO: 39244 - protein, 239 aa, Leptospira mayottensis
  misc_feature (1)..(239): tr|A0A3S9KNI3|A0A3S9KNI3_9LEPT 7-cyano-7-deazaguanine s ynthase OS=Leptospira mayottensis 200901116 OX=1192864 GN=queC PE=3 SV=1
MNSRKNKNSSRKHSDPSSKSANDKAVVLLSGGLDSTTCLYQAIADGKKIQALSFDYGQRHKIELSYAKKITRQLGISHTIQKLKPELFLGSSLTQKSLKVPKNSLGKEKIPNTYVPGRNILFLSFAVCLAEGTGSSSIYIGVNAMDYSGYPDCRPEFIKMYEMAIQLGTKKGSQGSSIKIVTPLQNLSKKEIVLLGNRLQVPFHLTFSCYDPKNKKACGRCDACLLRKKGFQETGVSEK

SEQ ID NO: 39245 - protein, 239 aa, Leptospira mayottensis; identical to SEQ ID NO: 39244
  misc_feature (1)..(239): tr|A0A5F2EM81|A0A5F2EM81_9LEPT 7-cyano-7-deazaguanine s ynthase OS=Leptospira mayottensis OX=1137606 GN=queC PE =3 SV=1

SEQ ID NO: 39246 - protein, 251 aa, Leptospira meyeri
  misc_feature (1)..(251): tr|A0A4R8MXQ8|A0A4R8MXQ8_LEPME 7-cyano-7-deazaguanine s ynthase OS=Leptospira meyeri OX=29508 GN=queC PE=3 SV=1
MVSVKDSSPKSKSEKKGAVVLLSGGLDSTTCLYVAAKEFGYPKNKKLPLLALSFDYSQKHKIELIKSKKIAKTLGIKHVIQKLDPGFFLGSSLTEKKIKVRKNAKSLFSGDETEIPNTYVPGRNILFLSFALSLAEGHGYDSIYIGVNALDYSGYPDCRPEFIEAFQKMANLGTKKGVSGDGDSIQIKTPLLHLGKKEIIELGIQVNAPLHLTHSCYDPIKGKPCGKCDSCILRAKGFLEAGILDPTISLR

SEQ ID NO: 39247 - protein, 251 aa, Leptospira meyeri
  misc_feature (1)..(251): tr|A0A5F1ZLB1|A0A5F1ZLB1_LEPME 7-cyano-7-deazaguanine s ynthase OS=Leptospira meyeri OX=29508 GN=queC PE=3 SV=1
MVSVKDSSPKSKSEKKGAVVLLSGGLDSTTCLYVAAKEFGYPKNKKLPLLALSFDYSQKHKIELIKSKKIAKTLGIKHVIQKLDPGFFLGSSLTEKKIKVRKNAKSLFSGDETEIPNTYVPGRNILFLSFALSLAEGHGYDSIYIGVNALDYSGYPDCRPEFIEAFQKMANLGTKKGVSGEGDSIQIKTPLLHLGKKEIIELGIQVDAPLHLTHSCYDPIKGKPCGKCDSCILRAKGFLEAGILDPTISLR

SEQ ID NO: 39248 - protein, 248 aa, Leptospira montravelensis
  misc_feature (1)..(248): tr|A0A4Z0ZB87|A0A4Z0ZB87_9LEPT 7-cyano-7-deazaguanine s ynthase OS=Leptospira montravelensis OX=2484961 GN=queC PE=3 SV=1
MVSAKDSSSHSKSEKKGAVVLLSGGLDSTTCLYFAAKEFGYPKNKKLPILALSFDYSQKHKIELIKSKKIAKLLGIKHVIQKLDPGFFLGSSLTEKKIKVRKNAKSLFSGIEKEIPNTYVPGRNILFLSFALSLAEGHGYDSIYIGVNALDYSGYPDCRPEFIESFQNMANLGTKKGVSGDGDSIQIKTPLLHLNKKEIIELGIEVDAPLHLTHSCYDPINGKPCGKCDSCILRAKGFLEAGILDPTF

SEQ ID NO: 39249 - protein, 251 aa, Leptospira mtsangambouensis
  misc_feature (1)..(251): tr|A0A5F2DEL1|A0A5F2DEL1_9LEPT 7-cyano-7-deazaguanine s ynthase OS=Leptospira mtsangambouensis OX=2484912 GN=qu eC PE=3 SV=1
MVSVKDSSLKSKSEKKGAVVLLSGGLDSTTCLYYAAKEFGYPKNKKLPLLALSFDYSQKHKIELIKSKKIAKTLGIKHVIQKLDPGFFLGSSLTEKKIKVRKNAKSLFSGIEEEIPNTYVPGRNILFLSFALSLAEGHGYDSIYIGVNALDYSGYPDCRPEFIESFQKMANLGTKKGVSGDGDSIQIKTPLLHLGKKEIIELGIQVDAPLHLTHSCYDPVRGKPCGKCDSCILRAKGFLEAGILDPAISLR

SEQ ID NO: 39250 - protein, 235 aa, Leptospira neocaledonica
  misc_feature (1)..(235): tr|A0A2N0A212|A0A2N0A212_9LEPT 7-cyano-7-deazaguanine s ynthase OS=Leptospira neocaledonica OX=2023192 GN=queC PE=3 SV=1
MSSSSKSNGVRTKSHSKNPKAIVLFSGGLDSTTCLYQAIQDGYSPIALSFDYNQKHKQELKSAKKITKLLDIPHLIQKLNPEFFQGSSLTEKKIKVPKNSLGHSDIPNTYVPGRNILFLSFGVSLAEGIGAQRLYIGVNALDYSGYPDCRPEFIKAYSETIRLGTKMGSEGHPLEICTPLQFLDKKEIVLLGSKLGVPFSMTHSCYDPVGGKPCGKCDSCLLRKKGFQEAGVPEK

SEQ ID NO: 39251 - protein, 242 aa, Leptospira noguchii
  misc_feature (1)..(242): tr|A0A540SYB1|A0A540SYB1_9LEPT 7-cyano-7-deazaguanine s ynthase OS=Leptospira noguchii OX=28182 GN=queC PE=3 SV =1
MNFSSNEKNKNLNRKNSSSKTNPPNNKAVVLLSGGLDSTTCLYQAIEDGKEIQALSFDYGQRHKIELTYAKKVTRKLGIPHTIQKLKPELFLGSSLTQKSLQVPKNSLRKEEIPNTYVPGRNILFLSFAVSLAEGTGSDSIYIGVNSMDYSGYPDCRPEFIKMFEMAIQLGTKKGSQGPSIKILTPLQNLSKKEIVLLGNRLKVPFHLTFSCYDPKNGKACGKCDACLLRKKGFQETGVSEK

SEQ ID NO: 39252 - protein, 242 aa, Leptospira noguchii
  misc_feature (1)..(242): tr|V6GR82|V6GR82_9LEPT 7-cyano-7-deazaguanine synthase OS=Leptospira noguchii str. Cascata OX=1193054 GN=queC PE=3 SV=1
MNFLSNEKNKNLNRKNSSSKTNPPNNKAVVLLSGGLDSTTCLYQAIEDGKEIQALSFDYGQRHKIELTYAKKVTRKLGIPHTIQKLKPELFLGSSLTQKSLQVPKNSLRKEEIPNTYVPGRNILFLSFAVSLAEGTGSDSIYIGVNSMDYSGYPDCRPEFIKMFEMAIQLGTKKGSQGPSIKILTPLQNLSKKEIVLLGNRLKVPFHLTFSCYDPKNGKACGKCDACLLRKKGFQETGVSEK

SEQ ID NO: 39253 - protein, 251 aa, Leptospira noumeaensis
  misc_feature (1)..(251): tr|A0A4R9I7M6|A0A4R9I7M6_9LEPT 7-cyano-7-deazaguanine s ynthase OS=Leptospira noumeaensis OX=2484964 GN=queC PE =3 SV=1
MVSVKDSSPKSKSEKKGAVVLLSGGLDSTTCLYVAAKEFGYPKNKKLPILALSFDYSQKHKIELIKSKKIAKTLGIKHVIQKLDPGFFLGSSLTEKKIKVRKNAKFLFSGNEKEIPNTYVPGRNILFLSFALSLAEGQGYDSIYIGVNALDYSGYPDCRPEFIESFQKMANLGTKKGVSGDGDSIQIKTPLLHLGKKEIIELGIQVDAPLHLTHSCYDPVRGKPCGKCDSCILRAKGFLEAGILDPAIQSQ

SEQ ID NO: 39254 - protein, 234 aa, Leptospira ognonensis
  misc_feature (1)..(234): tr|A0A4R9JVG3|A0A4R9JVG3_9LEPT 7-cyano-7-deazaguanine s ynthase OS=Leptospira ognonensis OX=2484945 GN=queC PE= 3 SV=1
MPGAVVLLSGGLDSTTCLYLAARDYGYPKKKNLPILALSFNYSQKHKIEISKSRKITKELGVKHLIQKLDPNFFLGSSLTEKKIKVRKNAAFESLGDHSEIPNTYVPGRNILFLSFALSLAEGHNFDSIYIGVNALDYSGYPDCRPEFIEAYQKMANLGTKAGIGGKGRVKIITPLLELNKKEIILLGQKVGAPLHLTHSCYDPQKGKPCGKCDSCLLRAKGFKEAGLRDPANL

SEQ ID NO: 39255 - protein, 248 aa, Leptospira perdikensis
  misc_feature (1)..(248): tr|A0A4R9JKN5|A0A4R9JKN5_9LEPT 7-cyano-7-deazaguanine s ynthase OS=Leptospira perdikensis OX=2484948 GN=queC PE =3 SV=1
MVSVKDSSPKSKSEKKGAVVLLSGGLDSTTCLYLAAKDYGYPKSKHLPLLALSFDYSQKHKIELIKSKKIAKLLGIKHVIQKLDPGFFLGSSLTEKKIKVRKNAKSLFSGIEEEIPNTYVPGRNILFLSFALSLAEGHGYDSIYIGVNALDYSGYPDCRPEFIESFQKMADLGTKKGVSEADDSIQIKTPLLRLGKKEIIELGIQVGAPLHLTHSCYDPIKGKPCGKCDSCTLRNKGFAELGMTDPSL

SEQ ID NO: 39256 - protein, 228 aa, Leptospira perolatii
  misc_feature (1)..(228): tr|A0A2M9ZTG6|A0A2M9ZTG6_9LEPT 7-cyano-7-deazaguanine s ynthase OS=Leptospira perolatii OX=2023191 GN=queC PE=3 SV=1
MPKTESNTAKRPKAVVLFSGGLDSTTCLYKAIKDGYNPTALSFDYGQRHKIELKSAKKIAKMLGITHLIQKLQPELFKGSSLTERKLKVPKNALDYSHIPNTYVPGRNILFLSFAVSLAEGIGADSLYIGVNALDYSGYPDCRPEFLQAYSEAIAKGTKSGVEGKPIQIKAPLQYLSKKEIILLGDSLGVPFSLTHSCYDPVNGAPCGKCDSCLLRKKGFQEAGIPEK

SEQ ID NO: 39257 - protein, 239 aa, Leptospira putramalaysiae
  misc_feature (1)..(239): tr|A0A4R9L297|A0A4R9L297_9LEPT 7-cyano-7-deazaguanine s ynthase OS=Leptospira putramalaysiae OX=2484984 GN=queC PE=3 SV=1
MNSDKSKNPNRKKSDSKMKNSGNKAIVLLSGGLDSTTCLYQAIADGKEVRALSFDYGQRHRIELSFAKKITRKLGIPHTIQKLKPELFLGSSLTQKSIKVPKNSLGKDEIPNTYVPGRNILFLSFATSLAEGTGSDSIYIGVNAMDYSGYPDCRPEFIKMFEMAIQLGTKKGSQGSPLKIITPLQNLTKKEIVLLGSKLNVPFHLTFSCYDPQNGKACGKCDACLLRKKGFQETGVSEK

SEQ ID NO: 39258 - protein, 236 aa, Leptospira ryugenii
  misc_feature (1)..(236): tr|A0A2P2E2P8|A0A2P2E2P8_9LEPT 7-cyano-7-deazaguanine s ynthase OS=Leptospira ryugenii OX=1917863 GN=queC PE=3 SV=1
MKDTNGAVVLLSGGLDSTTCLYLAAHDFGYPKQKKLPILALSFLYSQKHKIEIAKSKLIAEKLGVKHLVQKLDPEFFLGSSLTEERLKVRKNVQLNQLQKDKEIPNTYVPGRNTLFLSFALSLAEGHGYDSIYIGVNALDYSGYPDCRPEFIQAFQTVADLGTKTGVSGRKKIQIKTPLLKLNKKEIVLLANRYHVPFELTHSCYDPVKGKPCGKCDSCLLRKKGFEEAGILDPTA

SEQ ID NO: 39259 - protein, 235 aa, Leptospira saintgironsiae
  misc_feature (1)..(235): tr|A0A2M9YGV5|A0A2M9YGV5_9LEPT 7-cyano-7-deazaguanine s ynthase OS=Leptospira saintgironsiae OX=2023183 GN=queC PE=3 SV=1
MSSSSKSNSVRTKSQSKNPKAIVLFSGGLDSTTCLYQAIQDGYSPIALSFDYNQKHKQELKSAKKITKLLEVPHLIQKLNPDFFQGSSLTEKKIKVPKNSLGHSKIPNTYVPGRNILFLSFGVSLAEGIGAQRLYIGVNALDYSGYPDCRPEFIKAYSDAIRIGTKTGSEGHPLEICTPLQFLDKKEIVLLGSKLGVPFSMTHSCYDPVGGKPCGKCDSCLLRKKGFQEAGIPEK

SEQ ID NO: 39260 - protein, 237 aa, Leptospira santarosai
  misc_feature (1)..(237): tr|M6ZG99|M6ZG99_9LEPT 7-cyano-7-deazaguanine synthase OS=Leptospira santarosai str. 200702252 OX=1049977 GN=q ueC PE=3 SV=1
MFLNSKENKNSSRKSSEPTNDKAVVLLSGGLDSTTCLYQAIEDGKKIRALSFDYGQKHKIELSYAKKITRQLGIPHTIQKLKPELFLGSSLTQKSLRVPKNSLGKEKIPNTYVPGRNILFLSFAVCLAEGTDSSSVYIGVNAMDYSGYPDCRPEFIKMYETAIQLGTKKGSQGSPIKIVTPLQNLSKKEIVLLGNRLKVPFHLTFSCYDPKKGKACGKCDACLLRKKGFQETGVFEK

SEQ ID NO: 39261 - protein, 237 aa, Leptospira santarosai
  misc_feature (1)..(237): tr|A0A2P1QUW7|A0A2P1QUW7_9LEPT 7-cyano-7-deazaguanine s ynthase OS=Leptospira santarosai OX=28183 GN=queC PE=3 SV=1
MFLNSKENKNSSRKSSEPTNDKAVVLLSGGLDSTTCLYQAIADGKKIRALSFDYGQKHKIELSYAKKITRQLGIPHTIQKLKPELFLGSSLTQKSLRVPKNSLGKEKIPNTYVPGRNILFLSFAVCLAEGTGSSSVYIGVNAMDYSGYPDCRPEFIKMYETAIQLGTKKGSQGSPIKIVTPLQNLSKKEIVLLGNRLKVPFHLTFSCYDPKKGKACGKCDACLLRKKGFQETGVFEK

SEQ ID NO: 39262 - protein, 235 aa, Leptospira sarikeiensis
  misc_feature (1)..(235): tr|A0A4R9K9E5|A0A4R9K9E5_9LEPT 7-cyano-7-deazaguanine s ynthase OS=Leptospira sarikeiensis OX=2484943 GN=queC P E=3 SV=1
MSRSIKSNTVRKKSSSKDPKAIVLFSGGLDSTTCLYKAIEDGYSPIALSFDYNQKHKQELKSAKKITKLLNIPHLVQKLNPDFFQGSSLTEKKIKVPKNSLGTSEIPNTYVPGRNILFLSFGVSLAEGIGAQRLYIGVNALDYSGYPDCRPEFIKAYADAIRLGTKTGSQGHPLEICTPLQFLDKKEIVLLGSKLGVPFSMTHSCYDPIQGKPCGKCDSCLLRKKGFQEAGVPEK

SEQ ID NO: 39263 - protein, 235 aa, Leptospira selangorensis
  misc_feature (1)..(235): tr|A0A4R9G9K0|A0A4R9G9K0_9LEPT 7-cyano-7-deazaguanine s ynthase OS=Leptospira selangorensis OX=2484982 GN=queC PE=3 SV=1
MSPSSKSNSVRTKSHSKNPKAIVLFSGGLDSTTCLYQAIQDGYSPIALSFDYNQKHKQELKSAKKITKLLEVPHLIQKLNPEFFQGSSLTEKKIKVPKNSLGHSEIPNTYVPGRNILFLSFGVSLAEGIGAQRLYIGVNALDYSGYPDCRPEFIKAYSDAIRIGTKTGAEGHPLEICTPLQFLDKKEIVLLGSKLGVPFSMTHSCYDPVGGKPCGKCDSCLLRKKGFQEAGVPEK

SEQ ID NO: 39264 - protein, 235 aa, Leptospira selangorensis
  misc_feature (1)..(235): tr|A0A5F2C1B6|A0A5F2C1B6_9LEPT 7-cyano-7-deazaguanine s ynthase OS=Leptospira selangorensis OX=2484982 GN=queC PE=3 SV=1
MSPSSKSNSVRTKSHSKNPKAIVLFSGGLDSTTCLYQAIQDGYSPIALSFDYNQKHKQELKSAKKITKLLEVPHLIQKLNPEFFQGSSLTEKKIKVPKNSLGHSEIPNTYVPGRNILFLSFGVSLAEGIGAQRLYIGVNALDYSGYPDCRPEFIKAYSDAIRIGTKTGSEGHPLEICTPLQFLDKKEIVLLGSKLGVPFSMTHSCYDPVGGKPCGKCDSCLLRKKGFQEAGVPEK

SEQ ID NO: 39265 - protein, 236 aa, Leptospira semungkisensis
  misc_feature (1)..(236): tr|A0A4R9G7Z7|A0A4R9G7Z7_9LEPT 7-cyano-7-deazaguanine s ynthase OS=Leptospira semungkisensis OX=2484985 GN=queC PE=3 SV=1
MSFQKPSSKLNGVQKNSKGPKAVVLFSGGLDSTTCLYKAIKDGYSPTALSFDYNQKHKEELKSAKKIAKLLGIPHLIQKLQPDFFKGSSLTEKKIRVPKNSLGHTKIPNTYVPGRNILFLSFGVSLAEGISAERLYIGVNALDYSGYPDCRPEFIKAYAEAIRLGTKMGAEGNPLEICTPLQYLDKKEIVLLGSSLGVPFSLTHSCYDPIQGKPCGKCDSCLLRKKGFQEAGIPEK

SEQ ID NO: 39266 - protein, 237 aa, Leptospira sp.
  misc_feature (1)..(237): tr|M5UX35|M5UX35_9LEPT 7-cyano-7-deazaguanine synthase OS=Leptospira sp. Fiocruz LV4135 OX=1193013 GN=queC PE= 3 SV=1
MFLNSKENKNSSRKSSEPTNDKAVVLLSGGLDSTTCLYQAIEDGKKIRALSFDYGQKHKIELSYAKKITRQLGIPHTIQKLKPELFLGSSLTQKSLRVPKNSLGKEKIPNTYVPGRNILFLSFAVCLAEGTGSSSVYIGVNAMDYSGYPDCRPEFIKMYETAIQLGTKKGSQGSPIKIVTPLQNLSKKEIVLLGNRLKVPFHLTFSCYDPKKGKACGKCDACLLRKKGFQETGVFEK

SEQ ID NO: 39267 - protein, 234 aa, Leptospira sp.
  misc_feature (1)..(234): tr|A0A2M8HNA7|A0A2M8HNA7_9LEPT 7-cyano-7-deazaguanine s ynthase OS=Leptospira sp. OX=178 GN=queC PE=3 SV=1
MKSISPDKIAVVLLSGGLDSTTCLYLAKQQSEKIYAISFDYGQKHSIELKRAKKIAKSQNIEHTIIKIQTELFQGTSLTDPKLKVPKDSLKKHLQKNTIPNTYVPGRNILFLSYALSYAESRQAGQIYIGVNALDYSGYPDCRPEFIEAYQNMIDLGTKSGSKSGKSEKSIQIITPLIHLSKKEIVSLAAHLKVPFQDTISCYDPDPRTGKPCGHCDSCILRKKGFAEAGVVDG

SEQ ID NO: 39268 - protein, 239 aa, Leptospira stimsonii; identical to SEQ ID NO: 39257
  misc_feature (1)..(239): tr|A0A5E8TTV5|A0A5E8TTV5_9LEPT 7-cyano-7-deazaguanine s ynthase OS=Leptospira stimsonii OX=2202203 GN=queC PE=3 SV=1

SEQ ID NO: 39269 - protein, 239 aa, Leptospira stimsonii
  misc_feature (1)..(239): tr|A0A396ZAU0|A0A396ZAU0_9LEPT 7-cyano-7-deazaguanine s ynthase OS=Leptospira stimsonii OX=2202203 GN=queC PE=3 SV=1
MDSDKSKNSNRKKNDSKVKTSSNKAVVLLSGGLDSTTCLYQAIADGKEVRALSFDYGQRHRIELSFAKKITRKLGIPHTIQKLKPELFLGSSLTQKSIKVPKNSLGKDEIPNTYVPGRNILFLSFATSLAEGTGSDSIYIGVNAMDYSGYPDCRPEFIKMFEMAIQLGTKKGSQGSPLKIITPLQNLSKKEIVLLGSKLNVPFHLTFSCYDPQNGKACGKCDACLLRKKGFQETGVSEK

SEQ ID NO: 39270 - protein, 238 aa, Leptospira terpstrae
  misc_feature (1)..(238): tr|N1VWQ4|N1VWQ4_9LEPT 7-cyano-7-deazaguanine synthase OS=Leptospira terpstrae serovar Hualin str. LT 11-33 = ATCC 700639 OX=1257025 GN=queC PE=3 SV=1
MSSKSSGAVVLLSGGLDSTTCLYEALEEYGYPKVKKPPILAISFHYSQKHIIELKKSKLITNRLGIRHVVQKLDPGFFLGSSLTEKKIKVRKNAKSLLTGEEKEIPNTYVPGRNILFLSFAISLAEGHGYDSVYIGVNALDYSGYPDCRPEFIRAYQSMVNLGTKTGVTGEHSIQIKTPLLTMSKKEIIQRALELQVPLKDTHSCYDPVRGKPCGKCDSCLLRNKGFAELGMTDPSLG

SEQ ID NO: 39271 - protein, 239 aa, Leptospira tipperaryensis
  misc_feature (1)..(239): tr|A0A1D7V151|A0A1D7V151_9LEPT 7-cyano-7-deazaguanine s ynthase OS=Leptospira tipperaryensis OX=2564040 GN=queC PE=3 SV=1
MNSDKIKNPNRKKSDSKLKSSNNKAVVLLSGGLDSTTCLYQAIADGKEVQALSFDYGQRHRIELTYAKKITRKLGIPHTIQKLKPELFLGSSLTQKSIKVPKNSLGKDEIPNTYVPGRNILFLSFATSLAEGTGSDSIYIGVNAMDYSGYPDCRPEFIKMFEMAIQLGTKKGSQGSPLKIITPLQNLSKKEIVLLGSKLNVPFHLTFSCYDPQNGKACGRCDACLLRKKGFQETGVSEK

SEQ ID NO: 39272 - protein, 241 aa, Leptospira vanthielii
  misc_feature (1)..(241): tr|N1WDU0|N1WDU0_9LEPT 7-cyano-7-deazaguanine synthase OS=Leptospira vanthielii serovar Holland str. Waz Holla nd = ATCC 700522 OX=1218591 GN=queC PE=3 SV=1
MATKSRGAVILLSGGLDSTTCLYIAAKDYGYPKDKKLPLLALSFDYSQKHKIELQKSKKIAKLLGIKHVIQKLDPGFFLGSSLTEKKIKVRKNAKSLLSGAEKEIPNTYVPGRNILFLSFALSLAEGHGFDSIYIGVNALDYSGYPDCRPEFIKAFQKMANLGTKKGVSEKGNSIQIKTPLLHSNKKDIVLKAMEVGAPIHLTHSCYDPIQGKPCGKCDSCILRAKGFLEAGFLDPAISIR

SEQ ID NO: 39273 - protein, 241 aa, Leptospira vanthielii
  misc_feature (1)..(241): tr|A0A4R9LF38|A0A4R9LF38_9LEPT 7-cyano-7-deazaguanine s ynthase OS=Leptospira vanthielii OX=293085 GN=queC PE=3 SV=1
MATKSRGAVILLSGGLDSTTCLYIAAKDYGYPKDKKLPLLALSFDYSQKHKIELQKSKKIAKLLGIKHVIQKLDPGFFLGSSLTEKKIKVRKNAKSLLSGAEKEIPNTYVPGRNILFLSFALSLAEGHGFDSIYIGVNALDYSGYPDCRPEFIKAFQKMANLGTKKGVSEKGNSIQIKTPLLHSNKKDIVLKAMEVGAPIHLTHSCYDPIQGKPCGKCDSCILRAKGFLEAGLLDPAISIR

SEQ ID NO: 39274 - protein, 244 aa, Leptospira weilii
  misc_feature (1)..(244): tr|M6FG38|M6FG38_9LEPT 7-cyano-7-deazaguanine synthase OS=Leptospira weilii str. 2006001855 OX=996804 GN=queC PE=3 SV=1
MSKNLETNPKKTRKEKNDKTKPSKDKNNKAVVLLSGGLDSTTCLYQAVSDGKKVQALSFDYGQRHKIELSYAKKIARKLGIPHTIQKLKPELFLGSSLTQKSIRVPKNSLGKDEIPNTYVPGRNILFLSFAVSLAEGTGSDSIYIGVNAMDYSGYPDCRPEFIKMYEMAIQLGTKKGSQGSPIKIVTPLQNLSKKEIVLLGQKLKVPFHLTFSCYDPQNGKACGKCDACILRKKGFQETGVSEK

SEQ ID NO: 39275 - protein, 244 aa, Leptospira weilii
  misc_feature (1)..(244): tr|M3GYV0|M3GYV0_9LEPT 7-cyano-7-deazaguanine synthase OS=Leptospira weilii serovar Topaz str. LT2116 OX=10885 40 GN=queC PE=3 SV=1
MRGSFLNSRENKNSNQKNSDPSLEPANDKAVVLLSGGLDSTTCLYQAIADGKKIQALSFDYGQRHKIELSYAKKITRQLGISHAIQKLKPELFLGSSLTQKSLRVPKNSLGKEEIPNTYVPGRNILFLSFAVCLAEGTGSSSIYIGVNAMDYSGYPDCRPEFIKMYETAIQLGTKKGSQGSPIKIVAPLQNLSKKEIVLLGSRLQVPFHLTFSCYDPKNGKACGRCDACLLRKKGFQETGVSEK

SEQ ID NO: 39276 - protein, 238 aa, Leptospira wolbachii
  misc_feature (1)..(238): tr|R8ZZR4|R8ZZR4_9LEPT 7-cyano-7-deazaguanine synthase OS=Leptospira wolbachii serovar Codice str. CDC OX=1218 599 GN=queC PE=3 SV=1
MSTKSKGAVVLLSGGLDSTTCLYEALQEYGYPKVKKPPILAISFNYSQKHIIELKKSKLITSRLGIPHVVQKLDPEFFLGSSLTEKKLKVRKNAGKILDSNSTEIPNTYVPGRNILFLSFAISLAEGHGYDSVYIGVNALDYSGYPDCRPEFIRAYQAMVNLGTKTGVTGDHSIQIKTPLLTMSKKEIIQRALELQVPLKDTHSCYDPVRGKPCGKCDSCLLRNKGFAELGMTDPSLG

SEQ ID NO: 39277 - protein, 233 aa, Leptospira wolffii
  misc_feature (1)..(233): tr|S3UZT5|S3UZT5_9LEPT 7-cyano-7-deazaguanine synthase OS=Leptospira wolffii serovar Khorat str. Khorat-H2 OX= 1193069 GN=queC PE=3 SV=1
MATPRKSNGVRNSSALPKAVVLFSGGLDSTTCLYQCIEDGYSPTALSFDYNQRHREELKSAKKIAKLLQVPHMIQKLQPEFFLGSSLTERRIKVPKNALGDKKIPNTYVPGRNILFLSFGVSLAEGIGAERLYIGVNALDYSGYPDCRPEFIRAYAEAVRLGTKMGAEGRPLEIRTPLQHLDKKEIVLLGSKLGVPFSLTHSCYDPIQGKPCGKCDSCLLRKKGFQEAGIPEK

SEQ ID NO: 39278 - protein, 233 aa, Leptospira wolffii
  misc_feature (1)..(233): tr|A0A2M9ZDY9|A0A2M9ZDY9_9LEPT 7-cyano-7-deazaguanine s ynthase OS=Leptospira wolffii OX=409998 GN=queC PE=3 SV =1
MATPRKSNGVRNSSALPKAVVLFSGGLDSTTCLYQCIEDGYSPTALSFDYNQRHKEELKSAKKIAKLLQVPHMIQKLQPEFFLGSSLTERRIKVPKNALGDKKIPNTYVPGRNILFLSFGVSLAEGIGADRLYIGVNALDYSGYPDCRPEFIRAYAEAVRLGTKMGAEGRPLEIQTPLQHLDKKEIVLLGSKLGVPFSLTHSCYDPIQGKPCGKCDSCLLRKKGFQEAGIPEK

SEQ ID NO: 39279 - protein, 250 aa, Leptospira yanagawae
  misc_feature (1)..(250): tr|A0A4R9IZM4|A0A4R9IZM4_9LEPT 7-cyano-7-deazaguanine s ynthase OS=Leptospira yanagawae OX=293069 GN=queC PE=3 SV=1
MGPVSDSSLGSKSKKKGAVVLLSGGLDSTTCLYVAAKEFGYPKTKNLPLLALSFDYSQKHKIELTKSKKIAKTLGIKHVIQKLDPGFFLGSSLTEKKIKVRKNAKSLFSGDETEIPNTYVPGRNILFLSFALSLAEGHGYDSIYIGVNALDYSGYPDCRPEFIESYQKMANLGTKKGVTGAGDSIQIKTPLLHLGKKEIIELGMEVGAPLYLTHSCYDPIKGKPCGKCDSCILRAKGFLELGLEDPALNS

SEQ ID NO: 39280 - protein, 250 aa, Leptospira yanagawae
  misc_feature (1)..(250): tr|A0A5E8HEB7|A0A5E8HEB7_9LEPT 7-cyano-7-deazaguanine s ynthase OS=Leptospira yanagawae serovar Saopaulo str. S ao Paulo = ATCC 700523 OX=1249483 GN=queC PE=3 SV=1
MGPVSDSSLGSKSKKKGAVVLLSGGLDSTTCLYVAAKEFGYPKTKNLPLLALSFDYSQKHKIELTKSKKIAKTLGIKHVIQKLDPGFFLGSSLTEKKIKVRKNAKSLFSGDETEIPNTYVPGRNILFLSFALSLAEGHGYDSIYIGVNALDYSGYPDCRPEFIESYQKMANLGTKKGVTGAGDSIQIKTPLLHLGKKEIIELGMEVGAPLHLTHSCYDPIKGKPCGKCDSCILRAKGFLELGLEDPALNS

SEQ ID NO: 39281 - protein, 239 aa, Leptospira yasudae; identical to SEQ ID NO: 39209
  misc_feature (1)..(239): tr|A0A418ABF3|A0A418ABF3_9LEPT 7-cyano-7-deazaguanine s ynthase OS=Leptospira yasudae OX=2202201 GN=queC PE=3 S V=1

SEQ ID NO: 39282 - protein, 221 aa, Leptospiraceae bacterium
  misc_feature (1)..(221): tr|A0A357J1T5|A0A357J1T5_9LEPT 7-cyano-7-deazaguanine s ynthase OS=Leptospiraceae bacterium OX=2026757 GN=queC PE=3 SV=1
MVLLSGGLDSATTLYYALSRDLSVYTLSFDYGQRHSVELESARKIAAEAGVPHTILTLDTQIFQQSALTDVSIDIPQDRDESAMSSSIPVTYVPGRNILFLSFGLSYCESRNLDSIFIGANAVDYSGYPDCRPQFIEAFQQMANIGTRAGDEGHPIKIEAPLINMTKAEIISMGIKLGVDYSLTSSCYQPSSSGKPCGRCDSCLLRAQGFAAAGVPDPLTA

SEQ ID NO: 39283 - protein, 218 aa, Leptospiraceae bacterium
  misc_feature (1)..(218): tr|A0A2E5S075|A0A2E5S075_9LEPT 7-cyano-7-deazaguanine s ynthase OS=Leptospiraceae bacterium OX=2026757 GN=queC PE=3 SV=1
MSGGLDSATTLYHALSRGLRAYALSFDYGQRHSVELESARRIAAATGVEHAIISLDTQIFQKSALTDVSIDIPQDRDERSMSSSIPVTYVPGRNILFLSFGVSYCESRNLGSIFIGANAVDYSGYPDCRPEFIQAFQSMASIGTRAGDEGHPIKIEAPLIHMTKAQIISLGLELGVDYSLTSSCYQPADKGKPCGRCDSCILRAHGFAAAGVPDPLTA

SEQ ID NO: 39284 - protein, 241 aa, Leptospirillum ferriphilum
  misc_feature (1)..(241): tr|A0A059XS11|A0A059XS11_9BACT 7-cyano-7-deazaguanine s ynthase OS=Leptospirillum ferriphilum YSK OX=1441628 GN =queC PE=3 SV=1
MLHRDPDEIENQKAGGKGSVVLVSGGMDSAVTAAMAIRESPRVAFLHVRYGARAQDSEERAFRNIARHWGVDRVQVIDLAPLGALGGSALTDRSMEVPAANPDAPGIPSTYVPFRNAHFLAIATSWCEVLKFDRIWIGAVEEDSSGYPDCRRIFYDAFEVAIRLGTRPGTGIRIMTPVIHLNKGEIVSEGVRLGVPFEHTWSCYREGTRACGRCDSCALRLRGFSRAGIRDPLEYEISETP

SEQ ID NO: 39285 - protein, 241 aa, Leptospirillum ferriphilum
  misc_feature (1)..(241): tr|A0A1V3SUQ9|A0A1V3SUQ9_9BACT 7-cyano-7-deazaguanine s ynthase OS=Leptospirillum ferriphilum OX=178606 GN=queC PE=3 SV=1
MLHRDPDEIENQKAGGKGSVVLVSGGMDSAVTAAMAIRESPRVAFLHVRYGARAQDSEERAFRNIARHWGVDRVQVIDLAPLGALGGSALTDRSMEVPAANPDAPGIPSTYVPFRNAHFLAIATSWCEVLKFDRIWIGAVEEDSSGYPDCRRIFYDAFEEAIRLGTRPGTGIRIMTPVIHLNKGEIVSEGVRLGVPFEHTWSCYREGTRACGRCDSCALRLRGFSRAGIRDPLEYEISETP

SEQ ID NO: 39286 - protein, 229 aa, Leptospirillum ferrodiazotrophum
  misc_feature (1)..(229): tr|C6HYH6|C6HYH6_9BACT 7-cyano-7-deazaguanine synthase OS=Leptospirillum ferrodiazotrophum OX=412449 GN=queC P E=3 SV=1
MATGGRGVVLVSGGMDSAVTAALARKECDFLGFLHVRYGGRTQRREEQSFRALCDHFRPDRTLITDAPSLAAVGGSALTDGNLEIPEGDLERTGIPVTYVPFRNAHFLSVAVSWAEVLSCDRIYIGAVEEDSSGYPDCRRSFYDAFEQAARLGTAMEMEGSSLSIVTPVIHMDKGEIVRTGLSLSVPFALTWSCYREGEKACGHCDSCLLRLRGFSRAGVSDPLPYDLS

SEQ ID NO: 39287 - protein, 228 aa, Leptospirillum ferrooxidans
  misc_feature (1)..(228): tr|I0IKD9|I0IKD9_LEPFC 7-cyano-7-deazaguanine synthase OS=Leptospirillum ferrooxidans (strain C2-3) OX=1162668 GN=queC PE=3 SV=1
MSRLKSSGAVVLVSGGMDSAVTAAIALSENERVSFLHIRYGARAQRREESAFRALCQFWNVTDFQVTDLPSLSSFGGSALTDSSISLPEGSLDREGIPVTYVPFRNAHFLATATSLAEIKGANRIYIGAVEEDSSGYPDCRRVFYDAFTEAIRQGTKPDADISIVTPVITFRKSRIVQEGLRLGVPFIHTWSCYQGVTDACGHCDSCLLRLRGFSEAGVSDPLEYLKK

SEQ ID NO: 39288 - protein, 241 aa, Leptospirillum sp.; identical to SEQ ID NO: 39285
  misc_feature (1)..(241): tr|A0A0K0WJB4|A0A0K0WJB4_9BACT 7-cyano-7-deazaguanine s ynthase OS=Leptospirillum sp. Group II 'CF-1' OX=166008 3 GN=queC PE=3 SV=1

SEQ ID NO: 39289 - protein, 241 aa, Leptospirillum sp.
  misc_feature (1)..(241): tr|B6AMY1|B6AMY1_9BACT 7-cyano-7-deazaguanine synthase OS=Leptospirillum sp. Group II '5-way CG' OX=419541 GN= queC PE=3 SV=1
MLLRDPDDTEKQKAGGKGSVVLVSGGMDSAVTAAMAIRESPRIAFLHVRYGARAQDSEERAFRNIARHWGVDRVQVVDLAPLGVLGGSALTDRSMEVPAANPDAPGIPSTYVPFRNAHFLAIATSWCEVLKFDRIWIGAVEEDSSGYPDCRRIFYDAFEEAIRLGTRPGTGIRIMTPVIHLNKGEIVSEGIRLGVPFEHTWSCYREGTRACGRCDSCALRLRGFSRAGIRDPLEYEVSGTL

SEQ ID NO: 39290 - protein, 235 aa, Leptothrix cholodnii
  misc_feature (1)..(235): sp|B1Y8J4|QUEC_LEPCP 7-cyano-7-deazaguanine synthase OS =Leptothrix cholodnii (strain ATCC 51168 / LMG 8142 / S P-6) OX=395495 GN=queC PE=3 SV=1
MNRDSRTALVLFSGGQDSTTCLAWALTRFAHVETLAFDYGQRHRIELDCRLTVLAQLREQFPDWAERLGADHLLDLSLLAQISDTALTTEREIELQANGLPNTFVPGRNLLFLGMAATLAYRRSASVLVGGMCETDYSGYPDCRDNTLKALQVALSLGLAAPMTIETPLMFLTKAQTWTLAEDLGGAPLVELITEHTHTCYLGERGQRHAWGHGCGHCPACELRHAGHAAWLGGR

SEQ ID NO: 39291 - protein, 235 aa, Leptothrix mobilis
  misc_feature (1)..(235): tr|A0A4V2EW58|A0A4V2EW58_9BURK 7-cyano-7-deazaguanine s ynthase OS=Leptothrix mobilis OX=47994 GN=queC PE=3 SV= 1
MSRDPRTALVLFSGGQDSTTCLAWALDRYARVETVAYDYGQRHRIELDCRLTVRAEIRRRFPDWADRLGDDHLLDLSVLGQVGDSALTVEREIALQADGLPNTFVPGRNLLFLTLAGALAYRRGASVLVGGMCETDYSGYPDCRDNTLKALQVALSLGLATPMTLETPLMFLTKAQTWTLAEDLGGTALVELLVEHSHTCYLGERGQRHPWGYGCGHCPACALRAAGHAAWLSGR

SEQ ID NO: 39292 - protein, 235 aa, Leucothrix pacifica
  misc_feature (1)..(235): tr|A0A317C609|A0A317C609_9GAMM 7-cyano-7-deazaguanine s ynthase OS=Leucothrix pacifica OX=1247513 GN=queC PE=3 SV=1
MKAMIVCSGGLDSVTLAYKVAAEGSLTSLVSFQYGQRHDKELGYAARCAEHFGVPHHIIDISNVGAQLTGSALTDDVDVPDGHYAEDSMKLTIVPNRNAIMLTIAYGMAASQGADTVAIAVHGGDHFIYPDCRPDFIEQFAKMQKMALDGYADIDIYAPFLHGSKADIAAAGAALNVPFEDTWSCYKGGEKHCGKCGTCVERAEAFHEAGVVDPTDYEDPDFWRTAVAAHDSGAA

SEQ ID NO: 39293 - protein, 235 aa, Leucothrix sp.
  misc_feature (1)..(235): tr|A0A317C948|A0A317C948_9GAMM 7-cyano-7-deazaguanine s ynthase OS=Leucothrix sp. IMCC9719 OX=1481894 GN=queC P E=3 SV=1
MKAIIVCSGGLDSVTLAYKVAVEAEITSLVSFNYGQRHDKELNYAALCAKDLNVPHHVVDISHVGAQLTGSALTDDIDVPDGHYAEDSMKVTVVPNRNAIMLTIAYGMAASQNADTVAIAVHGGDHFIYPDCRPDFIEQFAKMQKMAMDGYADVSIYAPFLHGTKGDIVTAGTAINVPYKNTWSCYKGGDKHCGRCGTCVERAEAFYDAGVTDPTDYADSDFWQNAVKQRAEAEA

SEQ ID NO: 39294 - protein, 197 aa, Lewinella sp.
  misc_feature (1)..(197): tr|A0A5C7FDI8|A0A5C7FDI8_9BACT 7-cyano-7-deazaguanine s ynthase OS=Lewinella sp. SSH13 OX=2602767 GN=FUA23_1829 0 PE=3 SV=1
MNNKLLLLSGGMDSIAVAHWKKPKYAVTIDYGQKPAKAEISAAKSVCATLKIEHFVINANCSDLGSGDLSDNPQISVGPVSEWWPYRNQLLLTLAAMKALHLDVKQLIIGSVSTDSIHVDGTLEFYREINELISMQEGNLIVETPAISMTTTELIKTSKVPYSTLLYAHSCHKSNHPCMHCRGCQKYLYNIQQLELD

SEQ ID NO: 39295 - protein, 1376 aa, Lewinella sp.
  misc_feature (1)..(1376): tr|A0A180EKE8|A0A180EKE8_9BACT Carrier domain-containin g protein OS=Lewinella sp. 4G2 OX=1803372 GN=A3850_0038 00 PE=4 SV=1
MKGAGYQELTKGQQVLWAGQQLAWGQPLYNMAFAFHLRGPLDVARFNGAFNQLCAASDAMRTVFTTVDGRPQQRVLPTAPRQLAILRAEDIDGNLEDYLRARTQTVFPLDRYAYDAAVIKVSEEEHIFFLNQHHLITDAWGISVQYRLLREFYLGAAAGAGLGGQVNKTSPPSYGGYLERERTRAQQEPSSYWAEQPNPGKPTLYGRRPQQTVTASNRTTVLLGAERQQKLEALLTQANIKHWTRDLTLFNVLATLVFAYLSRVVEEQTLTIGTPAHNRTNRKSQDTPGCFIEVLPLTVEVTPGRNFLSLLETVRTQTNAFLAEARPGLVTPDLLRSVGVILNYIHVKFGDFTEDISARTEWIHPGHADAAHQVRVQAYDFGNGDGLRLELDLNADIFPDGGDHVATEILALLDAFLEDPSRTIAAVPLADGSAMEAGPIRTEAPGLVPDLFSSRALSHPETLALDFAGGELSYGDLERQSEQLAHFLRGRVNGGNVAVHLPRGPELFVALFGCWKAGLAYLPVPASTPAQRGTTLLEQGEARFVLTVASLTEVTAGVGVPTLQLDTDWGLVSATRPTTDLPAVKATDPAYVMFTSGSTGTPKGVVISHGALANYVAYARETYVTVPAPAFPLFTMIGFDLTVTSLFTPLTCGGHVLIYEEPPAGQPDLALFRVLDDNRSDVIKLTPSHLALLSGRQYPEALVSTLIVGGENFRWGLAVETAQTFPAGVKIYNEYGPTEATVGCIVHQFDIGAPPQPSVPIGRAIPGTFAVILDEYGHPSPPGVSGELYLGGSGLAKAYYGDAERTAERFVHYAGVPGERLYRTGDVARRHRNGDLVFLGRADRQVKWRGFRIELNEVEAALATHPAVSNVAVEMVDARQTGMRKEAHYCTKCGLPANYPSAVFDEAGVCQLCLGFEDYQKQVQHYFRTKEDLRQLFTPQPSAGAAEYDCIMLLSGGKDSTYALGQLVQMGLKVLAFTLDNGYISQQALANVRRVAAALGVDCHVGSTPAMNAIFTDSLHRHCNVCNGCFKTIYTLSTQLALEKNIPYIVTGLSRGQFFETRLTEELFLNGNSGKDIDAAILEARKVYHQADDAVKQLLDTSMFDDAAVFDRVQFIDFYRYTDVTLDEMLRDLDERLPWDRPTDTGRSTNCLINQLGIYVHKKEKGYNNYAFPYSWDVRVGHKQRNAALEEINEEVDEREVKRMMREIGYSNAQENLENRHLVAYYTAEDGVSADELRRYLAERLPDYSLPSHFVAIPSMPLTPNGKVDRKALLAAEEIRGEVAVATYVAPEGEFEEMLAEIWGDVLNLEQISATEKFLDLGGHSLTAIRLAARIQDTFELEVPIPVVFSHPTIKEQAIYLESTIEALLAEMEVDE

SEQ ID NO: 39296 - protein, 240 aa, Liberibacter asiaticus
  misc_feature (1)..(240): tr|C6XGK1|C6XGK1_LIBAP 7-cyano-7-deazaguanine synthase OS=Liberibacter asiaticus (strain psy62) OX=537021 GN=q ueC PE=3 SV=1
MNDIIKKAPSALLLFSGGQDSSTCLSWALDRFDRVETLSFDYGQRNKVELECRLCVRKKIVELMPKWKDSLGEDHILPLAILGDISHSSLTKNVAMKIQDNNLPNTFVPGRNIIFLVFAATLAYRLGITNIVIGVCETDYSGYPDCRHDTIRAIETAINLGMESHVTVHTPLMWLKKYETWKLAQDIGGQDLVNLILEESHTCYLGKRDKRYEWGYGCNSCPACYLRQKGWMEFKEKYQD

SEQ ID NO: 39297 - protein, 238 aa, Liberibacter crescens
  misc_feature (1)..(238): tr|L0EV75|L0EV75_LIBCB 7-cyano-7-deazaguanine synthase OS=Liberibacter crescens (strain BT-1) OX=1215343 GN=qu eC PE=3 SV=1
MDGALVLFSGGQDSSTCLAWALNQFDVVETLAFDYGQRNLIELECRIRLRDRIISLNPDWKNRLGKDHFLPLKTLGALSETALTRDIPIKTEENGLPNTFVPGRNLIFLIFAAALAYRRNIRNIVVGVCETDYSGYPDCRNETIQALQTAINLGMDNDFTLHTPLMWIDKSATWDLAYQIGGKALVELIIEESHTCYLGKRGQRHAWGYGCGTCLACKIREKGWTKYTISKQNCQPLS

SEQ ID NO: 39298 - protein, 243 aa, Liberibacter solanacearum
  misc_feature (1)..(243): tr|E4UAY1|E4UAY1_LIBSC 7-cyano-7-deazaguanine synthase OS=Liberibacter solanacearum (strain CLso-ZC1) OX=65817 2 GN=queC PE=3 SV=1
MNNNREKTSSALLLFSGGQDSSTCLSWALDKFDKVETLSFDYGQRNKVELECRLRLREKIVQLTPKWKDSLGADHILPLATLGDISHSSLTKNIEIKIQENNLPNTFVPGRNIIFLVFAAALAYRRGITNIIAGMCEMDYSGYPDCRNETIKALEMTLNLGMESNFTIHTPLMHLKKHETWKLVQDIGGQNLVDLILEESHTCYLGTRDKRYEWGYGCNSCPSCNLRQKGWVEFKEKYQRTPT

SEQ ID NO: 39299 - protein, 228 aa, Lihuaxuella thermophila
  misc_feature (1)..(228): tr|A0A1H8C2B1|A0A1H8C2B1_9BACL 7-cyano-7-deazaguanine s ynthase OS=Lihuaxuella thermophila OX=1173111 GN=queC P E=3 SV=1
MKEKAVIVLSGGLDSTTCMGIARDRGYELYPITFFYNQRHHKEVEHAKRVAEHYGVADRHKVVNVSFLGEIGGSALTDETIAVRTSGVDEEIPETYVPARNLIFLSLAVAYGEVIGARTIYTGVNAVDYSGYPDCRPEFIRSLTETVNLATKMGVTSEQKIKIETPLIHLTKADIIRIGLALKVPYELTTSCYQGEEEACGVCDSCLLRLKGFAENNAVDPIPYKSIS

SEQ ID NO: 39300 - protein, 232 aa, Limimaricola cinnabarinus
  misc_feature (1)..(232): tr|A0A2G1MH49|A0A2G1MH49_9RHOB 7-cyano-7-deazaguanine s ynthase OS=Limimaricola cinnabarinus OX=1125964 GN=queC PE=3 SV=1
MKTYVICSGGLDSVSLAHKVAAEHELAGLISFDYGQRHSKELDFARACAERLGVPFHLIDMRGIGAHLTGSALTDDVEVPDGHYAEETMKSTVVPNRNAIMLTVAFGLAAAQKADAVATAVHGGDHFIYPDCRPEFTESFEAMQRHALDGYADIRLYTPFVRAPKSAIVTEGAKHDTPFAETWSCYKGGEKQCGRCGTCVERREAFHLAGVDDPTEYADPDYWAEAVKKGAN

SEQ ID NO: 39301 - protein, 232 aa, Limimaricola cinnabarinus
  misc_feature (1)..(232): tr|U2Z2Z4|U2Z2Z4_9RHOB 7-cyano-7-deazaguanine synthase OS=Limimaricola cinnabarinus LL-001 OX=1337093 GN=queC PE=3 SV=1
MKTYVICSGGLDSVSLAHKVAAENELAGLISFDYGQRHSKELDFARAAADRLDVPFHLIDMRSIGAHLSGSALTDDVEVPDGHYAEETMKTTVVPNRNAIMLAVAFGLAAAQKADAVATAVHGGDHFIYPDCRPAFTEAFDAMQKQALDGYADVTLYTPFVREPKSAIVTEGAKHGTPFAETWSCYKGGDKHCGRCGTCVERREAFHLAGVEDPTDYADPDFWLEAVARGAK

SEQ ID NO: 39302 - protein, 232 aa, Limimaricola hongkongensis
  misc_feature (1)..(232): tr|A0A017HDU3|A0A017HDU3_9RHOB 7-cyano-7-deazaguanine s ynthase OS=Limimaricola hongkongensis DSM 17492 OX=1122 180 GN=queC PE=3 SV=1
MKTYVICSGGLDSVSLAHKVAAEHELAGLISYDYGQRHAKELDFARACAERLGVPFHLIDMRGVGAHLTGSALTDDVDVPDGHYAEETMKSTVVPNRNAIMLAVAFGLAAAQKADAVATAVHGGDHFIYPDCRPEFTQAFEAMQKQALDGYADIRLYTPFVHEPKSAIVTAGAQHGTPFAETWSCYKGNDLHCGRCGTCVERREAFHLAGVEDPTTYADPDYWIEAIEKGAN

SEQ ID NO: 39303 - protein, 232 aa, Limimaricola soesokkakensis
  misc_feature (1)..(232): tr|A0A1X6YZ97|A0A1X6YZ97_9RHOB 7-cyano-7-deazaguanine s ynthase OS=Limimaricola soesokkakensis OX=1343159 GN=qu eC PE=3 SV=1
MKTYVICSGGLDSVSLAHKVAAENELAGLISFDYGQRHSKELDFARAAAERLGVPFHLIDMRSIGAHLSGSALTDDVEVPDGHYAEDTMKTTVVPNRNAIMLTVAFGLAAAQKADAVATAVHGGDHFIYPDCRPAFTEAFDAMQRQALDGYADVRLYTPFVHEPKSAIVTEGAKHGTPFAETWSCYKGGDLHCGRCGTCVERREAFHLAGVADPTEYADPDFWVEAVARGAK

SEQ ID NO: 39304 - protein, 238 aa, Limimonas halophila
  misc_feature (1)..(238): tr|A0A1G7R6N4|A0A1G7R6N4_9PROT 7-cyano-7-deazaguanine s ynthase OS=Limimonas halophila OX=1082479 GN=queC PE=3 SV=1
MRDDAALLLFSGGQDSATCLAWALTRFAHVETVGFAYGQRHDVEMRCREDVRAAVPASLDADAGTLGEDHLVEASGLAQVAESALTSERAIEMADDGLPSTFVPGRNLIFLTYAAALGYRRGLRHLVGGMCETDYSGYPDCRDDTVKAMQVALNLGMAARFVLHTPLMWRDKAATWALAEQLGGGELVETIRVRTHTCYRGDRSVEHAWGYGCGTCPACELRAEGWRRYRAGEATDGV

SEQ ID NO: 39305 - protein, 234 aa, Limnobacter sp.
  misc_feature (1)..(234): tr|A0A151QG59|A0A151QG59_9BURK 7-cyano-7-deazaguanine s ynthase OS=Limnobacter sp. CACIAM 66H1 OX=1813033 GN=qu eC PE=3 SV=1
MNKKALVLFSGGQDSTVCLAWALSKFEHVETIGFDYGQRHRIELECRLTVLERVREQFPEWAHKLGEDRVINLSWLGQISDCALTEEREIELNETGLPNTFVPGRNLVFFLISSAVAYRRGLSTLVGGMCQTDFSGYPDCREDTLKALQVATNLGMAGSFRFETPLMWIDKTETFQLGEQLGGKKLLEIIVRDTHTCYTGDRSHKHDWGFGCGECPACDLRKRGWNNYISQQNQ

SEQ ID NO: 39306 - protein, 234 aa, Limnobacter sp.
  misc_feature (1)..(234): tr|A0A520TI53|A0A520TI53_9BURK 7-cyano-7-deazaguanine s ynthase OS=Limnobacter sp. OX=2003368 GN=queC PE=3 SV=1
MNKKALVLFSGGQDSTVCLAWALSKFEHVETIGFDYGQRHRIELECRLTVLDRVREQFPEWAQKLGEDRVIDLSWLGQISDCALTEEREIELNETGLPNTFVPGRNLVFFLISSAVAYRRGLSTLVGGMCQTDFSGYPDCREDTLKALQVATNLGMASSFRFETPLMWIDKTETFQLGEQLGGKKLLEIIVRDTHTCYTGDRSHEHEWGFGCGECPACDLRKRGWKNYISQQNQ

SEQ ID NO: 39307 - protein, 229 aa, Limnobaculum parvum
  misc_feature (1)..(229): tr|A0A2Y9U2E9|A0A2Y9U2E9_9ENTR 7-cyano-7-deazaguanine s ynthase OS=Limnobaculum parvum OX=2172103 GN=queC PE=3 SV=1
MKRAVVVFSGGQDSTTCLIQALTQYDEVHCVTFDYGQRHQAEIEVAKSLAKQLGVTAHKVMDVGLLNQLAISSLTRDNIPVPTHVDDGIPNTFVPGRNILFLTLAAIYAYQIKAQAVITGVCETDFSGYPDCRDEFVKALNHAVALGMDYPVSFETPLMWLNKSETWALADYYGQLALIRHQTLTCYNGIQGDGCGECPACHLRANGLKTYQDNHQQVMAQLKRKLTLK

SEQ ID NO: 39308 - protein, 237 aa, Limnohabitans curvus
  misc_feature (1)..(237): tr|A0A315ETZ8|A0A315ETZ8_9BURK 7-cyano-7-deazaguanine s ynthase OS=Limnohabitans curvus OX=323423 GN=queC PE=3 SV=1
MHRNALVLFSGGQDSTTCLAHALAQYERVETLAFDYRQRHLVELEARLQVLAQVRAQFPQWANKLGEDHLLDLGVLGQVSETSLTRDMAFKMEASGLPNTFVPGRNLLFLTLAAALAYRRDLDVIVTGVCETDFSGYPDCRDDTMKAMQIALSLGMDRRLLIETPLMWIDKAQTWQLAYDLGQKAHADGGDQLVDLIVEHTHTCYMGDRTHRHNWGYGCGTCPACDLRAKGWERWKA

SEQ ID NO: 39309 - protein, 239 aa, Limnohabitans parvus
  misc_feature (1)..(239): tr|A0A315EDQ7|A0A315EDQ7_9BURK 7-cyano-7-deazaguanine s ynthase OS=Limnohabitans parvus II-B4 OX=1293052 GN=que C PE=3 SV=1
MHTSALVLFSGGQDSTTCLAHALSRYERVETLAFDYGQRHKVELDARLNVLAAIKARFPQWAPKMGEDHLLDAGILGQISETSLTRDTAIEMESSGLPNTFVPGRNLLFLTLAGALAYRRGLQVIVTGVCETDFSGYPDCRDDTMKAMQVALSLGMDRKLLIETPLMWIDKAQTWQLAHDLGQKVDPAQGGQALVDLIVEHTHTCYLGDRTQRHDWGYGCGQCPACQLRAAGFARYAKP

SEQ ID NO: 39310 - protein, 239 aa, Limnohabitans planktonicus
  misc_feature (1)..(239): tr|A0A2T7UCA8|A0A2T7UCA8_9BURK 7-cyano-7-deazaguanine s ynthase OS=Limnohabitans planktonicus II-D5 OX=1293045 GN=queC PE=3 SV=1
MHTSALVLFSGGQDSTTCLAHALNRYERVETLAFDYGQRHKVELDARLNVLAAIKSRFPQWATKMGEDHLLDAGILGQISETSLTRDTAIVMETSGLPNTFVPGRNLLFLTLAAALAYRRGLQVIVTGVCETDFSGYPDCRDDTMKAMQVALSLGMDRRLLIETPLMWIDKAQTWQLAHDLGQKADADGGGQALVDVIVEHSHTCYLGERTQRHDWGYGCGQCPACQLRAAGFGRWTSR

SEQ ID NO: 39311 - protein, 239 aa, Limnohabitans sp.
  misc_feature (1)..(239): tr|A0A2M6VYY1|A0A2M6VYY1_9BURK 7-cyano-7-deazaguanine s ynthase OS=Limnohabitans sp. 15K OX=1100706 GN=queC PE= 3 SV=1
MHTSALVLFSGGQDSTTCLAHALSRYERVETLAFDYGQRHKVELDARLNVLAAIKVRFPQWAPKMGEDHLLDAGILGQISETSLTRDTAIEMESTGLPNTFVPGRNLLFLTLAAALAYRRGLQVIVTGVCETDFSGYPDCRDDTMKAMQVALSLGMDRKLLIETPLMWIDKAQTWQLAHDLGQKADPAQGGQALVDLIVEHTHTCYLGDRTQRHDWGYGCGQCPACQLRAAGFARFQKS

SEQ ID NO: 39312 - protein, 239 aa, Limnohabitans sp.
  misc_feature (1)..(239): tr|A0A2M6VFB1|A0A2M6VFB1_9BURK 7-cyano-7-deazaguanine s ynthase OS=Limnohabitans sp. G3-2 OX=1100711 GN=queC PE =3 SV=1
MHTSALVLFSGGQDSTTCLAHALSRYDRVETLAFDYGQRHKVELDARLNVLAAIKAHFPQWASKMGEDHLLDAGILGQISETSLTRDTAIEMESSGLPNTFVPGRNLLFLTLAAALAYRRGLQVIVTGVCETDFSGYPDCRDDTMKAMQVALSLGMDRKLLIETPLMWIDKAQTWQLAHDLGQKAQPQGGGSALVDLIVEHSHTCYLGDRTQRHDWGYGCGQCPACQLRSAGFDRFQKA

SEQ ID NO: 39313 - protein, 229 aa, Limnoraphis robusta
  misc_feature (1)..(229): tr|A0A0F5Y7P7|A0A0F5Y7P7_9CYAN 7-cyano-7-deazaguanine s ynthase OS=Limnoraphis robusta CS-951 OX=1637645 GN=que C PE=3 SV=1
MKAVILLSGGLDSSTVLYQAKADGYECYAISFDYQQRHQRELTSAQQIAESAGIVEHQVVKFDLTLWGGSALTDRKIDLPRDRSLDQMSETIPITYVPARNTIFLSFALGYAETVNASRVYIGVNALDYSGYPDCRPDYIDAMQDVFRLGTKQGREGNPILIYSPLIHLKKTEIIQLGNQLGVPWEKTWSCYAGEEKACGVCDSCKLRLAAFQELGLTDPIPYIEGIVN

SEQ ID NO: 39314 - protein, 226 aa, Limnospira indica; identical to SEQ ID NO: 36109
  misc_feature (1)..(226): tr|H1WHY5|H1WHY5_9CYAN 7-cyano-7-deazaguanine synthase OS=Limnospira indica PCC 8005 OX=376219 GN=queC PE=3 SV =1

SEQ ID NO: 39315 - protein, 224 aa, Limnothrix rosea
  misc_feature (1)..(224): tr|A0A1Q4QZX6|A0A1Q4QZX6_9CYAN 7-cyano-7-deazaguanine s ynthase OS=Limnothrix rosea IAM M-220 OX=454133 GN=queC PE=3 SV=1
MKKAVVLLSGGLDSATSAAQAIADGFEVIALSFRYGQKHSRELDAAGNIATQLGIREHFVMDVNLSQWGGSSLTDAAQEIPKDGVQADVIPSTYVPGRNTVFLALALSLAEAKEAEAIYLGINAVDYSGYPDCRPEYLEAYQQLANLSSKAGIEGHAPQLVAPLVLDSKVEIVKKAIALGVDIAETWSCYQGSEKPCGLCDSCRIRDEALTQAGYPELTSQAKA

SEQ ID NO: 39316 - protein, 238 aa, Limnothrix sp.
  misc_feature (1)..(238): tr|A0A372DDN7|A0A372DDN7_9CYAN 7-cyano-7-deazaguanine s ynthase OS=Limnothrix sp. CACIAM 69d OX=1890733 GN=queC PE=3 SV=1
MPSARSPQCQPPKAVVLLSGGLDSSTVLYQAKADGCDCYALSFDYQQRHRRELQAAVAIAQAAGVAAHQVVRFDLTQWGGSALTDAALELPSDRPLDGMAAEIPITYVPARNTIFLSFALAYAEAIDAQRVYIGVNALDYSGYPDCRPDYLAAMQLVFQLGTRQGREGQPIEIVAPLVELRKTDIIELGNRLGVPWAETWSCYAGGDRSCGRCDSCRLRLAAFAELGLTDPVPYEAHG

SEQ ID NO: 39317 - protein, 225 aa, Limnothrix sp.
  misc_feature (1)..(225): tr|A0A1C0VAX4|A0A1C0VAX4_9CYAN 7-cyano-7-deazaguanine s ynthase OS=Limnothrix sp. P13C2 OX=1880902 GN=queC PE=3 SV=1
MLLSGGLDSSTVLYQAKADGCDCYALSFDYQQRHRRELQAAVAIAQAAGVVAHQVVRFDLTQWGGSALTDNQLDLPSDRPLDGMATEIPITYVPARNTIFLSFALAYAEAIDAQRVYIGVNALDYSGYPDCRPDYLAAMQSVFQLGTRQGREGQPIEIVAPLVELRKTDIIELGNRLGVPWADTWSCYAGGDRSCGRCDSCRLRLAAFAELGLTDPVPYEVLPSQ

SEQ ID NO: 39318 - protein, 224 aa, Listeria booriae
  misc_feature (1)..(224): tr|A0A099WFV6|A0A099WFV6_9LIST 7-cyano-7-deazaguanine s ynthase OS=Listeria booriae OX=1552123 GN=queC PE=3 SV= 1
MKMTNKKALVIFSGGQDSTTCLFQAIQDYGKENVEVITFFYGQRHAIELSKAKWIVRDLNVKQTVIDTSVIKQTTNNALMDDSMEISQGESEEYPNTFVDGRNALFLLLAGTYAKGQGITDIIIGVCETDFSGYPDCRDVFVKSMNVTLNLAMDFPFVVKTPLMYLTKAETWALADELGRLDYVREHTHTCYMGVDGGCGECPSCELREKGLTEYLAQKAGTAL

SEQ ID NO: 39319 - protein, 222 aa, Listeria cornellensis
  misc_feature (1)..(222): tr|W7BTU9|W7BTU9_9LIST 7-cyano-7-deazaguanine synthase OS=Listeria cornellensis FSL F6-0969 OX=1265820 GN=queC PE=3 SV=1
MTNKKALVVFSGGQDSTTCLFQAIQDYGKENVEVITFFYGQRHAIELEKAKWIVRDLNVKQTMIDTSVIKQTTNNALMDDSMEISQGESEEYPNTFVDGRNALFLLLAGTYAKGQGITDIIIGVCETDFSGYPDCRDVFVKSMNVTLNLAMDFPFVVKTPLMYLTKAETWALADELGRLDYVREHTHTCYMGVDGGCGECPSCLLREQGLKEYLAAKAGSAI

SEQ ID NO: 39320 - protein, 222 aa, Listeria grandensis
  misc_feature (1)..(222): tr|W7B6N3|W7B6N3_9LIST 7-cyano-7-deazaguanine synthase OS=Listeria grandensis FSL F6-0971 OX=1265819 GN=queC P E=3 SV=1
MTNKKALVVFSGGQDSTTCLFQAIQDYGKENVEVITFFYGQRHAIELEKAKWIVRDLNVKQTMIDTSVIKQTTNNALMDDSMEISQGESEEYPNTFVDGRNALFLLLAGTYAKGQGITDIIIGVCETDFSGYPDCRDVFVKSMNVTLNLAMDFPFVVKTPLMYLTKAETWALADELGRLDYVRDHTHTCYMGVDGGCGECPSCELREKGLTEYLAQKAGSAL

SEQ ID NO: 39321 - protein, 222 aa, Listeria rocourtiae
  misc_feature (1)..(222): tr|A0A4R6ZL20|A0A4R6ZL20_9LIST 7-cyano-7-deazaguanine s ynthase OS=Listeria rocourtiae OX=647910 GN=queC PE=3 S V=1
MTNKKALVIFSGGQDSTTCLFQAIQDYGKENVEVITFFYGQRHVIELEKAKWIVQDLNVKQTVIDTSVIKQTTNNALMDESLEISQGESEEYPNTFVDGRNALFLLLAGTYAKGQGITDIIIGVCETDFSGYPDCRDVFVKSMNVTLNLAMDYPFVVKTPLMYLTKAQTWALADDLGRLDYVREHTHTCYMGVDGGCGKCPSCELREKGLTEYLAQKAGSAI

SEQ ID NO: 39322 - protein, 224 aa, Listeria sp.
  misc_feature (1)..(224): tr|A0A3N9TSK8|A0A3N9TSK8_9LIST 7-cyano-7-deazaguanine s ynthase OS=Listeria sp. SHR_NRA_18 OX=2269046 GN=queC P E=3 SV=1
MKMTNKKALVVFSGGQDSTTCLFQAIQDYGKENVEVITFFYGQRHVIELEKAKWIVQDLNVKQTVIDTSVIKQTTNNALMDESMEISQGKSEEYPNTFVDGRNALFLLLAGTYAKGQGITDIIIGVCETDFSGYPDCRDVFVKSMNVTLNLAMDYPFVVKTPLMYLTKAETWRLADELGRLDYVREHTHTCYMGVEGGCGECPSCELREKGLTEYLEQKAGSAI

SEQ ID NO: 39323 - protein, 224 aa, Listeriaceae bacterium; identical to SEQ ID NO: 39322
  misc_feature (1)..(224): tr|A0A099WAT8|A0A099WAT8_9LIST 7-cyano-7-deazaguanine s ynthase OS=Listeriaceae bacterium FSL A5-0209 OX=149767 9 GN=queC PE=3 SV=1

SEQ ID NO: 39324 - protein, 616 aa, Litoreibacter janthinus
  misc_feature (1)..(616): tr|A0A1I6H0D9|A0A1I6H0D9_9RHOB 7-cyano-7-deazaguanine s ynthase (Queuosine biosynthesis) OS=Litoreibacter janth inus OX=670154 GN=SAMN04488002_2255 PE=4 SV=1
MVGVAPQPEYRVKCLPPITFGGGDERLIFEVNGRRKGVSLKIRQLSRQLVAALPDRALDLIEIAALVYAVDASVSRGGLTDQHMGAKWHRRFLIEMPVLDLSLWTSPDLQRDLEETLMFLSGDKFEFKFVQREGRTIKQSGFFDYGPDSAWVPDTVMMFSGGLDSFAGALEELVERKNKVALISHFSSSKIAPIQQTLQKAISEKLGPGKSMHFPMRVQLQDGTNSEGTHRTRSLLFAALGVATALSFGKDKVSFYENGIVSLNLPPVGNVLGTRATRTTHPQTLIRFSKLFSSIFNAKLIIDNPFFWRTKTDIVSKIHQLGMGDQIANTRSCADVHNQTKQYAHCGRCSQCIDRRFAILAAGLQAQDPQEAYRVDLMTGVRKAVQDKEAALSYVRNAFGFEAMTSSDLEQRFPPILDAVEHLHEPASTALSRLTELLRRHGTAVAGVMRETMDGKRPDQFPKDSLPFLFGEQQRETYFTPQIPLFPNTTSEPSLEKFMLVFDEQRKCLTINDAIEVKGADYGLFICLAKEHLRAAGLGLDPLDYPTTTARKLARALQVEASEAVRRRILRARNALAKKATSAGLDPHRAKALIENLPSHGYRLAPDLVIVRMPTA

SEQ ID NO: 39325 - protein, 110 aa, Litoricolaceae bacterium
  misc_feature (1)..(110): tr|A0A520RZV4|A0A520RZV4_9GAMM 7-cyano-7-deazaguanine s ynthase (Fragment) OS=Litoricolaceae bacterium OX=25103 33 GN=EVA61_02845 PE=3 SV=1
ANAVDYSGYPDCRPAFIEQFESLANVATAAVDGGERWVIEAPLMTMSKSDIVTTGNALGVDYSMTVSCYQADEEGAACGACDACRLRRKGFLDAGLYDPTKYRRGISPKI

SEQ ID NO: 39326 - protein, 233 aa, Litoricolaceae bacterium
  misc_feature (1)..(233): tr|A0A520S7Z4|A0A520S7Z4_9GAMM 7-cyano-7-deazaguanine s ynthase OS=Litoricolaceae bacterium OX=2510333 GN=queC PE=3 SV=1
MGQPKAVILLSGGLDSATVLAMAKSRGFDCYTISFDYGQKHNAELRAAHRIAETMGQHPHKVIRLDLKAIGGSALTSDEFEVPVGGVAEAGIPVTYVPARNTVFLSIALGYGEVIGATHLFIGANAVDYSGYPDCRPAFIEQFERLANVATAAVDGGVRWVVEAPLMSMSKSDIVKTGAALGVDYSLTVSCYQADDSGAACGACDACRLRHKGFLDAGLQDPTAYQVGISPKI

SEQ ID NO: 39327 - protein, 221 aa, Litorilituus sediminis
  misc_feature (1)..(221): tr|A0A4P6P393|A0A4P6P393_9GAMM 7-cyano-7-deazaguanine s ynthase OS=Litorilituus sediminis OX=718192 GN=queC PE= 3 SV=1
MTEKVVVIYSGGMDSFTVLNRALKDGKQVYALSFDYGQRHVKELDCARTVCNKLKIEHKVIDISAINQLLAGSSLTDDIEIPEGHYEAENMKSTVVPNRNMILLSLAVGYAVSVGASQVYYGAHSGDHAIYPDCRPEFVMKMNDVCKIANYESVEIFSPYLTVDKTAILADGLAMGLDYSNTWTCYNGREKACGKCGACQERLEAFRDNNEVDPISYESSL

SEQ ID NO: 39328 - protein, 218 aa, Litorilituus sp.
  misc_feature (1)..(218): tr|A0A502KTA1|A0A502KTA1_9GAMM 7-cyano-7-deazaguanine s ynthase OS=Litorilituus sp. RZ04 OX=2491017 GN=queC PE= 3 SV=1
MAEKVVVIYSGGMDSFTVLNRAIKDGKQVYALSFDYGQRHVKELTCARTVCTQLDIPHKVIDISAINELLAGSSLTDDIEIPEGHYEAENMKSTIVPNRNMILLSLAVGYAVSVGAGQVYYGAHSGDHAIYPDCRPEFVLKMNDVCKIANYESVEIFSPYLEVNKTAILTDGIAMGLDYSNTWTCYNGREKACGKCGACQERLEAFADNNVNDPISYE

SEQ ID NO: 39329 - protein, 232 aa, Litorimonas taeanensis
  misc_feature (1)..(232): tr|A0A420WJU4|A0A420WJU4_9RHOB 7-cyano-7-deazaguanine s ynthase OS=Litorimonas taeanensis OX=568099 GN=queC PE= 3 SV=1
MRDVTKALLLFSGGQDSATCLAWALDKYDYVETVGFHYGQRHDIEMTCRETIRQTMPSFKSDWKNRLGPDHVLDLSVLGQMSETALTRDVEIKMNADGMPNTFVPGRNLVFLTFAGALAYRRGINDLVGGMCEADFSGYPDCRKETLDAQMQALSLGLDRPMTLSTPLMHLSKAQAWGLCQTLGGDDLVSLVNEKTHSCYKGNHKDQHSWGFGCGECPACELRAAGWNEFTS

SEQ ID NO: 39330 - protein, 233 aa, Loktanella sp.
  misc_feature (1)..(233): tr|A0A1H9HDV3|A0A1H9HDV3_9RHOB 7-cyano-7-deazaguanine s ynthase OS=Loktanella sp. DSM 29012 OX=1881056 GN=queC PE=3 SV=1
MKTIVICSGGLDSVSLAHMVAAEHQLTRLVSFDYGQRHRKELDFAARCAGRLGVPHDVIDLRGIGAALTGSALTDDVDVPDGHYAEESMRITVVPNRNAIMLAVAFGVAAANGDDAVATAVHGGDHFIYPDCRPAFTQAFEAMQKAALDGYADVSLYTPFVNRTKADIVTAGARHSTPFADTWSCYKGGEVHCGRCGTCVERREAFDLAGITDPTTYADPDFWAHAIAAKEGV

SEQ ID NO: 39331 - protein, 233 aa, Loktanella sp.
  misc_feature (1)..(233): tr|A0A0F4RJK4|A0A0F4RJK4_9RHOB 7-cyano-7-deazaguanine s ynthase OS=Loktanella sp. S4079 OX=579483 GN=queC PE=3 SV=1
MKTIVICSGGLDSVSLAHVVANEGNLSRLVSFDYGQRHRKELDFAAACAERLGVPHHIIDMRQIGAALSGSALTDDIDVPDGHYAEETMKITVVPNRNAIMLTIAYGIAAANGDDAVATAVHGGDHFIYPDCRPAFTESFDRMQRAALDGYADVALSTPFVHRSKADIVTEGARVGTPFAQTWSCYKGGEKQCGRCGTCVERREAFHLAGVTDPTEYEDPEFWRAAIETHGGN

SEQ ID NO: 39332 - protein, 243 aa, Lonepinella koalarum
  misc_feature (1)..(243): tr|A0A4R1L0V3|A0A4R1L0V3_9PAST 7-cyano-7-deazaguanine s ynthase OS=Lonepinella koalarum OX=53417 GN=queC PE=3 S V=1
MQLFNPNHDRKAVVIFSGGQDSTTCLIQAIQQYGKQNLETITFKYGQRHAIELDKAQWICQDLGIKQTLIDMESTQIFSANAMMSDSPIKTGNNGVPNTLVDGRNALFLLYAAIYAKGQGITDIITGVCETDFSGYPDCRDIFIKSMNVTLNLAMDYNFRIITPLMYLTKAQTWQLADELDALDYVQQHSHTCYLGIDGGCGECPSCQLRNKGLNEYLALKSAVKNANEIGRNNSVNSTSIGG

SEQ ID NO: 39333 - protein, 235 aa, Longibacter salinarum
  misc_feature (1)..(235): tr|A0A2A8CUX1|A0A2A8CUX1_9BACT 7-cyano-7-deazaguanine s ynthase OS=Longibacter salinarum OX=1850348 GN=queC PE= 3 SV=1
MPHPDSTDRSALVLFSGGQDSTTCLFWALDRFASVHALGFHYGQKHAVETEQARKIAVKADVPFEIIDMEGTLSGSALTEHEKDMSAAHERNEDLPASFVPGRNALFLSTAASYAYNRGIHDLVGGMCQTDYSGYPDCRRVFIDSMQTSLSLAMDEDLRIHTPLMYLTKAETWKLAADLVTVAGCDVLETVRVMSHTDYNGDRSELHEWGYGQLDNPASKLRAKGYREAKEKGWV

SEQ ID NO: 39334 - protein, 231 aa, Longimonas halophila
  misc_feature (1)..(231): tr|A0A2H3P8F9|A0A2H3P8F9_9BACT 7-cyano-7-deazaguanine s ynthase OS=Longimonas halophila OX=1469170 GN=queC PE=3 SV=1
MPTDSAALVLFSGGQDSTTCLFWALQRFDQVQALGFTYGQKHAVEVEQARKIADKAGVPYDCIDLTGALEGSALTEHGKDMNAPHARNEDLPASFVPGRNALFLSTAASYAYNRGITQLVGGMCQTDYSGYPDCRRTFISAMQTSLSLAMDADLQIYTPLMDRTKAETWKLAADLGTVAGCDVLETVRVMSHTDYNGDRSQLNEWGYGQLDNPASKLRAKGYEEAKEKGWV

SEQ ID NO: 39335 - protein, 231 aa, Lonsdalea britannica
  misc_feature (1)..(231): tr|A0A1X3RZI0|A0A1X3RZI0_9GAMM 7-cyano-7-deazaguanine s ynthase OS=Lonsdalea britannica OX=1082704 GN=queC PE=3 SV=1
MTSAVVVFSGGQDSTTCLIQALKQYDHVHCVTFDYGQRHRAEIDVAAELAQRLGACAHKVLDVRLLNELAVSSLTRDNIPVPDFDENLKGLPSTFVPGRNILFLTLAAIYAYQVGADTVITGVCETDFSGYPDCRDEFVKALNKGVALGLAKDIRFVTPLMWLDKAETWALADHYAQLETIRHHTLTCYNGIKGDGCGQCAACHLRQKGLELYQQNPEGVRASLFKKTGLK

SEQ ID NO: 39336 - protein, 231 aa, Lonsdalea iberica
  misc_feature (1)..(231): tr|A0A1X3RMD6|A0A1X3RMD6_9GAMM 7-cyano-7-deazaguanine s ynthase OS=Lonsdalea iberica OX=1082703 GN=queC PE=3 SV =1
MTSAVVVFSGGQDSTTCLIQALKQYDHVHCVTFDYGQRHRAEIDVAAELAQRLGACAHKVLDVRLLNELAVSSLTRDNIPVPDFDEKPDGLPSTFVPGRNILFLTLAAIYAYQVGADTVITGVCETDFSGYPDCRDEFVKALNKGVALGLAKDIRFVTPLMWLDKAETWALADYYHQLDTIRHHTLTCYNGIKGDGCGQCAACHLRKKGLELYQQNPEGVRASLAKKTELE

SEQ ID NO: 39337 - protein, 231 aa, Lonsdalea populi
  misc_feature (1)..(231): tr|A0A3N0U8U7|A0A3N0U8U7_9GAMM 7-cyano-7-deazaguanine s ynthase OS=Lonsdalea populi OX=1172565 GN=queC PE=3 SV= 1
MRSAVVVFSGGQDSTTCLIQALKQYDHVHCVTFDYGQRHRAEIGVAAELAQRLGACAHKVLDVRLLNELAVSSLTRDNIPVPDFDEKPDGLPSTFVPGRNILFLTLAAIYAYQVGADTVITGVCETDFSGYPDCRDEFVKALNKGVALGLAKDIRFITPLMWLDKAETWALADYYQQLETIRYHTLTCYNGVKGDGCGQCAACHLRQKGLDQYQLNPEDVRASLAKKTGLK

SEQ ID NO: 39338 - protein, 231 aa, Lonsdalea quercina
  misc_feature (1)..(231): tr|A0A1H3W8L3|A0A1H3W8L3_9GAMM 7-cyano-7-deazaguanine s ynthase OS=Lonsdalea quercina OX=71657 GN=queC PE=3 SV= 1
MTSAVVVFSGGQDSTTCLIQALKQYDHVHCVTFDYGQRHRAEIDVAAELAQRLGACAHKVLDVRLLNELAVSSLTRDNIPVPDFDENQDGLPSTFVPGRNILFLTLAAIYAYQVGADTVITGVCETDFSGYPDCRDEFVKALNEGVALGLAKDIRFLTPLMWLDKAETWALADYYQQLDTIRHHTLTCYNGIKGDGCGQCAACHLRQKGLEQYQQNPESVRASLSKKTGLK

SEQ ID NO: 39339 - protein, 219 aa, Lucifera butyrica
  misc_feature (1)..(219): tr|A0A498R151|A0A498R151_9FIRM 7-cyano-7-deazaguanine s ynthase OS=Lucifera butyrica OX=1351585 GN=queC PE=3 SV =1
MTAYKDQGALVVFSGGQDSTTCLFWARKQFNRVEAVTFDYNQRHRREIDCAREIARELSLEHTILDLGLLNQLAPNALTRSEITVKAGESGQLPNTFVDGRNLLFLSFTAVVAKQRNIRHIVTGVCETDFSGYPDCRDVFIKSLNVTLNLAMDYQFVIHTPLMWINKMETWAMADELGVLDFVRQKTLTCYNGIIGDGCGECPACKLRNAGLKEYLCRK

SEQ ID NO: 39340 - protein, 224 aa, Luminiphilus syltensis
  misc_feature (1)..(224): tr|B8KS56|B8KS56_9GAMM 7-cyano-7-deazaguanine synthase OS=Luminiphilus syltensis NOR5-1B OX=565045 GN=queC PE= 3 SV=1
MSSKKAVVLVSGGLDSATVLAMAAAAGRQCFALSFDYGQRHRAELKAAAHVASSVPGTVHKVVQLDLSTIGGSALTDTSIAVPTSPTEGIPVTYVPARNTVFLSIALGWAEVLDADEIHIGVNAVDYSGYPDCRPAFIDAFRSLAAVATKAGVEGHPLAVCTPIIDMTKGDIIRAGTELGVDYALTVSCYQPDGEGLACGRCDSCRLRRAGFREAGVEDPTRYG

SEQ ID NO: 39341 - protein, 227 aa, Luteibacter pinisoli
  misc_feature (1)..(227): tr|A0A4Y5Z9D7|A0A4Y5Z9D7_9GAMM 7-cyano-7-deazaguanine s ynthase OS=Luteibacter pinisoli OX=2589080 GN=queC PE=3 SV=1
MNASTPSRKAVILVSGGMDSAVTIAMAREQGFDVHALSVAYGQRHSSELEASERVSKLLGAVEHKTVVVDLRSIGGSALTADIDVPEDGGEGIPVTYVPARNTIMLSIALGWAEVLGSTDIFCGVNAVDYSGYPDCRPAFIDAFQALANVATKAGVEGAGIRIHAPLMAMGKGDIVREGMRLGVDFSETVSCYQADAQGRACGHCDACRLRAEGFAKAGVPDPTHYV

SEQ ID NO: 39342 - protein, 227 aa, Luteibacter rhizovicinus
  misc_feature (1)..(227): tr|A0A1L3EPM7|A0A1L3EPM7_9GAMM 7-cyano-7-deazaguanine s ynthase OS=Luteibacter rhizovicinus DSM 16549 OX=144076 3 GN=queC PE=3 SV=1
MNASNPSRKAVILVSGGMDSAVTIAMAREQGFEVYALSVAYGQRHSSELEASERVATMLGAVTHKTVHVDLRSIGGSALTADIDVPEDGGTGIPVTYVPARNTIMLSIALGWAEVLGSSDIFCGVNAVDYSGYPDCRPAFIESFQSLANVATKAGVEGAGIRIHAPLMDMGKGDIVREGMRLGVDFAATVSCYQADAQGRACGHCDACRLRAEGFAKAGVPDPTHYV

SEQ ID NO: 39343 - protein, 227 aa, Luteibacter rhizovicinus
  misc_feature (1)..(227): tr|A0A4R3YNM3|A0A4R3YNM3_9GAMM 7-cyano-7-deazaguanine s ynthase OS=Luteibacter rhizovicinus OX=242606 GN=queC P E=3 SV=1
MNASSPSRKAVILVSGGMDSAVTIAMAREQGFEVYALSVAYGQRHSSELEASERVAKMLGAVVHKTVHVDLRSIGGSALTADIDVPEEGGEGIPVTYVPARNTIMLSIALGWAEVLGSSDIFCGVNAVDYSGYPDCRPAFIESFQTLANVATKAGVEGAGIVVHAPLMNMGKAQIVREGERLGVDFAATVSCYNADAQGRACGHCDACRLRAQGFHEAGVVDPTHYV

SEQ ID NO: 39344 - protein, 227 aa, Luteibacter sp.
  misc_feature (1)..(227): tr|A0A2T5LI94|A0A2T5LI94_9GAMM 7-cyano-7-deazaguanine s ynthase OS=Luteibacter sp. OK325 OX=2135670 GN=queC PE= 3 SV=1
MNASTPSRKAVILVSGGMDSAVTIAMAREQGFEVYALSVAYGQRHSSELEASERVAKMLGAVTHKTVNVDLRSIGGSALTADIDVPEDGGAGIPVTYVPARNTIMLSIALGWAEVLGSSDIFCGVNAVDYSGYPDCRPAFIESFQSLANVATKAGVEGAGIRIHAPLMDMGKGDIVREGMRLGVDFAATVSCYQADSQGRACGHCDACRLRAEGFAKAGVPDPTRYA

SEQ ID NO: 39345 - protein, 227 aa, Luteibacter sp.
  misc_feature (1)..(227): tr|A0A1I0NU85|A0A1I0NU85_9GAMM 7-cyano-7-deazaguanine s ynthase OS=Luteibacter sp. 329MFSha OX=1798239 GN=queC PE=3 SV=1
MNAPNAPRKAVILVSGGMDSAVTIAMAREQGFEVYALSVAYGQRHSSELEASERVSNLLGAVVHKTVHVDLRSIGGSALTADIDVPEEGGDGIPVTYVPARNTIMLSIALGWAEVLGSTDIFCGVNAVDYSGYPDCRPAFIEAFEALANVATKAGVEGAGIRIHAPLMQMGKGDIVREGMRLGVDFAETVSCYQADAQGRACGHCDACRLRAEGFAKAGVPDPTRYV

SEQ ID NO: 39346 - protein, 227 aa, Luteibacter yeojuensis
  misc_feature (1)..(227): tr|A0A0F3KKV3|A0A0F3KKV3_9GAMM 7-cyano-7-deazaguanine s ynthase OS=Luteibacter yeojuensis OX=345309 GN=queC PE= 3 SV=1
MNAPNPTPKAVILVSGGMDSAVTIAMAREQGFEVYALSVAYGQRHSSELEASERVSKLLGAVAHKTVHVDLRSIGGSALTADIDVPEDGGEGIPVTYVPARNTIMLSIALGWAEVLGSNDIFCGVNAVDYSGYPDCRPAFIEAFETLANVATKAGVEGAGIRIHAPLMKMGKGDIVTEGVRLGVDFAETVSCYQADAQGRACGHCDACRLRAEGFAKAGVPDVTRYV

SEQ ID NO: 39347 - protein, 227 aa, Luteibacter yeojuensis
  misc_feature (1)..(227): tr|A0A561GZA5|A0A561GZA5_9GAMM 7-cyano-7-deazaguanine s ynthase OS=Luteibacter yeojuensis OX=345309 GN=queC PE= 3 SV=1
MNTTNTSRKAVILVSGGMDSAVTIAMAREQGFEVYALSVAYGQRHSSELEASARVAKMLGAVTHKTVHVDLRSIGGSALTADIDVPEEGGEGIPVTYVPARNTIMLSIALGWAEVLGSSDIFCGVNAVDYSGYPDCRPAFIESFQALANVATKAGVEGAGIRIHAPLMQMGKGDIVREGMRLGVDFAETVSCYQADAQGRACGHCDACRLRAEGFAKAGVADPTRYA

SEQ ID NO: 39348 - protein, 466 aa, Luteimonas aestuarii
  misc_feature (1)..(466): tr|A0A4R5TY86|A0A4R5TY86_9GAMM 7-cyano-7-deazaguanine s ynthase OS=Luteimonas aestuarii OX=453837 GN=E2F46_0621 5 PE=3 SV=1
MCRWSLPDRNRLRRRIVLVELPTQLHVRYANGRLEVQGDTTRRMSISAQAMIHDLLACVDDRSIDLISIAAGAYAIDRIHRRKVSIKNEAGLRTIPVCFHVADLAYWSQPHVVDQLAELLHFLSGDFWLISFSPHERPAPAVGQTTLDFGPHLKPSRVALYSGGLDSAAGLAASLQSGQRDIMLLTAGHQSAIRRRAMDQIKLLKHVLPQAGSISHASFVLGLERSGRIRDQETTQRSRGFLFCASGAVLASVCGVDVVHVYENGHGAINLPLGGAPLSNGLSTRGAHPTFLAMMTQVASDALERPVRFELPFARVTKAAMIEALVHTPGLVQWAQQSRSCVHTSWREAGVTHCGYCAACIERHQAFVGAGARDLTPYSRPLWEREDAMNDDYFRSYVWQAQRWAEGDLGMRDRLGDHCAPSQLSAPFEDLVLLHQKHAEEVLSVYARHADPSPSGRARQAQLRAA

SEQ ID NO: 39349 - protein, 223 aa, Luteimonas aestuarii
  misc_feature (1)..(223): tr|A0A4R5TIP5|A0A4R5TIP5_9GAMM 7-cyano-7-deazaguanine s ynthase OS=Luteimonas aestuarii OX=453837 GN=queC PE=3 SV=1
MKKKAVVLLSGGMDSAVVFAIAREQGYAVHALSVSYGQRHTSELAAAGRLAQAMGAVAQKVVGVDLRSIGGSALTDDIDVPEAGGSGIPVTYVPARNTIMLSVALGWAEVLGAADIFCGVNAVDYSGYPDCRPEFIAAFERLANLATKAGVEGVGLRIHAPLLHMGKDRIVQEGVRLGVDFAHTVSCYDADAEGRACGRCDACRLRAAGFADAGIPDPTRYVA

SEQ ID NO: 39350 - protein, 243 aa, Luteimonas cucumeris
  misc_feature (1)..(243): tr|A0A562L4Z3|A0A562L4Z3_9GAMM 7-cyano-7-deazaguanine s ynthase OS=Luteimonas cucumeris OX=985012 GN=queC PE=3 SV=1
MPKSPDPSPQSRRNAVVLVSGGMDSAVVLAIARERGHAVHALSVSYGQRHTSELDAAARVANALGAVQHKTVVVDLRTIGGSALTDDIDVPLDTDQHPVGTAAARDDIPVTYVPARNTIMLSVALGWAEVLGASDIYCGVNAVDYSGYPDCRPEFVEAFERLANLATKAGVEGAGLRVQAPLQYMSKADIVREGLRLGVDFAQTVSCYQADAQGRACGHCDACRLRAEGFAAAGVADPTRYVG

SEQ ID NO: 39351 - protein, 222 aa, Luteimonas marina
  misc_feature (1)..(222): tr|A0A5C5U0V2|A0A5C5U0V2_9GAMM 7-cyano-7-deazaguanine s ynthase OS=Luteimonas marina OX=488485 GN=queC PE=3 SV= 1
MKKAVVLVSGGMDSAVVLAIAREQGFAVHALSVSYGQRHTSELEAADRVSRTLGALEHKTVQVDLRAFGGSALTDDIDVPEAGGPGIPVTYVPARNSIMLSLALGWAEVLGANDLFCGVNAVDYSGYPDCRPEFIEAFERLANLATRAGVEGAGIRVHAPLLRMGKADIVREGQRLGVDFAATVSCYRADADGRACGHCDACRLRADGFVAAGIADPTRYVA

SEQ ID NO: 39352 - protein, 224 aa, Luteimonas sp.
  misc_feature (1)..(224): tr|A0A1B3W567|A0A1B3W567_9GAMM 7-cyano-7-deazaguanine s ynthase OS=Luteimonas sp. JM171 OX=1896164 GN=queC PE=3 SV=1
MKNAVVLLSGGMDSAVVLAMARERGFAAHALSVDYGQRHPSELQAAARVARAQGAVAHKVVAVDLRGIGGSALTDDIAVPDGSEHAPGDIPVTYVPARNTIMLSIALGWAEVLGAADIFCGVNAVDYSGYPDCRPEFIAAFQALANLATKAGVEGAGIRVHAPLMALGKDGIVREGVRLGVDFSSTVSCYSADLDGRACGRCDACRLRAQGFAGAGVPDPTRYA

SEQ ID NO: 39353 - protein, 226 aa, Luteimonas sp.
  misc_feature (1)..(226): tr|A0A0H1AMP8|A0A0H1AMP8_9GAMM 7-cyano-7-deazaguanine s ynthase OS=Luteimonas sp. FCS-9 OX=1547516 GN=queC PE=3 SV=1
MKNAVVLLSGGMDSAAVVAIAREQGFAVHALSVRYGQRHTSELDAAARVAAALGAVAHKTVDVDLRAFGGSALTDDIEVPEAGSAGIPVTYVPARNTIMLSLALGWAEVIGAADLFCGVNAVDYSGYPDCRPEFVAAFERLANLATKAGVEGAGIRVHAPLQHMSKADIVREGLRLGVDFGLTVSCYRADAQGRACGHCDACRLRADGFAAAGAADPTHYVPTVAG

SEQ ID NO: 39354 - protein, 225 aa, Luteimonas terrae
  misc_feature (1)..(225): tr|A0A4R5U738|A0A4R5U738_9GAMM 7-cyano-7-deazaguanine s ynthase OS=Luteimonas terrae OX=1530191 GN=queC PE=3 SV =1
MKKAVVLLSGGMDSAAVVAIAQEQGFDVHALSVRYGQRHTSELDAAARVAAAMGVTAHKTVDVDLRSIGGSALTDDIDVPEAGSAGIPVTYVPARNTIMLSLALGWAEVLGAADIFCGVNAVDYSGYPDCRPEFVDAFERLANLATKAGVEGAGISVHAPLQHMGKGDIVREGVRLGVDFGLTVSCYNADAQGLACGHCDACRLRADGFDAAGVPDPTHYAHAPG

SEQ ID NO: 39355 - protein, 222 aa, Luteitalea pratensis
  misc_feature (1)..(222): tr|A0A143PIG0|A0A143PIG0_9BACT 7-cyano-7-deazaguanine s ynthase OS=Luteitalea pratensis OX=1855912 GN=queC_2 PE =3 SV=1
MLCSGGLDSVVLAADLATTAPVQPIYVASGLAWEAQERAMLERALACLPDRTRVAPLHVLDASVRDVYAPTHWSLAGTPPSWDTPDEDVYLVGRNIVLLGKAAVYCALRKIGRIALGPLAGNPFPDATAEFYESMARALSLGLAHPIAIETPYRTLHKSDVIRRGHAIGAPMALTLSCMNPLERIHCGACSKCRERHDAFMEALGQDQTIYAADRGTSTIKG

SEQ ID NO: 39356 - protein, 230 aa, Luteitalea pratensis
  misc_feature (1)..(230): tr|A0A143PHB5|A0A143PHB5_9BACT 7-cyano-7-deazaguanine s ynthase OS=Luteitalea pratensis OX=1855912 GN=queC_1 PE =3 SV=1
MTTVAPAAILLLSGGLDSYTAGAMARADGFRLFALTVRYGQTHVQEVEAARRAAQALGVERHVELDLDLRDIARSALTGASAVPLDRDVAHEHDIPSTYVPARNTIFLSLALAWAETVGASVIVIGVNALDYSGYPDCRPEYIEAFERMGRLATAAGVGGTALRILAPLQHLSKADIVRRGVDLGLDYSLTHSCYAPTPDGRPCGRCDSCQLRARGFAEAGIPDPALERS

SEQ ID NO: 39357 - protein, 248 aa, Lutispora thermophila
  misc_feature (1)..(248): tr|A0A1M6BAX1|A0A1M6BAX1_9CLOT Uncharacterized protein OS=Lutispora thermophila DSM 19022 OX=1122184 GN=SAMN02 745176_00366 PE=4 SV=1
MTLYDFFVKNPKVAVAFSGGVDSSYLLYAAKQYAQKVCAYYVKSQFQPRFELDDVVRLADELKADLKIMNINVLQAPCVSDNPTDRCYYCKKAIFNEIIRVAKSDGFLVLLDGTNASDDADDRPGMKALHELSVFSPLRECGLTKAEIRRLSKEAGLFTWDKPAYACLATRIPTGEKITSEKLEATEAAEDFLFSLGFTDFRVRWQDGNAKIQLLEDQWPLLLEHRKAIMDKLKMYYKSVVLDLEVRG

SEQ ID NO: 39358 - protein, 224 aa, Lyngbya aestuarii
  misc_feature (1)..(224): tr|U7QMA5|U7QMA5_9CYAN 7-cyano-7-deazaguanine synthase OS=Lyngbya aestuarii BL J OX=1348334 GN=queC PE=3 SV=1
MKAVILLSGGLDSSTVLYQAKAEGYECYAISFDYQQRHQRELASAQQIAQSAGVVEHQVVKFDLSLWGGSALTDRKINLPHDRSLNQMSENIPITYVPARNTIFLSFALGYAETVNASRVYIGVNALDYSGYPDCRPDYIAAMQDVFRLGTKQGREGNPITINSPLIHLKKTEIIQLGNRLRVPWEKTWSCYAGEEKACGVCDSCKLRLAAFKELGLTDPIPYV

SEQ ID NO: 39359 - protein, 229 aa, Lyngbya sp.
  misc_feature (1)..(229): tr|A0YPN3|A0YPN3_LYNSP 7-cyano-7-deazaguanine synthase OS=Lyngbya sp. (strain PCC 8106) OX=313612 GN=queC PE=3 SV=1
MKAVILLSGGLDSSTVLYQAKAEGYECYAISFDYQQRHQRELASAQQIAQSAGVVEHQVVKFDLSLWGGSALTDRKIDLPNDRSLNQMSENIPITYVPARNTIFLSFALGYAETVNASRVYIGVNALDYSGYPDCRPDYIAAMQDVFRLGTKQGREGNPILIHSPLIHLKKTEIIQLGNRLRVPWEKTWSCYAGEEKSCGVCDSCKLRLAAFKELGLTDPIPYVEDVLK

SEQ ID NO: 39360 - protein, 488 aa, Lyngbya sp.
  misc_feature (1)..(488): tr|A0YNH9|A0YNH9_LYNSP Uncharacterized protein OS=Lyngb ya sp. (strain PCC 8106) OX=313612 GN=L8106_12405 PE=4 SV=1
MNYAPSRTPKSDKSDRNNYTLNFKPVLNSNGSVEFIDHCENKILTVSFGVDDQDFQYRVRAEFPSIIADIVDLAVAIHVSDRLAFHDLNKKLRHLNIVLPVRHPELLSTEPFYTKLQDLLRWATGSKWVFDFQKRTVSELSVEQQSILLPTVPEGCEVALWSGGLDALAGLYTRLQTSHTVPFMLFGTGSSKSVYARQEKVFQAIIKSFPTHLYLCRVPINFLNSKLLRKNKITRARGVVFTLLGAACAYLMGQRTLSVYENGIGAINLPYRASAVGLDHSRSVHPLTLLMVSDVVSELLGENFRVYNPFLFLTKAQICRALAENQENDLVAITQSCDSRHRKSQQPTQCGYCSSCILRKQALAASKIEDKTRYLVPHGDPPASDPSKHLLNMLAQVETFRALLTSSNKIDLQWEALTREFPILDDIVDRSAGVENLSPAEMRSRLIDLYQRYITEWDIAESQITTGILNKSSNQQTLDRCLTEATHA

SEQ ID NO: 39361 - protein, 219 aa, Lysinibacillus boronitolerans
  misc_feature (1)..(219): tr|A0A0A3IKE5|A0A0A3IKE5_9BACI 7-cyano-7-deazaguanine s ynthase OS=Lysinibacillus boronitolerans JCM 21713 = 10 a = NBRC 103108 OX=1294264 GN=queC PE=3 SV=1
MKKEKAIVVFSGGQDSTTCLFWAKERFEEIEAVTFDYGQRHRLEIDCAKAITEELGIKHHILDMSLLNQLAPNALTRQDIKVKDGENGELPSTFVPGRNLLFLSFAGVLASQVGAKHIVTGVCETDFSGYPDCRDVFIKSLNVTLNLSMDDSFVIDTPLMWLNKAQTWELADQLGALEFVRERTLTCYNGVIADGCGECPACKLRNKGLDEYLSYRKES

SEQ ID NO: 39362 - protein, 221 aa, Lysinibacillus chungkukjangi
  misc_feature (1)..(221): tr|A0A318U4E3|A0A318U4E3_9BACI 7-cyano-7-deazaguanine s ynthase OS=Lysinibacillus chungkukjangi OX=1202712 GN=q ueC PE=3 SV=1
MKQGKAIVVFSGGQDSTTCLFWAKERYAEVEAVTFDYGQRHCLEIECAKEIAKELDVKHHILDMSLLNQLAPNALTRTDIEVADGEDGELPSTFVPGRNLLFMSFAGVLASQVGAKHIVTGVCETDFSGYPDCRDIFIKSLNVTLNLSMDDTFVIETPLMWLNKAQTWELADKLGALDFVRERTLTCYNGVIADGCGECPSCKLRQNGLDEYLTLKKGLKA

SEQ ID NO: 39363 - protein, 219 aa, Lysinibacillus composti
  misc_feature (1)..(219): tr|A0A3N9U747|A0A3N9U747_9BACI 7-cyano-7-deazaguanine s ynthase OS=Lysinibacillus composti OX=720633 GN=queC PE =3 SV=1
MKQEKAVVVFSGGQDSTTCLFWAKERFAEVEAVTFNYGQRHALEIECAKEIAEELGVKHHILDMSLLNQLAPNALTRDDIKVEEGDEGELPSTFVPGRNLLFLSFAGVLASQVGAKHIVTGVCETDFSGYPDCRDIFIKSLNVTLNLSMDDSFVIHTPLMWLNKAETWELADQLQAFEFVREKTLTCYNGVIADGCGECPACKLRKRGLDEYLSVKKED

SEQ ID NO: 39364 - protein, 219 aa, Lysinibacillus fusiformis
  misc_feature (1)..(219): tr|A0A4Y4IID9|A0A4Y4IID9_9BACI 7-cyano-7-deazaguanine s ynthase OS=Lysinibacillus fusiformis OX=28031 GN=queC P E=3 SV=1
MKQEKAIVVFSGGQDSTTCLFWAKERFAEIEAVTFDYGQRHRLEIDCAKLIAEELGIKHHILDMSLLNQLAPNALTRQDIKVEDGKNGELPSTFVPGRNLLFLSFAGVLASQVGAKHIITGVCETDFSGYPDCRDVFIKSLNVTLNLSMDDSFVIDTPLMWLDKAQTWELADQFGALEFVRERTLTCYNGVIADGCGECPACKLRKKGLDDYLSNRKEF

SEQ ID NO: 39365 - protein, 219 aa, Lysinibacillus fusiformis
  misc_feature (1)..(219): tr|D7WZC8|D7WZC8_9BACI 7-cyano-7-deazaguanine synthase OS=Lysinibacillus fusiformis ZC1 OX=714961 GN=queC PE=3 SV=1
MKKEKAIVVFSGGQDSTTCLFWAKERFEEIEAVTFDYGQRHRLEIDCAKVITEELGIKHHILDMSLLNQLAPNALTRQDIKVKDGENGELPSTFVPGRNLLFLSFAGVLASQVGAKHIVTGVCETDFSGYPDCRDVFIKSLNVTLNLSMDDSFVIDTPLMWLNKAQTWELADQLGALEFVRERTLTCYNGVIADGCGECPACKLRNKGLDEYLSYRKES

SEQ ID NO: 39366 - protein, 219 aa, Lysinibacillus halotolerans
  misc_feature (1)..(219): tr|A0A3M8H400|A0A3M8H400_9BACI 7-cyano-7-deazaguanine s ynthase OS=Lysinibacillus halotolerans OX=1368476 GN=qu eC PE=3 SV=1
MKQGKAVVVFSGGQDSTTCLFWAKERFEEVVAVTFDYGQRHRLEIECAKEITKELGISHHILDMSLLNQLAPNALTRGTIPVEDGEGGELPSTFVPGRNLLFLSFAGVLAKQIGAKHIVTGVCETDFSGYPDCRDIFIKSLNVTLNLSMDDTFVIETPLMWLNKAQTWELADQLGALEFVREKTLTCYNGIKADGCGECPACKLRKRGLDEYLNSKVES

SEQ ID NO: 39367 - protein, 191 aa, Lysinibacillus macroides
  misc_feature (1)..(191): tr|A0A0N0CVN3|A0A0N0CVN3_9BACI 7-cyano-7-deazaguanine s ynthase OS=Lysinibacillus macroides OX=33935 GN=ADM90_1 3265 PE=3 SV=1
MTRENDSVLVLASGGIDSTALIEYYASKKYKVSALFFDYGQISRTKELQAVRKVCSYYGIKLEEAQLGFTLKNTSGEFIGRNALFITSAFNFLPNNYSKISIGIHSGTPYYDCSKTFVEDFQRIVDGYFEGTVLIDVPFVEFTKGQIIEYCLQENVPINLTYSCENGYEKNCGKCLSCLDRREFLGKSDLM

SEQ ID NO: 39368 - protein, 221 aa, Lysinibacillus macroides
  misc_feature (1)..(221): tr|A0A0M9DHH2|A0A0M9DHH2_9BACI 7-cyano-7-deazaguanine s ynthase OS=Lysinibacillus macroides OX=33935 GN=queC PE =3 SV=1
MKKQKAIVVFSGGQDSTTCLFWALQQFGEVEAVTFDYGQKHRLEIDCAKNITQQLGVKHHILDISLLNQLAASALTREDIDIEEGQDGGLPSTFVPGRNLLFFSFAGVLASQVGAKHIVTGVCETDFSGYPDCRDQFVKSFNVTLNLAMDEPFVLHTPLMWLDKAQAWALADELDAFDFVREQTLTCYNGIMADGCGECPACKLRQNGLQSYLATKAGQEA

SEQ ID NO: 39369 - protein, 219 aa, Lysinibacillus massiliensis
  misc_feature (1)..(219): tr|A0A0A3JV88|A0A0A3JV88_9BACI 7-cyano-7-deazaguanine s ynthase OS=Lysinibacillus massiliensis 4400831 = CIP 10 8448 = CCUG 49529 OX=1211035 GN=queC PE=3 SV=1
MKQGKAIVVFSGGQDSTTCLFWAKERFSQVEAVTFDYGQRHRLEIECATQIAKELGVKHHILDMSLLNQLAPNALTRNDIEIVDGKDGELPSTFVPGRNLLFLSFAGILAKQVGAKHIVTGVCETDFSGYPDCRDIFIKSLNVTLNLSMDDSFVIETPLMWLNKAETWELADELGALDFVRERTLTCYNGIIADGCGECPACKLRKNGLEEYLGFKQGL

SEQ ID NO: 39370 - protein, 204 aa, Lysinibacillus massiliensis
  misc_feature (1)..(204): tr|A0A0A3ILN4|A0A0A3ILN4_9BACI 7-cyano-7-deazaguanine s ynthase OS=Lysinibacillus massiliensis 4400831 = CIP 10 8448 = CCUG 49529 OX=1211035 GN=CD30_19380 PE=3 SV=1
MSGGLDSTTLAYELLEQNKSILPVFLDYGQHFKEKELNSLLKVIPQKIKPYLRVVNIKDIYKNSSSRMIIEPNLWMENVNSDDLYLPYRNLLFLTIASSIAQSEDITKVYAAFINSNHAKEIDCSKEFFDKLGVLLNDYGSVEICLPYRDLSKAEVIQRGIRLNVPMAITYSCQANSEVPCGVCPNCVDRENAISFISTVNVDN

SEQ ID NO: 39371 - protein, 219 aa, Lysinibacillus odysseyi
  misc_feature (1)..(219): tr|A0A0A3INP7|A0A0A3INP7_9BACI 7-cyano-7-deazaguanine s ynthase OS=Lysinibacillus odysseyi 34hs-1 = NBRC 100172 OX=1220589 GN=queC PE=3 SV=1
MIQEKAIVVFSGGQDSTTCLFWAQKQFAEIEAVTFDYGQRHRLEIECAAEIAKELQIKHHILDMSLLNQLAPSALTRTDMEVRDGKDDELPSSFVPGRNLVFLTFAGILAAQVGAKHIVTGVCETDFSGYPDCRDSFIKSLNVSLNLSMDKTFVIDTPLMWLTKAQTWELADSLGAFEFVRERTLTCYNGIKADGCGQCPACKLRQRGLEEYMNSKKHE

SEQ ID NO: 39372 - protein, 221 aa, Lysinibacillus saudimassiliensis
  misc_feature (1)..(221): tr|A0A078MD57|A0A078MD57_9BACI 7-cyano-7-deazaguanine s ynthase OS=Lysinibacillus saudimassiliensis OX=1461583 GN=queC PE=3 SV=1
MQLNQDKAVVVFSGGQDSTTCLFWALQNFKEVMTLSFDYGQRHQQELAHAEAIAKELGVSFHIMPMHSINELSPNALTKKNIPIAKRDDGLPNTFVPGRNHIFFSFAALYAYAVDARHIITGVSETDFSGYPDCRDNFMKSLNVTLNLAMDADFVLHTPLMWRDKAKVWALSDELGAFDFVREKTLTCYEGIAADGCGECPACVLRREGLVQYLASKDATQ

SEQ ID NO: 39373 - protein, 222 aa, Lysinibacillus sinduriensis
  misc_feature (1)..(222): tr|A0A0A3HVF4|A0A0A3HVF4_9BACI 7-cyano-7-deazaguanine s ynthase OS=Lysinibacillus sinduriensis BLB-1 = JCM 1580 0 OX=1384057 GN=queC PE=3 SV=1
MKQEKAVVVFSGGQDSTTCLFWAKERFSEVEAVTFDYGQRHRLEIECAKEIAKELGVKHHILDMSLLSQLAPNALTRNDISVADGENGELPSTFVPGRNLLFMSFAGVLASQVGAKHIVTGVCETDFSGYPDCRDIFIKSLNVTLNLSMDETFVIETPLMWLNKTETWGLADELGALDFVRERTLTCYNGVIADGCGHCASCKLRQKGLETYLSTQKELSNG

SEQ ID NO: 39374 - protein, 222 aa, Lysinibacillus sp.
  misc_feature (1)..(222): tr|A0A544UPS5|A0A544UPS5_9BACI 7-cyano-7-deazaguanine s ynthase OS=Lysinibacillus sp. SDF0063 OX=2133753 GN=que C PE=3 SV=1
MKKEKAVVVFSGGQDSTTCLFWAKEQFGEVETLTFDYGQRHKLEIECAQQIAAELGVKNSVLDMSLLNQLAPNALTRTDIDITQEEGQLPSTFVDGRNLLFLSFAGVFAKQRGARHLITGVCETDFSGYPDCRDAFIKSLNVTLNLSMDYPFVIHTPLMWLNKAQTWKLADDLGAFTYIRENTLTCYNGIKGDGCCDCPACHLRKAGLDTYLSEKNQPGEKA

SEQ ID NO: 39375 - protein, 219 aa, Lysinibacillus sp.
  misc_feature (1)..(219): tr|A0A4R7U5Q5|A0A4R7U5Q5_9BACI 7-cyano-7-deazaguanine s ynthase OS=Lysinibacillus sp. YR326 OX=1855296 GN=queC PE=3 SV=1
MKQGKAIVVFSGGQDSTTCLFWAKEHFEEVEAVTFDYGQRHRLEIDCAKMIAGELGVKHHILDMSLLNQLAPNALTRQDIKVEDGENGELPSTFVPGRNLLFLSFAGVLASQVGAKHIVTGVCETDFSGYPDCRDVFIKSLNVTLNLSMDDSFVIDTPLMWLNKAQTWELADQFGALEFVREKTLTCYNGVIADGCGECPACQLRNKGLDEYLSYRKES

SEQ ID NO: 39376 - protein, 219 aa, Lysinibacillus sphaericus
  misc_feature (1)..(219): sp|B1HPF6|QUEC_LYSSC 7-cyano-7-deazaguanine synthase OS =Lysinibacillus sphaericus (strain C3-41) OX=444177 GN= queC PE=3 SV=1
MKQEKAIVVFSGGQDSTTCLFWAKERFAEIEAVTFNYGQRHRLEIECAEQIAEELGIKHHILDMTLLNQLAPNALTRQDIKVEDGQNGELPSTFVPGRNLLFLSFAGVLASQIGAKHIVTGVCETDFSGYPDCRDVFIKSLNVTLNLSMDNSFVIDTPLMWLNKAQTWELADQFGALEFVRERTLTCYNGVIADGCGECPACKLRKKGLDEYLSYRKEF

SEQ ID NO: 39377 - protein, 370 aa, Lysinibacillus sphaericus
  misc_feature (1)..(370): tr|A0A2X0XJV9|A0A2X0XJV9_LYSSH NAD synthetase OS=Lysini bacillus sphaericus OX=1421 GN=NCTC7582_02308 PE=4 SV=1
MAKYQICTKCVMDTTDSQIKFDQNGVCNHCQNAEALGKKIWFPNEVGSQKLNAILSEIKENGKNKKYDAIVGLSGGIDSSYIVYKAKEWGLRLLAVHVDGGWNTDISVNNVKTVCEYANVDLKIVTIDWEDMKKMQLAFLKAAVPNQDIPQDHAFFTVLYSYAVENDIKYVLNGSNWETESILPRSWGYNAMDGKHVSDIYKKNGDGIKTNFPIIDLYKVKIYYPYVKKMKIVKPLNLMPYNKEQAMKELIDNTEWRYYGGKHYESVWTKFLQAYYLPTKFNIDKRRAHLSSLIVSNQITREEALAELEKPLYDPNEIEKEKEIIADKLEISIDEFNQLLSIRIGKHSDYYCTGDSLLYKMLFKINKAIK

SEQ ID NO: 39378 - protein, 219 aa, Lysinibacillus xylanilyticus
  misc_feature (1)..(219): tr|A0A2M9Q9L8|A0A2M9Q9L8_9BACI 7-cyano-7-deazaguanine s ynthase OS=Lysinibacillus xylanilyticus OX=582475 GN=qu eC PE=3 SV=1
MKKEKAIVVFSGGQDSTTCLFWAKERFKEVEAVTFDYGQRHRLEIECAKVIAKELGIKHHILDMSLLNQLAPNALTRQDIKVEDGENGELPSTFVPGRNLLFLSFAGVLASQVGAKHIVTGVCETDFSGYPDCRDVFIKSLNVTLNLSMDDSFVIDTPLMWLNKAQTWELADQFGALEFVRERTLTCYNGVIADGCGECPACQLRKKGLDEYLSYRKES

SEQ ID NO: 39379 - protein, 219 aa, Lysinibacillus xylanilyticus
  misc_feature (1)..(219): tr|A0A0K9FD90|A0A0K9FD90_9BACI 7-cyano-7-deazaguanine s ynthase OS=Lysinibacillus xylanilyticus OX=582475 GN=qu eC PE=3 SV=1
MKQEKAIVVFSGGQDSTTCLFWAKERFEEVEAVTFDYGQRHRLEIECAKVIAGELGIKHHILDMSLLNQLAPNALTRQDIKVEDGENGELPSTFVPGRNLLFLSFAGVLASQVGAKHIVTGVCETDFSGYPDCRDVFIKSLNVTLNLSMDDSFVIDTPLMWLNKAQTWELADQFGALEFVRERTLTCYNGVIADGCGECPACQLRKKGLDEYLSYRKES

SEQ ID NO: 39380 - protein, 231 aa, Lysobacter aestuarii
  misc_feature (1)..(231): tr|A0A508ARV8|A0A508ARV8_9GAMM 7-cyano-7-deazaguanine s ynthase OS=Lysobacter aestuarii OX=1706195 GN=queC PE=3 SV=1
MKKAVVLVSGGMDSAVVIAIAREQGYAVHALSVRYGQRHTSELDAAERVARDLGAVEHKTVSVDLRSIGGSALTDDIEVPTDADGHPVGDAAPEGHIPVTYVPARNTIMLSMALGWAEVIGAADIFCGVNAVDYSGYPDCRPAFIEAFQVLANLATKAGVEGAGLQVHAPLQHMSKADIVREGLRLGVDFSTTVSCYQADADGRACGHCDACRLRAEGFAAADAVDTTRYS

SEQ ID NO: 39381 - protein, 221 aa, Lysobacter antibioticus
  misc_feature (1)..(221): tr|A0A0S2F7B4|A0A0S2F7B4_9GAMM 7-cyano-7-deazaguanine s ynthase OS=Lysobacter antibioticus OX=84531 GN=queC PE= 3 SV=1
MDSAVVIAIAREQGYAVHALSVRYGQRHTSELDAAARLADSLGAVAHKTVSVDLRSIGGSALTDEAISVPLDNDGHAIGTAAAKDDIPVTYVPARNTIMLSIALGWAEVLGANDIFCGVNAVDYSGYPDCRPEFVEAFERLANLATKAGVEGAGLRVQAPLQFMSKADIVREGVRLGVDFAETVSCYQADADGRACGHCDACRLRAEGFSAAGVADPTRYV

SEQ ID NO: 39382 - protein, 225 aa, Lysobacter arseniciresistens
  misc_feature (1)..(225): tr|A0A0A0F099|A0A0A0F099_9GAMM 7-cyano-7-deazaguanine s ynthase OS=Lysobacter arseniciresistens ZS79 OX=913325 GN=queC PE=3 SV=1
MKNAVVLVSGGMDSAVVLAIAREQGFAVHALSVRYGQRHTSELDAADRVARALGAVAHKTVNVDLRSIGGSALTDEIDVPLDHVPAAEEIPVTYVPARNTIMLSVALGWAEVLGAADIFCGVNAVDYSGYPDCRPEFIEAFERLANLATRAGVEGAGIRVHAPLQHMSKADIAREGVRLGVDFADTVSCYQADADGRACGHCDACRLRAEGFAAAGIADPTRYMR

SEQ ID NO: 39383 - protein, 232 aa, Lysobacter capsici
  misc_feature (1)..(232): tr|A0A108UCN2|A0A108UCN2_9GAMM 7-cyano-7-deazaguanine s ynthase OS=Lysobacter capsici AZ78 OX=1444315 GN=queC P E=3 SV=1
MKKAVVLVSGGMDSAVVIAIAREQGFAVHALSVRYGQRHTSELDAAALVAQSLGAVAHKTVSVDLRSIGGSALTDESISVPLDNDGHAIGAAAAKDDIPVTYVPARNTIMLSIALGWAEVLGANDIFCGVNAVDYSGYPDCRPEFVEAFERLANLATKAGVEGAGLRVQAPLQFMSKADIVREGQRLGVDFSQTVSCYQADDAGRACGHCDACRLRAEGFNAAGVADPTRYV

SEQ ID NO: 39384 - protein, 232 aa, Lysobacter capsici; identical to SEQ ID NO: 39383
  misc_feature (1)..(232): tr|A0A0S2FVB5|A0A0S2FVB5_9GAMM 7-cyano-7-deazaguanine s ynthase OS=Lysobacter capsici OX=435897 GN=queC PE=3 SV =1

SEQ ID NO: 39385 - protein, 441 aa, Lysobacter concretionis
  misc_feature (1)..(441): tr|A0A0A0EPB6|A0A0A0EPB6_9GAMM 7-cyano-7-deazaguanine s ynthase OS=Lysobacter concretionis Ko07 = DSM 16239 OX= 1122185 GN=N792_03875 PE=3 SV=1
MPTDLSSIVVRYEPGRVALSGAVEQDVTITAQSMLNHLLETASQRSIDLVAIATGIYAIDRACKRKLTRHNECGVRTLRVVFEVSDLAFWQQPDIVEQLTDILCVLSGDTWLVSFAKRSEPHQTTAVQRSLDLQQPLPTRVALYSGGLDSAAGLANQLVANDQTYMLLTVGHHVAVRSKCLDQVKKLRQILRTPMLHHASFMVRFDGGVAGKMKSQEKSQRARGFLFCAAAALLADACDIEDIELFENGVGAINLPLTEGGLTDGLSTRGAHPGFLAKMGALVSAVLETPLRFSLPFLSATKAEMVQPLVARPLLAEWLQQSCSCIHTSLRVRGKRHCGHCPACIERRQAFRGGGIEEGAKDYEVDLFSGGVPKDFAYFMSYLENARWWSTGHARVKSRLARHCILTDSTHVPIDQIESMLVRHANESLLTYGGVELLEAA

SEQ ID NO: 39386 - protein, 224 aa, Lysobacter concretionis
  misc_feature (1)..(224): tr|A0A0A0ERG2|A0A0A0ERG2_9GAMM 7-cyano-7-deazaguanine s ynthase OS=Lysobacter concretionis Ko07 = DSM 16239 OX= 1122185 GN=queC PE=3 SV=1
MKNAVVLVSGGMDSAVVIAMAREQGFAVHALSLDYGQRHTSELAAADRVAKALGVVAHKTVSVDLRSIGGSALTDEIDVPLDEASGADAIPVTYVPARNTIMLSVALGWAEVLGAADLFCGVNAVDYSGYPDCRPEFIAAFEKLANLATKAGVEGAGIRVHAPLQFMSKADIVREGLRLGVDFADTVSCYKADDEGRACGHCDACRLRAEGFAGAGIPDPTRYA

SEQ ID NO: 39387 - protein, 231 aa, Lysobacter daejeonensis
  misc_feature (1)..(231): tr|A0A0A0EVU7|A0A0A0EVU7_9GAMM 7-cyano-7-deazaguanine s ynthase OS=Lysobacter daejeonensis GH1-9 OX=1385517 GN= queC PE=3 SV=1
MKKAVVLVSGGMDSAVVIAIAREQGFAVHALSVSYGQRHTSELDAADRVSKALGAVAHKTVNVDLRSIGGSALTDDIEVPLDTDGHPVGQAAAKDAIPVTYVPARNTIMLSIALGWAEVLGANDIFCGVNAVDYSGYPDCRPEFVAAFERLANLATKAGVEGAGLRVHAPLQFMSKADIVREGVRLGVDFAQTVSCYKADEAGRACGHCDACRLRAEGFAVAGVVDPTRYV

SEQ ID NO: 39388 - protein, 213 aa, Lysobacter defluvii
  misc_feature (1)..(213): tr|A0A0A0M706|A0A0A0M706_9GAMM 7-cyano-7-deazaguanine s ynthase OS=Lysobacter defluvii IMMIB APB-9 = DSM 18482 OX=1385515 GN=queC PE=3 SV=1
MDSAVVLAMARAQGFRCHALSVRYGQRHTSELEAAARVARELGAVEHKVVDVDLRSIGGSALTADIDVPTSEEAAADPIPVTYVPARNTIMLSVALGWAEVLGAADIFCGVNAVDYSGYPDCRPEFIEAFERLANLATRAGVEGAGIRIHAPLQHMGKDAIVSEGLRLGVDFSHTVSCYQADPDGRACRVCDACRLRAAGFERAGAVDSTRYV

SEQ ID NO: 39389 - protein, 267 aa, Lysobacter dokdonensis
  misc_feature (1)..(267): tr|A0A0A2WEX2|A0A0A2WEX2_9GAMM Uncharacterized protein OS=Lysobacter dokdonensis DS-58 OX=1300345 GN=LF41_279 PE=4 SV=1
MQHVAPVELFWTSGWDSTFRLLQLLLDHRVPVAPIYVVDPTRGSAAIERLSLERLRDALFDAHPHTRVLLQPVREVPMSDLAQDAAVTAAFHRIASHVPLGDQYEWLARYCKQYGVRGVELSCEHTYQGPHAVLHSIAERVIDPHGLDNWRVPPEYADEDVQAIFGAYTMPLFEMTKEQTAVLAREKGWLDLLGLTWFCHRPTGNDQPCGLCNPCMYAIKQGFGWRISPTRRAASAVYKRTLYPVRRMARRMLMRSHAGPTPLPSAH

SEQ ID NO: 39390 - protein, 225 aa, Lysobacter dokdonensis
  misc_feature (1)..(225): tr|A0A0A2WKK5|A0A0A2WKK5_9GAMM 7-cyano-7-deazaguanine s ynthase OS=Lysobacter dokdonensis DS-58 OX=1300345 GN=q ueC PE=3 SV=1
MNNGNKRAVILVSGGMDSAVVLAIAREQGYEPYALSVRYGQRHTSELDAADRVSNALGAAHKTVVVDLRSIGGSALTDDIDVPEAGGPGIPVTYVPARNTIMLSVALGWAEVLGAADLFCGVNAVDYSGYPDCRPEFIEAFEKLANVATKAGVEGAGIRVHAPLLRMSKADIVREGNRLGVDFAQTVSCYQADAQGRACRHCDACRLRAEGFAAAGVEDPTRYVG

SEQ ID NO: 39391 - protein, 232 aa, Lysobacter enzymogenes
  misc_feature (1)..(232): tr|A0A1J1E332|A0A1J1E332_LYSEN 7-cyano-7-deazaguanine s ynthase OS=Lysobacter enzymogenes OX=69 GN=queC PE=3 SV =1
MKKAVVLVSGGMDSAVVAAIAREQGFLVHALSVRYGQRHTSELDAAARIAESIGAAAHKTVSVDLRSIGGSALTDESIQVPLDDDGHAIGQDAAKDAIPVTYVPARNTIMLSIALGWAEVLGANDIFCGVNAVDYSGYPDCRPEFVEAFERLANLATKAGVEGAGLRVVAPLQFLSKADIVREGVRLGVDFGQTVSCYKADDAGRACGHCDACRLRAEGFHAAGVADPTRYV

SEQ ID NO: 39392 - protein, 232 aa, Lysobacter enzymogenes
  misc_feature (1)..(232): tr|A0A3N2RJ96|A0A3N2RJ96_LYSEN 7-cyano-7-deazaguanine s ynthase OS=Lysobacter enzymogenes OX=69 GN=queC PE=3 SV =1
MKKAVVLVSGGMDSAVVAAIAREQGFVVHALSVRYGQRHTSELDAAARIAESIGAAAHKTVSVDLRSIGGSALTDESIQVPLDDDGHPVGQDAAKDAIPVTYVPARNTIMLSIALGWAEVLGANDIFCGVNAVDYSGYPDCRPEFVEAFERLANLATKAGVEGAGLRVVAPLQFLSKADIVREGVRLGVDFGQTVSCYKADDTGRACGHCDACRLRAEGFHAAGVADPTRYV

SEQ ID NO: 39393 - protein, 232 aa, Lysobacter gummosus
  misc_feature (1)..(232): tr|A0A0S2GAS3|A0A0S2GAS3_9GAMM 7-cyano-7-deazaguanine s ynthase OS=Lysobacter gummosus OX=262324 GN=queC PE=3 S V=1
MKNAVVLVSGGMDSAVVIAIAREQGFAVHALSVRYGQRHTSELDAAARVAVSLGAVAHKTVSVDLRSIGGSALTDETISVPLDNDGHAIGAAAAKDDIPVTYVPARNTIMLSIALGWAEVLGANDIFCGVNAVDYSGYPDCRPEFVEAFERLANLATKAGVEGAGLRVQAPLQFMSKADIVREGLRLGVDFSQTVSCYQADDAGRACGHCDACRLRAEGFNAAGVADPTHYV

SEQ ID NO: 39394 - protein, 229 aa, Lysobacter lycopersici
  misc_feature (1)..(229): tr|A0A516V7S7|A0A516V7S7_9GAMM 7-cyano-7-deazaguanine s ynthase OS=Lysobacter lycopersici OX=1324796 GN=queC PE =3 SV=1
MSAHKPAVVLVSGGMDSAVVLAIAREAGYDVHALSVRYGQRHTSELDAADRVSTALGAVAHKTVHVDLRSIGGSALTDDIDVPTDDDGHVIGQGIPSTYVPARNTIMLSVALGWAEVLGATDLFCGVNAVDYSGYPDCRPEFIAGFEALANLATKAGVEGSRFRVHAPLMRMSKADIVREGLRLGVDFSQTVSCYQADADGRACGHCDACRLRAQGFAEAGVADPTRYR

SEQ ID NO: 39395 - protein, 237 aa, Lysobacter maris
  misc_feature (1)..(237): tr|A0A508ATI9|A0A508ATI9_9GAMM 7-cyano-7-deazaguanine s ynthase OS=Lysobacter maris OX=1605891 GN=queC PE=3 SV= 1
MKKAVVLVSGGMDSAVVIAIAREQGYAVHALSVRYGQRHTSELDAADRVARSLGAVAHKTVDVDLRSIGGSALTDDIEVPTDADGHPVGEAAQADPAYRDLIPVTYVPARNTIMLSMALGWAEVLGAADIFCGVNAVDYSGYPDCRPEFIEAFQALANLATRAGVEGAGIRVHAPLQHLSKADIVREGLRLGVDFSQTVSCYQADAEGRACGHCDACRLRAEGFAAAAAADTTRYRD

SEQ ID NO: 39396 - protein, 226 aa, Lysobacter maris
  misc_feature (1)..(226): tr|A0A2U9T6L9|A0A2U9T6L9_9GAMM 7-cyano-7-deazaguanine s ynthase OS=Lysobacter maris OX=1605891 GN=queC PE=3 SV= 1
MDSAVVIAIAREQGYAVHALSVRYGQRHTSELDAADRVARSLGAVAHKTVDVDLRSIGGSALTDDIEVPTDADGHPVGEAAQADPAYRDLIPVTYVPARNTIMLSMALGWAEVLGAADIFCGVNAVDYSGYPDCRPEFIEAFQALANLATRAGVEGAGIRVHAPLQHLSKADIVREGLRLGVDFSQTVSCYQADAEGRACGHCDACRLRAEGFAAAGAADTTRYRD

SEQ ID NO: 39397 - protein, 234 aa, Lysobacter pythonis
  misc_feature (1)..(234): tr|A0A3M2HYJ8|A0A3M2HYJ8_9GAMM 7-cyano-7-deazaguanine s ynthase OS=Lysobacter pythonis OX=2483112 GN=queC PE=3 SV=1
MKTTMPKRAVVLVSGGMDSAVVAAIARARGFEVFALSVAYGQRHESELAAAERVAAMTGCARHKTVDVDLRAIGGSALTDEVIPVPTDDDGHEIGGDAIPSTYVPARNTIMLSVALGWAEVLGARDIFCGVNAVDYSGYPDCRPVFIEAFERLANLATKAGVEEGGIRIHAPLMRMTKGEIVREGVRLGVDFSRTVSCYQADADGRACGHCDACRLRALGFVEAGIADNTRYIV

SEQ ID NO: 39398 - protein, 231 aa, Lysobacter ruishenii
  misc_feature (1)..(231): tr|A0A562M2S1|A0A562M2S1_9GAMM 7-cyano-7-deazaguanine s ynthase OS=Lysobacter ruishenii OX=686800 GN=queC PE=3 SV=1
MKKAVVLVSGGMDSAVVIAIAREQGFAVHALSVSYGQRHTSELDAAGRVSKSLGAVAHKTVNVDLRSIGGSALTDDIEVPLDTDGHPVGQAAAKDAIPVTYVPARNTIMLSIALGWAEVLGANDIFCGVNAVDYSGYPDCRPEFVSAFERLANLATKAGVEGAGLRVHAPLQFMSKADIVREGERLGVDFAQTVSCYKADEAGRACGHCDACRLRAEGFAAAGVADPTRYA

SEQ ID NO: 39399 - protein, 441 aa, Lysobacter ruishenii
  misc_feature (1)..(441): tr|A0A562LP36|A0A562LP36_9GAMM 7-cyano-7-deazaguanine s ynthase OS=Lysobacter ruishenii OX=686800 GN=IP93_02016 PE=3 SV=1
MSADPTTIRVRYDAGHVMLSGAVEQELVITAQTMLNQLLETASQRSTDSIAIATGAYAIDRVIKRTSDINNECGIRTFRVVFEVADAAFWSAPDITEMLTDILWHLTGDTWLVSFSQRDMLYQTSSVQRLLGLKDPRPTRAALYSGGLDSAAGLANQVISTDETYILLTVGHHPSIRSSSLHQVATLRNLLHPKPLHHASFIVKFNGGVAGKMKAQETSQRVRGLLFYTTAAVLAEACGIEEIEVFENGVGAINLPLTEGGMVDGLSTRGAHPGVLAKIGQLLSKTLDKPIRFSLPFLHSTKAEMLRTLADRAHLPDWLKLSRSCIHSSLRISGKRHCGQCAACIERRQAFRAAGITEDIRDYDFDLFGGATPKEPGYLLTYLENARWWITEHPRVRSRLERHRILSDMTQLPLASIESLLMRHAKESLDTYGDLDLRDAA

SEQ ID NO: 39400 - protein, 227 aa, Lysobacter silvestris
  misc_feature (1)..(227): tr|A0A2K1Q2T3|A0A2K1Q2T3_9GAMM 7-cyano-7-deazaguanine s ynthase OS=Lysobacter silvestris OX=1645665 GN=queC PE= 3 SV=1
MTPAVILVSGGMDSAVVLALAREQGFAAHALSVRYGQRHLSELDAAQRVAKVLGAVEHKIVEIDLRAIGGSALTSDIDVPTDADGHEIGTGDIPVTYVPARNTLMLSAALGWAEVLGANDIFCGVNAVDYSGYPDCRPEFIAAFEALANLATRAGVEGTRFHVHAPLMRMTKADIAREGERLGVDFAQTVSCYQADEAGRACGHCDACLLRARGFADAGLADPTRYR

SEQ ID NO: 39401 - protein, 201 aa, Lysobacter silvestris
  misc_feature (1)..(201): tr|A0A2K1Q1D5|A0A2K1Q1D5_9GAMM 7-cyano-7-deazaguanine s ynthase OS=Lysobacter silvestris OX=1645665 GN=Lysil_04 88 PE=3 SV=1
MKTALLLSGGMDSIALAWWKRPKQAFTVDYGQLAATAEIDASVAICRVLDIPHTVIHFDAKALGSGDMAGTLPDPNAPASDWWPYRNQLLVTLVAMKAVASGTQRLWMGAVASDGVHKDGTPEFFMHISRLLSYQEGGIVVEAPAIGLRTVDLVRKSNIPRSMLAWAHSCHKADVPCCDCRGCNKYFEVLQELDRDVATGD

SEQ ID NO: 39402 - protein, 232 aa, Lysobacter soli
  misc_feature (1)..(232): tr|A0A3D8V9A1|A0A3D8V9A1_9GAMM 7-cyano-7-deazaguanine s ynthase OS=Lysobacter soli OX=453783 GN=queC PE=3 SV=1
MKKAVVLVSGGMDSAVVVAIARAQGFDVHALSVRYGQRHTSELDAAQRVADSLGAVAHKTVNVDLRSIGGSALTDETITVPTDADGHAVGQDAPKDAIPVTYVPARNTIMLSVALGWAEVLGANDLFCGVNAVDYSGYPDCRPEFVEAFEKLANLATKAGVEGAGIRVHAPLQFMSKADIVREGVRLGVDFAQTVSCYQADDEGRACGHCDACRLRAEGFAAAGVADPTRYV

SEQ ID NO: 39403 - protein, 239 aa, Lysobacter sp.
  misc_feature (1)..(239): tr|A0A3M8SY81|A0A3M8SY81_9GAMM 7-cyano-7-deazaguanine s ynthase OS=Lysobacter sp. ZS60 OX=1327343 GN=queC PE=3 SV=1
MKPAVVLVSGGMDSAVVVAIAREMGFAVHALSVRYGQRHTSELEAADRVATALGAVAHKTVNVDLRSIGGSALTDESISVPTDEDGHAIGSDAVKDAIPVTYVPARNTIMLSVALGWAEVLGAADIFCGVNAVDYSGYPDCRPEFVAAFEALANLATKAGVEGAGLRVHAPLQHLSKADIVREGLRLGVDFAQTVSCYQADADGRACGHCDACRLRAEGFAAAGVPDPTRYVNPPARQG

SEQ ID NO: 39404 - protein, 213 aa, Lysobacter sp.
  misc_feature (1)..(213): tr|A0A345ZP18|A0A345ZP18_9GAMM 7-cyano-7-deazaguanine s ynthase OS=Lysobacter sp. TY2-98 OX=2290922 GN=queC PE= 3 SV=1
MDSAVVVAMAKAQGFDVYALSVRYGQRHTSELDAAARVATSLGAAAHKTVVVDLGTIGGSALTDASIDVPTAGDTGDTIPVTYVPARNTIMLSIALGWAEVLGANDIFCGVNAVDYSGYPDCRPEFVAAFERLANLATKAGVEGAGLRVHAPLQFMSKADIAREGMRLGVDFGLTVSCYQADADGRACGACDACRLRAQGFEAAGVPDPTRYA

SEQ ID NO: 39405 - protein, 225 aa, Lysobacter spongiicola
  misc_feature (1)..(225): tr|A0A1T4QXV1|A0A1T4QXV1_9GAMM 7-cyano-7-deazaguanine s ynthase OS=Lysobacter spongiicola DSM 21749 OX=1122188 GN=queC PE=3 SV=1
MKNAVVLVSGGMDSAVVLAIARERGFAVHALSVRYGQRHTSELEAAARVARAMGAVAHKTVGVDLGSIGGSALTDAGIDVPMDQAPGDGEIPVTYVPARNTIMLSIALGWAEVLGAADIFCGVNAVDYSGYPDCRPEFIEAFERLANLATRAGVEGAGIRVHAPLQHLGKDDIVREGVRLGVDFADTVSCYAADAAGKACGHCDACRLRAAGFDAAGVADPTRYA

SEQ ID NO: 39406 - protein, 232 aa, Lysobacter tolerans
  misc_feature (1)..(232): tr|A0A1N6NHX2|A0A1N6NHX2_9GAMM 7-cyano-7-deazaguanine s ynthase OS=Lysobacter tolerans OX=1604334 GN=queC PE=3 SV=1
MSEVSKRAVVLVSGGMDSAVVAAIARAEGFDVYALSVAYGQRHQSELAAAQRVAVMTGATQHKTVDVDLRSIGGSALTDVIDVPTDEDGHKIGTGDIPSTYVPARNTIMLSVALGWAEVLGAKDIFCGVNAVDYSGYPDCRPAFIEAFERLANLATKTGVEEGGLRVQAPLMSMTKADIVREGVRLGVDFAQTVSCYQADAEGRACGHCDACLLRAQGFDEAGIADNTRYIG

SEQ ID NO: 39407 - protein, 222 aa, Macrococcus bohemicus
  misc_feature (1)..(222): tr|A0A4R5Y044|A0A4R5Y044_9STAP 7-cyano-7-deazaguanine s ynthase OS=Macrococcus bohemicus OX=1903056 GN=queC PE= 3 SV=1
MEKQLNNNKALVVFSGGQDSTTCLFWAMERYSDVEVVTFNYGQRHALEIDVAKQIANEHGIKHHILDMSLLTQLSPNALTNHNAIITDDGEVPNTFVPARNLLFMSFAAALAYQIEAKHIITGVCETDFSGYPDCRDNFIKSLNVTINLSMDVNFEIHTPLMWLDKKETWALADTLGKLDYVRNKTLTCYEGIAADGCGECPSCKLRNKGLNDYLNEKEVLS

SEQ ID NO: 39408 - protein, 222 aa, Macrococcus bohemicus
  misc_feature (1)..(222): tr|A0A328A7M8|A0A328A7M8_9STAP 7-cyano-7-deazaguanine s ynthase OS=Macrococcus bohemicus OX=1903056 GN=queC PE= 3 SV=1
MEKQLNNNKALVVFSGGQDSTTCLFWAMERYSDVEVVTFNYGQRHALEIDVAKQIANEQGIKHHILDMSLLTQLSPNALTSHDVAITHDNNVPNTFVPARNLLFMSFAAALAYQIEAKHIITGVCETDFSGYPDCRDNFIKSLNVTINLSMDVNFEIHTPLMWLNKKETWALADALGKLDYVRNKTLTCYEGIPADGCGECPSCILRNKGLKDYLNEKEVLS

SEQ ID NO: 39409 - protein, 218 aa, Macrococcus bovicus
  misc_feature (1)..(218): tr|A0A4R6C159|A0A4R6C159_9STAP 7-cyano-7-deazaguanine s ynthase OS=Macrococcus bovicus OX=69968 GN=queC PE=3 SV =1
MKLNNDKALVVFSGGQDSTTCMFHALKHYQEVELVTFSYGQRHALEIEVATNIAAEQGLKHHVLDMSLLSQLSPNALTDHSMAIEDGDIPNTFVPARNLLFMSFAAALAYQIGAKHIITGVCETDFSGYPDCRDIFIKSLNVTVNLAMDEDFVIHTPLMWLDKKETWQLADELGQLDYVRFKTLTCYEGIMADGCGECPSCQLRKAGLEAYLAERGTK

SEQ ID NO: 39410 - protein, 218 aa, Macrococcus brunensis
  misc_feature (1)..(218): tr|A0A4R6BGL8|A0A4R6BGL8_9STAP 7-cyano-7-deazaguanine s ynthase OS=Macrococcus brunensis OX=198483 GN=queC PE=3 SV=1
MKLNNDKALVVFSGGQDSTTCMFHALKHYKEVELVTFNYGQRHALEITVAQNIAEEQGLKHHVLDMSLLSQLSPNALTDHTMAIEEGNIPNTFVPARNLLFMSFAAALAYQIGAKHIITGVCETDFSGYPDCRDIFIKSLNVTVNLAMDENFVIHTPLMWLDKKETWQLADELGQLDYVRNNTLTCYEGIMADGCGECPSCQLRNAGFTAYLAERGAK

SEQ ID NO: 39411 - protein, 222 aa, Macrococcus canis
  misc_feature (1)..(222): tr|A0A4P9CHI6|A0A4P9CHI6_9STAP 7-cyano-7-deazaguanine s ynthase OS=Macrococcus canis OX=1855823 GN=queC PE=3 SV =1
MKQLNSNKALVVFSGGQDSTTCMFYAMHHYDEVELVTFNYGQRHALEIDIAKQIAEEQNLKHHVLDMSLLSQLSPNALTHHDIEIEDDDIPNTFVPARNLLFMSFAAALAYQINAQHIITGVCETDFSGYPDCRDNFIKSLNVTINLSMDLNFEIHTPLMWLDKKETWALADTLGQLDYVRNKTLTCYNGIPADGCGECPSCKLRNNGLTQYLQEKESGEIK

SEQ ID NO: 39412 - protein, 221 aa, Macrococcus canis
  misc_feature (1)..(221): tr|A0A4R6C5Y4|A0A4R6C5Y4_9STAP 7-cyano-7-deazaguanine s ynthase OS=Macrococcus canis OX=1855823 GN=queC PE=3 SV =1
MKKLNSNKALVVFSGGQDSTTCMFYAMHHYDEVELVTFNYGQRHALEIDIAKQIAVEQGLKHHVLDMSLLSQLSPNALTHHDFQIEGDDIPNTFVPARNLLFMSFAAALAYQINAKHIITGVCETDFSGYPDCRDNFIKSLNVTINLSMDLNFEIHTPLMWLDKKETWSLADTLGQLDYVRNKTLTCYNGVPADGCGECPSCKLRNNGLNQYLQEKESGDL

SEQ ID NO: 39413 - protein, 218 aa, Macrococcus carouselicus
  misc_feature (1)..(218): tr|A0A4R6BPI8|A0A4R6BPI8_9STAP 7-cyano-7-deazaguanine s ynthase OS=Macrococcus carouselicus OX=69969 GN=queC PE =3 SV=1
MNLNPDKALVVFSGGQDSTTCMFHALKHYKEVEVVTFNYGQRHALEIEVAKKIADEQGLKHHILDMSLLSQLAPNALTDHTLEIEGGDIPNTFVPARNLLFMSFAAALAYQIEAKHIITGVCETDFSGYPDCRDIFIKSLNVTVNLAMDQNFVIHTPLMWLDKKETWQLADELGQLDYIRNNTLTCYKGIIADGCGECPSCQLRKTGLEAYLAERGTK

SEQ ID NO: 39414 - protein, 222 aa, Macrococcus caseolyticus
  misc_feature (1)..(222): tr|A0A3B0F3K7|A0A3B0F3K7_9STAP 7-cyano-7-deazaguanine s ynthase OS=Macrococcus caseolyticus OX=69966 GN=queC PE =3 SV=1
MKQLNSNKALVVFSGGQDSTTCMFYAMHHYDEVELVTFNYGQRHALEIDIAKQIAEEQGLKHHVLDMSLLSQLSPNALTHHDLTIEDNDIPNTFVPARNLLFISFAAALAYQINAKHIITGVCETDFSGYPDCRDNFIKSLNVTINLSMDLNFEIHTPLMWLDKKETWALADTLGQLDYVRNKTLTCYNGIPADGCGECPSCKLRNNGLNQYLQEKESGDLK

SEQ ID NO: 39415 - protein, 222 aa, Macrococcus caseolyticus
  misc_feature (1)..(222): tr|B9EAB1|B9EAB1_MACCJ 7-cyano-7-deazaguanine synthase OS=Macrococcus caseolyticus (strain JCSC5402) OX=458233 GN=queC PE=3 SV=1
MKQLNSNKALVVFSGGQDSTTCMFYAMHHYDEVELVTFNYGQRHALEIDIAKQIAEEQGLKHHVLDMSLLSQLSPNALTHHDLTIENNDIPNTFVPARNLLFMSFAAALAYQINAKHIITGVCETDFSGYPDCRDNFIKSLNVTINLSMDLNFEIHTPLMWLDKKETWALADTLGQLDYIRNKTLTCYNGIPADGCGECPSCKLRNNGLNQYLQEKESGDLK

SEQ ID NO: 39416 - protein, 222 aa, Macrococcus epidermidis
  misc_feature (1)..(222): tr|A0A327ZYG7|A0A327ZYG7_9STAP 7-cyano-7-deazaguanine s ynthase OS=Macrococcus epidermidis OX=1902580 GN=queC P E=3 SV=1
MEKQLNNNKALVVFSGGQDSTTCLFWAMERYSDVEVVTFNYGQRHALEIDIAKQVANEQGIKHHILDLSLLSQLSPNALTHHNVAITHDNNVPNTFVPARNLLFMSFAAALAYQIEAKHIITGVCETDFSGYPDCRDNFIKSLNVTINLSMDVNFEIHTPLMWLDKKETWALADALGKLDYVRNKTLTCYEGIPADGCGECPSCKLRNKGLNDYLNEKEVLS

SEQ ID NO: 39417 - protein, 222 aa, Macrococcus goetzii
  misc_feature (1)..(222): tr|A0A395G8W0|A0A395G8W0_9STAP 7-cyano-7-deazaguanine s ynthase OS=Macrococcus goetzii OX=1891097 GN=queC PE=3 SV=1
MEKQLNSNKALVVFSGGQDSTTCLFWAMERYSDVEVVTFNYGQRHALEIDIAKQIANEQGIKHHILDMSLLSQLSPNALTNHDVAITHDNNVPNTFVPARNLLFMSFAAALAYQIEAKHIITGVCETDFSGYPDCRDNFIKSLNVTINLSMDVNFEIHTPLMWLNKKETWALADALGKLDYVRNKTLTCYEGIPADGCGECPSCKLRNKGLNDYLNEKEVLS

SEQ ID NO: 39418 - protein, 222 aa, Macrococcus goetzii
  misc_feature (1)..(222): tr|A0A4R6CEH4|A0A4R6CEH4_9STAP 7-cyano-7-deazaguanine s ynthase OS=Macrococcus goetzii OX=1891097 GN=queC PE=3 SV=1
MEKQLNNNKALVVFSGGQDSTTCLFWAMERYSDVEVVTFNYGQRHALEIDIAKQIANEQGIKHHILDMSLLSQLSPNALTNHDVAITHDNNVPNTFVPARNLLFMSFAAALAYQIEAKHIITGVCETDFSGYPDCRDNFIKSLNVTINLSMDVNFEIHTPLMWLNKKETWALADALSKLDYVRNKTLTCYEGIPADGCGECPSCKLRNKGLNDYLNEKEVLS

SEQ ID NO: 39419 - protein, 221 aa, Macrococcus hajekii
  misc_feature (1)..(221): tr|A0A4R6BIZ4|A0A4R6BIZ4_9STAP 7-cyano-7-deazaguanine s ynthase OS=Macrococcus hajekii OX=198482 GN=queC PE=3 S V=1
MINMNLKSNKALVVFSGGQDSTTCLFHALEHYDEVELVTFNYGQRHALEIKVAKSIAKEQGLKHHVLDMSLLSQLAPNALTDHHMQIEDDEIPNTFVPARNLLFMSFAAALAYQIEAKHIITGVCETDFSGYPDCRDIFIKSLNVTINLSMDQDFVIHTPLMWLDKKQTWALADSLGQLDYIRNNTLTCYEGIMTDGCGECPSCKLRNAGLKAYLTERGAR

SEQ ID NO: 39420 - protein, 221 aa, Macrococcus lamae
  misc_feature (1)..(221): tr|A0A4V3BFC6|A0A4V3BFC6_9STAP 7-cyano-7-deazaguanine s ynthase OS=Macrococcus lamae OX=198484 GN=queC PE=3 SV= 1
MNGQLSNSKALVVFSGGQDSTTCLFYALKQFQEVELVTFNYGQRHALEIDVARQIADDQQLKHHVLDMSLLSQLAPNALTDHTMNISAESELPNTFVPARNLLFMSFAGALAYQIGAKHIITGVCETDFSGYPDCRDMFVKSLNVTLNLSMDKEFVIHTPLMWLDKKQTWQLADELGQLDYIRANTLTCYEGIIADGCGTCPSCLLRNNGLRAYMKERETK

SEQ ID NO: 39421 - protein, 221 aa, Macrococcus sp.
  misc_feature (1)..(221): tr|A0A4V1M1Z3|A0A4V1M1Z3_9STAP 7-cyano-7-deazaguanine s ynthase OS=Macrococcus sp. DPC7161 OX=2507060 GN=queC P E=3 SV=1
MEKQLNNNKALVVFSGGQDSTTCVFHALKQYDTVELVTFNYGQRHALEIEVAKNIASDLGLKHHILDMSLLSQLSPNALTDHTLAIESNSTVPNTFVPARNLLFMSFAAALAYQIEARHIITGVCETDFSGYPDCRDNFIKSLNLTINLSMDMNFEIHTPLMWLDKKETWALADELGRLDYIRNQTLTCYEGIIGDGCGECPSCKLRKNGLDQYLQSRGGL

SEQ ID NO: 39422 - protein, 228 aa, Magnetococcus marinus
  misc_feature (1)..(228): sp|A0L4R8|QUEC_MAGMM 7-cyano-7-deazaguanine synthase OS =Magnetococcus marinus (strain ATCC BAA-1437 / JCM 1788 3 / MC-1) OX=156889 GN=queC PE=3 SV=1
MPTIMSAVVLLSGGLDSATVLRMAHATGQRIHALSFRYGQRHTMELEMARKQALSLPGVAHRIMDLQLSLFGGSALTADIPVPKGGVDENTIPVTYVPARNMVFLSLALAWAESLGAQHLYIGVNAVDYSGYPDCRPEFIQSFQQTANLATKAGVEGHPFTVHTPLINLTKAQIIQQGLALGVDYGLTRSCYDPDAQGAGCGLCDACRLRLQGFAEAGVPDPAPYQGP

SEQ ID NO: 39423 - protein, 225 aa, Magnetococcus massalia
  misc_feature (1)..(225): tr|A0A1S7LL73|A0A1S7LL73_MAGMO 7-cyano-7-deazaguanine s ynthase OS=Magnetococcus massalia (strain MO-1) OX=4515 14 GN=queC PE=3 SV=1
MPRSAVILLSGGLDSATVLHMAHQQGLQLYALSFRYGQRHTLELEMAAKQAAALPHVTHRVLDLNLSAFGGSALTDEIPVPKEGVEPGIPVTYVPARNTVFLSLALAWAETLGAADIFIGVNAIDYSGYPDCRPDFIHAFNELANLATREGVEGEGFKIHAPLIEMSKAEIIQTGLKLGVDYSLTRSCYDPDEKGDACGRCDACRLRLEGFMGAGISDPSPYQQR

SEQ ID NO: 39424 - protein, 235 aa, Magnetofaba australis
  misc_feature (1)..(235): tr|A0A1Y2K262|A0A1Y2K262_9PROT 7-cyano-7-deazaguanine s ynthase OS=Magnetofaba australis IT-1 OX=1434232 GN=que C PE=3 SV=1
MIAMDGTPRAVILLSGGLDSATALRMAHNQGYELYALSFRYGQRHSHELTCAAQLAAQLPDVTHRILDLDLTVFGGSALTADIPVPKDGVGDGIPVTYVPARNTVFLSLSLSWAEALGAHDIFVGVNAVDYSGYPDCRPQYIEAFETLANLATRDGVEGRRFRIHAPLIHLTKGQIIAQGLALGVDYGLTTSCYDPDEQGRGCGLCDACRLRLAGFAEAGAADPARYVPNASPGA

SEQ ID NO: 39425 - protein, 634 aa, Magnetospirillum caucaseum
  misc_feature (1)..(634): tr|M2ZRK5|M2ZRK5_9PROT Uncharacterized protein OS=Magne tospirillum caucaseum OX=1244869 GN=H261_10472 PE=4 SV= 1
MLMAERLVICGGVTGVPGARNVLEMDVNAPEGTPQKVNLRLGDLCARMVQDVPAVLADLLEVASYVYCADQFTRRGRDGMRSMGAEWRRQFRFIIPVRRPDLWNRRDVIEALCETLGFLSEDAYALEFVEHGSPATGLQPYLDLGHSADRGFVPDEVMLFSGGLDSFAGAVDSLIGNGRKVALVSHRGSSMVTSRQSALLIALRNRTRASQLFHVYVSVNKGQEEAVEFTQRTRSFLFASLGLVVAHLFGQRTIRFYENGVVSINLPLAEHVLGARATRTTHPHVLADFTSLFSLLLGEAVLVENPYLWLTKSDVVGVIAKHGCADLIAETFSCTRVREATKRKRHCGVCSQCLDRHFGILGAGLGEYESAEAYSVDLFKGERKPGTDVVMAESYVLNAMKLAGMSEQGFFSTFGQAFRVLPYLPGPPDEAAAKIYDLLRRHGQTVARVVDWELGNNASLTHTLGLPDTSLLMLLKSTSMRSMETVDPAEVEPPASEQAAADVSRRSANGLFFAVDEEKERILFRGGVELAGAGFKLLRALVADFAADVTAGLPHEEHRLIKSDALAERLGIEEPTLRKRVVRTRNAIEKQFLDKLDVQIADDAVIQNVNWRGYRLNPYLLQIQPGQLGDIGSD

SEQ ID NO: 39426 - protein, 227 aa, Magnetospirillum caucaseum
  misc_feature (1)..(227): tr|M3AF30|M3AF30_9PROT 7-cyano-7-deazaguanine synthase OS=Magnetospirillum caucaseum OX=1244869 GN=queC PE=3 S V=1
MRPAVVLLSGGLDSATVLAIAKAEGFAPAALTFRYGQRHAVEIRAAERVAAAMGIADHRIADIDLRVFGGSALTSDIAVPKGNLDEAIPAGIPVTYVPARNTIMLSFALAFAEVIGAADIFVGVNAVDYSGYPDCRPDYIGAFEAMANLATKAAVEGTRLRLHTPLIDLSKADIIRRGLGLGVDYSITSTCYDPDPGGRACGHCDSCRLRLKGFAEAGLADPAEYSP

SEQ ID NO: 39427 - protein, 230 aa, Magnetospirillum gryphiswaldense
  misc_feature (1)..(230): tr|V6F5X3|V6F5X3_MAGGM 7-cyano-7-deazaguanine synthase OS=Magnetospirillum gryphiswaldense (strain DSM 6361 / JCM 21280 / NBRC 15271 / MSR-1) OX=431944 GN=queC PE=3 SV=1
MTKKAVILLSGGLDSATVLALATERGFDCAALSFRYGQRHQVELACAAKVAAAAGITDHRIADIDLRLFGGSALTADIAVPKDRAEAEMDAEIPVTYVPARNTIMLSFALAFAEVLGAADIFVGVNAVDYSGYPDCRPEYIKAFETMANLATKAGVEGRRLTIHAPLISLTKAQIIAEGKRLGVDYGLTSSCYDPDVHGHACGRCDACRLRLKGFADAGLSDPAPYAGGV

SEQ ID NO: 39428 - protein, 230 aa, Magnetospirillum gryphiswaldense
  misc_feature (1)..(230): tr|A4TUU2|A4TUU2_9PROT 7-cyano-7-deazaguanine synthase OS=Magnetospirillum gryphiswaldense OX=55518 GN=queC PE =3 SV=1
MTKKAVILLSGGLDSATVLALATEWGFDCAALSFRYGQRHQVELACAAKVAAAAGVADHRIADIDLRLFGGSALTADIAVPKDRLEAEMEAEIPVTYVPARNTIMLSFALAFAEVLGAADIFVGVNAVDYSGYPDCRPEYIKAFETMANLATKAGVEGRRLTIHAPLISLTKAQIIAEGKRLGVDYGLTSSCYDPDVHGHACGRCDACRLRLKGFADAGLSDPAPYAGGV

SEQ ID NO: 39429 - protein, 231 aa, Magnetospirillum kuznetsovii
  misc_feature (1)..(231): tr|A0A364NXW0|A0A364NXW0_9PROT 7-cyano-7-deazaguanine s ynthase OS=Magnetospirillum kuznetsovii OX=2053833 GN=q ueC PE=3 SV=1
MKPAVVLLSGGLDSATTLAMAKADGFAPAALTFRYGQRHAVEIDAARRVALAIGVSDHRIADIDLRVFGGSALTSDLAVPKGRADAEISTGIPVTYVPARNTIMLSFALAFAEVIGAADIFVGVNAVDYSGYPDCRPDYIKAFEDMANLATKAAVEGRRLTLHTPLINLTKGEIIKKGLALGVDYAITSTCYDPDPLGHACGQCDSCRLRLKGFAEAGLADPAPYAARPMK

SEQ ID NO: 39430 - protein, 227 aa, Magnetospirillum magneticum
  misc_feature (1)..(227): sp|Q2W000|QUEC_MAGSA 7-cyano-7-deazaguanine synthase OS =Magnetospirillum magneticum (strain AMB-1 / ATCC 70026 4) OX=342108 GN=queC PE=3 SV=1
MKPAIVLLSGGLDSATVLAIAKAEGFAPAALTFRYGQRHAVEIRAAERVAAALGIRDHRIADIDLRVFGGSALTSDIAVPKGELDEAIPAGIPVTYVPARNTIMLSFALAFAEVLGAADIFVGVNAVDYSGYPDCRPDYIKAFEAMANLATKAAVEGTRLTIHTPLIDLTKGQIIRRGLDLGVDYSITSTCYDPTPDGKACGHCDSCRLRLKGFAEAGLADPAEYAS

SEQ ID NO: 39431 - protein, 229 aa, Magnetospirillum magnetotacticum
  misc_feature (1)..(229): tr|A0A0C2YIU5|A0A0C2YIU5_MAGMG 7-cyano-7-deazaguanine s ynthase OS=Magnetospirillum magnetotacticum MS-1 OX=272 627 GN=queC PE=3 SV=1
MTVRPAIVLLSGGLDSATVLAIAKAEGFTPSALTFRYGQRHAVEIRAAERVAAALRVSDHRVADIDLRVFGGSALTSDIAVPKGNLDEAIPEGIPVTYVPARNTIMLSFALAFAEVLGAADIFVGVNAVDYSGYPDCRPDYIKAFEAMANLATKAAVEGTRMTLHTPLIDLTKADIIRRGLALGVDYSLTSTCYDPDPMGRACGHCDSCRLRLKGFAEAGLADPAEYAP

SEQ ID NO: 39432 - protein, 226 aa, Magnetospirillum marisnigri
  misc_feature (1)..(226): tr|A0A178MKJ1|A0A178MKJ1_9PROT 7-cyano-7-deazaguanine s ynthase OS=Magnetospirillum marisnigri OX=1285242 GN=qu eC PE=3 SV=1
MKPAVVLLSGGLDSATTLAIAKAQGFAPAALTFRYGQRHAVEIDAARRVALAIGVADHRIADIDLRVFGGSALTSDIAVPKGRDDAEMAAGIPVTYVPARNTIMLSFALAFAEVIGADDIFVGVNAVDYSGYPDCRPDYIQAFEAMANLATKAAVEGRKLTLHTPLITLTKGEIIRQGLALGVDYAITSTCYDPDPLGRACGQCDSCKLRLKGFAEAGLRDPAPYA

SEQ ID NO: 39433 - protein, 228 aa, Magnetospirillum moscoviense
  misc_feature (1)..(228): tr|A0A178M757|A0A178M757_9PROT 7-cyano-7-deazaguanine s ynthase OS=Magnetospirillum moscoviense OX=1437059 GN=q ueC PE=3 SV=1
MTRRAVVLLSGGLDSATVLAMAQKAGFECWALSFRYGQRHAVELAAAARVAAALGAARHRVAEIDLRAFGGSALTADIDVPKDRDDAAIAGGIPVTYVPARNTIMLSFALAWAEVLEAFDIFVGVNAVDYSGYPDCRPEYVAAFERMANLATKAGVEGHKLTIHTPLIDLTKAQIIAKGVELGVDYALTSSCYDPDHQGRACGRCDSCRLRRKGFEQAGIPDPTSYTD

SEQ ID NO: 39434 - protein, 227 aa, Magnetospirillum sp.
  misc_feature (1)..(227): tr|A0A0U5MET3|A0A0U5MET3_9PROT 7-cyano-7-deazaguanine s ynthase OS=Magnetospirillum sp. XM-1 OX=1663591 GN=queC PE=3 SV=1
MKPAVVLLSGGLDSATVLAIAKAEGFAPAALTFRYGQRHAVEIRAAQRVAAAMGVGDHRIADIDLRVFGGSALTSDIAVPKGDLDEAIPAGIPVTYVPARNTIMLSFALAFAEVIGAADIFVGVNAVDYSGYPDCRPDYIKAFEAMANLATKAAVEGTPLRLHTPLIDLTKGQIIRRGLDLGVDYSITSTCYDPDAQGRACGHCDSCRLRLKGFAEAGLSDPAEYGP

SEQ ID NO: 39435 - protein, 230 aa, Magnetospirillum sp.
  misc_feature (1)..(230): tr|A0A1M3LJ27|A0A1M3LJ27_9PROT 7-cyano-7-deazaguanine s ynthase OS=Magnetospirillum sp. 64-120 OX=1895778 GN=qu eC PE=3 SV=1
MKPKAVILLSGGLDSATVLAMAQEQGYDCAALSFRYGQRHHVELDCAARVAKAAGVVDHRIVDIDLRGFGGSALTSDIAVPKDRDEAQMDAEIPVTYVPARNTIMLSFALAFAEVIGAADIFVGVNAVDYSGYPDCRPEYVKAFEAMANLATKAGVEGHKLTIHAPLMSLGKGQIIAEGTRLGVDYSLTSSCYDPDDQGRACGRCDSCQLRRKGFADAGIADPTPYSPQV

SEQ ID NO: 39436 - protein, 235 aa, Magnetovibrio blakemorei
  misc_feature (1)..(235): tr|A0A1E5QC40|A0A1E5QC40_9PROT 7-cyano-7-deazaguanine s ynthase OS=Magnetovibrio blakemorei OX=28181 GN=queC PE =3 SV=1
MPQSLNKNAVLLLSGGLDSTTVLAIAQDAGYSVHALSFRYGQRHSFELECATRIAKAARVAQHVILDLDLSQFGGSALTSDIAVPKDRNAQEMQGSIPVTYVPARNTVFLSCALGWAETLGTGDIFIGVNALDYSGYPDCRPEYIAAFETLANLATKGGVEGTAPVRIHTPLIHMSKAEIIAKGTQLQVDYGLTISCYDPDVTGAACGHCDACQLRLKGFHEAGLVDPMRYQEGS

SEQ ID NO: 39437 - protein, 242 aa, Magnetovibrio sp.
  misc_feature (1)..(242): tr|A0A2E3P6B9|A0A2E3P6B9_9PROT 7-cyano-7-deazaguanine s ynthase OS=Magnetovibrio sp. OX=2024836 GN=queC PE=3 SV =1
MNGETAVVLLSGGLDSTTVLAIARDKGYRLLALSFRYGQRHSVELDVAARIARQMGVARHAVADIDLTVYGGSALTADIDVPKDRDADAMADGIPVTYVPARNTIFLAHALALAETGGARNIFIGVNALDYSGYPDCRPAFIKAFQRLANLATKEGVEAMARGTDGPFHVQAPLMDMTKAEIIRHGMALGVDYAQTWSCYDPHPGAGGAADAPVHCGRCDSCQLRKKGFAEAGVDDPTAYAV

SEQ ID NO: 39438 - protein, 240 aa, Magnetovibrio sp.
  misc_feature (1)..(240): tr|A0A2D7AAQ0|A0A2D7AAQ0_9PROT 7-cyano-7-deazaguanine s ynthase OS=Magnetovibrio sp. OX=2024836 GN=queC PE=3 SV =1
MAEKAGSEKKQRAIVLLSGGLDSATVFAVAYQEGYQIVALSFDYGQRHVRELEAARAIAQGWGVQHHAIVNLDLRAFGGSALTDNIEVPKGRSDKEIGEGIPVTYVPARNTIFLSHALALAEVEGARDIFIGVNALDYSGYPDCRPEYISAFQTMANLATKACIEETPGLLIRSPLQDFTKAKIVELGTHLGVDFANTLSCYDPPGGRGDFSHCGICDACQLRRKGFEEASIHDPTRYKN

SEQ ID NO: 39439 - protein, 249 aa, Malikia granosa
  misc_feature (1)..(249): tr|A0A2S9K687|A0A2S9K687_9BURK 7-cyano-7-deazaguanine s ynthase OS=Malikia granosa OX=263067 GN=queC PE=3 SV=1
MHTTALVLFSGGQDSTTCLAHALQRYQRVETLGFHYGQRHAVEMEARLSVLAELRRQFPAWAGRLGDDHVLDVGVLGQVSETSLTREMAFQIEASGLPNTFVPGRNLVFLTLAAALAYRRGLQVVVTGVCETDFSGYPDCRDDTIKALQVALSLGLDRRLLLETPLMWIDKAQTWALAEQLGAESGVAGGGQALVDLIVEHSHTCYLGDREHRHDWGWGCGSCPACELRARGWQRWRAGLSNAMGGPAT

SEQ ID NO: 39440 - protein, 249 aa, Malikia spinosa
  misc_feature (1)..(249): tr|A0A2S9KHX0|A0A2S9KHX0_9BURK 7-cyano-7-deazaguanine s ynthase OS=Malikia spinosa OX=86180 GN=queC PE=3 SV=1
MHTTALVLFSGGQDSTTCLAHALQRYQRVETLGFHYGQRHAVEMEARLCVLSELRRQFPAWTERLGQDHVLDVGVLGQVSETSLTREMAFQIEASGLPNTFVPGRNLVFLTLAAALAYRRGLQVIVTGVCETDFSGYPDCRDDTIKALQVALSLGLDRRLLLETPLMWIDKAQTWALAEQLGADSGVAGGGQALVDLIVEHSHTCYLGDREHRHDWGWGCGSCPACELRARGWQRWRAGLSDGIAGLAN

SEQ ID NO: 39441 - protein, 573 aa, Maliponia aquimaris
  misc_feature (1)..(573): tr|A0A238K3E4|A0A238K3E4_9RHOB 7-cyano-7-deazaguanine s ynthase OS=Maliponia aquimaris OX=1673631 GN=queC PE=4 SV=1
MTSEIGPRLLDLLEIAATVFCADTTFPRGALDQPREGRAWRRDLHFRFAVRDIAFWDRPVVRQALRETIEFMTDDCVDCAFVAAEFSPTLQSYFRFENTSSDKTRIDDVIMFSGGLDSLAGTLKVLCGSQKRVALVTHFSAQKTIRRQAELIEQLKTRFRDRLLWIPVHVHRRRSPAKESTQRSRSLLFAALGCVVARMLGVDHLQFYENGIVSQNLPLAPPIVGTLATRTTHPRTLMLLSDFLSQVSGRPFEVNNPFEWLTKTEVVQSIAELKMTNMIGRTVSCNHTFKRTAAERHCGSCSQCLDRRFAILANGLAASDRAEDYATDVLFGVRDNEQERALAVEWVRHAIDLAEMPPEKFNETFMDELLRVTSPVQDRKAAFSRSFDMHQRHGRAVVGVLNTLPSSDMDEFPDRSIAAMFASHARTEVSVTPAIAPGPEAPPPRMERSIASDNIVEVVRRGPSSFDVLGIQGYSGPRARILSCLLDVLIEDRQQGRPIREFRGLTGRALADKLNATEYNIRQDIHRIKSDFRASWTAIYDMPPPKDLLIGNRSDKGYFLNPKIHVVTPENVG

SEQ ID NO: 39442 - protein, 226 aa, Malonomonas rubra
  misc_feature (1)..(226): tr|A0A1M6JS46|A0A1M6JS46_MALRU 7-cyano-7-deazaguanine s ynthase OS=Malonomonas rubra DSM 5091 OX=1122189 GN=que C PE=3 SV=1
MKKAVVLYSGGLDSTTCMAIARAEGFEPYALSFSYGQRHTVELDKAREYAPKIGAKEHMVIDVDMRQMGGSALTADIDVPKDGESPDEIPVTYVPARNTIFLSFALGWAEVLGASDIYIGVNALDYSGYPDCRPEFVEAFQTMANLSTKAGVEGNPYNIHAPLIDLTKAQIIEKGLSLGVDYGLTHSCYDPTPEGLSCGHCDSCILRLKGFADAGAEDPVAYVDRG

SEQ ID NO: 39443 - protein, 233 aa, Mameliella alba
  misc_feature (1)..(233): tr|A0A0B3RPF5|A0A0B3RPF5_9RHOB 7-cyano-7-deazaguanine s ynthase OS=Mameliella alba OX=561184 GN=queC PE=3 SV=1
MNTLVICSGGLDSVSLAHIVAAEHRLTRLVSFDYGQRHRKELDFAAAAAHRLGVPHHLIDMRTIGAALTGSALTDDIDVPDGHYAEETMRITVVPNRNAIMLAIGFGVAAANGDNAVATAVHGGDHFIYPDCRPAFTQAFDAMQRMALDGYADVRLFTPFVERTKADIVTEGARHGTPFAETWSCYKGGAVHCGRCGTCVERREAFHLADVEDPTTYADPDFWARAVAEKEER

SEQ ID NO: 39444 - protein, 231 aa, Mangrovibacter phragmitis
  misc_feature (1)..(231): tr|A0A1B7L0W4|A0A1B7L0W4_9ENTR 7-cyano-7-deazaguanine s ynthase OS=Mangrovibacter phragmitis OX=1691903 GN=queC PE=3 SV=1
MKRAVVVFSGGQDSTTCLIQALHQYDEVHCVTFDYGQRHRAEIDIARELALKLGARAHKVLDVGLLNELAVSSLTRDSIPVPDYDPNASGIPNTFVPGRNILFLTLAAIYAWQVKAEAVITGVCETDFSGYPDCRDEFVKALNHAVNLGMACEIRFETPLMWIDKAQTWALADYWGKLDLIRTETLTCYNGIKGDGCGECAACNLRANGLKHYLADKTAVMAAMKQKTGLR

SEQ ID NO: 39445 - protein, 231 aa, Mangrovibacter plantisponsor
  misc_feature (1)..(231): tr|A0A317PYS0|A0A317PYS0_9ENTR 7-cyano-7-deazaguanine s ynthase OS=Mangrovibacter plantisponsor OX=451513 GN=qu eC PE=3 SV=1
MKRAVVVFSGGQDSTTCLIQALHQYDEVHCVTFDYGQRHRAEIDIARELALKLGARAHKVLDVGLLNELAVSSLTRDSIPVPDYDPNASGIPNTFVPGRNILFLTLAAIYAWQVKAEAVITGVCETDFSGYPDCRDEFVKALNHAVNLGMASEIRFETPLMWIDKAQTWALADYWGKLDLIRTETLTCYNGIKGDGCGECASCNLRANGLKRYLADKTAVMAAMKQKTGLR

SEQ ID NO: 39446 - protein, 231 aa, Mangrovibacter sp.; identical to SEQ ID NO: 39445
  misc_feature (1)..(231): tr|A0A071LTX7|A0A071LTX7_9ENTR 7-cyano-7-deazaguanine s ynthase OS=Mangrovibacter sp. MFB070 OX=1224318 GN=queC PE=3 SV=1

SEQ ID NO: 39447 - protein, 226 aa, Mangrovibacterium diazotrophicum
  misc_feature (1)..(226): tr|A0A419W8D2|A0A419W8D2_9BACT 7-cyano-7-deazaguanine s ynthase OS=Mangrovibacterium diazotrophicum OX=1261403 GN=queC PE=3 SV=1
MNNKSKALVVFSGGQDSTTCLFWAKKEFGEVEAISFDYGQKHRLELELAAKIAREAGVPFQVMQLEMLGKITNNALTNPDMEVETDKPDNRPPNTLVEGRNMLFLTYAAIYAKSKDIHHLVTGVGQADYSGYPDCRDEFIRSLNQTLNLSMDYEYEIHTPLMWRDKEAVWQLSDELGVFDLVRTQTLTCYNGIVGEGCGHCPACKLRKNGLDSYLLKKNHKSDQSQ

SEQ ID NO: 39448 - protein, 224 aa, Mangrovibacterium marinum
  misc_feature (1)..(224): tr|A0A2T5BYH3|A0A2T5BYH3_9BACT 7-cyano-7-deazaguanine s ynthase OS=Mangrovibacterium marinum OX=1639118 GN=queC PE=3 SV=1
MSDKRKALVVFSGGQDSTTCLFWAIREFDEVEAISFDYGQRHKLELEVASKIAREAQVPLRILKLDMLSQITDNALTNPDLEVEAEKPADRPPNTLVEGRNMLFLTYAAIYAKSKDIHHLVTGVGQADYSGYPDCRDEFVRSLNQTLNLSMDYPYEIHTPLMWKNKEEIWQLSDELEVFDLVRTQTLTCYNGIVGDGCGHCPSCKLRKNGLDSYLLKKKHKSDQ

SEQ ID NO: 39449 - protein, 218 aa, Mannheimia granulomatis
  misc_feature (1)..(218): tr|A0A011M0S4|A0A011M0S4_9PAST 7-cyano-7-deazaguanine s ynthase OS=Mannheimia granulomatis OX=85402 GN=queC PE= 3 SV=1
MTNQTPKAVVIFSGGQDSTTCLFQAIAEFGRENVEVVTFQYGQRHSIELEKAAWIAQDLGVKQTLIDTSVIKAITTNALMDNKADIQQHGSTPNTFVDGRNALFLLYAAIYAKGQGIQTIFTGVCETDFSGYPDCRDIFVKSMNVTLNLAMDYNFNIRTPLMYLTKKETWALADRLGAFDYIREHTHTCYLGVEGGCHTCPSCVLREKGLHEYLAERG

SEQ ID NO: 39450 - protein, 222 aa, Mannheimia haemolytica
  misc_feature (1)..(222): tr|A0A248ZY04|A0A248ZY04_MANHA 7-cyano-7-deazaguanine s ynthase OS=Mannheimia haemolytica OX=75985 GN=queC PE=3 SV=1
MTHQKPKAVVIFSGGQDSTTCLFQAIAEFGKENVEVVTFQYGQRHSIELEKARWISNDLGVKQTLIDTSVIKAITTNALMDNNAEIQQQGSTPNTFVDGRNALFLLYTAIYAKGQGIQTIFTGVCETDFSGYPDCRDVFVKSMNVTLNLAMDYNFNIRTPLMYLTKKETWALADKLGAFDYIRDHTHTCYLGVEGGCHDCPSCVLREKGLNEYLAEREVSNV

SEQ ID NO: 39451 - protein, 222 aa, Mannheimia sp.
  misc_feature (1)..(222): tr|W0Q3B5|W0Q3B5_9PAST 7-cyano-7-deazaguanine synthase OS=Mannheimia sp. USDA-ARS-USMARC-1261 OX=1432056 GN=qu eC PE=3 SV=1
MTIQTPKAVVIFSGGQDSTTCLFQAIAEFGKENVEVLTFQYGQRHSIELEKAEWIAKDLGVKQTLIDTSVIKAITTNALMDNSAKIEQQGSTPNTFVDGRNALFLLYTAIYAKGQGIQTIFTGVCETDFSGYPDCRDVFVKSMNVTLNLAMDYNFNIRTPLMYLTKKETWALADKLGAFDYIREHTHTCYLGIEGGCHDCPSCILREKGLNEYLAERGQSNV

SEQ ID NO: 39452 - protein, 222 aa, Mannheimia succiniciproducens
  misc_feature (1)..(222): sp|Q65RE8|QUEC_MANSM 7-cyano-7-deazaguanine synthase OS =Mannheimia succiniciproducens (strain MBEL55E) OX=2219 88 GN=queC PE=3 SV=2
MNITNPNGDRKAVVIFSGGQDSTTCLLKAIADYGVENVEAVTFQYGQRHAIELEKAKWIAQDLGIKQTLIDTSVIKTITANAMMDNIKITKDEAGMPNTFVDGRNALFLLYTAIYAKGQGIRDIITGVCETDFSGYPDCRDVFIKSMNVTLNLAMDYQFNIHTPLMYLTKAQTWQLADELGALNYVREHTHTCYLGVEGGCGSCPSCILRENGLQQYLASKQ

SEQ ID NO: 39453 - protein, 222 aa, Mannheimia varigena
  misc_feature (1)..(222): tr|W0QC15|W0QC15_9PAST 7-cyano-7-deazaguanine synthase OS=Mannheimia varigena USDA-ARS-USMARC-1296 OX=1433287 GN=queC PE=3 SV=1
MTSQTSKAVVIFSGGQDSTTCLFQAIAEFGQENVEVVTFQYGQRHSIELEKAAWIANDLGVKQTLIDTSVIKAITTNALMSDNAEIKQEGSTPNTFVDGRNALFLLYTAIYAKGQGIKTIFTGVCETDFSGYPDCRDVFVKSMNVTLNLAMDYNFNIRTPLMYLTKKETWALADKLGAFDYIREHTHTCYLGVEGGCHTCPSCVLREKGLNEYLAERGQTNV

SEQ ID NO: 39454 - protein, 444 aa, Maribius pelagius
  misc_feature (1)..(444): tr|A0A1H8MF23|A0A1H8MF23_9RHOB Queuosine biosynthesis p rotein QueC OS=Maribius pelagius OX=387096 GN=SAMN04488 011_11614 PE=4 SV=1
MTSVACLADPAALRSSNADRRVRLFGRRRDVPDAAATGARLYDQMRRLEGTISPKAFDFLSIALSAVTADVFVPRASSANGFSRAIELTTSVQDPAFWKAQASDLEEALNFLTGDRWEMTFVGEGRSAPTAASRKGLRQRTKLLDSNCVCLFSGGLDSLLGAIDLIEDANRSPFLVSRESTGDKMYQTNLRALLPSRPHLGANDAPQGPEGQYGAYPREDTTRARSLLFLAMGVCVASAIAERNGLLSAAGQVPLYIPENGFIALNPPLSPRRVGALSTRTAHPEFLSGIQRILDAGSIPVTIENPFRHKTKGEMLRGNSNAPLARSLASNTVSCGRWKRKRMQCGHCVPCLIRRAAFHASNVTDGTQYWLGDLKQVMNKPDRRADLLSVIYAIRRSRTESIARWVIRAGTLPINSNERAQLLQVVERGRDELAVFIRSQGVAA

SEQ ID NO: 39455 - protein, 243 aa, Maricaulis maris
  misc_feature (1)..(243): sp|Q0ARS7|QUEC_MARMM 7-cyano-7-deazaguanine synthase OS =Maricaulis maris (strain MCS10) OX=394221 GN=queC PE=3 SV=1
MTDTSTPDHANRTALVLFSGGQDSATCLAWALQRYARVETVGFDYGQRHHVEMTARERVRSGLAASFPHWGDRLGEDFVIDLAGYGAIADSALTADRAIEMQANGLPSTFVPGRNLVFLTVASALAYRRGHGVLVGGMCETDFSGYPDCRRNTIDAMQTALGLGLEMAVEIATPLMHLDKAATWALAHQLGGDALIGLIEEDSHTCYRGERGKRHAWGYGCGDCPACELRANGHAAWQNSVPA

SEQ ID NO: 39456 - protein, 243 aa, Maricaulis maris
  misc_feature (1)..(243): tr|A0A495DMC9|A0A495DMC9_9RHOB 7-cyano-7-deazaguanine s ynthase OS=Maricaulis maris OX=74318 GN=queC PE=3 SV=1
MSDTSSPVPAERSALVLFSGGQDSATCLAWALDRYDRVETVGFDYGQRHHVEMQARERIRGGMATALPDAAARLGEDFVIDLSGYGAIAESALTADRAIEMEASGLPSTFVPGRNLVFLTVASALAYRRGHGVLVGGMCETDYSGYPDCRRETIDAMQTTLALGLATPLEIATPLMQLDKAQTWALAERLGGRALTALIEEDSHTCYRGERGERHSWGYGCGHCPACELRARGHAAWKASLPA

SEQ ID NO: 39457 - protein, 239 aa, Maricaulis salignorans
  misc_feature (1)..(239): tr|A0A1G9MW05|A0A1G9MW05_9RHOB 7-cyano-7-deazaguanine s ynthase OS=Maricaulis salignorans OX=144026 GN=queC PE= 3 SV=1
MDTRPTSTSALLLFSGGQDSATCLAWALSRYDRVETVGFDYGQRHHVEMQARLDVRAAMAAAFPDWATRLGEDHVVDIAGYGAIAESALTADRAIEMAADGLPTTFVPGRNLVFLTIASALAYRRGHGAMVGGMCETDFSGYPDCRRATIDAMQQTLSLGLATDITIETPLMWLDKAQSWALTHELGGDILVEIIRKRSHSCYRGDRSELHDWGYGCGTCPACELRAAGWQHWRSGDGA

SEQ ID NO: 39458 - protein, 237 aa, Maricaulis sp.
  misc_feature (1)..(237): tr|A0A2D7Y1B3|A0A2D7Y1B3_9RHOB 7-cyano-7-deazaguanine s ynthase OS=Maricaulis sp. OX=1486257 GN=queC PE=3 SV=1
MTTQSTSASALVLFSGGQDSATCLAWALDRYERVETVGFDYGQRHSVELQARQDVRAAMSAMPGGDRLGEDFVIDLTGYGAIAESALTADRAIEMEASGLPSTFVPGRNLVFLTVASALAYRRGHGVLVGGMCETDYSGYPDCRRETLDAMQSALTLGLDTGMAVETPLMHLDKAQTWALAETLGGRDLVEIIRTQTHTCYRGERGELHDWGYGCGTCPACDLREKGWQAWPGSVPA

SEQ ID NO: 39459 - protein, 243 aa, Maricaulis sp.
  misc_feature (1)..(243): tr|A0A1Q8FWK3|A0A1Q8FWK3_9RHOB 7-cyano-7-deazaguanine s ynthase OS=Maricaulis sp. W15 OX=1772333 GN=queC PE=3 S V=1
MSDTSSPVPAERSALVLFSGGQDSATCLAWALDRYDRVETVGFDYGQRHHVEMQARERIRGGMATALPDATARLGEDFVIDLSGYGAIAESALTADRAIEMEASGLPSTFVPGRNLVFLTVASALAYRRGHGVLVGGMCETDYSGYPDCRRETIDAMQTTLALGLATPLEIATPLMQLDKAQTWALAERLGGRALTALIEEDSHTCYRGERGERHSWGYGCGHCPACELRARGHAAWKASLPA

SEQ ID NO: 39460 - protein, 231 aa, Marichromatium gracile
  misc_feature (1)..(231): tr|A0A4R4AIC7|A0A4R4AIC7_MARGR 7-cyano-7-deazaguanine s ynthase OS=Marichromatium gracile OX=1048 GN=queC PE=3 SV=1
MTPAVVLLSGGLDSTTVLAIAKDQGFAPHALSFRYGQRHGCELDAAARVAAQLGVVEHVIADIDLRRFGGSALTADIAVPKGRSAEEMDSAIPVTYVPARNTVFLSFALAWAETLGASDIFIGVNALDYSGYPDCRPEYIAAYEQMANLATVAGVEGRQRLRIHTPLIDLTKAGIIQRGLALGVDYALTSSCYDPDAHGRPCGGCDSCLLRAKGFAEAGVADPLLNRFENP

SEQ ID NO: 39461 - protein, 231 aa, Marichromatium purpuratum
  misc_feature (1)..(231): tr|W0E4Z8|W0E4Z8_MARPU 7-cyano-7-deazaguanine synthase OS=Marichromatium purpuratum 984 OX=765910 GN=queC PE=3 SV=1
MTPAVVLLSGGLDSTTVLAIAKDQGFAPHALSFRYGQRHGCELDAAARVAAQLGVVEHVIADIDLRRFGGSALTADIAVPKGRDPEEMETTIPVTYVPARNTVFLSFALAWAETLGASDIFIGVNALDYSGYPDCRPEYIAAYEQMANLATVAGVEGRQRLRIHTPLIDLTKAGIIRRGLALGVDYALTSSCYDPDAHGRPCGGCDSCLLRAKGFAEAGIADPLLNRFETP

SEQ ID NO: 39462 - protein, 221 aa, Unknown
  misc_feature (1)..(221): tr|A0Z4X7|A0Z4X7_9GAMM 7-cyano-7-deazaguanine synthase OS=marine gamma proteobacterium HTCC2080 OX=247639 GN=q ueC PE=3 SV=1
MKAVVLTSGGLDSATVLAMAHAAGRQCYALSFDYGQRHRAELSAAARVAASFEGIIHKTVSLDLRGIGGSALTDDAIDVPVEPTEGIPVTYVPARNTVFLSIALGWAEVIGASEIYIGVNAVDYSGYPDCRPEFIDAFGALAAVATKAGVEGDPIKICTPIIDLTKAEIIARGMDLGVDYEQTVSCYQASDEGKACGRCDSCRLRAQGFFEAGVSDPTRYV

SEQ ID NO: 39463 - protein, 218 aa, Unknown
  misc_feature (1)..(218): tr|A0YGA1|A0YGA1_9GAMM 7-cyano-7-deazaguanine synthase OS=marine gamma proteobacterium HTCC2143 OX=247633 GN=q ueC PE=3 SV=1
MKIVVIYSGGIDSFTILNKALQEGHDVLAISFNYGQRHNKELDYAARACKELGIVHKLVDISAMQTLMSNSSLMAKSDVIIPEGHYEAENMKSTVVPNRNMILISLAIGYAVNEGASEVWYGAHAGDHTIYPDCRPEFVEAMSKASLLANFEPIAVVAPYLNTDKIAIVKEGLAMGLDYGKTWTCYNGREKACGKCGSCVERLEAFAENGVTDTLSYE

SEQ ID NO: 39464 - protein, 268 aa, Mariniblastus fucicola
  misc_feature (1)..(268): tr|A0A5B9PA69|A0A5B9PA69_9PLAN 7-cyano-7-deazaguanine s ynthase OS=Mariniblastus fucicola OX=980251 GN=queC PE= 3 SV=1
MERPRPAVICLSGGMDSTSLLVRMLAERRKVFGLCFDYGQKHRIELKRLYDNIEYLRENDIEMSCETIEIPKLGDLFHSALTDSNWQVPKGHYEQENMRQTVVPNRNAIFASIAYGYALSIAIQHDTHVDFCLGVHSGDHAIYPDCRPEFYQSIFHAFSIGNWDNEKVHLHIPYINGDKYTILQEAAVSIEKLGLDFDTIFRNTCTSYQPDASGRSHGLTGSDVERILAFHKFDRRDPIDYVDSWEVVVEKALELEAQYRAESEENDD

SEQ ID NO: 39465 - protein, 239 aa, Marinicauda algicola
  misc_feature (1)..(239): tr|A0A4S2H4L7|A0A4S2H4L7_9RHOB 7-cyano-7-deazaguanine s ynthase OS=Marinicauda algicola OX=2029849 GN=queC PE=3 SV=1
MTRADPSRNAALVLFSGGQDSATCLAWALDRYRRVETIGFAYGQRHGVEMQARTRVRAGVAERFPGWAEKLGPDTVVDLSGYGALAESALTAEREIEMGEKGLPTTFVPGRNLVFLTVAAAHAYRRAIPVLVGGMCETDYSGYPDCRRATIEAQEKAISLGLGEAMRIETPLMALDKAETWALADELGGKALVDLIVEESHTCYRGERGTRHAWGHGCGTCPACELRAAGWEKYLETAR

SEQ ID NO: 39466 - protein, 237 aa, Marinicauda pacifica
  misc_feature (1)..(237): tr|A0A4S2HB57|A0A4S2HB57_9RHOB 7-cyano-7-deazaguanine s ynthase OS=Marinicauda pacifica OX=1133559 GN=queC PE=3 SV=1
MSETDSSSALVLFSGGQDSATCLAWALQRYERVETIGFDYGQRHEVELRARERVREQIVQINSDWAVRLGDDLLVDLFGYGRLAESALTAEREIEMGEKGLPTTFVPGRNLVFLTVAAAHAYRRGTAVLVGGMCQTDYSGYPDCRADTLAAQERALALGLDQPIKIETPLMDLTKAETWQLAQSLGGDRLVHLIVEETHTCYRGVRGTLHAWGYGCGDCPACELRAHGWNGFSGGAS

SEQ ID NO: 39467 - protein, 241 aa, Marinicauda sp.
  misc_feature (1)..(241): tr|A0A2U2BRU2|A0A2U2BRU2_9RHOB 7-cyano-7-deazaguanine s ynthase OS=Marinicauda sp. WD6-1 OX=2135793 GN=queC PE= 3 SV=1
MTDATSSPNRSALVLFSGGQDSATCLAWALDRYDAVETIGFDYGQRHAVEMGARESVREEIARRFPDWAGRLGPDIVVDLAGYGALADSALTTDRAIEMDAQGLPTTFVPARNLVFLAVAAAHAWRRGIETLVGGMCQTDYSGYPDCRAETIAAQQRALSLGLDAEMAVETPLMHLTKAETWALADELGGDSLVELIVADTHTCYRGERGVLHEWGYGCGDCPACELRARGWAEWRAEAAS

SEQ ID NO: 39468 - protein, 241 aa, Marinicaulis flavus
  misc_feature (1)..(241): tr|A0A2S7K964|A0A2S7K964_9PROT 7-cyano-7-deazaguanine s ynthase OS=Marinicaulis flavus OX=2058213 GN=queC PE=3 SV=1
MRKLDPSRALILFSGGQDSSISLAWALDRFAHVETVGFVYGQRHSIELGARLTVRKAMADAFPRWAGKLGEDMLVDARGLKDLGETAMTHETEIVMGEDGLPTTFVPGRNLVFLSLAGGLAYRRNLGRLVAGMCETDYSGYPDCREPALNAQLEALRLGMDADFGLETPLMHIDKAESWRLAESLGGEKLVALINEHSHTCYRGERGARHNWGYGCGECPACVLRAKGWAAYSAGTESARP

SEQ ID NO: 39469 - protein, 226 aa, Marinicella litoralis
  misc_feature (1)..(226): tr|A0A4R6XYS7|A0A4R6XYS7_9GAMM 7-cyano-7-deazaguanine s ynthase OS=Marinicella litoralis OX=644220 GN=queC PE=3 SV=1
MSKKCVVLLSGGLDSSTCLAVAKDHGYDCYTLSIDYGQRHVAELEASKTIAKNITPNPHKVVQINLDAIGGSALTDDDIDVPDYGDSNDAIPVTYVPARNTIFLSTALAYAEVVGANAIFIGVTAVDYSGYPDCRAEYIQAFETMANLATKAGVEGQKLSIITPLIDLDKSQIIQLGHHLGFDYGLTVSCYSANRKGEACGVCDSCHYRRKGFEAAGLKDPTRYAS

SEQ ID NO: 39470 - protein, 209 aa, Marinilabilia salmonicolor
  misc_feature (1)..(209): tr|A0A368UN94|A0A368UN94_9BACT 7-cyano-7-deazaguanine s ynthase OS=Marinilabilia salmonicolor OX=989 GN=DFO77_1 2612 PE=3 SV=1
MQNLKKGIILASGGLDSTTLCYLFIKKNIEFVPLIINYGQHCFKTELERLKKVLPENNVNKIEILNVSEIYKYSNSKFINASNLWEEKITADDLYIPYRNVLILTIAASFARTLGLNYVYSAFINSNHAKEIDCSNEFFNNLENLLKEYGSVKIEMPFKDFSKFEVAKLGIELGAPIGKTFSCQASPDIPCGACPNCVDRLEALKRLSE

SEQ ID NO: 39471 - protein, 223 aa, Marinilabilia salmonicolor
  misc_feature (1)..(223): tr|A0A2T0XPU9|A0A2T0XPU9_9BACT 7-cyano-7-deazaguanine s ynthase OS=Marinilabilia salmonicolor OX=989 GN=queC PE =3 SV=1
MKRAVVLLSGGLDSAVALYLAKSRGFEIHALSFDYGQRHDRELHAAKAIAQEAGVAAHQVVSLKLDQWGGSSLTDKSMEVENGDVTRQDIPVTYVPARNMVFLSVAASYAEAIQATEIFIGVSQVDYSGYVDCRQEFIEAMENAVNKGTVMGAEQNRPIRIHAPFVHKTKAEEIQLGRELGVPFELTWSCYRGGEKPCETCDSCLLRAKAFAEAGIEDKALIR

SEQ ID NO: 39472 - protein, 222 aa, Marinilabilia sp.
  misc_feature (1)..(222): tr|A0A2U2BCK8|A0A2U2BCK8_9BACT 7-cyano-7-deazaguanine s ynthase OS=Marinilabilia sp. WTE OX=2162893 GN=queC PE= 3 SV=1
MKKAVVLLSGGLDSAVTLYMVKSQGYEVHALSFDYGQRHSRELKAAKSLAQEAGVVSHQVVSLRLDQWGGSSLTDSTMQVEDGNVNREDIPVTYVPARNMVFLSVAASFAEAVKAQDIFIGVSQVDYSGYVDCREEFIEAMENAVNKGTVMGAEQNIPIRIHAPFIHKTKSEEIQMGKELGVPFELTWSCYRGGTKPCGTCDSCLLRAKAFEDAGVVDKALV

SEQ ID NO: 39473 - protein, 626 aa, Marinilabiliaceae bacterium
  misc_feature (1)..(626): tr|A0A359FZQ0|A0A359FZQ0_9BACT Uncharacterized protein OS=Marinilabiliaceae bacterium OX=2053574 GN=DEG09_1066 0 PE=4 SV=1
MSQQTPDVIRVNCGELCTSRDCTASEINLLHRENGDITPNITIGYAKFVKDADELPERILDLLQIAAYVFCGDRMANRGSRKSVNNEAWARSFEFHIPVLDLDFWSDTKTKKALNDALTFMTGDRGYSFIFSQSDKNPAEILNKQISLFSGEYQSIDEAENTDIMLFSGGLDSLAGAVQRLNENMERSLCVVSHKSNKTVTHTQRVLIDELNKQYGNRVKPYSFECCNHDGLKSKDETQRTRIFLFSAIAFSMCHCFSKNSFYVYENGITSMNLSKQADVINARASRTTHPKTLELLRRFYKLLKPSFDIIAPYYNHTKAEIMEVFKEYNSLHLIASSVSCSSSRTKPGQAPHCGCCSQCIDRRFSLYAAGINEYDAEYANDFIHSFPDDDNNETKQRIYSTMRLANLEDIPTQNAFVRKYPDDVTDLVAYWRGSNADDKLDEIYDLVCRYGKSVIDAATRMRNKYDDLSLPINKNSLLGVISERQYKKSPIIIRIEEIDTFLRETIPIMFQRERPANENDLNDKIEAILKGQGSFTREHPALQFWRTEYRPDHAQGDLLVESKYVRDSTTPSKITEGIAADMTKAPSDMGFMFIVYDPDRQISDDMQFARAFEGKRNDCFVRVYR

SEQ ID NO: 39474 - protein, 221 aa, Marinilabiliaceae bacterium
  misc_feature (1)..(221): tr|A0A359FYK0|A0A359FYK0_9BACT 7-cyano-7-deazaguanine s ynthase OS=Marinilabiliaceae bacterium OX=2053574 GN=qu eC PE=3 SV=1
MKRAVILLSGGLDSAVALWLAKSEGYEVYSLSFFYGQKHDKELKAAEALALAAGVKKHRVVSINIDQWGGSSLTDKDMEVEDGDIDRTDIPVTYVPARNMIFLSIAASYAEAIAAQSIFIGVSQADYSGYVDCREPFIRSMEQTINEGTVMAAEHKKPIKIHAPFINKTKSEEIRLGARLGVPFGLTWSCYRGGEKPCGKCDSCLLRARAFNEAGIIDESL

SEQ ID NO: 39475 - protein, 340 aa, Marinilabiliales bacterium
  misc_feature (1)..(340): tr|A0A2N5YTA0|A0A2N5YTA0_9BACT Uncharacterized protein OS=Marinilabiliales bacterium OX=2053303 GN=C0596_12905 PE=4 SV=1
MKETKICKRCIMPESKPDIYINDEGICNICVAHDNSRESINEQKPLESDLLKILDKHKGRKKFDCMVMCSGGKDSTAALYFMKKRYNLNILAFMFDHGFETKEARANVESAVQKLGVDFLLYKSSYMKPMFARMIESESKAIICHTCSIWYMELAFDVAARYDIPLIVAGWTKGQYKKQNIVSKYGTDDGTCEFKAMSESTRSFLDNNISDMHQYKNFPKSMDEVIKKARKKHKAKVISPHWFLPYGPDEYVKIIEDELEWKAPDLSYPKGSTNCTLNFISVHQSIKHYGYTHYVVEASKLIREGVITREEALEQVKINFDDKTLKEVASGLCIDFSTYL

SEQ ID NO: 39476 - protein, 230 aa, Marinilabiliales bacterium
  misc_feature (1)..(230): tr|A0A2J6HR34|A0A2J6HR34_9BACT 7-cyano-7-deazaguanine s ynthase OS=Marinilabiliales bacterium OX=2053303 GN=que C PE=3 SV=1
MDISEKKRKAVVLLSGGLDSATALYVAKNEGFEVHALSFEYGQKHDRELQAARQTAKKAGVKSHRIVSMDIGQWGGSSLTDRNMEIENGIPGREDIPLTYVPARNMVFLSVAASFAEAIEAYDIFIGVSEVDYSGYVDCRQKFLDAMENAINNGTVCAVEQGKKITIHAPFINMKKSEEITLGMKLGVDYSDTWSCYRGGEKPCGECDSCLLRAEAFIEAGVKDPGLPPR

SEQ ID NO: 39477 - protein, 221 aa, Marinimicrobia bacterium
  misc_feature (1)..(221): tr|A0A101IAW6|A0A101IAW6_9BACT 7-cyano-7-deazaguanine s ynthase OS=Marinimicrobia bacterium 46_43 OX=1635280 GN =queC PE=3 SV=1
MKTLVLLSGGQDSSTCLFWSLRYANQTEAVFFNYEQRHKIEWECARRLCEENKVPLHVLDVPAFQQIGGTAMIEETDIQMTNKGVPNTFVPGRNIVFLTLAASLAYRLNFDSVIVGVNDEDYSGYPDCRASFIHIMESTLREGLDYPIRITTPLQHLSKKEIWALSDELGVMQTIVEKTHTCYRGDHFTRHAWGYGCGSCPACLLRKTGYEAYLRTRYENS

SEQ ID NO: 39478 - protein, 221 aa, Marinimicrobia bacterium; identical to SEQ ID NO: 39477
  misc_feature (1)..(221): tr|A0A101GB51|A0A101GB51_9BACT 7-cyano-7-deazaguanine s ynthase OS=Marinimicrobia bacterium 46_47 OX=1635279 GN =queC PE=3 SV=1

SEQ ID NO: 39479 - protein, 226 aa, Marinimicrobium koreense
  misc_feature (1)..(226): tr|A0A3N1NI65|A0A3N1NI65_9GAMM 7-cyano-7-deazaguanine s ynthase OS=Marinimicrobium koreense OX=306545 GN=queC P E=3 SV=1
MANPKAVILVSGGLDSTTALAIARSEGYDCYTISFDYGQRHRAELHAAELTARAGGAIEHKVVKLDLQSIGGSALTDDSIAVPETEGEGIPVTYVPARNTIFLSIALGWAEVLGANDIFIGVNAVDYSGYPDCRPEYVAAYEAMANLATKSGVEGQKLHIRAPLMRWSKGEIIRQGQSLGVDYALTVSCYQANEAGEACGRCDSCRLRRAGFEEAGVPDPTRYRAG

SEQ ID NO: 39480 - protein, 226 aa, Marinimicrobium sp.
  misc_feature (1)..(226): tr|A0A2D8WNR3|A0A2D8WNR3_9GAMM 7-cyano-7-deazaguanine s ynthase OS=Marinimicrobium sp. OX=2024837 GN=queC PE=3 SV=1
MANPKAVILVSGGLDSTTALAIARSEGYDCYTISFDYGQRHRAELHAAELTARAGGAIEHKVVKLDLQSIGGSALTDDSIAVPETEGEGIPVTYVPARNTIFLSIALGWAEVLGANDIFIGVNAVDYSGYPDCRPEYVAAYETMANLATKSGVEGQKLHIRAPLMRWSKGEIIRQGQSLGVDYALTVSCYQANEAGEACGRCDSCRLRRAGFEEAGVPDPTRYRAG

SEQ ID NO: 39481 - protein, 225 aa, Marininema halotolerans
  misc_feature (1)..(225): tr|A0A1I6SMK9|A0A1I6SMK9_9BACL 7-cyano-7-deazaguanine s ynthase OS=Marininema halotolerans OX=1155944 GN=queC P E=3 SV=1
MAKKAVIVLSGGLDSTTCMGLAKEQGYDLYPVTFCYGQRHDREVEQAKEVARFYEVGEHRIVDISFLSQIGGSALTEEGIQVPTDPEEGIPSTYVPARNLIFLSLAAAYAEVIGAEAVYTGVSAVDYSGYPDCRPEFIAHLEETIRLATKTGAEGGKIQLKTPLIHLSKADTIREGLRLNVPYQLTTSCYQGAELACGECDSCRLRLKGFADAGATDLIEYKAVN

SEQ ID NO: 39482 - protein, 225 aa, Marininema mesophilum
  misc_feature (1)..(225): tr|A0A1H3BB30|A0A1H3BB30_9BACL 7-cyano-7-deazaguanine s ynthase OS=Marininema mesophilum OX=1048340 GN=queC PE= 3 SV=1
MAKKAVIVLSGGLDSTTCMGLAKKTGYELYPITFSYGQRHDREVTQAKEVAQFYEVPEHRIVDISFLSQIGGSALTEESIEVPTEAKEGIPSTYVPARNLIFLSLAAAYAEVIGAEAVYTGVSAVDYSGYPDCRPEFIAHLEETIHLATKTGVEGGKIHLATPLIHWSKGETIQEGLRLGVPYHLTTSCYQGDEEACGECDSCRLRLKGFADAGATDPISYGVKK

SEQ ID NO: 39483 - protein, 219 aa, Marinisporobacter balticus
  misc_feature (1)..(219): tr|A0A4R2KJJ8|A0A4R2KJJ8_9CLOT 7-cyano-7-deazaguanine s ynthase OS=Marinisporobacter balticus OX=2018667 GN=que C PE=3 SV=1
MNREKALVIFSGGQDSTTCLFWAKKKFKEVIAISFDYNQKHKLELECAKELCKKYHVEHHILDLNLLNQLAPNSLTRTDIEVDKDAPKEGLPNSFVDGRNMLFLTFGAIFAKQRGIYHMVTGVSESDYSGYPDCRDVFIKSTNVTLNLAMDYQFEIHTPLMWINKEETWKMADDLEVLHIIKEETLTCYNGIKGNGCGECPACYLRKKGYLDFKKSREN

SEQ ID NO: 39484 - protein, 233 aa, Marinithermus hydrothermalis
  misc_feature (1)..(233): tr|F2NQ95|F2NQ95_MARHT 7-cyano-7-deazaguanine synthase OS=Marinithermus hydrothermalis (strain DSM 14884 / JCM 11576 / T1) OX=869210 GN=queC PE=3 SV=1
MKPKAVALLSGGLDSATAAAQALADGYEVIALSFAYGQRHTRELTAAKEVAKALGIQEHYVLEVNLAQWGGSALTDPTIQVPTGGVNPEVIPPTYVPGRNTVFLAIALSLAEARGAEAIYLGINAVDYSGYPDCRPEYLEAFQRLANLATKAGLEGQAPRLVAPLVMDTKADIVRRALALGVPIERTWSCYQGGEEPCGLCDSCRIRDRALIEAGRPDLATPKGRELYAQEAR

SEQ ID NO: 39485 - protein, 221 aa, Marinobacter adhaerens
  misc_feature (1)..(221): tr|A0A1E3CEX3|A0A1E3CEX3_9ALTE 7-cyano-7-deazaguanine s ynthase OS=Marinobacter adhaerens OX=1033846 GN=queC PE =3 SV=1
MTDTVVVIYSGGMDSYTLLHLARERGHQVHALSFNYGQRHVRELECARSVCESLGIPHKVIDIRAMSEVMAGSSLTSDLDVPEGHYEEDSMKATVVPNRNMILLSLATGYAVTAGAGAVWYGAHGGDHAIYPDCRPEFVEKMDAVCRVANYEPVAIEAPFMAMDKGQILSEGLRLGLDYSQTWTCYNGREQACGRCGSCVERLEAFAANGVDDPLDYEDAS

SEQ ID NO: 39486 - protein, 221 aa, Marinobacter adhaerens
  misc_feature (1)..(221): tr|A0A349SZR5|A0A349SZR5_9ALTE 7-cyano-7-deazaguanine s ynthase OS=Marinobacter adhaerens OX=1033846 GN=queC PE =3 SV=1
MTDTVVVIYSGGMDSYTLLHLARERGYQVHALSFNYGQRHVRELECARSVCEALGVPHKVIDIRAMSEVMAGSSLTSDIDVPEGHYEEDSMKATVVPNRNMILLSLATGYAVTAGAGAVWYGAHGGDHAIYPDCRPEFVDKMDAVCRVANYEPVGIEAPFMTMDKGQILAEGLRLGLDYAQTWTCYNGRERACGRCGSCVERLEAFAANGVKDPLDYEAAS

SEQ ID NO: 39487 - protein, 221 aa, Marinobacter algicola
  misc_feature (1)..(221): tr|A6F335|A6F335_9ALTE 7-cyano-7-deazaguanine synthase OS=Marinobacter algicola DG893 OX=443152 GN=queC PE=3 S V=1
MTETVVVIYSGGMDSFTLLHLARARGYRVHALSFDYGQRHVRELECARQVCEALSVPHKVIDIRALSEVMAGSALTDAVDVPEGHYEEDNMKATVVPNRNMILLSLATGYAVTAGAVAVWYGAHGGDHAIYPDCRPEFVEKMDAVCQVANYEPVKIEAPFMGSDKGAILAEGLKLGLDYSRTWTCYNGRDRACGVCGSCVERLEAFAANGVSDPLPYEVET

SEQ ID NO: 39488 - protein, 221 aa, Marinobacter antarcticus
  misc_feature (1)..(221): tr|A0A1M6PS63|A0A1M6PS63_9ALTE 7-cyano-7-deazaguanine s ynthase OS=Marinobacter antarcticus OX=564117 GN=queC P E=3 SV=1
MTDTVVVIYSGGMDSFTLLHCARARGLRVHALSFNYGQRHVRELDVARSVCADLDIPHKVIDIRAMSEVMSGSALTSGEDIPEGHYEEENMKATVVPNRNMILLSLATGYAVTVNAGAVWYGAHGGDHAIYPDCRPEFVEKMDAVCRVANYEPVGIEAPFMHIRKGEILAEGLKLGLDYANTWTCYNGREQACGLCGSCVERLEAFAENGLPDPLAYEAGR

SEQ ID NO: 39489 - protein, 221 aa, Marinobacter confluentis
  misc_feature (1)..(221): tr|A0A4Z1BIM3|A0A4Z1BIM3_9ALTE 7-cyano-7-deazaguanine s ynthase OS=Marinobacter confluentis OX=1697557 GN=queC PE=3 SV=1
MNRTVVVIYSGGMDSFTLLHRALAQGLNVHALSFDYGQRHVRELDCARQVCKALSVPHKVVDIRSLGAVMAGSALTSELAVPEGHYEEDSMKATVVPNRNMILLSLATGYAVTAEADAVWYGAHGGDHAIYPDCRPEFVEKMDAVCRVANYQPVAIEAPFMGSDKGNILSEGLRLGLDYSQTWTCYNGRERACGRCGSCVERLEAFATNGVTDPVPYEEEA

SEQ ID NO: 39490 - protein, 221 aa, Marinobacter daqiaonensis
  misc_feature (1)..(221): tr|A0A1I6IHE9|A0A1I6IHE9_9ALTE 7-cyano-7-deazaguanine s ynthase OS=Marinobacter daqiaonensis OX=650891 GN=queC PE=3 SV=1
MSKTVVVIYSGGMDSFTLLHRALAEGHRVHALSFDYGQRHVRELEAASEVCEGLGIPHRVIDIRSLETVMSGSSLTGGGPVPEGHYEEETMKSTVVPNRNMILLSLATGYAVTVKGDAVWFGAHGGDHAIYPDCRPEFIEKMDAVCRVANYEPVAVEAPYMLADKSEILAEGLAMGLDYSQTWTCYNGREKACGVCGSCVERLEAFAANGKTDPLAYEARN

SEQ ID NO: 39491 - protein, 227 aa, Marinobacter excellens
  misc_feature (1)..(227): tr|A0A0N8KLE1|A0A0N8KLE1_9ALTE 7-cyano-7-deazaguanine s ynthase OS=Marinobacter excellens HL-55 OX=1305731 GN=q ueC PE=3 SV=1
MTDTVVVIYSGGMDSFTLLHLARARGFNVHALSFNYGQRHVRELESARAVCQAHSIPHKVIDIRAMNDVMAGSSLTSDIDIPEGHYQEDSMKSTVVPNRNMILLSLATGYAVTVGARSVWYGAHGGDHAIYPDCRPEFVEKMDAVCRIANYEPVAIEAPFMAFDKGQILGEGLKLGLDYSQTWTCYNGREQACGVCGSCVERLEAFAAHGLADPLAYEAVETGKGSA

SEQ ID NO: 39492 - protein, 221 aa, Marinobacter excellens
  misc_feature (1)..(221): tr|A0A137SEF9|A0A137SEF9_9ALTE 7-cyano-7-deazaguanine s ynthase OS=Marinobacter excellens LAMA 842 OX=1306954 G N=queC PE=3 SV=1
MTDTVVVIYSGGMDSFTLLHLARARGHKVHALSFNYGQRHVRELEAAAAVCQAEAIPHKVIDIRAMSEVMAGSSLTSDIAVPEGHYQEDSMKSTVVPNRNMILLSLATGYAVTAGAQAVWFGAHGGDHAIYPDCRPEFIEKMDAVCRVANYQPVAVEAPFMALDKGEILGEGLKLGLDYSQTWTCYNGRELACGRCGSCVERLEAFAAHGLKDPLAYESRA

SEQ ID NO: 39493 - protein, 221 aa, Marinobacter flavimaris
  misc_feature (1)..(221): tr|A0A3D8H496|A0A3D8H496_9ALTE 7-cyano-7-deazaguanine s ynthase OS=Marinobacter flavimaris OX=262076 GN=queC PE =3 SV=1
MTDTVVVIYSGGMDSYTLLHLARERGYQVHALSFNYGQRHVRELECARSVCEALGVPHKVIDIRAMSEVMAGSSLTSDIDVPEGHYEEDSMKSTVVPNRNMILLSLATGYAVTAGAGAVWYGAHGGDHAIYPDCRPEFVDKMDAVCRVANYEPVGIEAPFMTMDKGQILAEGLRLGLDYAQTWTCYNGRERACGRCGSCVERLEAFAANGVKDPLDYEAAS

SEQ ID NO: 39494 - protein, 221 aa, Marinobacter fuscus
  misc_feature (1)..(221): tr|A0A2T1KUR5|A0A2T1KUR5_9ALTE 7-cyano-7-deazaguanine s ynthase OS=Marinobacter fuscus OX=2109942 GN=queC PE=3 SV=1
MTDTVVVIYSGGMDSFTLLHMARARGLDVHALSFNYGQRHVRELEVARAVCKAEGIPHKVIDIRAMSDVMSGSALTSEVAVPEGDYEEESMKATVVPNRNMILLSLATGYAVTVGAGAVWYGAHGGDHAIYPDCRPEFVEKMDAVCRIANYEPVTIDAPLIAMDKGQILAEGLALGLDYGRTWTCYNGRDKACGRCGSCVERLEAFASNGLADPLAYEELA

SEQ ID NO: 39495 - protein, 222 aa, Marinobacter gudaonensis
  misc_feature (1)..(222): tr|A0A1I6H353|A0A1I6H353_9ALTE 7-cyano-7-deazaguanine s ynthase OS=Marinobacter gudaonensis OX=375760 GN=queC P E=3 SV=1
MTDTVVVIYSGGMDSYTLLHLARSRGYQVHALSFNYGQRHVRELDCARSVCEAHGIPHQTIDIRAMSEVVMAGSSLTSDLQVPEGHYQEDSMKATVVPNRNMILLSLATGYAVTVGAGAVWYGAHGGDHAIYPDCRPEFVAKMDAVCRIANYEAVGIEAPFMAMDKGQILAEGLRLGLDYRHTWTCYNGRERACGRCGSCVERLEAFAANGVTDPLDYEVAH

SEQ ID NO: 39496 - protein, 221 aa, Marinobacter guineae
  misc_feature (1)..(221): tr|A0A2G1VDW5|A0A2G1VDW5_9ALTE 7-cyano-7-deazaguanine s ynthase OS=Marinobacter guineae OX=432303 GN=queC PE=3 SV=1
MTDTVVVIYSGGMDSYTLLHLARIRGCRVHALSFNYGQRHVRELEYARSVCETQGIPHKVIDIRAMSEVMSGSSLTSDRDVPEGHYEEESMKATVVPNRNMILLSLATGYAVTVGGGTVWYGAHGGDHAIYPDCRPEFVAKMDAVCRVANYEPVGIEAPFMAMDKGQILAEGLRLGLDYSQTWTCYNGRERACGRCGSCVERLEAFAANGVTDPLEYEDSR

SEQ ID NO: 39497 - protein, 227 aa, Marinobacter halophilus
  misc_feature (1)..(227): tr|A0A2T1KK37|A0A2T1KK37_9ALTE 7-cyano-7-deazaguanine s ynthase OS=Marinobacter halophilus OX=1323740 GN=queC P E=3 SV=1
MTDTVVVIYSGGMDSFTLLNLARAQGRNVHALSFNYGQRHVRELEAARSVCQAERIPHKVIDIRAMNEVMAGSSLTSDINIPEGHYQEDSMKSTVVPNRNMILLSLATGYAVTVGAQSVWYGAHGGDHAIYPDCRPEFVEKMDAVCRIANYEPVGIEAPFMDLDKGEILAEGLKLGLDYSQTWTCYNGREQACGVCGSCVERLEAFAVHGLEDPLSYEAPERNEDDA

SEQ ID NO: 39498 - protein, 221 aa, Marinobacter hydrocarbonoclasticus
  misc_feature (1)..(221): sp|A1TWU4|QUEC_MARHV 7-cyano-7-deazaguanine synthase OS =Marinobacter hydrocarbonoclasticus (strain ATCC 700491 / DSM 11845 / VT8) OX=351348 GN=queC PE=3 SV=1
MTDSVVVIYSGGMDSFTLLHLARARGLKVHALSFNYGQRHVRELDVAADVCRAEGIPHKVIDIRAMSEVMSGSSLTSDIEVPEGHYEEDTMKATVVPNRNMILLSLATGYAVTTGAGAVWYGAHGGDHAIYPDCRPEFVEKMDAVCRVANYEPVGIEAPFMAMDKGQILAEGLKLGLDYSQTWTCYNGRDKACGRCGSCVERLEAFAANGVTDPLAYERLA

SEQ ID NO: 39499 - protein, 221 aa, Marinobacter hydrocarbonoclasticus
  misc_feature (1)..(221): tr|A0A455W967|A0A455W967_MARHY 7-cyano-7-deazaguanine s ynthase OS=Marinobacter hydrocarbonoclasticus OX=2743 G N=queC PE=3 SV=1
MTDTVVVIYSGGMDSFTLLHLARARGHKVHALSFNYGQRHVRELEAAAAVCQAEAIPHKVIDIRAMSEVMAGSSLTSDIAVPEGHYQEDSMKSTVVPNRNMILLSLAAGYAVTAGAQAVWFGAHGGDHAIYPDCRPEFIEKMDAVCRVANYQPVAVEAPFMALDKGEILGEGLKLGLDYSQTWTCYNGRELACGRCGSCVERLEAFAAHGLKDPLAYESRA

SEQ ID NO: 39500 - protein, 221 aa, Marinobacter lipolyticus
  misc_feature (1)..(221): tr|R8B0M8|R8B0M8_9ALTE 7-cyano-7-deazaguanine synthase OS=Marinobacter lipolyticus SM19 OX=1318628 GN=queC PE= 3 SV=1
MSETVVVIYSGGMDSFTLLHLARARGHQVHALSFDYGQRHVRELEYARNVCEEAGIPHKVIDISALGAVMAGSALTADVDVPEGHYEEDSMKATVVPNRNMILLSLATGYAVTAGAGAVWYGAHGGDHAIYPDCRPEFVEKMDAVCRVANYEPVAIEAPFMAMDKSAILAEGLKLNLDYSQTWTCYNGRDRACGRCGSCVERREAFATHGLVDPLPYEDAD

SEQ ID NO: 39501 - protein, 221 aa, Marinobacter litoralis
  misc_feature (1)..(221): tr|A0A3M2RBY8|A0A3M2RBY8_9ALTE 7-cyano-7-deazaguanine s ynthase OS=Marinobacter litoralis OX=187981 GN=queC PE= 3 SV=1
MTDTVVVIYSGGMDSFTLLHLARAQGHNVHALSFNYGQRHVRELDAARAVCEAEGIPHKVIDIRAMSEVMSGSALTSDIEIPEGHYEEDNMKATVVPNRNMILLSLATGYAVTVNAQAVWYGAHGGDHAIYPDCRPEFVEKMDAVCRVANYEPVAVKAPFMTLDKGEILAEGLKLGLDYGQTWTCYNGREKACGQCGSCVERLEAFAAHGIKDPLAYERGA

SEQ ID NO: 39502 - protein, 221 aa, Marinobacter lutaoensis
  misc_feature (1)..(221): tr|A0A1V2DUY7|A0A1V2DUY7_9ALTE 7-cyano-7-deazaguanine s ynthase OS=Marinobacter lutaoensis OX=135739 GN=queC PE =3 SV=1
MTDTVVVIYSGGMDSFTLLHRALARGLRVHALSFDYGQRHVRELACARQVCQALAIPHKVLDIRAMSEVMSGSSLTSDIDVPEGHYEEESMKATVVPNRNMILLSLATGYAVTVGAQAVWYGAHGGDHAIYPDCRPEFVEKMDAVCRIANYEPVAIEAPFMHMDKGQILAEGLKLGLDYRHTWTCYNGRERACGRCGSCVERLEAFAANGVRDPLEYEVPV

SEQ ID NO: 39503 - protein, 221 aa, Marinobacter manganoxydans; identical to SEQ ID NO: 39486
  misc_feature (1)..(221): tr|G6YZ24|G6YZ24_9ALTE 7-cyano-7-deazaguanine synthase OS=Marinobacter manganoxydans MnI7-9 OX=1094979 GN=queC PE=3 SV=1

SEQ ID NO: 39504 - protein, 222 aa, Marinobacter mobilis
  misc_feature (1)..(222): tr|A0A1H2W3B8|A0A1H2W3B8_9ALTE 7-cyano-7-deazaguanine s ynthase OS=Marinobacter mobilis OX=488533 GN=queC PE=3 SV=1
MKETVVVIYSGGMDSFTLLHKALAEGHAVHALSFNYGQRHVRELDCARTVCESLGIPHRVIDIRALSEVMAGSALTGEVEVPEGHYEEDSMKSTVVPNRNMILLSLATGYAVTVEAQAVWFGAHGGDHAIYPDCRPEFMEKMDAVCRVANYQPVAIAAPYIRADKGEILAEGLAMGLDYSHTWTCYNGRNKACGRCGSCVERLEAFASNGLRDPLPYEESVR

SEQ ID NO: 39505 - protein, 221 aa, Marinobacter nanhaiticus
  misc_feature (1)..(221): tr|N6W4N8|N6W4N8_9ALTE 7-cyano-7-deazaguanine synthase OS=Marinobacter nanhaiticus D15-8W OX=626887 GN=queC PE =3 SV=1
MSEKVVVIYSGGMDSFTLLHRARAAGHEVHALSFNYGQRHVRELECAETVCKALGIPHKVVDMSPMASLMTGSALTDAIDVPEGHYEEDSMKATVVPNRNMILLSLATGYAVSVDAQTVWYGAHGGDHAIYPDCRPEFVEKMDAVCRVANYEPVRIEAPYMKLDKGQILAEGLALDLDYSQTWTCYNGREKACGRCGSCVERLEAFASHGLKDPLPYEVEV

SEQ ID NO: 39506 - protein, 221 aa, Marinobacter nitratireducens
  misc_feature (1)..(221): tr|A0A072MXZ3|A0A072MXZ3_9ALTE 7-cyano-7-deazaguanine s ynthase OS=Marinobacter nitratireducens OX=1137280 GN=q ueC PE=3 SV=1
MTDTVVVIYSGGMDSYTLLHLARARGLKVHALSFNYGQRHVRELDCARAVCEAHDIPHKVVDIRAMSEVMEGSALTSDIDVPEGHYEEDSMKSTVVPNRNMILLSLATGYAVTVGAGEVWYGAHGGDHAIYPDCRPEFVEKMDAVCRVANYDPVGIAAPFMTLDKSEILAKGLELGLDYGQTWTCYNGRDKACGRCGSCVERLEAFAAHGATDPLPYEDGV

SEQ ID NO: 39507 - protein, 221 aa, Marinobacter pelagius
  misc_feature (1)..(221): tr|A0A366GQE5|A0A366GQE5_9ALTE 7-cyano-7-deazaguanine s ynthase OS=Marinobacter pelagius OX=379482 GN=queC PE=3 SV=1
MTETVVVIYSGGMDSFTLLHLARARGYQVHALSFNYGQRHVRELDCARQVCADLGIPHKEIDIRAMSEVMSGSSLTSDIEVPEGHYEEDSMKATVVPNRNMILLSLATGYAVTAGASAVWFGAHGGDHAIYPDCRPEFVEKMDAVCRVANYEPVGIEAPLIRMDKREILAEGLKLGLDYSQTWTCYNGRDKACGRCGSCVERLEAFAANGVTDPLEYEEQA

SEQ ID NO: 39508 - protein, 221 aa, Marinobacter pelagius
  misc_feature (1)..(221): tr|A0A1I4RUC7|A0A1I4RUC7_9ALTE 7-cyano-7-deazaguanine s ynthase OS=Marinobacter pelagius OX=379482 GN=queC PE=3 SV=1
MTETVVVIYSGGMDSFTLLHLARARGYQVHALSFNYGQRHVRELDCARQVCADLGIPHKEIDIRAMSEVMSGSSLTSDTEVPEGHYEEDSMKSTVVPNRNMILLSLATGYAVTAGASEVWFGAHGGDHAIYPDCRPEFVEKMDAVCRVANYEPVGIEAPFIRMDKGEILAEGLKLGLDYSQTWTCYNGRDKACGRCGSCVERLEAFAANAVTDPLEYEEQV

SEQ ID NO: 39509 - protein, 221 aa, Marinobacter persicus
  misc_feature (1)..(221): tr|A0A1I3V7A6|A0A1I3V7A6_9ALTE 7-cyano-7-deazaguanine s ynthase OS=Marinobacter persicus OX=930118 GN=queC PE=3 SV=1
MTDTVVVIYSGGMDSFTLLHLARARGYQVHALSFNYGQRHVRELEAARAVCQAEGIPHKVIDIRAMSEVMSGSSLTSDIDIPEGHYAEDNMKSTVVPNRNMILLSLATGYAVTVGAQSVWYGAHGGDHAIYPDCRPEFVEKMDAVCRVANYEPVAIEAPFMQLDKGEILAEGLKLGLDYRQTWTCYNGREQACGRCGSCVERLEAFAAHGIRDPLDYEAEA

SEQ ID NO: 39510 - protein, 221 aa, Marinobacter persicus
  misc_feature (1)..(221): tr|A0A2S6GAL3|A0A2S6GAL3_9ALTE 7-cyano-7-deazaguanine s ynthase OS=Marinobacter persicus OX=930118 GN=queC PE=3 SV=1
MADTVVVIYSGGMDSFTLLHLARARGLNVHALSFNYGQRHVRELEAAKAVCEAGRIPHKVIDIRAMSEVMSGSSLTSDIDVPEGHYEEDSMKATVVPNRNMILLSLATGYAVTVGAQAVWYGAHGGDHAIYPDCRPEFVEKMDAVCRVANYEPVGVEAPFMHLDKGEILGEGLKLNLDYSQTWTCYNGRAKACGRCGSCVERLEAFAAHGIQDPLAYEVPA

SEQ ID NO: 39511 - protein, 222 aa, Marinobacter psychrophilus
  misc_feature (1)..(222): tr|A0A0H4I0F9|A0A0H4I0F9_9ALTE 7-cyano-7-deazaguanine s ynthase OS=Marinobacter psychrophilus OX=330734 GN=queC PE=3 SV=1
MTDTVVVIYSGGMDSFTLLHKARADGLNVHALSFNYGQRHVRELDCAQEVCQQLGIPHKVIDIRAMSDVMAGSALTSETIDVPEGDYQEGAMKSTVVPNRNMILLALATGYAVTVEASAVWFGAHGGDHAIYPDCRPEFVEKMDAVCKVANYQTVAVEAPFMHFTKGDILALGLQLNLDYSHTWTCYNGRSKACGRCGSCVERLQAFAEHQQQDPVAYEVQY

SEQ ID NO: 39512 - protein, 221 aa, Marinobacter salarius
  misc_feature (1)..(221): tr|W5YP90|W5YP90_9ALTE 7-cyano-7-deazaguanine synthase OS=Marinobacter salarius OX=1420917 GN=queC PE=3 SV=1
MTETVVVIYSGGMDSFTLLHLARARGYKVHALSFDYGQRHVRELECARQVCEELSVPHKVIDIRALSEVMAGSALTDAVDVPEGHYEEDNMKATVVPNRNMILLSLATGYAVTAGAVAVWYGAHGGDHAIYPDCRPEFVEKMDAVCQVANYEPVKIEAPFMGSDKGAILAEGLKLGLDYGKTWTCYNGRDRACGVCGSCVERLEAFAANGVSDPLRYEVET

SEQ ID NO: 39513 - protein, 221 aa, Marinobacter salinus
  misc_feature (1)..(221): tr|A0A1D9GNX3|A0A1D9GNX3_9ALTE 7-cyano-7-deazaguanine s ynthase OS=Marinobacter salinus OX=1874317 GN=queC PE=3 SV=1
MTDTVVVIYSGGMDSYTLLHLARARGYKVHALSFNYGQRHVRELECASAVCESLAIPHKVIDIRAMSEVMAGSALTGDVNVPEGHYEEDSMKATVVPNRNMILLSLATGYAVTTGAGAVWYGAHGGDHAIYPDCRPEFVEKMDAVCRVANYEPVGIEAPFMAMTKGEILAEGLKLGLDYLQTWTCYNGREKACGRCGSCVERLEAFAANGMTDPLAYEVER

SEQ ID NO: 39514 - protein, 221 aa, Marinobacter santoriniensis
  misc_feature (1)..(221): tr|M7D1N0|M7D1N0_9ALTE 7-cyano-7-deazaguanine synthase OS=Marinobacter santoriniensis NKSG1 OX=1288826 GN=queC PE=3 SV=1
MTDTVVVIYSGGMDSFTLLHHARACGYRVHALSFNYGQRHVRELDCARDVCRDLGVPHKVIDIRAMAEVMSGSALTSDIDVPEGHYEEDSMKATVVPNRNMILLSLATGYAVTADASAVWFGAHGGDHAIYPDCRPEFIRKMDAVCRIANYEPVGIEAPFMAMDKGAILARGLELGLDYSQTWTCYNGREKACGRCGSCVERLEAFAANGVTDPLDYEVSA

SEQ ID NO: 39515 - protein, 221 aa, Marinobacter segnicrescens
  misc_feature (1)..(221): tr|A0A1I0HZU8|A0A1I0HZU8_9ALTE 7-cyano-7-deazaguanine s ynthase OS=Marinobacter segnicrescens OX=430453 GN=queC PE=3 SV=1
MPERVVVIYSGGMDSFTLLHRALSEGHEVHALSFDYGQRHVRELKSASDVCEQLGLPHKVIDIRSMKAVMAGSALTGGGDVPEGHYEEASMKSTVVPNRNMILLSLATGYAVTVEADAVWFGAHGGDHAIYPDCRPEFVEKMDAVCRIANYEPVRIEAPYIRASKTDILADGLAMGLDYSQTWTCYNGREKACGVCGSCVERLEAFAAHGVTDPLPYEARN

SEQ ID NO: 39516 - protein, 248 aa, Marinobacter segnicrescens
  misc_feature (1)..(248): tr|A0A1I0H1I2|A0A1I0H1I2_9ALTE Queuosine biosynthesis p rotein QueC OS=Marinobacter segnicrescens OX=430453 GN= SAMN04487962_1237 PE=4 SV=1
MQNQEQKPANVLWTGGWDSTYRVIQLVRQGRPVNPHYIIDNNRDSTDIEIKTIKRISSILNEKYGELISDAKIVNSRQLPSRPEIHKAHRKIIEESYLGSQYIILASYCKEFEVNDLNLCIHKDDKAYDHVSDFIEPAEDDGYRLSASSPDHISELFRYFVFPILNLTKLEMEDHTRTWNFQEIMEMTWFCHTPFMGKPCGTCYPCMYTINEGLSRRFSKIALIRYRMKLELRKYPTLVRYVQRVIKS

SEQ ID NO: 39517 - protein, 221 aa, Marinobacter shengliensis
  misc_feature (1)..(221): tr|A0A2T1KU98|A0A2T1KU98_9ALTE 7-cyano-7-deazaguanine s ynthase OS=Marinobacter shengliensis OX=1389223 GN=queC PE=3 SV=1
MTDTVVVIYSGGMDSFTLLHLARARGYKVHALSFNYGQRHVRELEAAAAVCQAEAIPHKVIDIRAMSEVMAGSSLTSDIAVPEGHYQEDSMKSTVVPNRNMILLSLATGYAVTAGAQAVWFGAHGGDHAIYPDCRPEFIEKMDAVCRVANYQPVAVEAPFMALDKGEILGEGLKLGLDYSQTWTCYNGRERACGRCGSCVERLEAFAAHGLKDPLAYESHA

SEQ ID NO: 39518 - protein, 206 aa, Marinobacter shengliensis
  misc_feature (1)..(206): tr|A0A2T1KR77|A0A2T1KR77_9ALTE 7-cyano-7-deazaguanine s ynthase OS=Marinobacter shengliensis OX=1389223 GN=C7H1 0_10490 PE=3 SV=1
MKNALLLASGGLDSTTVAYQLADAGVEVVPIFFDYGQHCVDIEWDRVNEVLPSDMHRPERFNISDIFQGSQSRLIREADLWTEEVKDDDLYIPYRTMLFFAAAAARAQTVGVLDVYTGFINSNHAKEIDCTAAFMDSLDGLTSSIGPVRFHSPFRYSSKADVARAAVELGVPIGRTYSCQASAKFPCGACPNCVERLNALKEAKLV

SEQ ID NO: 39519 - protein, 220 aa, Marinobacter sp.
  misc_feature (1)..(220): tr|A0A1E7PWI7|A0A1E7PWI7_9ALTE 7-cyano-7-deazaguanine s ynthase OS=Marinobacter sp. X15-166B OX=1897620 GN=queC PE=3 SV=1
MDTVVVIYSGGMDSFTLLHLARSKGHPVHALSFDYGQRHVRELDSARQVCRALGIPHQVIDITAMNAVMAGSSLTGEGAIPAGSYEEETMKSTVVPNRNMILLSLATGYAVTIGARSVWYGAHGGDHAIYPDCRPEFIEKMDAVCRVANYEPVAIEAPFMRADKAAILATGLELGLDYGQTWTCYNGREKACGQCGSCVERLQAFAAHGLTDPLAYEEQA

SEQ ID NO: 39520 - protein, 221 aa, Marinobacter sp.; identical to SEQ ID NO: 39512
  misc_feature (1)..(221): tr|A0A3S1BW53|A0A3S1BW53_9ALTE 7-cyano-7-deazaguanine s ynthase OS=Marinobacter sp. NP-6 OX=2488666 GN=queC PE= 3 SV=1

SEQ ID NO: 39521 - protein, 221 aa, Marinobacter subterrani
  misc_feature (1)..(221): tr|A0A0J7J4S8|A0A0J7J4S8_9ALTE 7-cyano-7-deazaguanine s ynthase OS=Marinobacter subterrani OX=1658765 GN=queC P E=3 SV=1
MTDTVVVIYSGGMDSYTLLHLARERGYKVHALSFNYGQRHVKELDCARSVCTALGIPHKVIDIRAMSEVMAGSSLTSDLEVPEGHYEEDSMKATVVPNRNMILLSLATGYAVTMAADAVWYGAHGGDHAIYPDCRPEFVAKMDAVCRVANYEPVGIEAPFMAMDKGRILAEGLRLGLDYARTWTCYNGRDRACGRCGSCVERLEAFAANGVTDPLEYEGNR

SEQ ID NO: 39522 - protein, 221 aa, Marinobacter vinifirmus
  misc_feature (1)..(221): tr|A0A558BI59|A0A558BI59_9ALTE 7-cyano-7-deazaguanine s ynthase OS=Marinobacter vinifirmus OX=355591 GN=queC PE =3 SV=1
MTDTVVVIYSGGMDSFTLLHLARSRGLKVHALSFNYGQRHVRELEAARAVCQAEGIPHKVIDIRAMSEVMAGSSLTSDAEVPEGHYEEDSMKSTVVPNRNMILLSLATGYAVTVGAGAVWYGAHGGDHAIYPDCRPEFVEKMDAVCRIANYEPVGIEAPFMAMDKGEILAEGLKLGLDYSQTWTCYNGRDKACGRCGSCVERLEAFAAHGLEDPLAYEDNA

SEQ ID NO: 39523 - protein, 222 aa, Marinobacter zhejiangensis
  misc_feature (1)..(222): tr|A0A1I4LYN4|A0A1I4LYN4_9ALTE 7-cyano-7-deazaguanine s ynthase OS=Marinobacter zhejiangensis OX=488535 GN=queC PE=3 SV=1
MKETVVVIYSGGMDSFTLLHKARAEGYDVHALSFNYGQRHVRELDCARAVCEQLGIPHRVIDIRSLSEVMAGSALTGEVEVPEGHYQEENMKTTVVPNRNMILLSLATGYAVTVEAQAVWFGAHGGDHAIYPDCRPEFMEKMDAVCRVANYHPVAIAAPYIRADKSEILAEGLALGLDYSQTWTCYNGRDKACGRCGSCVERLEAFASNQLPDPLSYEDGVR

SEQ ID NO: 39524 - protein, 230 aa, Marinobacterium aestuarii
  misc_feature (1)..(230): tr|A0A1A9EX60|A0A1A9EX60_9GAMM 7-cyano-7-deazaguanine s ynthase OS=Marinobacterium aestuarii OX=1821621 GN=queC PE=3 SV=1
MTQSSPKAVVLLSGGLDSATVLAMALDQGYDCHVLSFDYGQRSQTELNAARAVVSALGVSAHKHKVVRLHLEDFGGSALTDHSIDVPEQDAEGEIPVTYVPARNTVFLSLALGWAEVLGARALFIGVNAVDYSGYPDCRPEFIAAFESMANLATKAGVSGQPFRIETPLMSLTKSDIIVEGQRLGLDYGLTVSCYQADDQGRACGVCDSCRLRAKGFADAGVEDPTRYQA

SEQ ID NO: 39525 - protein, 226 aa, Marinobacterium georgiense
  misc_feature (1)..(226): tr|A0A1H4BBT1|A0A1H4BBT1_9GAMM 7-cyano-7-deazaguanine s ynthase OS=Marinobacterium georgiense DSM 11526 OX=1122 198 GN=queC PE=3 SV=1
MKQSEKRAVVLLSGGLDSATALAMAMEQGYSCHVLSFDYGQRSVTELNAARAIAAQAGVSEHRVLRLHLEDFGGSALTDTSIDVPEDQAEGVPVTYVPARNTVFLSLALGWAEVLDADAIFIGVNAVDYSGYPDCRPEFIEAFERMANLATRRGINGDPVHIETPLMHLTKADIIRRGTALGIDYALTVSCYQADMEGRACGRCDSCRLRAKGFEDAGVVDPTRYV

SEQ ID NO: 39526 - protein, 226 aa, Marinobacterium halophilum
  misc_feature (1)..(226): tr|A0A2P8EV73|A0A2P8EV73_9GAMM 7-cyano-7-deazaguanine s ynthase OS=Marinobacterium halophilum OX=267374 GN=queC PE=3 SV=1
MKQHEKRAVVLLSGGLDSATALAMAKEQGYTCHVLSFDYGQRSLTELNAAKAIAEQMGVAEHRILRLHLEDFGGSALTDTSIEMPEGETEGVPVTYVPARNTVFLSLALGWAEVLDADAIFIGVNAVDYSGYPDCRPEFIAAFETMANLATRRGIDGNPIRIETPLMSMTKADIIMRGNALGIDYALTVSCYQADADGRACGRCDSCRLRAKGFADAGVADPTRYF

SEQ ID NO: 39527 - protein, 229 aa, Marinobacterium lutimaris
  misc_feature (1)..(229): tr|A0A1H5WQ59|A0A1H5WQ59_9GAMM 7-cyano-7-deazaguanine s ynthase OS=Marinobacterium lutimaris OX=568106 GN=queC PE=3 SV=1
MTQAQKRAVVLLSGGLDSATALAIAKSEGYSCHVLSFDYGQRSLTELNAARQIAASLDVAEHRVLRLHLEDFGGSALTDKSIDVPEDADDDGIPVTYVPARNTVFLSLALGWAEVLHAEAIFIGVNAVDYSGYPDCRPEFIEAFEKMANLATKNGVSGEPIRIATPLIDLTKAEIIQAGMALGVDYSATLSCYQADEEGRACGHCDSCRLRAKGFEDAGVPDPTRYVEA

SEQ ID NO: 39528 - protein, 229 aa, Marinobacterium mangrovicola
  misc_feature (1)..(229): tr|A0A4R1GKA7|A0A4R1GKA7_9GAMM 7-cyano-7-deazaguanine s ynthase OS=Marinobacterium mangrovicola OX=1476959 GN=q ueC PE=3 SV=1
MTQAQKRAVVLLSGGLDSATALAIAKSKGYSCHVLSFDYGQRSLTELNAARQIAASLEVAEHRVLRLNLEDFGGSALTDKSIDVPEDAEDDGIPITYVPARNTVFLSLALGWAEVLHAEAIFIGVNAVDYSGYPDCRPEFIAAFEKMANLATKNGVSGEPIRIETPLIDLTKAEIIQAGMALGVDYSATLSCYQADDEGRACGHCDSCRLRAKGFEDAGVADPTRYVEA

SEQ ID NO: 39529 - protein, 227 aa, Marinobacterium sp.
  misc_feature (1)..(227): tr|A0A081FU47|A0A081FU47_9GAMM 7-cyano-7-deazaguanine s ynthase OS=Marinobacterium sp. AK27 OX=1232683 GN=queC PE=3 SV=1
MKDSQKRAVVLLSGGLDSATALAIAKSRGYSCHVLSFDYGQRSQTELNAARSIAQDMDVTEHRVLRLNLEDFGGSALTDTSIDVPDGETEGIPVTYVPARNTVFLSLALGWAEVLHAEAIFIGVNAVDYSGYPDCRPEFIEAFEKMANLATRNGVSGEPIHIETPLIDLTKAEIIKAGLALGVDYSKTLSCYQADDQGRACGHCDSCRLRAKGFADARVEDPTPYVV

SEQ ID NO: 39530 - protein, 226 aa, Marinobacterium stanieri
  misc_feature (1)..(226): tr|A0A1N6RKT5|A0A1N6RKT5_9GAMM 7-cyano-7-deazaguanine s ynthase OS=Marinobacterium stanieri OX=49186 GN=queC PE =3 SV=1
MKQGEKRAVVLLSGGLDSATALAMAKEQGYACYVLSFDYGQRSLTELNAARAITAQLGVAEHRVLRLSLEDFGGSALTDNSIDVPEDECEGVPVTYVPARNTVFLSLALGWAEVLDADAIFIGVNAVDYSGYPDCRPEFIQAFETMANLATRRGVEGDPISIETPLMHLTKADIIEKGTALGIDYALTVSCYQADDEGRACGRCDSCRLRAKGFADAGVADPTRYM

SEQ ID NO: 39531 - protein, 223 aa, Marinococcus halophilus
  misc_feature (1)..(223): tr|A0A510Y3X5|A0A510Y3X5_MARHA 7-cyano-7-deazaguanine s ynthase OS=Marinococcus halophilus OX=1371 GN=queC PE=3 SV=1
MGFQNEKAVVVFSGGQDSTTCLFWALEQFEEVIAVTFSYGQRHDEEIEVAKRIAEDINIEHHVLDMGLLSQLAPNALTRDDIEVEAGEDGELPSTFVEGRNLLFFSFATILASQKKAKHIVTGVCETDYSGYPDCRDVFVKSLNVSLNLAIGKEFVLHTPLMWLDKKETWELADRLGRLKYIKDETLTCYHGIPGDGCGECPACNLRRAGYEQYLEQKEREGL

SEQ ID NO: 39532 - protein, 223 aa, Marinococcus luteus
  misc_feature (1)..(223): tr|A0A1H2VFA8|A0A1H2VFA8_9BACI 7-cyano-7-deazaguanine s ynthase OS=Marinococcus luteus OX=1122204 GN=queC PE=3 SV=1
MGFQNDKAVVVFSGGQDSTTCLFWALEQFEEVIAVTFSYGQRHDEEIEVAKRIAEDINIEHHVLDMGLLSQLAPNALTRDDIEVEAGEDGELPSTFVEGRNLLFFSFATILASQKKAKHIVTGVCETDYSGYPDCRDVFVKSLNVSLNLAIGKEFVLHTPLMWLDKKETWELADRLGRLEYVKDETLTCYHGIPGDGCGECPACKLRRAGYEQYMEQKERKEL

SEQ ID NO: 39533 - protein, 219 aa, Marinomonas alcarazii
  misc_feature (1)..(219): tr|A0A318V7X9|A0A318V7X9_9GAMM 7-cyano-7-deazaguanine s ynthase OS=Marinomonas alcarazii OX=491949 GN=queC PE=3 SV=1
MSEKAVVVYSGGMDSFTVLNTAIQNGLDVYALSFNYGQKHSKELEVAARVCNELGVTHKVVDITAINSLMANSSLTSDAEIPEGHYEDDNMKSTVVPNRNMVLLSMAIAYAVSLEAGKVYYGAHSGDHHIYPDCRPEFVEAMNAVSKIANYQSVEIVTPFLHSSKGEILKAGLEMNLNYANTWTCYNGREKSCGKCGACYERLEAFAEQGTTDPLDYEV

SEQ ID NO: 39534 - protein, 219 aa, Marinomonas aquimarina
  misc_feature (1)..(219): tr|A0A1A8TEU8|A0A1A8TEU8_9GAMM 7-cyano-7-deazaguanine s ynthase OS=Marinomonas aquimarina OX=295068 GN=queC PE= 3 SV=1
MSNKAVVVYSGGMDSYTVLHTALAEGKEVYALSFNYGQRHSKELDVAAAVCAKHGIPHKIVDISAINDLMAGSSLTSDIEIPEGHYAEDSMKNTVVPNRNMVLLSMAIAYAVSLEAPEVYYGAHSGDHHIYPDCRPEFVHAMNAVSKIANYEPVEIVTPFLNSSKGEILAAGLAMNLDYGNTWTCYNGREHACGKCGACNERLEAFAEQGITDPLTYEA

SEQ ID NO: 39535 - protein, 220 aa, Marinomonas aquiplantarum
  misc_feature (1)..(220): tr|A0A366CYL5|A0A366CYL5_9GAMM 7-cyano-7-deazaguanine s ynthase OS=Marinomonas aquiplantarum OX=491951 GN=queC PE=3 SV=1
MSEKAVVVYSGGMDSFTVLNTAIQEGLEVYAISFNYGQKHNKELEVAAQVCQNLNIPHKIVDITAINSLMANSSLTSGEDIPEGHYESDSMKSTVVPNRNMVLLSMAIAYAVSLEAGKVYYGAHSGDHHIYPDCRPEFVDAMNAVAQIANYQAVDIVTPFLHSSKGDILKAGLDMGLNYGNTWTCYNGREKSCGKCGACHERLEAFAEQGKTDPLEYELN

SEQ ID NO: 39536 - protein, 219 aa, Marinomonas balearica
  misc_feature (1)..(219): tr|A0A4R6ME23|A0A4R6ME23_9GAMM 7-cyano-7-deazaguanine s ynthase OS=Marinomonas balearica OX=491947 GN=queC PE=3 SV=1
MTSKAVVVYSGGMDSFTVLNKAVREGKEVYALSFNYGQKHSKELIVAASVCKDLGVPHKVVDISAINELMAGSSLTDAIDIPEGHYAEDSMKSTVVPNRNMVLLSMAIAYAVSLEAPEVYYGAHSGDHHIYPDCRPEFVNAMNNVSKIANYQSVEIVTPFLSSSKGDILKAGLEMGLNYENTWTCYNGREKACGKCGACTERLEAFSEQQATDPLLYEV

SEQ ID NO: 39537 - protein, 219 aa, Marinomonas communis
  misc_feature (1)..(219): tr|A0A4R6X7N1|A0A4R6X7N1_9GAMM 7-cyano-7-deazaguanine s ynthase OS=Marinomonas communis OX=28254 GN=queC PE=3 S V=1
MSNKAVVVYSGGMDSYTVLHTALAEGKEVYALSFNYGQRHSKELDVAAAVCAKHGIPHKVVDISAINSLMAGSSLTSEIDIPEGHYAEESMKNTVVPNRNMVLLSMAIAYAVSLEAPEVYYGAHSGDHHIYPDCRPEFVHAMNAVSKIANYEPVEIVTPFLNNSKGEILAAGLAINLDYSDTWTCYNGREKACGKCGACNERLEAFTEQGVTDPLNYEA

SEQ ID NO: 39538 - protein, 220 aa, Marinomonas foliarum
  misc_feature (1)..(220): tr|A0A368ZQI1|A0A368ZQI1_9GAMM 7-cyano-7-deazaguanine s ynthase OS=Marinomonas foliarum OX=491950 GN=queC PE=3 SV=1
MMSEKAVVVYSGGMDSFTVLNTAIENGLDVYALSFNYGQKHSKELDVATKVCQALNIPHKVVDITAINSLMANSSLTSDADIPEGHYEDDNMKSTVVPNRNMVLLSMAIAYAVSLEAGKVYYGAHSGDHHIYPDCRPEFVEAMNAVSKIANYQSVEIVTPFLHASKGEILKVGLDMKLDYANTWTCYNGREKSCGKCGACCERLEAFAEQGKKDPLDYEA

SEQ ID NO: 39539 - protein, 219 aa, Marinomonas fungiae
  misc_feature (1)..(219): tr|A0A0K6IK82|A0A0K6IK82_9GAMM 7-cyano-7-deazaguanine s ynthase OS=Marinomonas fungiae OX=1137284 GN=queC PE=3 SV=1
MSNKAVVVYSGGMDSYTVLHTALAEGKEVYALSFNYGQRHSKELDVAAAVCAKHGISHKIVDISAINSLMAGSSLTSDIEIPEGHYAEDSMKNTVVPNRNMVLLSMAIAYAVSLEAPEVYYGAHSGDHHIYPDCRPEFVHAMNAVSKIANYEPVEIVTPFLNSSKGEILAAGLGMNLDYADTWTCYNGREKACGKCGACNERLEAFAEQGVTDPLIYEV

SEQ ID NO: 39540 - protein, 219 aa, Marinomonas gallaica
  misc_feature (1)..(219): tr|A0A1C3JUH1|A0A1C3JUH1_9GAMM 7-cyano-7-deazaguanine s ynthase OS=Marinomonas gallaica OX=1806667 GN=queC PE=3 SV=1
MSNKAVVVYSGGMDSYTVLHTALAAGKDVYALSFNYGQRHSKELDVAAKVCQKFNIPHKVVDISAINSLMAGSSLTDDIEIPEGHYAEDSMKNTVVPNRNMVLLSMAIAYAVSLEAPEVYYGAHAGDHHIYPDCRSEFVHAMNAVSQIANYEPVEIVTPFLNSSKGEILAAGLAMDLNYGDTWTCYNGREKACGKCGACNERMEAFNEQGVTDPLSYEV

SEQ ID NO: 39541 - protein, 219 aa, Marinomonas hwangdonensis
  misc_feature (1)..(219): tr|A0A3M8Q3B2|A0A3M8Q3B2_9GAMM 7-cyano-7-deazaguanine s ynthase OS=Marinomonas hwangdonensis OX=1053647 GN=queC PE=3 SV=1
MSEKAVVVYSGGMDSFTVLNTAIQNGLEVYALSFNYGQKHSKELEVAAQVCRELGVSHKVVDITAINSLMANSSLTGDAEIPEGHYESDSMKSTVVPNRNMVLLSMAIAYAVSLEAGKVYYGAHSGDHHIYPDCRPEFVEAMNAVSKIANYQSVEIVTPFLHASKGEILKAGLSMNLNYANTWTCYNGREKSCGKCGACNERLEAFAEQGKTDPLEYEA

SEQ ID NO: 39542 - protein, 219 aa, Marinomonas mediterranea
  misc_feature (1)..(219): tr|F2JTI9|F2JTI9_MARM1 7-cyano-7-deazaguanine synthase OS=Marinomonas mediterranea (strain ATCC 700492 / JCM 2 1426 / NBRC 103028 / MMB-1) OX=717774 GN=queC PE=3 SV=1
MTNKAVVVYSGGMDSFTVLNKAIKDGKDVYALSFNYGQRHSKELIVAAKVCQDLNIPHKVVNISAINELMAGSSLTDEIEIPEGHYAEESMKSTVVPNRNMVLLSMAIAYAVSLEAPEVYYGAHSGDHHIYPDCRPAFVNAMNDVSKIANYQSVEIVTPYLSNSKGDILEDGLTMGLNYANTWTCYNGREKACGKCGACTERLEAFSEQNTTDPLAYEV

SEQ ID NO: 39543 - protein, 219 aa, Marinomonas polaris
  misc_feature (1)..(219): tr|A0A1M5A0C6|A0A1M5A0C6_9GAMM 7-cyano-7-deazaguanine s ynthase OS=Marinomonas polaris DSM 16579 OX=1122206 GN= queC PE=3 SV=1
MSEKAVVVYSGGMDSFTVLNAAIQNGLDVYALSFNYGQKHSKELEVAARVCRELGVSHKIVDITAINSLMANSSLTGDAEIPEGHYEDDNMKSTVVPNRNMVLLSMAIAYAVSLEAGKVYYGAHSGDHHIYPDCRPEFVEAMNAVSKIANYQSVEIVTPFLHSSKGEILKTGLKMDLDYANTWTCYNGREKSCGKCGACYERLEAFAEQGKTDPLDYEV

SEQ ID NO: 39544 - protein, 219 aa, Marinomonas pollencensis
  misc_feature (1)..(219): tr|A0A3E0DTL8|A0A3E0DTL8_9GAMM 7-cyano-7-deazaguanine s ynthase OS=Marinomonas pollencensis OX=491954 GN=queC P E=3 SV=1
MSEKAVVVYSGGMDSFTVLNTAIQEGLEVYALSFNYGQKHSKELIVAAEVCKNLNIPHKVVDITAINSLMAGSSLTSDSDIPEGHYENESMKSTVVPNRNMVLLSMAIAYAVSLESGKVYYGAHSGDHHIYPDCRPEFVDAMNAVSKIANYQSVEIVTPFLHASKGEILQAGLAMNLDYANSWTCYNGREKSCGKCGACNERLEAFAELGKTDPLAYEA

SEQ ID NO: 39545 - protein, 220 aa, Marinomonas posidonica
  misc_feature (1)..(220): tr|F6CRR6|F6CRR6_MARPP 7-cyano-7-deazaguanine synthase OS=Marinomonas posidonica (strain CECT 7376 / NCIMB 144 33 / IVIA-Po-181) OX=491952 GN=queC PE=3 SV=1
MSEKAVVVYSGGMDSFTVLNTAIQQGLEVYAISFNYGQKHSKELQVAAQVCQSLNIPHKIVDITAINSLMANSSLTSDEDIPEGHYESDSMKSTVVPNRNMVLLSMAIAYAVSLEAGKVYYGAHSGDHHIYPDCRPEFVDAMNAVAQIANYQAVDIVTPFLHSSKGEILKAGLDMKLNYGNTWTCYNGREKSCGKCGACNERLEAFAEQGQTDPLEYELS

SEQ ID NO: 39546 - protein, 219 aa, Marinomonas primoryensis
  misc_feature (1)..(219): tr|A0A2Z4PTM9|A0A2Z4PTM9_9GAMM 7-cyano-7-deazaguanine s ynthase OS=Marinomonas primoryensis OX=178399 GN=queC P E=3 SV=1
MPEKVVVVYSGGMDSFTVLNTAIQNGLDVYALSFDYGQKHSKELEVAAQVCRTLGVSHKVVDITAINSLMANSSLTGDTKIPEGHYEDDSMKSTVVPNRNMVLLSMAIAYAVSLEAGKVYYGAHSGDHHIYPDCRPEFVDAMNAVSKIANYQSVEIVTPFLYSSKGDILKAGLSMNLDYANTWTCYNGREKSCGKCGACCERLDAFREQGKTDPLDYEI

SEQ ID NO: 39547 - protein, 219 aa, Marinomonas profundimaris
  misc_feature (1)..(219): tr|W1RNB4|W1RNB4_9GAMM 7-cyano-7-deazaguanine synthase OS=Marinomonas profundimaris OX=1208321 GN=queC PE=3 SV =1
MSEKAVVVYSGGMDSFTVLNTAIQSGLDVYALSFDYGQKHNKELNVAAQVCKDLGISHKIVDITAINSLMANSSLTGDAEIPEGHYEDDNMKSTVVPNRNMVLLSMAIAYAVSLEAGKVYYGAHSGDHHIYPDCRPEFVEAMNAVSKIANYQSVEIVTPFLHSSKGDILKAGLAMNLNYANTWTCYNGREKSCGKCGACVERLEAFSEQGKMDPLVYEA

SEQ ID NO: 39548 - protein, 219 aa, Marinomonas rhizomae
  misc_feature (1)..(219): tr|A0A366JC70|A0A366JC70_9GAMM 7-cyano-7-deazaguanine s ynthase OS=Marinomonas rhizomae OX=491948 GN=queC PE=3 SV=1
MSEKAVVVYSGGMDSFTVLNTAIQNGLDVYALSFNYGQKHSKELEVAARVCRELGVSHKVVDITAINSLMANSSLTGDTEIPEGHYEDDNMKSTVVPNRNMVLLSMAIAYAVSLEAGKVYYGAHSGDHHIYPDCRPEFVDAMNAVSKIANYQSVEIVTPFLYSSKGEILKTGLEMNLNYANTWTCYNGREKSCGKCGACCERLEAFEEQGKIDPLDYEI

SEQ ID NO: 39549 - protein, 219 aa, Marinomonas sp.
  misc_feature (1)..(219): tr|A0A2M8KAD8|A0A2M8KAD8_9GAMM 7-cyano-7-deazaguanine s ynthase OS=Marinomonas sp. BSi20584 OX=1594462 GN=queC PE=3 SV=1
MSEKAVVVYSGGMDSFTVLNTAIQNGLDVYALSFNYGQKHSKELEVAAQVCRELGVSHKIIDITAINSLMANSSLTGDTEIPEGHYEDDNMKSTVVPNRNMVLLSMAIAYAVSLEAGKVYYGAHSGDHHIYPDCRPEFVEAMNAVSKIANYQSVEIVTPFLHSSKGEILKTGLKMDLDYANTWTCYNGREKSCGKCGACYERLEAFAEQGKTDPLDYEV

SEQ ID NO: 39550 - protein, 219 aa, Marinomonas sp.
  misc_feature (1)..(219): sp|A6VX48|QUEC_MARMS 7-cyano-7-deazaguanine synthase OS =Marinomonas sp. (strain MWYL1) OX=400668 GN=queC PE=3 SV=1
MSEKAVVVYSGGMDSFTVLNTAIQNGLDVYALSFNYGQKHSKELEVAAHVCRKLGISHKVVDITAINSLMANSSLTGDAEIPEGHYEDDNMKSTVVPNRNMVLLSMAIAYAVSLEAGKVYYGAHSGDHHIYPDCRPEFVEAMNAVSKIANYQSVEIVTPFLHSSKGEILKAGLDMNLNYANTWTCYNGREKSCGKCGACYERLEAFAEQGKTDPLEYEA

SEQ ID NO: 39551 - protein, 219 aa, Marinomonas spartinae
  misc_feature (1)..(219): tr|A0A1A8TKH4|A0A1A8TKH4_9GAMM 7-cyano-7-deazaguanine s ynthase OS=Marinomonas spartinae OX=1792290 GN=queC PE= 3 SV=1
MSEKAVVVYSGGMDSFTVLNTALKSGLEVYALSFNYGQKHSKELQVAAQVCRELQVPHKIVDITAINSLMANSSLTGDEDIPEGHYESDNMKSTVVPNRNMVLLSMAIAYAVSLEAGKVYYGAHSGDHHIYPDCRPEFVTAMNAVSNIANYQPVEIVTPFLHSSKGDILKAGLAMNLDYAKTWTCYNGREKPCGKCGACNERLEAFAEQGITDPLEYEA

SEQ ID NO: 39552 - protein, 219 aa, Marinomonas ushuaiensis
  misc_feature (1)..(219): tr|X7E944|X7E944_9GAMM 7-cyano-7-deazaguanine synthase OS=Marinomonas ushuaiensis DSM 15871 OX=1122207 GN=queC PE=3 SV=1
MSEKAVVVYSGGMDSFTVLNTAIQNGLDVYALSFNYGQKHSKELEVAALVCKELNIPHKVVDITAINSLMANSSLTGGADIPEGHYEDDNMKSTVVPNRNMVLLSMAIAYAVSLEIGKVYYGAHSGDHHIYPDCRPEFVEAMNAVSKIANYQSVEIVTPFLHSSKGAILKAGLDMQLDYGKTWTCYNGREKSCGKCGACHERLEAFTEQGKTDPLDYEA

SEQ ID NO: 39553 - protein, 221 aa, Marinoscillum sp.; identical to SEQ ID NO: 38291
  misc_feature (1)..(221): tr|A0A2D7TG66|A0A2D7TG66_9BACT 7-cyano-7-deazaguanine s ynthase OS=Marinoscillum sp. OX=2024838 GN=queC PE=3 SV =1

SEQ ID NO: 39554 - protein, 233 aa, Marinovum algicola
  misc_feature (1)..(233): tr|A0A0H4L206|A0A0H4L206_9RHOB 7-cyano-7-deazaguanine s ynthase OS=Marinovum algicola DG 898 OX=988812 GN=queC PE=3 SV=1
MKTLVICSGGLDSVSLAHITADEHQLTRLVSFDYGQRHRKELDFAAAAAQRLGVPHHLMDMRGIGAALSGSALTDDIDVPDGHYAEDTMRITVVPNRNAIMLAIGFGVAAANGDEAVATAVHGGDHFIYPDCRPGFARAFDAMQQAALDGYAEVRLHTPFVERSKADIVREGARHGTPFAETWSCYKGGALHCGRCGTCVERREAFHIAGVPDPTAYADPEYWATAIAEREAT

SEQ ID NO: 39555 - protein, 236 aa, Marinovum sp.
  misc_feature (1)..(236): tr|A0A2E7WGA8|A0A2E7WGA8_9RHOB 7-cyano-7-deazaguanine s ynthase OS=Marinovum sp. OX=2024839 GN=queC PE=3 SV=1
MKTIVICSGGLDSVTLAHRVAAQQDLTALVSFNYGQRHKKELDFAAACSTRLGVPHHIIDIRAIGAALSGSALTDAIDVPDGHYAEDSMKVTVVPNRNAIMLTIAFGIAAAEKADAVAAAVHGGDHFIYPDCRPGFIDAFQVMQNQALEGYADVKLFTPYVHLSKADIVRDGVTHKAPFDATWSCYKGGAYHCGRCGTCVERREAFEIANVPDPTRYDDPDFWRQAITANPLGKET

SEQ ID NO: 39556 - protein, 226 aa, Marinovum sp.
  misc_feature (1)..(226): tr|A0A2D7ZBJ3|A0A2D7ZBJ3_9RHOB 7-cyano-7-deazaguanine s ynthase OS=Marinovum sp. OX=2024839 GN=queC PE=3 SV=1
  misc_feature (55)..(55): Xaa can be any naturally occurring amino acid
  misc_feature (213)..(213): Xaa can be any naturally occurring amino acid
MSTLVLCSGGLDSVTLAYKVHAESHLSYLLSFDYGQRHKKELNFAEKASSALGVXHEIIDISNLTKILGSSALTDSTPVPDGHYAEQSMMTTVVPNRNPIMLTIAFALAARENLQTVAAAVHAGDHFIYPDCRPEFVDAFREMQLLALDGVSKIDLYAPFVGSSKADIVSVGSELDVPFQETWSCYKGLERHCGRCGTCVERLEAFHLAGIDXPTSYDDTEFWKTA

SEQ ID NO: 39557 - protein, 228 aa, Mariprofundus aestuarium
  misc_feature (1)..(228): tr|A0A2K8L4A8|A0A2K8L4A8_9PROT 7-cyano-7-deazaguanine s ynthase OS=Mariprofundus aestuarium OX=1921086 GN=queC PE=3 SV=1
MSKAKAVVLLSGGLDSSTALAWAVKEMGWQCHTVAFDYGQRHRIELAASEHVARFFGVTDHRTISVDMRTIGHSALTSDMPVPKDEAGGAEVPTTYVPARNLIFLSLAAGLAETVGATKLVIGANVVDYSGYPDCRPEFLEAFARCARIGTQIGAEGGTLDIEAPLINLGKSEIISMGLKLGLDYGLTRSCYDPLSDGMPCGHCDSCHYRKIGFAELGISDPLPYPDH

SEQ ID NO: 39558 - protein, 228 aa, Mariprofundus ferrinatatus
  misc_feature (1)..(228): tr|A0A2K8L457|A0A2K8L457_9PROT 7-cyano-7-deazaguanine s ynthase OS=Mariprofundus ferrinatatus OX=1921087 GN=que C PE=3 SV=1
MSNVKAVVLLSGGLDSSTALAWAVKEMGWQCHTVAFDYGQRHRIELEASEAVARFFGVVDHRVIKVDLRAIGGSSLTSETPVPKDEAGRAGIPSTYVPARNLIFLSLAAGLAEAVGATRLVIGANVVDYSGYPDCRPEFLDAFIKAARLGTKAGSEGGDIEISAPLIELGKSEIIALGLRLGLDYGLTRSCYDPLPNGMPCGHCDSCHYRKQGFAELGGSDPLTYPQE

SEQ ID NO: 39559 - protein, 230 aa, Mariprofundus ferrooxydans
  misc_feature (1)..(230): tr|Q0F2M0|Q0F2M0_9PROT 7-cyano-7-deazaguanine synthase OS=Mariprofundus ferrooxydans PV-1 OX=314345 GN=queC PE =3 SV=1
MSTGVTHAVVLLSGGLDSSTALAWAVRKMGWQCHTVAFDYGQRHRIELDASAAIAHSFGVTDHRVISVDLRAIGHSALTSATPVPKDEAGHAGIPSTYVPARNLIFLSLAAGLAEAVCATRLVIGANVVDYSGYPDCRQEFLDAFVRTALLGTKAGSEGGDLQIAAPLIQLGKAEIIELGLDLGLDYGLTRSCYDPLPGGSPCGHCDSCYYRRQGFEQLGRQDPLAYPDN

SEQ ID NO: 39560 - protein, 229 aa, Mariprofundus micogutta
  misc_feature (1)..(229): tr|A0A1L8CPT0|A0A1L8CPT0_9PROT 7-cyano-7-deazaguanine s ynthase OS=Mariprofundus micogutta OX=1921010 GN=queC P E=3 SV=1
MGKQNRAVVLLSGGLDSSTALAWAIKTQGWDCHTVAFDYGQRHKVELKSSARVAASLGVTDHRIINVDMRTIGHSALTSDLAVPKDDEDHVGVPVTYVPARNLIFLSLAAGLAETVAASYLVIGANVVDYSGYPDCRPEFLEAFVQAARIGTKAGSEGKKLEISAPLIELGKDEIIKLGTELGLDYGLTSSCYDPRPDGAPCGHCDSCFYRRKGFERLGLEDPLVYPDF

SEQ ID NO: 39561 - protein, 230 aa, Mariprofundus sp.
  misc_feature (1)..(230): tr|A0A498DHW1|A0A498DHW1_9PROT 7-cyano-7-deazaguanine s ynthase OS=Mariprofundus sp. EBB-1 OX=2650971 GN=queC P E=3 SV=1
MNTTSKKAVVLLSGGLDSSTALAWAVREQGWECHTVAFDYGQRHRIELEASEQVARAFGVTDHRVIKVDLRSIGHSALTSDMPVPKDHADTAEIPSTYVPARNLIFLSLAAGLAEAVQATRLVIGANIVDYSGYPDCRPEFMHSFVRTALLGTKAGSEGGDLEIAAPLITLKKSEIIALGLKLGLDYGLTRSCYDPLPDGAPCGHCDSCFFRQQGFSDLGQQDPLPYPEQ

SEQ ID NO: 39562 - protein, 219 aa, Marisediminitalea aggregata
  misc_feature (1)..(219): tr|A0A1M5REI5|A0A1M5REI5_9ALTE 7-cyano-7-deazaguanine s ynthase OS=Marisediminitalea aggregata OX=634436 GN=que C PE=3 SV=1
MSEKVIVIYSGGMDSYTVLNKAIEDGKTPYALSFDYGQRHKKELDYAANVCKELGISHKIVDISAINSLVGGSALTDDIEVPEGHYEEPSMKQTVVPNRNMILLSLAVGYAVSMEANKVYYGAHSGDHAIYPDCRPEFVEKMNDVCAIANYEAIEIVTPYLKVSKTAILTDGLRMGLDYGKSWTCYNGREHACGKCGACQERLEAFRDNNATDPLEYES

SEQ ID NO: 39563 - protein, 233 aa, Maritalea myrionectae
  misc_feature (1)..(233): tr|A0A2R4MHN6|A0A2R4MHN6_9RHIZ 7-cyano-7-deazaguanine s ynthase OS=Maritalea myrionectae OX=454601 GN=queC PE=3 SV=1
MKTLVICSGGLDSVSLAHIIADQHELTRLVSFDYGQRHRKELDFAAAAAKRLNVPHHLMDMRGIGAALSGSALTDDIDVPDGHYAEDTMRVTVVPNRNAIMLTIGFGIAAANGDEAVATAVHGGDHFIYPDCRPEFTRAFDKMQKAALDGYANVQLYTPFVERSKADIVKEGAAHSTPFAETWSCYKGGEAHCGRCGTCVERREAFHLAGVEDPTLYADPDYWLEAVAEGEKR

SEQ ID NO: 39564 - protein, 616 aa, Maritimibacter alkaliphilus
  misc_feature (1)..(616): tr|A3VGT3|A3VGT3_9RHOB Uncharacterized protein OS=Marit imibacter alkaliphilus HTCC2654 OX=314271 GN=RB2654_144 20 PE=4 SV=1
MVGGAIPSERRVRCLPPLTKSGGDAQLRLEIDGNPAGVKVCISHLNAQLVADLPDRALDLLEVAAVVYGADAAVSRGGTADQQMGKMWHRHFQVDMPVRDRAFWQSEDVVLALEEMLMFLSGDRFVFRFVAKEDGEAERSLFFKFDEGSAWQATRVLMFSGGLDSFAGALEEIAERGERVALVSHFSASKIAPVQRQLHKTLTEKFGENSCRHIPVQVQMVGRGLKEGTHRARSFLFAALGAVTARAFGLNRVSFFENGVVSLNLSPVGNVLGTRATRTTHPQTLSRFSDFLGRVFASETRIDNPFFWRTKKEVVETVARLGMSEQIAQTRSCADVHNQTKQHIHCGRCSQCIDRRFAVLAAGLERFDPEEAYRVALMDDTRSDVRDREVALSYLRSARAYEHITPSELERALPAVISAVAHLAQPTETAIEMIARLLKRHGIGVSDVMRATLKAKSAEDFPDGSLPRLYGEAQKANALPNIPVSSRPIVEPAKPMVMEVNPQRRRVVIDDRIFIERNATADLLIVLADKWLEGAGQGLMPLDYPLANTNFLTKALKVDGDEAVRQRVNRAKVVMRKKMASCGREPEEADAIIENQPWLGYRLTPDRVTVRKAKAE

SEQ ID NO: 39565 - protein, 232 aa, Maritimibacter sp.
  misc_feature (1)..(232): tr|A0A2U2CLC9|A0A2U2CLC9_9RHOB 7-cyano-7-deazaguanine s ynthase OS=Maritimibacter sp. 55A14 OX=2174844 GN=queC PE=3 SV=1
MKTLVICSGGLDSVSLAHKVAAEQELAGLISFDYGQRHRKELDFAARAADRLGTGFELIDMRAIGAHLSGSALTDDLDVPDGHYAEETMKVTVVPNRNAIMLAVAFGIAAARGADAVAAAVHGGDHFIYPDCRPGFIDAFETMQRAALEGYADIRLYTPFVHLPKSAIVTEGARHGTPFAETWSCYKGGARHCGRCGTCVERREAFHLAGVPDPTDYADPDFWRAATAAEGA

SEQ ID NO: 39566 - protein, 233 aa, Marivivens niveibacter
  misc_feature (1)..(233): tr|A0A251WY79|A0A251WY79_9RHOB 7-cyano-7-deazaguanine s ynthase OS=Marivivens niveibacter OX=1930667 GN=queC PE =3 SV=1
MKTIVICSGGLDSVSLAYKVAAENTLTRLVSFDYGQRHAKEIDYAARAAQALNVPHTVIDMRNIGATLTGSALTDDIDVPDGHYAEETMRITVVPNRNAIMLTIAFGIAAANQDDAVATAVHGGDHFIYPDCRPAFTESFNAMQKAALDGYADVTLYTPFVHGSKADIVTAGAAVNTPFADTWSCYKGGENHCGRCGTCVERREAFDLAGVTDPTVYDDPDYWKQAIAERGNA

SEQ ID NO: 39567 - protein, 236 aa, Massilia albidiflava
  misc_feature (1)..(236): tr|A0A411X474|A0A411X474_9BURK 7-cyano-7-deazaguanine s ynthase OS=Massilia albidiflava OX=321983 GN=queC PE=3 SV=1
MMTRDAALVLFSGGQDSTTCLAWALDRYERVETIGFDYGQRHAIELAMRPQLLAKLRVLRPDWDARLGEDHMIDLGLISQLSHTAMTEEIEITMQANGLPNTFVPGRNLMFMMVAATLAYRRGMNVLVGGMCETDFSGYPDCRDDTMKALQVALNLGMDTRSKVETPLMWLDKAQTWELAENLGGQPLVDLIRADTHTCYKGERGALHDWGYGCGECPACALRARGYQNYVAGKAA

SEQ ID NO: 39568 - protein, 234 aa, Massilia armeniaca
  misc_feature (1)..(234): tr|A0A2R4CG45|A0A2R4CG45_9BURK 7-cyano-7-deazaguanine s ynthase OS=Massilia armeniaca OX=2072590 GN=queC PE=3 S V=1
MKTDAALVLFSGGQDSTTCLAWALDRYARVETIGFDYGQRHAIELTMRPELLGKLRAQRPDWAAKLGEDHMVDLGLIKQLSHTAMTEDIEITMQANGLPNTFVPGRNLMFMMVAATLAYRRGLNVLVGGMCETDFSGYPDCRDDTMKALQVALNLGMDTRVKLETPLMWLDKAETWELAERLGGQALVDLIRADTHTCYKGERGALHDWGYGCGECPACALRARGYQEYAARHG

SEQ ID NO: 39569 - protein, 238 aa, Massilia aurea
  misc_feature (1)..(238): tr|A0A422QP31|A0A422QP31_9BURK 7-cyano-7-deazaguanine s ynthase OS=Massilia aurea OX=373040 GN=queC PE=3 SV=1
MTIQSPDTALVLFSGGQDSTTCLAWALQRYARVETIGFDYGQRHAIELEVRPTLLSKLRALNPGWDARLGDDHMIDLSLISKISDTALTSNVEIAMQENGLPNTFVPGRNLMFMTVAATVAYRRGLNVLVGGMCETDFSGYPDCRDDTMKALQVALNLGMATRLKVETPLMWIDKAQTWELAQQEGGDTLVDLIRFDTHTCYLGERGDAHPWGHGCGTCPACALRARGYEQYVARKQA

SEQ ID NO: 39570 - protein, 238 aa, Massilia eurypsychrophila
  misc_feature (1)..(238): tr|A0A2G8TDP6|A0A2G8TDP6_9BURK 7-cyano-7-deazaguanine s ynthase OS=Massilia eurypsychrophila OX=1485217 GN=queC PE=3 SV=1
MLQPDTALVLFSGGQDSTTCLAWALERYARVETIGFDYGQRHAIELTVRPAVLAGVRAIKPEWDARLGEDHMVDLSVIGRISDTALTSNVEIAMQENGLPNTFVPGRNLLFMTVAATLAYRRGLNVLVGGMCETDFSGYPDCRDDTMKALQVALNLGMATRVKLETPLMWIDKKQTWQLAQAAGGMALVDLIREQTHTCYLGERGTLRAWGYGCGTCPACELRARGYAQFAAEGASAS

SEQ ID NO: 39571 - protein, 236 aa, Massilia flava
  misc_feature (1)..(236): tr|A0A562PLX5|A0A562PLX5_9BURK 7-cyano-7-deazaguanine s ynthase OS=Massilia flava OX=871742 GN=queC PE=3 SV=1
MMKRDCALVLFSGGQDSTTCLAWALDRYERVETIGFDYGQRHAIELTMRPELLRKLRALRPDWDAKLGEDHMIDLGLISQLSQTAMTEDIEITMQANGLPNTFVPGRNLMFMTVAATVAYRRGLTVLVGGMCETDFSGYPDCRDDTMKALQVALNLGMDTRNKLETPLMWLDKAETWELAERLGGQPLVDLIRADTHTCYKGERGELHDWGYGCGECPACALRARGYQNYVAKKAA

SEQ ID NO: 39572 - protein, 235 aa, Massilia glaciei
  misc_feature (1)..(235): tr|A0A2U2HIT6|A0A2U2HIT6_9BURK 7-cyano-7-deazaguanine s ynthase OS=Massilia glaciei OX=1524097 GN=queC PE=3 SV= 1
MQQADTALVLFSGGQDSTTCVAWALERFARVETVGFDYGQRHAVELAVRPRLLAGLRALSPEWDARLGADHLLDLSLIGSISDTALTSEVAISMQENGLPNTFVPGRNLMFLTVAATLAYRRGLGVLVGGMCETDFSGYPDCRDDTIKALQVALNLGMASRFRLETPLMWLTKKQTWQLAHAAGGAPLVELIRADTHTCYLGERGTLHAWGHGCGTCPACELRARGHAEYLAEGA

SEQ ID NO: 39573 - protein, 259 aa, Massilia lurida
  misc_feature (1)..(259): tr|A0A562QWH1|A0A562QWH1_9BURK 7-cyano-7-deazaguanine s ynthase OS=Massilia lurida OX=1036180 GN=queC PE=3 SV=1
MMKSDAALVLFSGGQDSTTCLAWALDRYERVETIGFDYGQRHAIELTMRPQLLARLRAQRPDWAAKLGEDHMIDLGLISQLSHTAMTEDIEITMQANGLPNTFVPGRNLMFMTVAATLAYRRGLNVLVGGMCETDFSGYPDCRDDTMKALQVALNLGMDTRNKLETPLMWLDKAETWELAETLGGQALVDLIRADTHTCYKGERGALHDWGYGCGECPACALRARGYRNYVAKKAATAVAADGAAGATAGGAPGAAAGA

SEQ ID NO: 39574 - protein, 236 aa, Massilia lutea
  misc_feature (1)..(236): tr|A0A4P6KWU9|A0A4P6KWU9_9BURK 7-cyano-7-deazaguanine s ynthase OS=Massilia lutea OX=321985 GN=queC PE=3 SV=1
MMTSDAALVLFSGGQDSTTCLAWALDRYERVETIGFDYGQRHAIELTMRPQLLAKLRTLRPDWDAKLGEDHMIDLGLISQLSHTAMTEEIEITMQANGLPNTFVPGRNLMFMMVAATLAYRRGMNVLVGGMCETDFSGYPDCRDDTMKALQVALNLGMDTRNKLETPLMWLDKAQTWELAEDLGGQPLVDLIRADTHTCYKGERGALHDWGYGCGECPACALRARGYHNYVAGKAA

SEQ ID NO: 39575 - protein, 242 aa, Massilia namucuonensis
  misc_feature (1)..(242): tr|A0A1I7IG79|A0A1I7IG79_9BURK 7-cyano-7-deazaguanine s ynthase OS=Massilia namucuonensis OX=1035707 GN=queC PE =3 SV=1
MIATDAALVLFSGGQDSTTCLAWALERYNRVETIGFDYGQRHAIELQVRPRVLERLRAYKPEWAARLGEDHMIDLSLISQLSRTAMTEDIEIVMQENGLPNTFVPGRNLMFMTVAATLAYRRGLNVLVGGMCETDFSGYPDCRDDTMKALQVALNLGMDTRVKLETPLMWLDKAQTWTLAESLGGQGLVDLIREGTHTCYLGERGALHDWGYGCGKCPACELRARGYLQYAAAKTAPPADPV

SEQ ID NO: 39576 - protein, 238 aa, Massilia oculi
  misc_feature (1)..(238): tr|A0A2S2DHQ6|A0A2S2DHQ6_9BURK 7-cyano-7-deazaguanine s ynthase OS=Massilia oculi OX=945844 GN=queC PE=3 SV=1
MTTPSSDTALVLFSGGQDSTTCLAWALQRYARVETIGFDYGQRHAIELEVRPSLLSKLRALNPDWDARLGEDHMIDLSLIAKISDTALTSNVAIAMQENGLPNTFVPGRNLMFMTVAATVAYRRGLNVLVGGMCETDFSGYPDCRDDTMKALQVALNLGMATRLKVETPLMWIDKAQTWELAQQEGGDALVDLIRFDTHTCYLGERGDAHPWGHGCGACPACALRARGYEQYVARKQA

SEQ ID NO: 39577 - protein, 237 aa, Massilia phosphatilytica
  misc_feature (1)..(237): tr|A0A2S8H2T6|A0A2S8H2T6_9BURK 7-cyano-7-deazaguanine s ynthase OS=Massilia phosphatilytica OX=2026176 GN=queC PE=3 SV=1
MHLPDTALVLFSGGQDSTTCLAWALERYERVETIGFDYGQRHAIELDVRAPVLAKMRALSATWDQRLGEDHLIDLSLIARISDTALTSNAEIQMQANGLPNTFVPGRNLLFMTVAATVAYRRSLNVLVGGMCETDFSGYPDCRDDTMKALQVALNLGMATRLKVETPLMWIDKKQTWQLAEQCGGEALVDLIRFETHTCYLGERGAPHAWGHGCGKCPACELRARGYEQYAKERASA

SEQ ID NO: 39578 - protein, 236 aa, Massilia plicata
  misc_feature (1)..(236): tr|A0A4V1AU65|A0A4V1AU65_9BURK 7-cyano-7-deazaguanine s ynthase OS=Massilia plicata OX=321984 GN=queC PE=3 SV=1
MKSDAALVLFSGGQDSTTCLAWALDRYQRVETIGFDYGQRHAIELTMRPQLLAKLRAQRPDWAAKLGEDHMIDLSLIKQLSHTAMTEDIEITMQANGLPNTFVPGRNLMFMTVAATLAYRRGLNVLVGGMCETDFSGYPDCRDDTMKALQVALNLGMDTRVKLETPLMWLDKSQTWELAEGLGGTALVDLIRADTHTCYKGERGALHDWGYGCGECPACALRARGYKEYAARAGQA

SEQ ID NO: 39579 - protein, 244 aa, Massilia psychrophila
  misc_feature (1)..(244): tr|A0A2G8T107|A0A2G8T107_9BURK 7-cyano-7-deazaguanine s ynthase OS=Massilia psychrophila OX=1603353 GN=queC PE= 3 SV=1
MLHTDTALVLFSGGQDSTTCLAWALGRYARVETIGFDYGQRHAIELTVRPAVLAGVRALSHEWDARLGEDHVVDLSVIGRISESALTSNVDIAMQENGLPNTFVPGRNLLFMTVAAALAYRRGLNVLVGGMCETDFSGYPDCRDDSMKALQVALNLGMATRLKIETPLMWIDKKQTWELAKSAGGSALVDLIREQTHTCYLGERGALHAWGYGCGTCPACELRARGYAQFAAGMAGVIAAAPVS

SEQ ID NO: 39580 - protein, 235 aa, Massilia sp.
  misc_feature (1)..(235): tr|A0A0Q5H186|A0A0Q5H186_9BURK 7-cyano-7-deazaguanine s ynthase OS=Massilia sp. Leaf139 OX=1736272 GN=queC PE=3 SV=1
MHAPDTALVLFSGGQDSTTCLAWALQRYERVETIGFDYGQRHAIELSVRPTVLEKMRALSPEWDARLGEDHMIDLSLISRISDTALTSNVAIEMQANGLPNTFVPGRNLLFMTVAATVAYRRGLTVLVGGMCETDFSGYPDCRDDTMKALQVALNLGMATRLKVETPLMWIDKKQTWQLAEQAGGTALVDLVRFETHTCYLGERGARHDWGYGCGTCPACELRARGYAQFAAEKG

SEQ ID NO: 39581 - protein, 234 aa, Massilia sp.
  misc_feature (1)..(234): tr|A0A344JLA8|A0A344JLA8_9BURK 7-cyano-7-deazaguanine s ynthase OS=Massilia sp. YMA4 OX=1593482 GN=queC PE=3 SV =1
MKSDAALVLFSGGQDSTTCLAWALDRYARVETIGFDYGQRHAIELTMRPELLGKLRAQRPDWAARLGEDHMIDLGLIKQLSHTAMTEDIEITMQANGLPNTFVPGRNLMFMMVAATLAYRRGLNVLVGGMCETDFSGYPDCRDDTMKALQVALNLGMDTRVKLETPLMWLDKAETWELAGRLGGQALVDLIRADTHTCYKGERGALHDWGYGCGECPACALRARGYREYAARRP

SEQ ID NO: 39582 - protein, 238 aa, Massilia timonae
  misc_feature (1)..(238): tr|K9DJJ9|K9DJJ9_9BURK 7-cyano-7-deazaguanine synthase OS=Massilia timonae CCUG 45783 OX=883126 GN=queC PE=3 S V=1
MTTPSSDTALVLFSGGQDSTTCLAWALQRYARVETIGFDYGQRHAIELEVRPTLLSKLRALNPGWDARLGDDHMIDLSLIAQISDTALTSNVEIAMQENGLPNTFVPGRNLMFMTVAATVAYRRGLNVLVGGMCETDFSGYPDCRDDTMKALQVALNLGMATRLKVETPLMWIDKAQTWELAQQEGGDALVDLIRFDTHTCYLGERGDAHPWGHGCGACPACALRARGYEQYVARKQS

SEQ ID NO: 39583 - protein, 238 aa, Massilia timonae
  misc_feature (1)..(238): tr|A0A1S2NC22|A0A1S2NC22_9BURK 7-cyano-7-deazaguanine s ynthase OS=Massilia timonae OX=47229 GN=queC PE=3 SV=1
MTTPSSDTALVLFSGGQDSTTCLAWALQRYARVETIGFDYGQRHAIELEVRPTLLSKLRALNPGWDARLGDDHMIDLSLIAQISDTALTSNVEIAMQENGLPNTFVPGRNLMFMTVAATVAYRRGLNVLVGGMCETDFSGYPDCRDDTMKALQVALNLGMATRLKVETPLMWIDKAQTWELAQQEGGDALVDLIRFDTHTCYLGERGDAHPWGHGCGTCPACALRARGYEQYVARKQA

SEQ ID NO: 39584 - protein, 236 aa, Massilia umbonata
  misc_feature (1)..(236): tr|A0A4P8HW41|A0A4P8HW41_9BURK 7-cyano-7-deazaguanine s ynthase OS=Massilia umbonata OX=864828 GN=queC PE=3 SV= 1
MMTRDAALVLFSGGQDSTTCLAWALDRYERVETIGFDYGQRHAIELTMRPQLLAKLRTLRPDWAAKLGDDHMIDLGLISQLSHTAMTEDIEITMQANGLPNTFVPGRNLMFMMVAATLAYRRGMNVLVGGMCETDFSGYPDCRDDTMKALQVALNLGMDTRSRLETPLMWLDKAQTWELAEDLGGQPLVDLIRADTHTCYKGERGALHDWGYGCGECPACALRARGYQNYVANQAA

SEQ ID NO: 39585 - protein, 407 aa, Massilia violaceinigra
  misc_feature (1)..(407): tr|A0A2D2DFH5|A0A2D2DFH5_9BURK Uncharacterized protein OS=Massilia violaceinigra OX=2045208 GN=CR152_03835 PE= 4 SV=1
MTSNHRSEQFCSQCGMPHEYDRFTVGAPQALAQHAQLCSYCADPATAATGTYRDSADNTWVLDMLLNIYKTGSDGKRALARMVNLAKVAIPSKVQVLATLVGSLPRRRTESDYDALVLYSGGKDSSYMLIKLAERGLRVCAWMLDQGYQSATAIANAQRLCDKLGVTLVIERPQRTSMDTLFRTGFKVGKSSANVELTRAVMTYGSACMPCFAAIAAASTRFCETHHIPLCFIGTQEGQNRLDLNGKPALAGQGLPRLDALVRKFVTPFRNHAQETHPEAAGILANGACDTVLIPFYEFVKKPEFDDQIRMLEEAGWEMPKNTGACSTNCMMNELGRKVMRTRFGFDLYQVIEAHERRMGNSAPPAVATLEPALDDDAVYLGATLIGLSESEMSEFDIKKVKNHGEH

SEQ ID NO: 39586 - protein, 234 aa, Massilia violaceinigra
  misc_feature (1)..(234): tr|A0A2D2DGE4|A0A2D2DGE4_9BURK 7-cyano-7-deazaguanine s ynthase OS=Massilia violaceinigra OX=2045208 GN=queC PE =3 SV=1
MQQADGALVLFSGGQDSATCLAWALERYGRVETIGFDYGQRHAIELTVRPTVLGKMRALKPDWDARLGEDHMVDLSLISKISDTAMTSNVAIEMQANGLPNTFVPGRNLLFMTVAATVAYRRGLNVLVGGMCETDFSGYPDCRDDTMKALQVALNLGMATRLKLETPLMWIDKKQTWQLAHEAGGDALVDLIREDTHTCYLGERGALHAWGYGCGTCPACALRARGYLQYAGAA

SEQ ID NO: 39587 - protein, 236 aa, Massilia yuzhufengensis
  misc_feature (1)..(236): tr|A0A1I1NYL3|A0A1I1NYL3_9BURK 7-cyano-7-deazaguanine s ynthase OS=Massilia yuzhufengensis OX=1164594 GN=queC P E=3 SV=1
MQSLDTALVLFSGGQDSTTCLAWALQRYARVETIGFDYGQRHAIELEVRPTVLSKMRALNPEWDARLGEDHMIDLSLIAKISDTALTSNVEIAMQANGLPNTFVPGRNLLFMTVAATVAYRRGLTVLVGGMCETDFSGYPDCRDDTMKALQVALNLGMATRLKVETPLMWIDKAQTWELAQQAGGDALVDLIRFDTHTCYLGERGAAHPWGHGCGSCPACALRARGYEQYVARKAA

SEQ ID NO: 39588 - protein, 227 aa, Mastigocladus laminosus
  misc_feature (1)..(227): tr|A0A4D9CE16|A0A4D9CE16_MASLA 7-cyano-7-deazaguanine s ynthase OS=Mastigocladus laminosus UU774 OX=1594576 GN= queC PE=3 SV=1
MKAVILLSGGLDSSTVLYQALADGYECYTISFDYQQRHRRELDSALAIAQKAGVVQNQIVTFDLRQWGGSALTDDTIDLPKKRSLEEMSQNIPVTYVPARNTIFLSFALAYAETIAAERVYIGVNALDYSGYPDCRPDYIQAMQEVFRLGTKQGREGKPITIVAPLLELKKTDIIELGNKLGVPWELTWSCYAGGEVACGVCDSCRLRLAAFAKLGLTDPLNYASLC

SEQ ID NO: 39589 - protein, 196 aa, Mastigocladus laminosus
  misc_feature (1)..(196): tr|A0A370CKW3|A0A370CKW3_MASLA 7-cyano-7-deazaguanine s ynthase (Fragment) OS=Mastigocladus laminosus WC112 OX= 1521402 GN=CBF18_16960 PE=3 SV=1
MKAVILLSGGLDSSTVLYQALADGCECYTISFDYQQRHKRELRSALAIAKTAGVVQNQIVTFDLRQWGGSALTDDTIDLPQMRSLEEMSQNIPVTYVPARNTIFLSFALAYAETITAERVYIGINALDYSGYPDCRPDYIQAMQEVFRLGTKQGREGKTINIVAPLLHLKKTEIIQLGNKLGVPWELTWSCYAGDD

SEQ ID NO: 39590 - protein, 228 aa, Mastigocoleus testarum
  misc_feature (1)..(228): tr|A0A0V8A0I7|A0A0V8A0I7_9CYAN 7-cyano-7-deazaguanine s ynthase OS=Mastigocoleus testarum BC008 OX=371196 GN=qu eC PE=3 SV=1
MKAVILLSGGLDSSTVLYQAHSDGYECYAISFDYQQRHRRELKSARLVAQSAGVVQHQVVNFDLRQWGGSALTDNSLELPRDRDIIQMSQNIPITYVPARNTIFLSFALAYAETIDAKRVYIGVNALDYSGYPDCRPDYIQGMQEVFRLGTKQGREGQPIKIVTPLIDLKKTEIIQLGNKLGVPWELTWSCYAGEEISCGVCDSCLLRLKAFTELGLRDPIPYRGNGR

SEQ ID NO: 39591 - protein, 222 aa, Mediterranea sp.
  misc_feature (1)..(222): tr|A0A1Y4HI51|A0A1Y4HI51_9BACT 7-cyano-7-deazaguanine s ynthase OS=Mediterranea sp. An20 OX=1965586 GN=queC PE= 3 SV=1
MYNETALVVFSGGQDSTTCLFWAKREFKDVRALSFLYGQKHAKEVELAQNIARQAGVTFETMELPLIGTLGHNALTDTSMPMDEQIPDGQTCPNTFVPGRNLFFLSVAAVYARERGIRHLVTGVSQTDYSGYPDCRDSFVKSLNVTLNLAMDAQFVLHTPLMWLDKAGTWALADELGVMDLVRRDTLTCYNGIPGDGCGHCPACKLRREGLEQYLASIHHSY

SEQ ID NO: 39592 - protein, 241 aa, Megamonas funiformis
  misc_feature (1)..(241): tr|H3K6H9|H3K6H9_9FIRM 7-cyano-7-deazaguanine synthase OS=Megamonas funiformis YIT 11815 OX=742816 GN=queC PE= 3 SV=1
MNAVILLSGGLDSTTCMAVAKQQGYDLYPISFDYHQRNKIELEGAKEIAKFFGAKRHLIIDTNMNAIGGSALTDENIEVPKGNVDRKDNDVPVTYVPSRNLIFLSYALGYAEVVKADAIFIGVNAVDFSGYPDCRPEFIQKFQDMADYACKTTAVDGKKIKIVTPLQSLSKKEIIQLGTKLGAPYHLTRSCYNGREKACGVCDSCKLRLRGFAEAGIKDPIAYEKNYNDVTKNHIAYENGE

SEQ ID NO: 39593 - protein, 240 aa, Megamonas hypermegale
  misc_feature (1)..(240): tr|A0A239TM64|A0A239TM64_9FIRM 7-cyano-7-deazaguanine s ynthase OS=Megamonas hypermegale OX=158847 GN=queC PE=3 SV=1
MNAVVLLSGGLDSTTCMAVAKSQGYDLYPISFNYHQRNKIELESAKKIAKFFGAKKHLIIDTNMNAIGGSALTDEHIDVPVGDVNRTEVPATYVPSRNLIFLSYALGYAEVVKASAIFIGVNAVDYSGYPDCRPEFIQKFQELANYACKATVVDGKSIKIVTPLQKLSKKEIIQLGTKLGAPYHLTRSCYNGREKACGMCDSCKLRLKGFAEAGIKDPIEYEKRPIITTTKNHITYENGE

SEQ ID NO: 39594 - protein, 241 aa, Megamonas hypermegale; identical to SEQ ID NO: 39592
  misc_feature (1)..(241): tr|A0A378NT97|A0A378NT97_9FIRM 7-cyano-7-deazaguanine s ynthase OS=Megamonas hypermegale OX=158847 GN=queC PE=3 SV=1

SEQ ID NO: 39595 - protein, 241 aa, Megamonas rupellensis; identical to SEQ ID NO: 39592
  misc_feature (1)..(241): tr|A0A412CGR6|A0A412CGR6_9FIRM 7-cyano-7-deazaguanine s ynthase OS=Megamonas rupellensis OX=491921 GN=queC PE=3 SV=1

SEQ ID NO: 39596 - protein, 241 aa, Megamonas rupellensis
  misc_feature (1)..(241): tr|A0A411ZTJ5|A0A411ZTJ5_9FIRM 7-cyano-7-deazaguanine s ynthase OS=Megamonas rupellensis OX=491921 GN=queC PE=3 SV=1
MNAVILLSGGLDSTTCMAVAKQQGYDLYPISFNYHQRNKIELEGAKEIAKFFGAKRHLIIDTNMNAIGGSALTDENIKVPEGNVERKDNDVPVTYVPSRNLIFLSYALGYAEVVKADAIFIGVNAVDFSGYPDCRPEFIQKFQDMADYACKTTAVDGKKIKIVTPLQTLSKKEIIQLGTKLGAPYHLTRSCYNGREKACGVCDSCKLRLRGFAEAGIKDPIAYEKNYNDVTKNHIAYENGE

SEQ ID NO: 39597 - protein, 241 aa, Megamonas sp.
  misc_feature (1)..(241): tr|A0A1H8D7R1|A0A1H8D7R1_9FIRM 7-cyano-7-deazaguanine s ynthase OS=Megamonas sp. Calf98-2 OX=1855330 GN=queC PE =3 SV=1
MNAVILLSGGLDSTTCMAVAKQQGYDLYPISFNYHQRNKIELEGAKEIAKFFGAKRHLIIDTNMNAIGGSALTDENIKVPEGNVERKDNDVPVTYVPSRNLIFLSYALGYAEVVKADAIFIGVNAVDFSGYPDCRPEFIQKFQDMADYACKTTAVDGKKIKIVTPLQSLSKKEIIQLGTKLGAPYHLTRSCYNGREKACGVCDSCKLRLRGFAEAGIKDPIAYEKNYNDVTKNHIAYENGE

SEQ ID NO: 39598 - protein, 226 aa, Megasphaera cerevisiae
  misc_feature (1)..(226): tr|A0A0J6WVF7|A0A0J6WVF7_9FIRM 7-cyano-7-deazaguanine s ynthase OS=Megasphaera cerevisiae DSM 20462 OX=1122219 GN=queC PE=3 SV=1
MKCVVLLSGGVDSTTCLAIGLTKYKKEEVLALTAYYGQKHVKELEAARQVAAYYGVQHQEVNLSQAFSLSDCPLLQGSSQEITHESYARQLEKIGGEGTLSTYVPFRNGLFLSYAAAVAISVQAEVIYYGAHADDAAGRAYPDCTPEFEEAMNRAVYEGSGRLCHLEAPLLHWNKAGVVKEGLRLHAPYELTWSCYEGNEKPCGTCGTCIDRARAFAANGVKDPAL

SEQ ID NO: 39599 - protein, 227 aa, Megasphaera elsdenii
  misc_feature (1)..(227): tr|G0VN21|G0VN21_MEGEL 7-cyano-7-deazaguanine synthase OS=Megasphaera elsdenii DSM 20460 OX=1064535 GN=queC PE =3 SV=1
MKCVVLLSGGVDSTTCLAMALTKYKKDDVLALTAYYGQKHAKELEAARKVAAHYGVQQQEVDLSQAFSLSDCSLLQGSHKPIAHESYADQLAKKGGEGTVDTYVPFRNGLFLSFAAAVAVSVGAEVIYYGAHADDAAGRAYPDCTPEFETAMNTAIYEGSGRTCHLEAPLLSWNKAGVVKEGLRLGAPYELTWSCYEGGDTPCGVCGTCRDRAAAFAANGVKDPALP

SEQ ID NO: 39600 - protein, 227 aa, Megasphaera elsdenii
  misc_feature (1)..(227): tr|R7MZ71|R7MZ71_9FIRM 7-cyano-7-deazaguanine synthase OS=Megasphaera elsdenii CAG:570 OX=1263087 GN=queC PE=3 SV=1
MKCVVLLSGGVDSTTCLAMALTKYKKDDVLALTAYYGQKHAKELEAARKVAAHYGVEQREVNLSQAFALSDCSLLQGSQKAIAHESYADQLAKKGGEGTVDTYVPFRNGLFLSFAAAVAVSVGAEVIYYGAHADDAAGRAYPDCTPEFETAMNTAIYEGSGRTCHLEAPLLSWNKAGVVKEGLRLGAPYELTWSCYEGGDTPCGVCGTCRDRAAAFAANGVKDPALP

SEQ ID NO: 39601 - protein, 226 aa, Megasphaera genomosp.
  misc_feature (1)..(226): tr|A0A2J8BB89|A0A2J8BB89_9FIRM 7-cyano-7-deazaguanine s ynthase OS=Megasphaera genomosp. type_2 OX=699193 GN=qu eC PE=3 SV=1
MKCLVLLSGGIDSTTCLALAIQTYGVKEVLAVTAYYGQKHAKELTAARDIASYYQVLHREIDVSQAFSLSNCVLLAGRQGKIAHTSYATQLAEKGGTGTLDTYVPFRNGLFLSFAAALAVSTQANYIYYGAHADDAAGRAYPDCTPEFETAMANAIYEGSGRTCQLKAPLLHWNKARVVQEGLSLHAPYHLTWSCYEGKDHPCGVCGTCRDRAAAFAANNKKDPAL

SEQ ID NO: 39602 - protein, 226 aa, Megasphaera genomosp.
  misc_feature (1)..(226): tr|D3LSU4|D3LSU4_9FIRM 7-cyano-7-deazaguanine synthase OS=Megasphaera genomosp. type_1 str. 28L OX=699218 GN=q ueC PE=3 SV=1
MKCLVLLSGGIDSTTCLALGVKKYGASELLAVTAYYGQKHAKELQAARNVAAYYGVAHREIDVSQAFTLSDCPLLAGRKGAIAHTSYSDQLAAKGGAGTLDTYVPFRNGLFLSFAAALAVSVHASCIYYGAHADDAAGRAYPDCTPEFEQAMATAIYEGSGKTCRLEAPLLQWNKAQVVRQGLQLHAPYHLTWSCYEGREKPCGLCGTCRDRAAAFAANGVPDPAL

SEQ ID NO: 39603 - protein, 229 aa, Megasphaera hexanoica
  misc_feature (1)..(229): tr|A0A344MMN1|A0A344MMN1_9FIRM 7-cyano-7-deazaguanine s ynthase OS=Megasphaera hexanoica OX=1675036 GN=queC PE= 3 SV=1
MKCVVLLSGGVDSTTCLAMAVEKYKKENVLALTAYYGQRHEKELQAARKVAAYYGVQQEEINLAQAFVHSDCPLLERNNDKEIAHMSYAEQLAQAGGEGTVETYVPFRNGLFLSFAAAVAVSVHAEVIYYGAHADDAAGRAYPDCTPEFEQAMNTAIYEGSGHTCHLEAPLLAWNKAGVVKEGLRLGAPYELTWSCYEGGDMPCGVCGTCRDRAAAFAANGVPDPALKK

SEQ ID NO: 39604 - protein, 229 aa, Megasphaera micronuciformis
  misc_feature (1)..(229): tr|E2ZCX7|E2ZCX7_9FIRM 7-cyano-7-deazaguanine synthase OS=Megasphaera micronuciformis F0359 OX=706434 GN=queC PE=3 SV=1
MKTAVLLSGGIDSTTALAQAVDTYGAENVIALSVLYGQKHKKELNCAEKIANYYGVRRISFDVSPLFSYSHNSLMENSDKAVPQTSYAEQIEETKGQSPVSTYVPFRNGIFLSAAAGVALSLDCERVVYGAHADDAAGAAYPDCSPAFFDAMKTAVYEGTGGGITLEAPFIHMNKADIVAEGLRLHVPYELTWSCYEGGDKPCGLCGTCRDREAAFSANGTIDPLLKGK

SEQ ID NO: 39605 - protein, 227 aa, Megasphaera paucivorans
  misc_feature (1)..(227): tr|A0A1G9R0W1|A0A1G9R0W1_9FIRM 7-cyano-7-deazaguanine s ynthase OS=Megasphaera paucivorans OX=349095 GN=queC PE =3 SV=1
MKAVVLLSGGIDSTTCLALAVEKYTKNEVLALTMHYNQKHVKEIEASHKVAYYYDVQLQESDLSQAFSLSDCPLLQQSHKKIKHESYAEQLEELGGTGTVDTYVPFRNGLFLSYAAAAAISVGANVIYYGAHADDAAGRAYPDCTPAFETAMNTAIYEGSGHTCCLEAPLLNFTKTEVVRMGLRLHAPYELTWSCYEGGTRPCGVCGTCIDRAKAFAENGIPDPALK

SEQ ID NO: 39606 - protein, 227 aa, Megasphaera sp.
  misc_feature (1)..(227): tr|S7HF84|S7HF84_9FIRM 7-cyano-7-deazaguanine synthase OS=Megasphaera sp. NM10 OX=1273103 GN=queC PE=3 SV=1
MKCVVLLSGGVDSTTCLAMALTKYKKEDVLALTAYYGQKHAKELEAARKVAAYYGVQQQEVNLSQAFSLSDCSLLQGSHKAIAHESYADQLAKKSGEGTVDTYVPFRNGLFLSFAAAVAVSVGAEVIYYGAHADDAAGRAYPDCTPEFETAMNTAIYEGSGRTCHLEAPLLSWNKAGVVKEGLRLGAPYELTWSCYEGGDKPCGVCGTCRDRAAAFAANGVKDPALS

SEQ ID NO: 39607 - protein, 230 aa, Megasphaera sp.
  misc_feature (1)..(230): tr|A0A3C1CNX0|A0A3C1CNX0_9FIRM 7-cyano-7-deazaguanine s ynthase OS=Megasphaera sp. OX=2023260 GN=queC PE=3 SV=1
MKKEAIVLLSGGIDSTTCLALAVEKYGAEKVFALSVYYGQKHVKEMQAAEKVARYYGVLRQEINLAGVYHWSDCPLLAHSDKPIKHETYAEQLKELGGTGTVTTYVPFRNGLLLSYSEAIAISVGASAIYYGAHADDAAGRAYPDCTPEFVKAMDTAIYEGSGLICHLYAPLLDLNKAGVVKEGLQLGAPYALTWSCYEGGDIPCGVCGTCRDRAAAFAANGVPDPAREA

SEQ ID NO: 39608 - protein, 229 aa, Megasphaera stantonii
  misc_feature (1)..(229): tr|A0A346AYG4|A0A346AYG4_9FIRM 7-cyano-7-deazaguanine s ynthase OS=Megasphaera stantonii OX=2144175 GN=queC PE= 3 SV=1
MKCIVLLSGGVDSTTCLAMAVERYGAGEVMALTAYYGQKHAKEIQAARQVAAHYGVAHKETNLSQAFALSDSSLLQGRGREIRHESYAEQLKELGGEGTVDTYVPFRNGLFLSYAAAIAVSVGAEVIYYGAHADDAAGRAYPDCTPEFEQAMATAIYEGSGRTCRLEAPLLSWNKAGVVKEGLRLGAPYELTWSCYEGGDRPCGVCATCIDRAKAFAANGAADPALTAR

SEQ ID NO: 39609 - protein, 210 aa, Mehylophilales bacterium
  misc_feature (1)..(210): tr|A0A258LFJ1|A0A258LFJ1_9PROT 7-cyano-7-deazaguanine s ynthase (Fragment) OS=Mehylophilales bacterium 35-46-6 OX=1970535 GN=B7Y72_05530 PE=3 SV=1
MNHQSKKPAKAVVLLSGGLDSATVLAYARSQGFECYCLSLDYHQRHIAELNAAKKVAEVMGAKAHKTAQLDLSLFGGSALTDNAIAVPEQASTGIPVTYVPARNTIMLSLALAWAEVLEAQDIFIGVNALDYSGYPDCRGEYVKAFQNMANLATKSAVEGKTITVHAPLIDMTKAQIVQMGAKLGVDYAMTVSCYQANSEGEACGVCDSC

SEQ ID NO: 39610 - protein, 441 aa, Meiothermus terrae
  misc_feature (1)..(441): tr|A0A399EI73|A0A399EI73_9DEIN 7-cyano-7-deazaguanine s ynthase OS=Meiothermus terrae OX=1408545 GN=queC PE=4 S V=1
MTHHFAARLGPKDGFEPRVPADAGRLYVAELDSLLRSGHGRTAGRVEAVLRSHGRNASVRSRDLLRLAVAVYCADLMTPRRQSYDRWTRHIRLYLALEEPDPWQAEGEALTRLLRFLTGDHWELDIRPGDPEPWPASPEDDDSRGFDTVCLFSGGLDSFVGALDLLSREQRAVLVGHYARGSGATSVSQAAVGEIVQDRYGSAHAPLLRYFVSPPRQPGRDRENTTRGRSLMFLALGVATAEAFGARRLVVAENGLISLNVPLTSTRLGSLSTRTTHPHFIDMFRGLLRAVGLEVELELPYRFKTKGEMLRECSEPDLLMEGLPSTISCAHPEAMRFAGAPNTHCGYCLACMIRRAAVEAAGLKDPTRYVYPDPSSLSGKSAVDLKVLRLALARYAKKPPRMADLLRAGPLPGTDDERMQLLGVYRRGIDELRAFLASQGL

SEQ ID NO: 39611 - protein, 230 aa, Melaminivora sp.
  misc_feature (1)..(230): tr|A0A2P1NKF6|A0A2P1NKF6_9BURK 7-cyano-7-deazaguanine s ynthase OS=Melaminivora sp. SC2-7 OX=2116657 GN=queC PE =3 SV=1
MSRRALVLFSGGQDSATCLAWALARYAHVETLGFDYGQRHRVELDCRVRLRQGLLAMPWSGQLGDDHLLSVDVLGQLGASAMTADVAIATQQDGLPNTFVPGRNLLFFTLAAALAYRRGLDVLVGGMSETDYSGYPDCRDNTLKALQVALSLGIDRPLTLQTPLMWRDKAATWALAHALGGNALVELVRRESHTCYLGERARLHSWGYGCGSCPACELRARGWAQWAAAG

SEQ ID NO: 39612 - protein, 227 aa, Melghirimyces algeriensis
  misc_feature (1)..(227): tr|A0A521DKY7|A0A521DKY7_9BACL 7-cyano-7-deazaguanine s ynthase OS=Melghirimyces algeriensis OX=910412 GN=queC PE=3 SV=1
MKQRAVIVLSGGLDSTTCMGIAQEAGYELYPLTFHYGQRHSREVEQARRVADYYKVSEHRIVDVAFLQQIGGSALTDQTKDVPTTPEAEGSIPVTYVPARNLIFLSLAVAYAEVIEAEAVYIGVSAVDYSGYPDCRPEFIRSMEETMNRATKAGVSGKPLRLEAPLIYLSKAETIREGLRLKVPYHLTTSCYQGGKTACGICDSCRLRLKGFAEAGAKDPIPYREIF

SEQ ID NO: 39613 - protein, 228 aa, Melghirimyces profundicolus
  misc_feature (1)..(228): tr|A0A2T6BW88|A0A2T6BW88_9BACL 7-cyano-7-deazaguanine s ynthase OS=Melghirimyces profundicolus OX=1242148 GN=qu eC PE=3 SV=1
MGEKAVVILSGGLDSTTCMGLAREAGYELYPLTFHYGQRHDREVEQARKVAEYFGVKEHRVVDIGFLRQIGGSALTDEAMDVPGPDDPDEEIPSTYVPARNLIFLSLAAAYAEVIGAVTIYIGVSAVDYSGYPDCRPEFIRSMEETVRRATKTGISGNPIRLEAPLIRLSKAETIREGLRLKVPYHLTTSCYRGGEVACGVCDSCRLRLKGFREAGAKDPIPYSKNVG

SEQ ID NO: 39614 - protein, 228 aa, Melghirimyces thermohalophilus
  misc_feature (1)..(228): tr|A0A1G6K2B7|A0A1G6K2B7_9BACL 7-cyano-7-deazaguanine s ynthase OS=Melghirimyces thermohalophilus OX=1236220 GN =queC PE=3 SV=1
MEKKAVVVLSGGLDSTTCMGIAREQGYQLYPITFHYGQQHDREVEQARQVAEYFQVKEHRVVNVGFFRQIGGSALTDDGMEVPDADEAVEGIPSTYVPARNLIFLSLAAAYAEVIGAKAIYTGVSAVDYSGYPDCRPSFIQSMEETIRQATKAGVTGYPIQLETPLLDLSKADTIREGLRLEVPYHLTTSCYRGEDLACGVCDSCRLRLKGFHEAGAEDPIPYVEASV

SEQ ID NO: 39615 - protein, 387 aa, Melioribacter roseus
  misc_feature (1)..(387): tr|I6YZC6|I6YZC6_MELRP N-acetyl sugar amidotransferase OS=Melioribacter roseus (strain JCM 17771 / P3M-2) OX=1 191523 GN=MROS_2672 PE=4 SV=1
MKIVPFKYEISKVCTRCVMDDSVPGIKFDENGICTYCKIHDELERKYPLNEESHKKLLQIVDKIKKDGKGKKYDCIVGVSGGRDSTYTLYNAAKLGLRPLAIHFDNGWDTEIAVQNIENACRKLGVDLHTHVADWEEFKDLQRSFLFASVPDAEVPTDWIIFSVLYNEAAKNKVKYIVHGHSFRTEGTAPLFWTYMDGRYVKGIQKRFGTKNLRSFPNLNLTKYLHYSFIKRIKQIRILYYIPYNEKEVFKILENELGWKNYGDKHHESKYTAFFQSYILTRKFNIDKRKLHYSAKIRNGQISRDEALEIIKQDPFTGGEELLEYCLKKLDLSYEDFERIMSTPPKTFLDFNTYYPLVKALQKPIKWGNSIGVVPDTVYNKYFNVNL

SEQ ID NO: 39616 - protein, 227 aa, Melioribacter roseus
  misc_feature (1)..(227): tr|I6YW17|I6YW17_MELRP 7-cyano-7-deazaguanine synthase OS=Melioribacter roseus (strain JCM 17771 / P3M-2) OX=1 191523 GN=queC PE=3 SV=1
MKKLAVVALSGGMDSCVTAAIASREYELALIHINYGQRTENRELKAFNDIAEYYGVKHKLIIDYTHFSKIGGSSLTDRNIEVTRANIGSRDIPSSYVPFRNANILAACVSWAEVLNAEAVFIGAVYEDASGYPDCRPEFFEAFEKMADLGTKPETKIKIHTPIIHLSKAEIIKKGIELNAPLHLTWSCYQNEDEACGICDSCAFRLRGFQTAGIEDPIPYKVRPVYK

SEQ ID NO: 39617 - protein, 228 aa, Melioribacter sp.
  misc_feature (1)..(228): tr|A0A1G1B9T9|A0A1G1B9T9_9BACT 7-cyano-7-deazaguanine s ynthase OS=Melioribacter sp. GWF2_38_21 OX=1801612 GN=q ueC PE=3 SV=1
MHKNKLAVVAVSGGMDSCVTAAIANQEYRLALIHINYGQRTQTHELSSFNEIANFYNVEKRLVIDLRHFAQIGGSSLTDNSIEVTKADLGSHEIPSSYVPFRNANILSACTSWAEVIGASAIFVGAVYEDASGYPDCRPEFFSAYEKMIDLGTKPETKIKIETPIIHFSKADIVKKGIELGAPLHLTWSCYQSEDAACGVCDSCAFRLRGFEQAGVEDPIPYKIRPKY

SEQ ID NO: 39618 - protein, 579 aa, Melioribacter sp.; identical to SEQ ID NO: 38871
  misc_feature (1)..(579): tr|A0A1G1BJI3|A0A1G1BJI3_9BACT Uncharacterized protein OS=Melioribacter sp. GWF2_38_21 OX=1801612 GN=A2X65_128 50 PE=4 SV=1

SEQ ID NO: 39619 - protein, 233 aa, Melittangium boletus
  misc_feature (1)..(233): tr|A0A250IBS2|A0A250IBS2_9DELT 7-cyano-7-deazaguanine s ynthase OS=Melittangium boletus DSM 14713 OX=1294270 GN =queC PE=3 SV=1
MSVSNKKAVVLLSGGLDSTTCLSMAKADGFEPVCLAVAYGQRHAVELERARWVARSLGVTDFRVVTVDLPQVGGSALTADIDVPKDRPESEMSHGIPITYVPARNALFLSLALGLAEVVGSSDIYIGVNAVDYSGYPDCRPEFIRAFEQMATLATKAGVEGTQFKVHAPLSGMTKAEIIRAGVKLGVDYSMTHSCYDPDKEGRACGRCDSCTLRRRGFEQAGVMDPTLYTAGV

SEQ ID NO: 39620 - protein, 231 aa, Merismopedia glauca
  misc_feature (1)..(231): tr|A0A2T1C947|A0A2T1C947_9CYAN 7-cyano-7-deazaguanine s ynthase OS=Merismopedia glauca CCAP 1448/3 OX=1296344 G N=queC PE=3 SV=1
MKAVILLSGGLDSSTVLYQAKADGCQCYAISFDYGQRHLRELDAARAIANAVGVVQHQVVQFDLRLWGGSALTDDGIDIPGDRSLEQMSAAIPVTYVPARNTIFLSFALGYAEAIAAQRVYIGVNALDYSGYPDCRPDYLQAMQEVFRLGTKQGREGQPIQIIAPLIKLKKTEIIELGNTLGVPWSRTWSCYAGEELACGVCDSCRLRLAAFDELRLVDPLSSKLNAKAAY

SEQ ID NO: 39621 - protein, 238 aa, Mesocricetibacter intestinalis
  misc_feature (1)..(238): tr|A0A4R6VBD6|A0A4R6VBD6_9PAST 7-cyano-7-deazaguanine s ynthase OS=Mesocricetibacter intestinalis OX=1521930 GN =queC PE=3 SV=1
MNIANPNGDRRAIVIFSGGQDSATCLIKAIADYGVANVEAVTFSYGQRHAIELEKARWIAQDLGVKQIVIDTSVIQAITTNALMDSHQPINAPSQGVPNTFVDGRNAMFLLYAAIYAKGQGIRDIITGVCETDFSGYPDCRDVFIKSMNVSLNLAMDYQFNIYTPLMYLTKAQTWQLADELGALDYVRRHTHTCYEGIEGGCGKCPSCVLREKGLREYLARKAGAQSEKKSGDYVSSF

SEQ ID NO: 39622 - protein, 186 aa, Mesonia sp.
  misc_feature (1)..(186): tr|A0A2D8URP8|A0A2D8URP8_9FLAO 7-cyano-7-deazaguanine s ynthase OS=Mesonia sp. OX=1960830 GN=CMH14_18750 PE=3 S V=1
MDSIALAYWKKPAHSITIDYGQKAANAEIKAAAQISKYLNIEHHILKVDCSALGSGDMNGSKSLGISPITEWWPYRNQLLVTLACMKGVSIGIKELIIGSVSTDNAHKDGTRTFYDYLSKLIEYQEGQIKITCPGIEMSTVDLIKKAKLPISLLYWAHSCHTANEPCMNCNGCKKYLYTLQMLGLD

SEQ ID NO: 39623 - protein, 236 aa, Mesorhizobium albiziae
  misc_feature (1)..(236): tr|A0A1I4DQR0|A0A1I4DQR0_9RHIZ 7-cyano-7-deazaguanine s ynthase OS=Mesorhizobium albiziae OX=335020 GN=queC PE= 3 SV=1
MNDSKAIVLFSGGQDSTTCLAWALDRFAHVETIGFDYRQRHLVELDVRPVVLNAFRERFSNWAVKLGEDHLIDVAVLGQLSDTSLTRDVEIAMQANGLPNTFVPGRNLLFLTFAATIAYRRGAKHIVTGVCETDYSGYPDCRDDTMKAMQLALNLGMDARFAVHAPLMWIDKAETWRLARVLGGDELVDLIRDETHTCYQGDRVHHHDWGWGCGQCPACELRAQGYWQFAARPAVP

SEQ ID NO: 39624 - protein, 233 aa, Mesorhizobium albiziae
  misc_feature (1)..(233): tr|A0A1I4F2J8|A0A1I4F2J8_9RHIZ 7-cyano-7-deazaguanine s ynthase OS=Mesorhizobium albiziae OX=335020 GN=queC PE= 3 SV=1
MKTLVICSGGLDSVSLAHKVAAEHELAGLLSFDYGQRHRKELSFAALCAERLNVPHRIIDIREIGRGLSGSALTDNVDVPDGHYAEDTMKVTVVPNRNAIMLAIAFGLAAAHKADAVATAVHGGDHFIYPDCRPAFIDAFQMMQDRALEGYAKIRLYAPYVNLTKADIVADGTTYGVPFAETWSCYRGGERHCGRCGTCVERREAFHLTGHPDPTDYEDSDFWLDALRRRRRA

SEQ ID NO: 39625 - protein, 232 aa, Mesorhizobium amorphae
  misc_feature (1)..(232): tr|A0A212DNY9|A0A212DNY9_9RHIZ 7-cyano-7-deazaguanine s ynthase OS=Mesorhizobium amorphae CCBAU 01583 OX=144934 8 GN=queC PE=3 SV=1
MNALVICSGGLDSVSLAHKVATEQKLIGLLWFDYGQRHKKELGFASICAKRLGVPHQIVDIRDVGRNLSGSALTDDVDVPDGHYAEDSMRITVVPNRNAIMLAIAFGVAAAQKADAVATAVHGGDHFIYPDCRPAFIDAFQTMQNHALAGYADIRLYAPYVNMSKAAIVSEGAKYGTPFEATWSCYKGGARHCGRCGTCVERREAFDLAGITDPTDYEDADFWLHAIQTRSA

SEQ ID NO: 39626 - protein, 232 aa, Mesorhizobium amorphae
  misc_feature (1)..(232): tr|G6YIF9|G6YIF9_9RHIZ 7-cyano-7-deazaguanine synthase OS=Mesorhizobium amorphae CCNWGS0123 OX=1082933 GN=queC PE=3 SV=1
MKTLVICSGGLDSVSLAHKVAAEHELAGLLSFDYGQRHRKELRFAALCAERLSVPHRIIDIREIGRGLSGSALTDNVAVPDGHYAEDTMKTTVVPNRNAIMLAIAFGLAAARRADAVATAVHGGDHFIYPDCRPAFIDAFQVMQDRALDGYANIRLYAPYVNLTKADIVGDGATYGTPFVETWSCYKGAERHCGRCGTCVERREAFHLSGCPDPTDYEDTDFWLEALRRRSV

SEQ ID NO: 39627 - protein, 457 aa, Mesorhizobium australicum
  misc_feature (1)..(457): tr|A0A1X7MVG6|A0A1X7MVG6_9RHIZ Queuosine biosynthesis p rotein QueC OS=Mesorhizobium australicum OX=536018 GN=S AMN02982922_0695 PE=4 SV=1
MSSGVGQVRIPEKSIEVVESGGIASGGWVPFDLGRDFEFSTEALETYAFASWEPVIYDAMVVAAAIEYGDRILKRPPRGWARRIALRIPVHDPERWNDGELSEALLDAAGFLTGDYWSIEFVRRANPAPSPHSDYLNLPVPTEAVLAYSDGMDSRAVAGLVGAGLGTKLVRVRVGSNEIGRPDKKSYREPFTLVPYDVPCNMPNREASARSRGFKFALITGIAAYLSGAKEIVIPESGQGAIGPAIASVVHAYPDYRNHPRFTQRMERLLRALFGREIRYVFPRLWSTKGETLRSFAALPEGTTWHATRSCWRSNRWSSVNGKRRQCGVCAACMLRRVSVHAAGLTEAEDTYVCTDPTAASLEEAVDRDFTRMTPAYRQYAIAGVLHMDHLADLASKDGLPVVRRHAAMLAPALGVGKDQTEESLTRMLSEHASEWKEFVRSMGSNSFVRQWVRAGL

SEQ ID NO: 39628 - protein, 232 aa, Mesorhizobium australicum
  misc_feature (1)..(232): tr|L0KTA1|L0KTA1_MESAW 7-cyano-7-deazaguanine synthase OS=Mesorhizobium australicum (strain HAMBI 3006 / LMG 2 4608 / WSM2073) OX=754035 GN=queC PE=3 SV=1
MKTLVICSGGLDSVSLAHKVAAEHELAGLLSFDYGQRHSKELKFATLCAQRLDIAHQIIDIRQIGRGLCGSALTDGVDVPDGHYAEDTMKITVVPNRNAIMLAIAFGLAAAQQLEAVGMAAHGGDHFIYPDCRPAFIEAFQTMQDRALDGDAQIRLYTPYVNLTKADIVGDGARHGTPFAQTWSCYKGGERHCGRCGTCVERREAFQLAQHADPTDYEDTDFWLEALRRRSA

SEQ ID NO: 39629 - protein, 232 aa, Mesorhizobium ciceri; identical to SEQ ID NO: 36466
  misc_feature (1)..(232): tr|A0A143NP65|A0A143NP65_9RHIZ 7-cyano-7-deazaguanine s ynthase OS=Mesorhizobium ciceri OX=39645 GN=queC PE=3 S V=1

SEQ ID NO: 39630 - protein, 232 aa, Mesorhizobium ciceri; identical to SEQ ID NO: 36473
  misc_feature (1)..(232): tr|A0A3G8FWE9|A0A3G8FWE9_9RHIZ 7-cyano-7-deazaguanine s ynthase OS=Mesorhizobium ciceri OX=39645 GN=queC PE=3 S V=1

SEQ ID NO: 39631 - protein, 232 aa, Mesorhizobium delmotii
  misc_feature (1)..(232): tr|A0A2P9ASV3|A0A2P9ASV3_9RHIZ 7-cyano-7-deazaguanine s ynthase OS=Mesorhizobium delmotii OX=1631247 GN=queC PE =3 SV=1
MKTLVICSGGLDSVSLAHKVATEHDLAGLLSFDYGQRHRKELDFAALCAKRLNVPHKIIDIREIGRSLSGSALTDDLDVPDGHYAEDTMKITVVPNRNAIMLAIAFGVAAAQKADAVATAVHGGDHFIYPDCRPAFIDAFQAMQDLALDGYAEIRLYAPYVNLSKAEIVADGARLNTPFAQTWSCYKGGERHCGRCGTCVERREAFHVAGYPDPTDYEDPAFWLDALQARRA

SEQ ID NO: 39632 - protein, 232 aa, Mesorhizobium delmotii
  misc_feature (1)..(232): tr|A0A2P9ALJ2|A0A2P9ALJ2_9RHIZ 7-cyano-7-deazaguanine s ynthase OS=Mesorhizobium delmotii OX=1631247 GN=queC PE =3 SV=1
MKTLVICSGGLDSVSLAHSVAAEHELAGLLSFDYGQRHRKELGFAALCAERLNTMHQIINIPEIGRGLSGSALTDNLDVPDGHYAEDTMKITVVPNRNAIMLAIAFGLATAHKAEAVAMAVHGGDHFIYPDCRPAFIEAFQMMQDRALEGYAEIRLYTPYVNLTKGDIVRDGARHGTPFAETWSCYKGGERHCGRCGTCVERREAFHLAGHADPTDYEDPVFWLEALRRRSA

SEQ ID NO: 39633 - protein, 232 aa, Mesorhizobium hawassense
  misc_feature (1)..(232): tr|A0A330H9L5|A0A330H9L5_9RHIZ 7-cyano-7-deazaguanine s ynthase OS=Mesorhizobium hawassense OX=1209954 GN=queC PE=3 SV=1
MKTLVVCSGGLDSISLAHKVAAEQELDGLLSFDYGQRHSKELDFAGLCAERLNVPHRIIDIREIGRGLFGSALTDNMEVPDGHYAEDMMKVTVVPNRNAILLAIAFGFAAARKSEAVAMAVHGGDHFIYPDCRPAFIDAFQMMQDRALDGYANIRLYTPYVNLTKADIVEDGARHGTPFAETWSCYKGGRRHCGRCGTCVERREAFHLCGHPDPTDYEDADFWLDALRRRNV

SEQ ID NO: 39634 - protein, 245 aa, Mesorhizobium helmanticense
  misc_feature (1)..(245): tr|A0A2T4ILB6|A0A2T4ILB6_9RHIZ 7-cyano-7-deazaguanine s ynthase OS=Mesorhizobium helmanticense OX=1776423 GN=qu eC PE=3 SV=1
MQRDPGTALVLFSGGQDSTTCLAWALENFERVETIGFDYGQRHRIELDVRPYLLGRIRTDFTAWRGRLGEDHMIDMAVLGQITDTALTRDVEVALNANGLTNTFVPGRNLLFLGFAAAIAYRMGAKHLVIGVAETDRFSYPDCRDDAVKAMQLALNLGMKTHFVIHTPLMQRDKAQTWALADWLGGEALVKLICEGSHTCYSGDREHRHSWGFGCGTCIECNLRAAGWEQFRSCKEAPVAAHETT

SEQ ID NO: 39635 - protein, 232 aa, Mesorhizobium helmanticense
  misc_feature (1)..(232): tr|A0A2T4IN60|A0A2T4IN60_9RHIZ 7-cyano-7-deazaguanine s ynthase OS=Mesorhizobium helmanticense OX=1776423 GN=qu eC PE=3 SV=1
MNALVICSGGLDSVSLAHKVATEQKLIGLLSFDYGQRHKKELGFAAICAKRLGVPHQIVDIRDVGRNLSGSALTDNVDVPDGHYAEDSMRITVVPNRNAIMLAIAFGVAAAQKADAVATAVHGGDHFIYPDCRPAFIDAFQTMQNHALAGYADIRLYAPYVNMSKADIVSEGAKYATPFEATWSCYKGGARHCGRCGTCVERREAFDLAGITDPTDYEDADFWLHAIQTRSA

SEQ ID NO: 39636 - protein, 232 aa, Mesorhizobium huakuii
  misc_feature (1)..(232): tr|A0A068DJ66|A0A068DJ66_9RHIZ 7-cyano-7-deazaguanine s ynthase OS=Mesorhizobium huakuii 7653R OX=763057 GN=que C PE=3 SV=1
MKTLVVCSGGLDSVTLAHKVAAQHELAGLLSFDYGQRHRKELSFAALCAERLNVPHRIIDIREIGRGLSGSALIDGVDVPDGHYAEDTMKATVVPNRNAIMLATAFGLAAAHKVEAVATAVHGGDHFIYPDCRPAFIDSFQMMQDRALDGYAKIRVYAPYVNLTKADIVRDGATYGTPFAQTWSCYKGAERHCGRCGTCVERREAFHLSGHPDPTDYEDSDFWLDALRRRTA

SEQ ID NO: 39637 - protein, 232 aa, Mesorhizobium japonicum
  misc_feature (1)..(232): sp|Q98AZ0|QUEC1_RHILO 7-cyano-7-deazaguanine synthase 1 OS=Mesorhizobium japonicum (strain LMG 29417 / CECT 91 01 / MAFF 303099) OX=266835 GN=queC1 PE=3 SV=1
MNALVICSGGLDSVSLAHKVATEQKLIGLLSFDYGQRHKKELGFAAICAKRLAVPHQIVDIRDVGRNLSGSALTDNVDVPDGHYAEDSMRITVVPNRNAIMLAIAFGVAAAKKADAVATAVHGGDHFIYPDCRPAFIDAFQTMQNHALAGYADIRLYAPYVNMSKADIVSEGAKYATPFEATWSCYKGGARHCGRCGTCVERREAFDLAGITDPTDYEDADFWLHAIQTRSA

SEQ ID NO: 39638 - protein, 198 aa, Mesorhizobium japonicum
  misc_feature (1)..(198): tr|Q989H2|Q989H2_RHILO 7-cyano-7-deazaguanine synthase OS=Mesorhizobium japonicum (strain LMG 29417 / CECT 910 1 / MAFF 303099) OX=266835 GN=mll6423 PE=3 SV=1
MTTALLLSGGMDSVSIAWWLRPDVALTIDYGQKPAEAEIDAAGHVAQLLGISHEVIRVDCSSLGSGDMAGTAPDAAAPVSEWWPFRNQLLVTLAGMAAVRHGVSRLLIGALATDGAHADGRPEFVERASQLMAMQEGGIVVEAPAIELDAVELVRRSGIDQGTLAWAHSCHTGNYACGRCRGCTKHFNTWQALGWTPH

SEQ ID NO: 39639 - protein, 232 aa, Mesorhizobium kowhaii
  misc_feature (1)..(232): tr|A0A2W7BVD4|A0A2W7BVD4_9RHIZ 7-cyano-7-deazaguanine s ynthase OS=Mesorhizobium kowhaii OX=1300272 GN=queC PE= 3 SV=1
MKTLVVCSGGLDSVTLAHKVAAQHELAGLLSFDYGQRHRKELGFAALCAERLNVPHRIIDIREIGRGLSGSALTDSVDVPDGHYAEDTMKATVVPNRNAIMLATAFGLAAAHKVEAVATAVHGGDHFIYPDCRPAFIDSFQMMQDRALDGYAKIRVYAPYVNLTKADIVRDGATYGTPFAQTWSCYKGAERHCGRCGTCVERREAFHLSGHPDPTDYEDSDFWLDALRRRTA

SEQ ID NO: 39640 - protein, 232 aa, Mesorhizobium mediterraneum
  misc_feature (1)..(232): tr|A0A271KRD3|A0A271KRD3_9RHIZ 7-cyano-7-deazaguanine s ynthase OS=Mesorhizobium mediterraneum OX=43617 GN=queC PE=3 SV=1
MKTLAVCSGGLDSVSLAHMVAAEHELTGLLSFDYGQRHRKELGFAALCAQRLKVPHQIIDIGEIGRGLSGSALTSSIDVPDGHYAEDTMKITVVPNRNAIMLAIAFGLAAAHSAEAVAAAVHGGDHFIYPDCRPAFIEAFQTMQDRALDGYAQIRLYAPYVNLGKADIVADGARYGTPFAETWSCYKGGVRHCGRCGTCVERREAFHLAGHSDPTDYEDADFWLEALRRRRA

SEQ ID NO: 39641 - protein, 500 aa, Mesorhizobium mediterraneum
  misc_feature (1)..(500): tr|A0A271KVF5|A0A271KVF5_9RHIZ 7-cyano-7-deazaguanine s ynthase OS=Mesorhizobium mediterraneum OX=43617 GN=CIT2 5_23290 PE=3 SV=1
MHRTRREPRKRKLNFSSSSGSSWIRSSERGCPAALGSTRPQSNASCGKRSPRSGGSGRRTMNRLEFHTDEDDIPDDDADGSIHVYLYGSRPKRAGTASIGRTLDLAVRRLGVGVDPEAFDFLSIALGVIAADTFVDRSSHSGNGWSREVELQIPLARPARWQAVTGELEQALSFLSGDQWKLHFTAGGKEPPSKETILRHHRSHIGIGSADCVCLFSGGLDSLIGAHQLVDQGRTPLLVSHSYRGDQSYQRHLVPRLGKKLPRFAANANPVFSGPNINDTSMRTRSLGFLAYGVVAASALRAKKRSASPIALFVPENGFIALNAPLTRRRIGSHSTRTTHPRFLGQMQSLFDTMNLPVHIENPYRHKTKGEMLVDLAPGEELKGTTVATVSCGKWKRKSQQCGHCVPCLIRRAAFAKAGIADTTPYQYTDLGHVWDRPDIRDDIMAMLVAVGRDHRGARQRAIAGGALPFDAVERKGWFGVHERGLEEVGAYLRSQGLGT

SEQ ID NO: 39642 - protein, 232 aa, Mesorhizobium metallidurans
  misc_feature (1)..(232): tr|M5EN67|M5EN67_9RHIZ 7-cyano-7-deazaguanine synthase OS=Mesorhizobium metallidurans STM 2683 OX=1297569 GN=q ueC PE=3 SV=1
MKTLVICSGGLDSVSLAHSVAAEHELAGLLSFDYGQRHRKELGFAALCAERLNTMHQIINIPEIGRGLSGSALTDNFDVPDGHYAEDTMKITVVPNRNAIMLAIAFGLATAHKAEAVAMAVHGGDHFIYPDCRPAFIEAFQMMQDRALEGYAEIRLYTPYVNLTKGDIVRDGARHGTPFAETWSCYKGGERHCGRCGTCVERREAFHLAGHADPTDYEDPVFWLEALRRRSA

SEQ ID NO: 39643 - protein, 233 aa, Mesorhizobium muleiense
  misc_feature (1)..(233): tr|A0A1G9GN56|A0A1G9GN56_9RHIZ 7-cyano-7-deazaguanine s ynthase OS=Mesorhizobium muleiense OX=1004279 GN=queC P E=3 SV=1
MMKTLAVCSGGLDSVSLAHMVAAEHELTGLLSFDYGQRHRKELGFAALCAQRLKVPHQIIDIGEIGRGLSGSALTDSVDVPDGHYAEDTMKITVVPNRNAIMLAIAFGLAAAHNAEAVAAAMHGGDHFIYPDCRPAFIEAFQTMQDRALDGYAQIRLYAPYVNLGKADIVADGARYGTPFAETWSCYKGGVRHCGRCGTCVERREAFHLAGHADPTDYEDADFWLEALRRRRA

SEQ ID NO: 39644 - protein, 232 aa, Mesorhizobium opportunistum; identical to SEQ ID NO: 39628
  misc_feature (1)..(232): tr|F7Y1I7|F7Y1I7_MESOW 7-cyano-7-deazaguanine synthase OS=Mesorhizobium opportunistum (strain LMG 24607 / HAMB I 3007 / WSM2075) OX=536019 GN=queC PE=3 SV=1

SEQ ID NO: 39645 - protein, 232 aa, Mesorhizobium plurifarium
  misc_feature (1)..(232): tr|A0A090ENS6|A0A090ENS6_MESPL 7-cyano-7-deazaguanine s ynthase OS=Mesorhizobium plurifarium OX=69974 GN=queC P E=3 SV=1
MKTLVVCSGGLDSVSLAHKVAAEQELAGLLSFDYGQRHSKELDFAGLCAQRLNVPHRIIDIREIGGGLFGSALTDNVEVPDGHYAEDMMKVTAVPNRNAIMLAIAFGFAAARKTEAVATAVHGGDHFIYPDCRPAFIDAFQMMQDRALEGYANIRLYTPYVNLTKADIVEDGARYGTPFAETWSCYKGGKRHCGRCGTCVERREAFYLCGHPDPTDYEDADFWLDAVRRRSV

SEQ ID NO: 39646 - protein, 232 aa, Mesorhizobium plurifarium
  misc_feature (1)..(232): tr|A0A090G5I7|A0A090G5I7_MESPL 7-cyano-7-deazaguanine s ynthase OS=Mesorhizobium plurifarium OX=69974 GN=queC P E=3 SV=1
MKTLVVCSGGLDSISLAHKVAAEHELAGLLSFDYGQRHSKELDFASLCAERLNVPHSIIDIREIGRGLSGSALTDNVEVPDGHYAEDMMKVTVVPNRNAIMLAIAFGVAAARKSEAVATAVHGGDHFIYPDCRPAFIDAFQMMQDRALEGYANIRLYTPYVNLTKADIIEDGARHGTPFAETWSCYKGGKRHCGRCGTCVERREAFHLCGHPDPTDYEDADFWLDALRRRGV

SEQ ID NO: 39647 - protein, 213 aa, Mesorhizobium prunaredense
  misc_feature (1)..(213): tr|A0A1R3VGK1|A0A1R3VGK1_9RHIZ 7-cyano-7-deazaguanine s ynthase OS=Mesorhizobium prunaredense OX=1631249 GN=BQ8 794_610003 PE=3 SV=1
MKSAVLLASGGLDSTTVAYRLAADGVDVFPFFLDYGQHCVEMEWDRVNEVLPRGMRRPERCDISDIFNGSSSRLIREADLWKDNVADHELYVPYRTMLFFAAAAARAQTLGIVDVYTGFINSNHAKEIDCTAEFMNGIDGLIDNIGSVRFTSPFRFSSKTDVVQEALRRGVPIGRTFSCQAASNFPCGACPNCVERLYALQDAALVTPQGKVG

SEQ ID NO: 39648 - protein, 232 aa, Mesorhizobium prunaredense
  misc_feature (1)..(232): tr|A0A1R3V902|A0A1R3V902_9RHIZ 7-cyano-7-deazaguanine s ynthase OS=Mesorhizobium prunaredense OX=1631249 GN=que C PE=3 SV=1
MKTLVICSGGLDSVSLAHSVAAEHELAGLLSFDYGQRHRKELGFAALCAERLNTMHQIINIPEIGRGLSGSALTDNFDVPDGHYAEDTMKITVVPNRNAIMLAIAFGLATAHKAEAVAMAVHGGDHFIYPDCRPAFIEAFQMMQDRALEGYAEIRLYAPYVNLTKGDIVRDGARHGTPFAETWSCYKGGERHCGRCGTCVERREAFHLAGHADPTDYEDPVFWLEALRRRSA

SEQ ID NO: 39649 - protein, 232 aa, Mesorhizobium qingshengii; identical to SEQ ID NO: 39636
  misc_feature (1)..(232): tr|A0A1G5ZZ21|A0A1G5ZZ21_9RHIZ 7-cyano-7-deazaguanine s ynthase OS=Mesorhizobium qingshengii OX=1165689 GN=queC PE=3 SV=1

SEQ ID NO: 39650 - protein, 245 aa, Mesorhizobium sanjuanii
  misc_feature (1)..(245): tr|A0A2A6FLB7|A0A2A6FLB7_9RHIZ 7-cyano-7-deazaguanine s ynthase OS=Mesorhizobium sanjuanii OX=2037900 GN=queC P E=3 SV=1
MQRDPGTALVLFSGGQDSTTCLAWALENFERVETIGFDYGQRHRIELDVRPYLLARIRKDFPVWRGRLGEDHMIDMAVLGQISDTALTRDVEVALNANGLTNTFVPGRNLLFLGFAAAIAYRMGAKHLVIGVSETDCFSYPDCRDNAVKAMQLALNLGMEKRFIIHTPLMQRDKAQTWALADCLGGEALVKLICEGSHTCYSGDREHRHSWGFGCGTCIECHLRAAGWEQFQSCKDAPVAAHEMT

SEQ ID NO: 39651 - protein, 232 aa, Mesorhizobium sanjuanii
  misc_feature (1)..(232): tr|A0A2A6FA22|A0A2A6FA22_9RHIZ 7-cyano-7-deazaguanine s ynthase OS=Mesorhizobium sanjuanii OX=2037900 GN=queC P E=3 SV=1
MNALVICSGGLDSVSLAHKVATEQKLIGLLSFDYGQRHKKELGFAAICAKRLGVPHQIVDIRYVGRNLSGSALTDNVDVPDGHYAEDSMRITVVPNRNAIMLAIAFGVAAAQKADAVATAVHGGDHFIYPDCRPAFIDAFQTMQNHALAGYADIRLYAPYVNMSKADIVTEGAKYATPFEATWSCYKGGARHCGRCGTCVERREAFDLAGITDPTDYEDADFWLHAIQTRSA

SEQ ID NO: 39652 - protein, 232 aa, Mesorhizobium sp.; identical to SEQ ID NO: 36473
  misc_feature (1)..(232): tr|A0A436I9G4|A0A436I9G4_9RHIZ 7-cyano-7-deazaguanine s ynthase OS=Mesorhizobium sp. M7A.F.Ca.CA.001.06.1.1 OX= 2496682 GN=queC PE=3 SV=1

SEQ ID NO: 39653 - protein, 232 aa, Mesorhizobium sp.; identical to SEQ ID NO: 36473
  misc_feature (1)..(232): tr|A0A3S1WL10|A0A3S1WL10_9RHIZ 7-cyano-7-deazaguanine s ynthase OS=Mesorhizobium sp. M7A.F.Ca.CA.001.05.1.1 OX= 2496721 GN=queC PE=3 SV=1

SEQ ID NO: 39654 - protein, 198 aa, Mesorhizobium tamadayense
  misc_feature (1)..(198): tr|A0A3P3FF10|A0A3P3FF10_9RHIZ 7-cyano-7-deazaguanine s ynthase OS=Mesorhizobium tamadayense OX=425306 GN=EH240 _21695 PE=3 SV=1
MKTALLLSGGMDSVSIAWWMKPDLAITIDYGQKPADAEIAAARKVAELLTIKHEIIRVDCSSLGSGDMAGTAPLSAAPVSEWWPFRNQLILTLAGMAAVRMGCGRLLIGTLATDGQHADGRPEFVERISALMSFQEGSMLVSAPAIGLDAVELVRQSGIDQATLAWAHSCHVGNFACGRCRGCIKHFNTWHALGWTPH

SEQ ID NO: 39655 - protein, 232 aa, Mesorhizobium tamadayense
  misc_feature (1)..(232): tr|A0A3P3FSX1|A0A3P3FSX1_9RHIZ 7-cyano-7-deazaguanine s ynthase OS=Mesorhizobium tamadayense OX=425306 GN=queC PE=3 SV=1
MKTLVICSGGLDSVSLAHKVAAEHELAGLLSFDYGQRHSKELGFAALCAERLNVPHSIIDIREIGRGLSGSALTDSVEVPDGHYAEDTMKITVVPNRNAIMLATAFGFAAAHKVEAVATAVHGGDHFIYPDCRPAFIDAFQMMQDRALDGYAKIGLYAPYVNLTKADIVVDGATYGTPFAQTWSCYKGGERHCGRCGTCVERREAFLLSGHADPTDYEDAGFWLEALRRRSA

SEQ ID NO: 39656 - protein, 232 aa, Mesorhizobium temperatum
  misc_feature (1)..(232): tr|A0A271LBN9|A0A271LBN9_9RHIZ 7-cyano-7-deazaguanine s ynthase OS=Mesorhizobium temperatum OX=241416 GN=queC P E=3 SV=1
MKTLVVCSGGLDSVTLAHKVAAEYELAGLLSFDYGQRHRKELGFAALCAERLNVPHRIIDIREIGRGLSGSALTDSVDVPDGHYAEDTMKVTVVPNRNAIMLATAFGFAAAHQAEAVATAVHGGDHFIYPDCRPAFIDAFQMMQDRALDGYAKIRLYAPYVNLTKADIVRDGATYGTPFAETWSCYKGGECHCGRCGTCVERREAFHLSGHPDPTDYEDSDFWLHALRRRSA

SEQ ID NO: 39657 - protein, 232 aa, Mesorhizobium temperatum
  misc_feature (1)..(232): tr|A0A271LQE2|A0A271LQE2_9RHIZ 7-cyano-7-deazaguanine s ynthase OS=Mesorhizobium temperatum OX=241416 GN=queC P E=3 SV=1
MNALVICSGGLDSVSLAHKVATEQKLIGLLSFDYGQRHKKELGFACICAKRLGVPHQIVDIRDVGRNLSGSALTDDVDVPDGHYAEDSMRITVVPNRNAIMLAIAFGVAAAQKADAVATAVHGGDHFIYPDCRPAFIDAFQTMQNHALAGYADIRPYAPYVNMSKADIVSEGAKYATPFEATWSCYKGGARHCGRCGTCVERREAFDLAGIADPTDYEDTDFWLHAIQTRSA

SEQ ID NO: 39658 - protein, 232 aa, Mesorhizobium tianshanense
  misc_feature (1)..(232): tr|A0A562N4B2|A0A562N4B2_9RHIZ 7-cyano-7-deazaguanine s ynthase OS=Mesorhizobium tianshanense OX=39844 GN=queC PE=3 SV=1
MKTLVVCSGGLDSVTLAHKVAAEYELAGLLSLDYDQRHRKELGFAALCAERLNVPHRIIDIREIGHGLSGSALTDSVDVPDGHYAEDTMKVTVVPNRNAIILATAFGFAAAHQAEAVATAVHGGDHFIYPDCRPAFIDAFQMMQDRALDGYAKIRLYAPYVNLTKADIVRDGATYGTPFAETWSCYKGGECHCGRCGTCVERREAFHLSGHPDPTDYEDSDFWLHALRRRSA

SEQ ID NO: 39659 - protein, 200 aa, Mesorhizobium tianshanense
  misc_feature (1)..(200): tr|A0A562MAF2|A0A562MAF2_9RHIZ 7-cyano-7-deazaguanine s ynthase OS=Mesorhizobium tianshanense OX=39844 GN=IQ26_ 07631 PE=3 SV=1
MRALLFSGGLDSSALAWWLRPQVCVTIDYGQRAAKGEIAASSALCSQIGLEHRTIQADLSFLGSGSMAAKAVVDGASAEEFWPYRNQMLVTLAAMKLMPEGVSEIILGSVSTDRHADGKAPFLKSLDRTLSLQEGHVRVTAPARRMSTRTLLRTSGFPYELIGLTFSCHVHEYACGQCNGCLKHRECVEMTYPRPKRGAA

SEQ ID NO: 39660 - protein, 232 aa, Mesorhizobium waimense
  misc_feature (1)..(232): tr|A0A3A5K9E1|A0A3A5K9E1_9RHIZ 7-cyano-7-deazaguanine s ynthase OS=Mesorhizobium waimense OX=1300307 GN=queC PE =3 SV=1
MKTLVICSGGLDSVSLAHKVAAEHQLASLLSFDYGQRHRKELGFAALCADRLNVLHRIIDIREIGRGLSGSALTDSVDVPDGHYAEDRMKVTVVPNRNAIMLATAFGFAAAQGAEAVATAVHGGDHFIYPDCRPAFIDAFQMMQDRALDGYANIRLHAPYVNLTKADIVEDGARYGTQFAETWSCYKGGERHCGRCGTCVERREAFHLARHPDPTNYEDGDFWLEALHRRNV

SEQ ID NO: 39661 - protein, 652 aa, Mesorhizobium wenxiniae
  misc_feature (1)..(652): tr|A0A271KKC2|A0A271KKC2_9RHIZ Uncharacterized protein OS=Mesorhizobium wenxiniae OX=2014805 GN=CIT31_15685 PE =4 SV=1
MLETLVVCGGEAAPQRRSGVVIELDVSPIAHPKSRIRFNPGEINAQLVDDLPDALADAVEVAAYVFSADRLVRRGSSSSRRIGAEWQRQLRFRIPVRRHDLWTRPEVKEKLRSALAFLSGDQIEFEFTKARDPRSIEPHLGFRDSGAQVIRPDKVILFSGGLDSLAGIAEHVVGDRGSAVLVAHQSATQIANYQNALADKIALRTGPKQTFYAPIWVRRGESNPTEHSQRLRSFLFASLGMAYAWMFGLSSVFFYENGVTSFNLPVAEQVVGTRASRTTHPSVLRRFGDLFSLLLDEPVTFENPFLWKTKGDVVATIGRHGCSDLIGATTSCAKIRDFSMTGQHCGSCSQCVERRFGVLNAGLGDHEPATTYVTDLFVGSHDDGRDLAMVEAHVLRAQRLATMSEHAFASNYGQIFRTLSDIDGTLEAAAHRVYHLHRRYGASIMQVVDQQLAKYSSLDDILRLPPTSLLGMLRTPVARQIPFQDPIEDEPRPSVEAKSNASKTADRRIAFAVTAQGHVKFPECPALPRNISALLAHLAQQFISDLEQGRDGADHSYVRTKQLTDLFDISGDDLRQRVRRARRFLEKHFERATGYTLDEHDIIQSMKWTGYRLNPYLILMDARALEARVSRQSSKGVTTREQMPGIQGFGTG

SEQ ID NO: 39662 - protein, 232 aa, Mesorhizobium wenxiniae
  misc_feature (1)..(232): tr|A0A271KPF3|A0A271KPF3_9RHIZ 7-cyano-7-deazaguanine s ynthase OS=Mesorhizobium wenxiniae OX=2014805 GN=queC P E=3 SV=1
MKTLAVCSGGLDSVSLAHMVAAEHELTGLLSFDYGQRHRKELGFAALCAERLKVPHQIIDLREIGRGLSGSALTDSVDVPDGHYAEDTMKITVVPNRNAIMFAIAFGLAATHKAEAVAAAVHGGDHFIYPDCRPAFIEAFQTMQDRALDGYAQIRLYAPYVNLGKADIVADGARYGTPFAETWSCYKGGVRHCGRCGTCVERREAFHLAGHADPTDYEDADFWLEALRRRRA

SEQ ID NO: 39663 - protein, 88 aa, Mesosutterella multiformis
  misc_feature (1)..(88): tr|A0A388SDV1|A0A388SDV1_9BURK 7-cyano-7-deazaguanine s ynthase OS=Mesosutterella multiformis OX=2259133 GN=MES MUL_16890 PE=3 SV=1
MSRTAVVLFSGGQDSTTCLAAALKQYDAVYTVGVDYGQRHRVELECRERIRARIESILGTHSLKDDLLLDLKAFGQLSDCALTKPRSD

SEQ ID NO: 39664 - protein, 91 aa, Mesosutterella multiformis
  misc_feature (1)..(91): tr|A0A388SI10|A0A388SI10_9BURK 7-cyano-7-deazaguanine s ynthase OS=Mesosutterella multiformis OX=2259133 GN=MES MUL_16880 PE=3 SV=1
MKALELAIDLGMETSLRIERPLMNLSKAETWKLAETIGGDALVSFIRDETHTCYEGDHTHFHDWGYGCGKCPACVLREKGWEEYVANLKGR

SEQ ID NO: 39665 - protein, 231 aa, Metakosakonia sp.; identical to SEQ ID NO: 38971
  misc_feature (1)..(231): tr|A0A348DIM4|A0A348DIM4_9ENTR 7-cyano-7-deazaguanine s ynthase OS=Metakosakonia sp. MRY16-398 OX=2487150 GN=qu eC PE=3 SV=1

SEQ ID NO: 39666 - protein, 226 aa, Metallibacterium scheffleri
  misc_feature (1)..(226): tr|A0A4S3KRK5|A0A4S3KRK5_9GAMM 7-cyano-7-deazaguanine s ynthase OS=Metallibacterium scheffleri OX=993689 GN=que C PE=3 SV=1
MMHASPRAVVLVSGGMDSAVTLALARERGFDCYALSVAYGQRHSAELSAAAHNAHALGAIAHKTVAVDLRSIGGSALTAEIDVPEAGGVGIPITYVPARNTIMLSIALGWAEVLGAADLFCGVNAVDYSGYPDCRPAFIAAFERLARVATKAAVEGHELRVHAPLMAMGKADIVREGLRLGVDFAATVSCYQADAEGRACAHCDACRLRADGFRVAGVADPTRYVV

SEQ ID NO: 39667 - protein, 228 aa, Unknown
  misc_feature (1)..(228): tr|A0A1X7MFM1|A0A1X7MFM1_9GAMM 7-cyano-7-deazaguanine s ynthase OS=methanotrophic bacterial endosymbiont of Bat hymodiolus sp. OX=280772 GN=queC PE=3 SV=1
MTKKAIILLSGGLDSVTVLALAKQQGYMIYALSFDYGQKHNAELISARQIARAYQVAEHKVIQLGLGEIGGSALTDEAIQVPVTHQDGIPVTYVPARNTVFLSFALGWAEVLDAHDIFIGVNAVDYSGYPDCRPQFIDAFQALANVATKAGVEGHKINIHAPLIDMSKGEIILQGTRLQVDYAQTVSCYVASPEGLACGECDACRLRQEGFAEAGVLDPTAYKVGVSL

SEQ ID NO: 39668 - protein, 233 aa, Methylarcula marina
  misc_feature (1)..(233): tr|A0A3R7LKC4|A0A3R7LKC4_9RHOB 7-cyano-7-deazaguanine s ynthase OS=Methylarcula marina OX=72022 GN=queC PE=3 SV =1
MKTIVICSGGLDSVSLAHIIAARGELSRLVSFDYGQRHRKELDYAAACAKRLDVPHHVIDMRPVGAALTGSALTEDIDVPDGHYAEETMKITVVPNRNAIMLTIAYGIATANGDQAVATAVHGGDHFIYPDCRPEFTTAFDRMQRAALDGYADVTLLTPFVHRSKADIVTEGARAGTPFAETWSCYKGGANHCGRCGTCVERREAFHLAGIDDPTVYEDPDFWREAIASKAEA

SEQ ID NO: 39669 - protein, 235 aa, Methylibium petroleiphilum
  misc_feature (1)..(235): sp|A2SCE3|QUEC_METPP 7-cyano-7-deazaguanine synthase OS =Methylibium petroleiphilum (strain ATCC BAA-1232 / LMG 22953 / PM1) OX=420662 GN=queC PE=3 SV=1
MSLDPRGALVLFSGGQDSTACLAWALEHHAHVETIGFDYGQRHVVELECRVQVREAIARSFPLWAGRLANDHVLDLGLLGQISDTALTSARAIEMQANGLPSTFVPGRNLLFLGFAATVAYRRNLSVLVGGMCETDYSGYPDCRDNTLKALQVALSLGMATPMTIETPLMWLDKARTWALTDRLGGRALNELILEHTHSCYLGDRSVRHAWGYGCNACPACELRRKGYEAWCAGA

SEQ ID NO: 39670 - protein, 235 aa, Methylibium sp.
  misc_feature (1)..(235): tr|A0A0Q7DBI6|A0A0Q7DBI6_9BURK 7-cyano-7-deazaguanine s ynthase OS=Methylibium sp. Root1272 OX=1736441 GN=queC PE=3 SV=1
MSLDPRGALVLFSGGQDSTACLAWALEHHAHVETIGFDYGQRHVVELECRMPVREAIARSFPLWAGRLANDHVLDLGLLGQISDTALTSAREIEMQANGLPSTFVPGRNLLFLGFAATVAYRRNLSVLVGGMCETDYSGYPDCRDNTLKALQVALSLGMATPMTIETPLMWLDKAQTWALTDRLGGSALNELILEHTHSCYLGDRSVRHAWGYGCNACPACELRRKGYEAWCASA

SEQ ID NO: 39671 - protein, 235 aa, Methylibium sp.
  misc_feature (1)..(235): tr|A0A4P6GVY9|A0A4P6GVY9_9BURK 7-cyano-7-deazaguanine s ynthase OS=Methylibium sp. Pch-M OX=2082386 GN=queC PE= 3 SV=1
MSLDPRGALVLFSGGQDSTACLAWALEHHAHVETIGFDYGQRHVVELECRVQVREAIARSFPLWAGRLANDHVLDLGLLGQISDTALTSARAIEMQANGLPSTFVPGRNLLFLGFAATVAYRRNLSVLVGGMCETDYSGYPDCRDNTLKALQVALSLGMATPMTIETPLMWLDKARTWALTDRLGGRALNELILEHTHSCYLGDRSVRHAWGYGCNACPACELRRKGHEAWCAGA

SEQ ID NO: 39672 - protein, 229 aa, Methylobacillus flagellatus
  misc_feature (1)..(229): sp|Q1GYT5|QUEC_METFK 7-cyano-7-deazaguanine synthase OS =Methylobacillus flagellatus (strain KT / ATCC 51484 / DSM 6875) OX=265072 GN=queC PE=3 SV=1
MSKKAVVLLSGGLDSATVLAIARHQGYDVYCLSLDYQQRHRAELQAADRVTKALGAVMHRTVKLDLSVFGGSALTDASIAVPEVPSEGIPVTYVPARNTIMLSLALAWAEVLEARDIFIGVNALDYSGYPDCRGEYVHAFQAMANLATKSAVEGRTIAIHAPLIDMTKADIVTQGTSLGVDYSLTVSCYQADDEGRACGVCDSCRLRRQGFVAAGLADPTRYAPTAGIR

SEQ ID NO: 39673 - protein, 230 aa, Methylobacillus rhizosphaerae
  misc_feature (1)..(230): tr|A0A238XXQ0|A0A238XXQ0_9PROT 7-cyano-7-deazaguanine s ynthase OS=Methylobacillus rhizosphaerae OX=551994 GN=q ueC PE=3 SV=1
MSKKAVVLLSGGLDSATVLAIARHQGYEAYCLSLDYHQRHRAELDAAQQIVTALGAAMHRTAQLDLAMFGGSALTDASIAVPEMPSEGIPITYVPARNTIMLSLALAWAEVLEAQDIFIGVNALDYSGYPDCRGEYVRAFQDMANLATKSAIEGRTITIHAPLIDMTKAQIVTQGVALGVDYSLTVSCYQADERGRACGVCDSCRLRRQGFVAAGLADPTRYVETANFAE

SEQ ID NO: 39674 - protein, 236 aa, Methylobacillus sp.
  misc_feature (1)..(236): tr|A0A1A9NKB7|A0A1A9NKB7_9PROT 7-cyano-7-deazaguanine s ynthase OS=Methylobacillus sp. MM3 OX=1848039 GN=queC P E=3 SV=1
MTVAHSFSPSTGSKAVVLLSGGLDSATVLAIARSEGYVCYCLSLDYHQRHIAELGAAKRVAQALGAAEHRVVQFDLSNFGGSALTDDKIAVPESPSEGIPVTYVPARNTIMLSLSLAWAEVLGAQDIFIGVNALDYSGYPDCRKEYVDAFERMANLATKAAVEGHRLKVHAPLIDLNKAEIIQRGHALGVDYGITVSCYQADSQGNACGVCDSCRFRQAGFRAAGLPDPTHYQSAK

SEQ ID NO: 39675 - protein, 225 aa, Methylobacter sp.
  misc_feature (1)..(225): tr|A0A522WXL7|A0A522WXL7_9GAMM 7-cyano-7-deazaguanine s ynthase OS=Methylobacter sp. OX=2051955 GN=queC PE=3 SV =1
MQKKAIVLLSGGLDSITVLALAKKQGFKCYALSFDYGQRHNAELVAAAQIAADYQVEDHKIIKLGLSSIGGSALTDEHIAVPNTPQDGIPVTYVPARNTIFLSFALGWAEVLNLTDIFIGVNAVDYSGYPDCRPEFIKAFQQLANLATKAGIEGQHFTIHTPLIALSKSEIIKQGIELGVDYRRTVSCYSADEQGRACQVCDACRLRKAGFIEAGIKDPTQYQII

SEQ ID NO: 39676 - protein, 229 aa, Methylobacter sp.
  misc_feature (1)..(229): tr|A0A2P5LJP3|A0A2P5LJP3_9GAMM 7-cyano-7-deazaguanine s ynthase OS=Methylobacter sp. OX=2051955 GN=queC PE=3 SV =1
MQKKAIVLLSGGLDSTTLLAYAQHQEYLCYALSFNYGQRHNAELVAAAEIAKLYRVEEHKVIKLGLDSIGGSALTDSRIDVPTTPQDGIPVTYVPARNTLFLSLALAWAEVLQAYDIFIGVNAVDYSGYPDCRPAFIQAFQQLANLATKAGVEGQRFTIHTPLITLSKADIIALGTKLGVDYRQTVSCYVADGAGQACGFCDACRLRKAGFANANIPDPTHYQTQDKDK

SEQ ID NO: 39677 - protein, 225 aa, Methylobacter tundripaludum
  misc_feature (1)..(225): tr|A0A2S6GFH8|A0A2S6GFH8_9GAMM 7-cyano-7-deazaguanine s ynthase OS=Methylobacter tundripaludum OX=173365 GN=que C PE=3 SV=1
MQKKAIVLLSGGLDSITVLALAKKQGFKCYALSFDYGQRHNAELIAATQIAADYQVEDHKIIKLGLSSIGGSALTDEHIAVPNAPQEGIPVTYVPARNTIFLSFALGWAEVLKLTDIFIGVNAVDYSGYPDCRPEFIKAFQQLANLATKAGVEGEHFTIHTPLIALSKAEIIKQGVELGVDYRRTVSCYSADEQGRACRVCDACRLRAAGFMDAEIKDPTQYQSN

SEQ ID NO: 39678 - protein, 225 aa, Methylobacter tundripaludum
  misc_feature (1)..(225): tr|A0A2S6HB28|A0A2S6HB28_9GAMM 7-cyano-7-deazaguanine s ynthase OS=Methylobacter tundripaludum OX=173365 GN=que C PE=3 SV=1
MQKKAIVLLSGGLDSITVLALAKKQGFKCYALSFDYGQRHNAELVAAAQIAADYQVEDHKIIKLGLSSIGGSALTDEHIAVPHSPQDGIPVTYVPARNTIFLSFALGWAEVLKLNDIFIGVNAVDYSGYPDCRPEFIKAFQQLANLATKAGVEGEHFVIHTPLIALSKAEIIKQGIELGVDYQRTVSCYSADEQGRACQVCDACRLRKIGFTEAGIKDPTRYQIS

SEQ ID NO: 39679 - protein, 435 aa, Methylobacterium aquaticum
  misc_feature (1)..(435): tr|A0A0C6FUZ2|A0A0C6FUZ2_9RHIZ Uncharacterized protein OS=Methylobacterium aquaticum OX=270351 GN=Maq22A_1p357 90 PE=4 SV=1
MTRVVCHADPADVPARRADGDVHVVLYGRGRVPDGVARLGAGVMDAVSRIGLALRDDAFDFLTVALAVTAADTFVLREDAEDRWSRRLEVEIPLVDPRPWDPVRVRLEGALRFLSGDDWRLTFGPGGPAGPSRAVIDGRRRRIDLTRSDCACLFSGGLDSYVGALDLIAAGRRPLLVSHAYRGDRRYQDRTAHALPVVCARFSANAHPTWSGPTDVSMRTRSFNFLAYGTAAATALSQTRGGRRVELWVPENGLIALNAPLTPRRIGSHSTRTTHPHFLGSIQAIVDAVGLPVAIANPLRHETKGEMVTRHAGDPTFVSQAVRTVSCGKWKRDGRQCGRCVPCLIRRASFHAAEVPDTTGYRSTALGPVLRDADLRDDLAAVLAATRRARVAAMEPWVLQAGPLPDAGPERNGCVEVFRRGIGELGRFLEANGVP

SEQ ID NO: 39680 - protein, 235 aa, Methylobacterium aquaticum
  misc_feature (1)..(235): tr|A0A0J6SKE9|A0A0J6SKE9_9RHIZ 7-cyano-7-deazaguanine s ynthase OS=Methylobacterium aquaticum OX=270351 GN=queC PE=3 SV=1
MTSPDGALVLFSGGQDSATCLAWALDRFAHVETLGFDYGQRHRIELECRASLRTAMTRIVPAFAARLGQDHTLSLSALGEVSETALTRETAIAMEAGGLPNTFVPGRNLVFLTFAAALAYRRGLRHIVGGMCETDFSGYPDCRDDTIKALQVALNLGMERRFVLHTPLMWIDKAETWRLARDLGGEALVDLIVRESHTCYLGERGALHAWGHGCGTCPACALRASGYARFRAEDA

SEQ ID NO: 39681 - protein, 241 aa, Methylobacterium brachiatum
  misc_feature (1)..(241): tr|A0A1I3G237|A0A1I3G237_9RHIZ 7-cyano-7-deazaguanine s ynthase OS=Methylobacterium brachiatum OX=269660 GN=que C PE=3 SV=1
MATEAAIIGDRSALVLFSGGQDSATCLAWALDRFDHVETLGFDYGQRHRVELERRAVLRAGMGRIDPAWATRLGADHTVALDALGKISETALTRDAEIGFAESGLPNTFVPGRNLVFLTFAAALAYRRGIRHVVGGMCETDYSGYPDCRDDAIKALQVALNLGMERRFVLHTPLMWLDKAQTWGLAEDLGGQPLVELIVEDSHTCYLGERGARHAWGYGCGTCPACRLRADGFARFTASAA

SEQ ID NO: 39682 - protein, 241 aa, Methylobacterium brachiatum
  misc_feature (1)..(241): tr|A0A3G2VBD1|A0A3G2VBD1_9RHIZ 7-cyano-7-deazaguanine s ynthase OS=Methylobacterium brachiatum OX=269660 GN=que C PE=3 SV=1
MATEAAIVGDRSALVLFSGGQDSATCLAWALDRFDHVETLGFDYGQRHRVELDRRAVLRAGMGRIDPAWATRLGADHTVALDALGKISETALTRDAEIGFAESGLPNTFVPGRNLVFLTFAAALAYRRGIRHVVGGMCETDYSGYPDCRDDTIKALQVALNLGMERRFVLHTPLMWLDKAQTWGLAEDLGGQPLVELIVEDSHTCYLGERGARHAWGYGCGTCPACRLRADGFARFTASAA

SEQ ID NO: 39683 - protein, 235 aa, Methylobacterium currus
  misc_feature (1)..(235): tr|A0A2R4WKB2|A0A2R4WKB2_9RHIZ 7-cyano-7-deazaguanine s ynthase OS=Methylobacterium currus OX=2051553 GN=queC P E=3 SV=1
MMLSDGALVLFSGGQDSATCLAWALDRFSHVETLGFDYGQRHRIELECRETLRAELARIVPAFAGRLGDDHTLSLDALGAVSETALTRETAIAMEAGGLPNTFVPGRNLVFLTFAAALAYRRGLRHIVGGMCETDFSGYPDCRDDTIKALQVALNLGMERRFVLHTPLMWIDKAATWRMARDLGGEPLVDLIVRESHTCYLGERGALHAWGHGCGTCPACALRASGYARFRAEDA

SEQ ID NO: 39684 - protein, 237 aa, Methylobacterium dankookense
  misc_feature (1)..(237): tr|A0A564G0J1|A0A564G0J1_9RHIZ 7-cyano-7-deazaguanine s ynthase OS=Methylobacterium dankookense OX=560405 GN=qu eC_1 PE=3 SV=1
MSEVGEDCALVLFSGGQDSATCLAWALDRYARVETLGFDYGQRHRIELEARGRLRAGLAKLVPAWGRRLGPDHTLALDALGQVSDTALTREAEIGYAASGLPNTFVPGRNLVFLTFAAALAYRRGLRHIVGGMCETDFSGYPDCRDDTIKAMQVALNLGMDRRFVLHTPLMWLDKAQTWKLAEDLGGPGLVDLVVEESHTCYVGERGTRHDWGYGCGTCPACRLREQGYARYVAAEA

SEQ ID NO: 39685 - protein, 210 aa, Methylobacterium dankookense
  misc_feature (1)..(210): tr|A0A564G398|A0A564G398_9RHIZ 7-cyano-7-deazaguanine s ynthase OS=Methylobacterium dankookense OX=560405 GN=qu eC_2 PE=3 SV=1
MRALLLSGGLDSAAIAAWQRPDVCLTVDYGQRPAEGEIAAAASVARELGLRHEVARVDLSALGLGPLAGRAASDLARAPEWWPYRNQMLVTLAGMRFVAEGLTEILLGAIRTDVHADGRAPFLRTVDRLMHLQEGGVRVMAPARHLSALELVRRSGIPRSLLGATFSCHVMEYACGRCRGCEKHQETLARIDGGRARADTPAQASAATGG

SEQ ID NO: 39686 - protein, 235 aa, Methylobacterium frigidaeris
  misc_feature (1)..(235): tr|A0A2G8ME75|A0A2G8ME75_9RHIZ 7-cyano-7-deazaguanine s ynthase OS=Methylobacterium frigidaeris OX=2038277 GN=q ueC PE=3 SV=1
MTSPDGALVLFSGGQDSTTCLAWALDRFSHVETLGFDYGQRHRIELDCRETLRAEISRIVPAFAERLGDDHTLSLDALGEVSETALTRETAIAMEAGGLPNTFVPGRNLVFLTFAAALAYRRGLRHIVGGMCETDFSGYPDCRDDTIKALQVALNLGMERRFVVHTPLMWIDKAETWRLARDLGGEALVDLIVRESHTCYLGERGALHPWGHGCGTCPACSLRAAGYARFRAEDA

SEQ ID NO: 39687 - protein, 240 aa, Methylobacterium gnaphalii
  misc_feature (1)..(240): tr|A0A512JLT8|A0A512JLT8_9RHIZ 7-cyano-7-deazaguanine s ynthase OS=Methylobacterium gnaphalii OX=1010610 GN=que C PE=3 SV=1
MTATEPGDDGALVLFSGGQDSTTCLAWALARFPRVETLGFDYGQRHRIELDCRDRLRSELGRIDEGWERRLGPDHTVDLATLGAVSETALTRDTEIAMAADGLPNTFVPGRNLVFLTFAAALAYRRGLRHIVGGMCETDYSGYPDCRDDTIKALQVALNLGMERRFVLHTPLMWLDKAATWGLADELGGERLVDLIVEDSHTCYLGERGERHDWGYGCGTCPACALRAKGFAAYRDRSRN

SEQ ID NO: 39688 - protein, 235 aa, Methylobacterium gossipiicola
  misc_feature (1)..(235): tr|A0A1I2R9C5|A0A1I2R9C5_9RHIZ 7-cyano-7-deazaguanine s ynthase OS=Methylobacterium gossipiicola OX=582675 GN=q ueC PE=3 SV=1
MSDNRALVLFSGGQDSATCLAWALDRFAKVETLGFDYGQRHRIELNGRAALRAGMTALNPAWGRRLGPDHTLDLAALGAVSDTALTRDTQIAFAADGLPNTFVPGRNLLFLTFAAALAYRRGLRHIVGGMCETDYSGYPDCRDDTIKALQVALNLGMDRRFVLHTPLMWIDKANTWRLAEELGGRPLVDLIVEASHTCYLGERGARHAWGYGCGACPACELRAKGYSAFVADTTG

SEQ ID NO: 39689 - protein, 240 aa, Methylobacterium haplocladii
  misc_feature (1)..(240): tr|A0A512IJF2|A0A512IJF2_9RHIZ 7-cyano-7-deazaguanine s ynthase OS=Methylobacterium haplocladii OX=1176176 GN=q ueC PE=3 SV=1
MTATDYGDDGALVLFSGGQDSTTCLAWALDRFPRVETLGFDYGQRHRIELDCRARLRKGLTGLDQTWWRRLGRDHTIDLAALGEVSDTALTRETEIAMEADGLPNTFVPGRNLVFLTFAAALAYRRGLRHIVGGMCETDYSGYPDCRDDTIKALQVALNLGMQRRFVLHTPLMWLDKAATWALAEDLGGKALVDLVVEGSHTCYLGERGERHDWGYGCGTCPACELRAKGFARYANHSGI

SEQ ID NO: 39690 - protein, 241 aa, Methylobacterium indicum
  misc_feature (1)..(241): tr|A0A147FKW5|A0A147FKW5_9RHIZ 7-cyano-7-deazaguanine s ynthase OS=Methylobacterium indicum OX=1775910 GN=queC PE=3 SV=1
MPSPARTTSPDGALVLFSGGQDSATCLAWALERFGHVETLGFDYGQRHRIELDCRASLRAEMTRIVPAFAGRLGEDHTLSLAALGEVSETALTRETAIAMESGGLPNTFVPGRNLVFLTFAAALAYRRGLRHIVGGMCETDFSGYPDCRDDTIKALQVALNLGMERRFVLHTPLMWIDKAETWRLARDLGGEALVDLIVRESHTCYLGERGALHPWGHGCGTCPACSLRAAGYARFRAEDA

SEQ ID NO: 39691 - protein, 241 aa, Methylobacterium indicum
  misc_feature (1)..(241): tr|A0A0J6QTN9|A0A0J6QTN9_9RHIZ 7-cyano-7-deazaguanine s ynthase OS=Methylobacterium indicum OX=1775910 GN=queC PE=3 SV=1
MPSPARTTSPDGALVLFSGGQDSATCLAWALERFGHVETLGFDYGQRHRIELDCRASLRAEMTRIVPAFAGRLGEDHTLSLAALGEVSETALTRETAIAMEAGGLPNTFVPGRNLVFLTFAAALAYRRGLRHIVGGMCETDFSGYPDCRDDTIKALQVALNLGMERRFVLHTPLMWIDKAETWRLARDLGGEALVDLIVRESHTCYLGERGALHPWGHGCGTCPACSLRAAGYARFRAEDA

SEQ ID NO: 39692 - protein, 239 aa, Methylobacterium mesophilicum
  misc_feature (1)..(239): tr|M7XZ27|M7XZ27_9RHIZ 7-cyano-7-deazaguanine synthase OS=Methylobacterium mesophilicum SR1.6/6 OX=908290 GN=q ueC PE=3 SV=1
MANETVIAGDRAALVLFSGGQDSATCLAWALERFDHVETLGFDYGQRHRVELDRRAALREGTTGLNPVWAARLGDDHTLALDALGQVSETALTREAAIGYEASGLPNTFVPGRNLVFLTFAAALAYRRGLRHIVGGMCETDYSGYPDCRDDTIKALQVALNLGMERRFVLHTPLMWLDKAQTWGLAENLGGGALVDLIVEESHTCYLGERGQRHPWGYGCGTCPACRLRADGYARFTAA

SEQ ID NO: 39693 - protein, 233 aa, Methylobacterium nodulans
  misc_feature (1)..(233): tr|B8IG26|B8IG26_METNO 7-cyano-7-deazaguanine synthase OS=Methylobacterium nodulans (strain LMG 21967 / CNCM I -2342 / ORS 2060) OX=460265 GN=queC PE=3 SV=1
METSEGALVLFSGGQDSTTCLAWALERFGRVETLGFDYGQRHRVELDCRDRLRAGLAALDPAWAARLGPDHTLPLGVLGEISETALTRDSAIALAETGLPNTFVPGRNLVFLTFAAALAYRRGLRHIVGGMCETDYSGYPDCRDDTIKALQVALNLGMERRFVLHTPLMWIDKAATWRLAEALGGEALVDLIVEDSHTCYRGERGERHAWGYGCGTCPACELRAAGYARFRAA

SEQ ID NO: 39694 - protein, 251 aa, Methylobacterium nodulans
  misc_feature (1)..(251): tr|B8IAM4|B8IAM4_METNO 7-cyano-7-deazaguanine synthase OS=Methylobacterium nodulans (strain LMG 21967 / CNCM I -2342 / ORS 2060) OX=460265 GN=queC PE=3 SV=1
MSRALVVLSGGQDSTTCLFWAKQQFDEVHALTFDYGQRHARELEAAVTVAKMAGVASHEVLKLPDLLRSTSPLVDPGAALEQYASYEQMEETIGDRVELTFVPMRNALFLTIAANRAVALDCFNLVTGVCQQDNANYPDCRLDFVLAQQGTINQALGVGRFRIHTPLMHLTKAETVKLAGSLPGCWEALAYSHTAYDGAYPPTGRDHATLLRAEGFRQAGLPDPLVVRAYREGLMPLPETDNYDGVRASAA

SEQ ID NO: 39695 - protein, 239 aa, Methylobacterium organophilum
  misc_feature (1)..(239): tr|A0A2U1EWN4|A0A2U1EWN4_METOR 7-cyano-7-deazaguanine s ynthase OS=Methylobacterium organophilum OX=410 GN=queC PE=3 SV=1
MANDPVGPGDRAALVLFSGGQDSATCLAWALDRFDHVETLGFDYGQRHRVELDRRAALRAGTTALDPAWAARLGDDHTLALDALGQVSETALTREAAIGYEASGLPNTFVPGRNLVFLTFAAALAYRRGLRHVVGGMCETDYSGYPDCRDDTIKALQVALNLGMERRFVLHTPLMWLDKAQTWELAESLGGRALVDLIVEESHTCYLGERGQRHPWGYGCGTCPACRLRADGYARFTAA

SEQ ID NO: 39696 - protein, 225 aa, Methylobacterium oryzae
  misc_feature (1)..(225): tr|A0A089NWB6|A0A089NWB6_9RHIZ 7-cyano-7-deazaguanine s ynthase OS=Methylobacterium oryzae CBMB20 OX=693986 GN= queC PE=3 SV=1
MLFSGGQDSATCLAWALDRFDHVETLGFDYGQRHRVELDRRAALRAGTTDLNPDWAPRLGADHTLALDALGQVSETALTREAAIGYEASGLPNTFVPGRNLVFLTFAAALAYRRGLRHVVGGMCETDYSGYPDCRDDTIKALQVALNLGMERRFVLHTPLMWLDKAQTWELAETLGGRALVDLIVEESHTCYLGERGQRHPWGYGCGTCPACRLRADGYARFTAA

SEQ ID NO: 39697 - protein, 237 aa, Methylobacterium oxalidis
  misc_feature (1)..(237): tr|A0A512IX00|A0A512IX00_9RHIZ 7-cyano-7-deazaguanine s ynthase OS=Methylobacterium oxalidis OX=944322 GN=queC PE=3 SV=1
MDAGGDGALVLFSGGQDSTTCLAWALDRFPRVETLGFDYGQRHRVELACRDRLRGGLARIEPAWGARLGPDHTLSLDALGAVSETALTREAEIGYEAGGLPNTFVPGRNLVFLTFAAALAYRRGLRRIVGGMCETDYSGYPDCRDDTVKALQVALNLGMERRFLLETPLMWIDKAETWRLAERLGGRALVDLVVEDTHTCYLGERGARHAWGYGCGTCPACDLRAKGYARFRAEAAD

SEQ ID NO: 39698 - protein, 241 aa, Methylobacterium phyllostachyos
  misc_feature (1)..(241): tr|A0A1G9Y1A8|A0A1G9Y1A8_9RHIZ 7-cyano-7-deazaguanine s ynthase OS=Methylobacterium phyllostachyos OX=582672 GN =queC PE=3 SV=1
MATDMATDMAGDRSALVLFSGGQDSATCLAWALDRFAHVETLGFDYGQRHRVELDRRAALRAGLVGLVPAWAGRLGEDHTVTLDALGEISETALTREAAIGYEESGLPNTFVPGRNLVFLTFAAALAYRRGLRHVVGGMCETDYSGYPDCRDDTIKALQVALNLGMERRFVLHTPLMWLDKAQTWSLAETLGGRALVDLIVEESHTCYLGERGQRHAWGYGCGTCPACRLRADGFARFSAA

SEQ ID NO: 39699 - protein, 235 aa, Methylobacterium platani
  misc_feature (1)..(235): tr|A0A179S1G8|A0A179S1G8_9RHIZ 7-cyano-7-deazaguanine s ynthase OS=Methylobacterium platani OX=427683 GN=queC P E=3 SV=1
MTSPDGALVLFSGGQDSATCLAWALDRFAHVETLGFDYGQRHRIELACRDTLRAELTRIVPAFAGRLGEDHTLSLDALGAVSETALTRETAIAMEEGGLPNTFVPGRNLVFLTFAAALAYRRGLRHIVGGMCETDFSGYPDCRDDTIKALQVALNLGMERRFVLHTPLMWIDKAETWRLARDLGGEALVDLIVRESHTCYLGERGAMHEWGHGCGTCPACSLRAAGYARFRAEDA

SEQ ID NO: 39700 - protein, 241 aa, Methylobacterium pseudosasicola
  misc_feature (1)..(241): tr|A0A1I4HXX8|A0A1I4HXX8_9RHIZ 7-cyano-7-deazaguanine s ynthase OS=Methylobacterium pseudosasicola OX=582667 GN =queC PE=3 SV=1
MATDAAIIGDRSALVLFSGGQDSATCLAWALDRFQHVETLGFDYGQRHRVELERRAVLRDGMGLVQPAWATRLGEDHTIALDALGQISETALTRDAEIGFEESGLPNTFVPGRNLVFLTFAAALAYRRGIRHVVGGMCETDYSGYPDCRDDTIKALQVALNLGMERRFVLHTPLMWLDKAQTWGLAEDLGGRPLVELIVEDSHTCYLGERGARHAWGYGCGTCPACRLRADGFARFTASAA

SEQ ID NO: 39701 - protein, 239 aa, Methylobacterium radiotolerans; identical to SEQ ID NO: 39695
  misc_feature (1)..(239): tr|A0A438LFP4|A0A438LFP4_9RHIZ 7-cyano-7-deazaguanine s ynthase OS=Methylobacterium radiotolerans OX=31998 GN=q ueC PE=3 SV=1

SEQ ID NO: 39702 - protein, 239 aa, Methylobacterium radiotolerans; identical to SEQ ID NO: 39695
  misc_feature (1)..(239): tr|B1LTL6|B1LTL6_METRJ 7-cyano-7-deazaguanine synthase OS=Methylobacterium radiotolerans (strain ATCC 27329 / DSM 1819 / JCM 2831 / NBRC 15690 / NCIMB 10815 / 0-1) O X=426355 GN=queC PE=3 SV=1

SEQ ID NO: 39703 - protein, 235 aa, Methylobacterium sp.
  misc_feature (1)..(235): tr|A0A3S2VSV2|A0A3S2VSV2_9RHIZ 7-cyano-7-deazaguanine s ynthase OS=Methylobacterium sp. TER-1 OX=2499852 GN=que C PE=3 SV=1
MHGNDGALVLFSGGQDSTTCLAWALDRFARVETLGFDYGQRHRVELDCRDRLRTGLAGLNPAWAERLGDDHTLSLDALGQVSDTALTRDTEISFESGGLPNTFVPGRNLVFLTFAASLAYRRGLRHIVGGMCETDFSGYPDCRDDTIKALQVALNLGMERRFVLHTPLMWIDKAETWRLARSLGGEALVDLIVEDSHTCYLGERGAPHPWGHGCGACPACALRAAGYARFRATAA

SEQ ID NO: 39704 - protein, 236 aa, Methylobacterium sp.
  misc_feature (1)..(236): tr|A0A5C8UJZ9|A0A5C8UJZ9_9RHIZ 7-cyano-7-deazaguanine s ynthase OS=Methylobacterium sp. WL19 OX=2603896 GN=queC PE=3 SV=1
MSDDGALVLFSGGQDSTTCLAWALERFPRVETLGFDYNQRHRVELDGRAPLRETMAAMNPAWFRRLGRDHTIALDALGKVSETALTRSTEIAFEAGGLPNTFVPGRNIIFLTFAAALAYRRSLGHIVGGMCETDYSGYPDCRDDTIKALQVALNLGMDRRFVLHTPLMWIDKAETWKMAKDLGGQPLVDLIVEDTHTCYLGTRGERHAWGYGCGTCPACDLRAKGHAKFVAEAVTE

SEQ ID NO: 39705 - protein, 235 aa, Methylobacterium tarhaniae
  misc_feature (1)..(235): tr|A0A0J6VHI6|A0A0J6VHI6_9RHIZ 7-cyano-7-deazaguanine s ynthase OS=Methylobacterium tarhaniae OX=1187852 GN=que C PE=3 SV=1
MTSPDGALVLFSGGQDSATCLAWALDRFAHVETLGFDYGQRHRIELDCRASLRAEMTRIVPAFAGRLGEDHTLSLSALGEVSETALTRETAIAMEAGGLPNTFVPGRNLVFLTFAAALAYRRGLRHIVGGMCETDFSGYPDCRDDTIKALQVALNLGMDRRFVLHTPLMWIDKAETWRLARDLGGEALVDLIVRESHTCYLGERGALHAWGHGCGACPACSLRAAGYARFRAEDA

SEQ ID NO: 39706 - protein, 227 aa, Methylocaldum marinum
  misc_feature (1)..(227): tr|A0A250L073|A0A250L073_9GAMM 7-cyano-7-deazaguanine s ynthase OS=Methylocaldum marinum OX=1432792 GN=queC PE= 3 SV=1
MKKAVVLLSGGLDSATTVAIAKSQGYACYALSFDYGQRHSAELDAARRVAQSVGVIEHKIIRIGLGEFGGSALTDTRIAVPETPQDGIPVTYVPARNTVFLAFALGWAEVLGSTDIFIGVNAVDYSGYPDCRPEYIEAFEHLANLATKAGVEGNRFKVHAPLIALKKVEIIRIGTDLGIDYALTVSCYSADDEGRACGLCDSCRFRKAGFAEAGAADPTIYRCEQSR

SEQ ID NO: 39707 - protein, 226 aa, Methylocaldum sp.
  misc_feature (1)..(226): tr|A0A4R7AFJ9|A0A4R7AFJ9_9GAMM 7-cyano-7-deazaguanine s ynthase OS=Methylocaldum sp. 0917 OX=2485163 GN=queC PE =3 SV=1
MTTMKKAVVLLSGGLDSATTLAIAKSQGYECYALSFDYGQRHGAELHAARRVAQSCGAIEHKIIRIGLGEFGGSALTDTRIAVPETPQEGIPVTYVPARNTVFLAFALGWAEVLGSADIFIGVNAVDYSGYPDCRPQYIEAFERLANLATKAGVEGKHFKVHAPLITLKKAEIIRIGTDLGIDYALTVSCYSADDEGRACGSCDSCRFRKIGFAEAGISDPTRYKS

SEQ ID NO: 39708 - protein, 239 aa, Methylocapsa palsarum
  misc_feature (1)..(239): tr|A0A1I3W2G7|A0A1I3W2G7_9RHIZ 7-cyano-7-deazaguanine s ynthase OS=Methylocapsa palsarum OX=1612308 GN=queC PE= 3 SV=1
MTTTGATKKVLVLFSGGQDSTTCLALALDRYDEVETIGFDYKQRHAVELGQREILRQALTRDFPAWRGRLGFDHLVRIEALAEMSQSAMTHDIEITLNEQGLPNTFVPGRNLLFLTFAAALAYRRGLTYIVAGMCETDYSGYPDCRDDAIKAMQIALNLGMEARFVMETPLMRLDKAATWRLAETLGGQKLVELIVEATHTCYLGDRRVRHDWGYGCGACPACELRAKGWREFKASPSA

SEQ ID NO: 39709 - protein, 242 aa, Methyloceanibacter caenitepidi
  misc_feature (1)..(242): tr|A0A0A8K4U4|A0A0A8K4U4_9RHIZ 7-cyano-7-deazaguanine s ynthase OS=Methyloceanibacter caenitepidi OX=1384459 GN =queC PE=3 SV=1
MASPPADEPAGALVLFSGGQDSTTCLGQALDRYARVETVGFNYGQRHGVELECRSRVRAAIAEGFPDWGARLGPDHMIDISSFGAIGDTALTSGAEIVMTESGLPSTFVPGRNLVFFIYAAALGYRRGLNVLVGGMCETDYSGYPDCRDETLKALQTAIRLGTEIPFSIETPLMWLSKAETWALADTLGGSAFVDLIREETHTCYKGDRATKHDWGFGCGTCPACDLRAKGYREWREMAQAG

SEQ ID NO: 39710 - protein, 234 aa, Methyloceanibacter marginalis
  misc_feature (1)..(234): tr|A0A1E3WAP7|A0A1E3WAP7_9RHIZ 7-cyano-7-deazaguanine s ynthase OS=Methyloceanibacter marginalis OX=1774971 GN= queC PE=3 SV=1
MTADGALVLFSGGQDSTVCLAYALDRYRRVETVGFDYGQRHGIELDCRKRVREEIVHRFPQWEDRLGPDHMLDLRSFGAIGETALTTNAEIVILESGLPSSFVPGRNLAFFVYAAALGYRRGFTVLVGGMCETDYSGYPDCRDATLRALQEAIRLGTNIDFAIETPLMSRSKAETWALAHDLGGDALVTLIVERTHTCYKGARGTRYDWGYGCGTCPACELRAKGYWEWRERVG

SEQ ID NO: 39711 - protein, 243 aa, Methyloceanibacter methanicus
  misc_feature (1)..(243): tr|A0A1E3W532|A0A1E3W532_9RHIZ 7-cyano-7-deazaguanine s ynthase OS=Methyloceanibacter methanicus OX=1774968 GN= queC PE=3 SV=1
MAAPSSDVPAGALVLFSGGQDSTTCLAHALEHYARVETAGFDYGQRHRIELECRARIRAALQERFPAWAGRLGPDHMLDISSFGAIGETSLTTQSEIVMLDSGLPSTFVPGRNLVFFVYAAALAYRRGLDVLVGGMCETDYSGYPDCRDATLKALQEAIRLGTEVPFTIETPLMWLSKAQTWALAHELGGDALVELVRNDTHTCYEGDHTTLHDWGYGCGTCPACDLRAKGYRAWRALGAQNG

SEQ ID NO: 39712 - protein, 243 aa, Methyloceanibacter sp.
  misc_feature (1)..(243): tr|A0A353IR00|A0A353IR00_9RHIZ 7-cyano-7-deazaguanine s ynthase OS=Methyloceanibacter sp. OX=1965321 GN=queC PE =3 SV=1
MAAPSSSEPAGALVLFSGGQDSTICLGHALERYARVETVGFNYGQRHLVELECRTRVLAALRERFPAWGARVGADHMIDLSSFGAIGETALTSEAEIVMTESGLPSTFVPGRNLAFFVHAAALGHRRGLTVLVGGMCEADYSGYPDCRDETLRTLQEALRLATEVPFSIETPLMWLSKAQSWGLAEDLGGAAFIDLIREKTHTCYVGDHETKHDWGYGCGTCPACELRAKGYEDWRGAAAKPS

SEQ ID NO: 39713 - protein, 236 aa, Methylocella silvestris
  misc_feature (1)..(236): tr|B8EP13|B8EP13_METSB 7-cyano-7-deazaguanine synthase OS=Methylocella silvestris (strain DSM 15510 / CIP 1081 28 / LMG 27833 / NCIMB 13906 / BL2) OX=395965 GN=queC P E=3 SV=1
MPDRPARRGALTLFSGGQDSTTCLAYALDRYDHVETIGFDYDQRHRIELDQRGKIRDALLRDFPAWKDKLGEDHLVRIGALAEIATTAMTHDVEIAFDANGLPNTFVPGRNLLFLTFAGALAYRRGLTQIIGGMCETDFSGYPDCRDDTVKAMQIALNLGMDTRFNVETPLMWLDKAATWRLAERLGGKALIAIILEETHTCYLGERGKRHNWGYGCGECPACQLRAKGWREYRNS

SEQ ID NO: 39714 - protein, 241 aa, Methylocella silvestris
  misc_feature (1)..(241): tr|A0A2J7TJJ0|A0A2J7TJJ0_METSI 7-cyano-7-deazaguanine s ynthase OS=Methylocella silvestris OX=199596 GN=queC PE =3 SV=1
MPDRPARRGALTLFSGGQDSTTCLAYALDRYDYVETIGFDYNQRHRIELDQRGKIRDALLRDFPAWRDKLGEDHLVRIGALAEIATTAMTHDVEIAFNANGLPNTFVPGRNLVFLTFAGAVAHRRGLTQIIGGMCETDFSGYPDCRDDSVKAMQLALNLGMDSRFNIETPLMWLDKAETWRLAERLGGNALIAIILEETHTCYLGERGQRHDWGYGCGQCPACQLRAKGWGEYRSIAISRR

SEQ ID NO: 39715 - protein, 236 aa, Methylocella tundrae
  misc_feature (1)..(236): tr|A0A4U8YX92|A0A4U8YX92_METTU 7-cyano-7-deazaguanine s ynthase OS=Methylocella tundrae OX=227605 GN=queC PE=3 SV=1
MSEKPLSRKALTLFSGGQDSTTCLAYALERYDHVETIGFDYNQRHRIELSQRAVIRDALTREFPAWREKLGEDHLVSIAALAEISTTAMTHDVAIVMDERGLPNTFVPGRNLMFLTFAGALAYRRGLTRIVAGMCETDFSGYPDCRDDSVKAMQLALNLGMDARFNVETPLMWLDKADTWRLAERLGGKPLIAIILEDTHTCYLGERGVRHDWGYGCGHCPACELRAKGWREYASG

SEQ ID NO: 39716 - protein, 44 aa, Methylococcaceae bacterium
  misc_feature (1)..(44): tr|A0A257MZR8|A0A257MZR8_9GAMM 7-cyano-7-deazaguanine s ynthase (Fragment) OS=Methylococcaceae bacterium NSM2-1 OX=1917482 GN=CG441_1446 PE=3 SV=1
MQKKAIVLLSGGLDSITVLALAKQQGYTCYALSFDYGQRHNAEL

SEQ ID NO: 39717 - protein, 242 aa, Methylococcaceae bacterium
  misc_feature (1)..(242): tr|A0A1Z9UC05|A0A1Z9UC05_9GAMM 7-cyano-7-deazaguanine s ynthase OS=Methylococcaceae bacterium TMED282 OX=198675 8 GN=queC PE=3 SV=1
  misc_feature (10)..(10): Xaa can be any naturally occurring amino acid
  misc_feature (192)..(192): Xaa can be any naturally occurring amino acid
  misc_feature (206)..(206): Xaa can be any naturally occurring amino acid
  misc_feature (221)..(221): Xaa can be any naturally occurring amino acid
  misc_feature (233)..(233): Xaa can be any naturally occurring amino acid
  misc_feature (238)..(238): Xaa can be any naturally occurring amino acid
MGGHLKPTGXRSALVLFSGGQDSTICLAWALANFDLVSTISFSYGQRHQVELDCCARIIEKFKKIVPQWSKKLSGQHLINLDFIPAISNSALTSEMEIEMTNSGLPNTFVPGRNIFFLSAAASLAYRSGILNLVGGMCETDYSGYPDCREEFIDSLETSIGLGMDMKFKIHTPLMFLNKAQSWLVAENLGGXELIDVIVEETHSCXRGVRESRYEWGYGCXKCPACELRKVGXGQYKXGVAI

SEQ ID NO: 39718 - protein, 224 aa, Methylococcales bacterium
  misc_feature (1)..(224): tr|A0A418RT21|A0A418RT21_9GAMM 7-cyano-7-deazaguanine s ynthase OS=Methylococcales bacterium OX=2304002 GN=queC PE=3 SV=1
MRKKAIILLSGGLDSITVLALAKQQGYDCYALSFDYGQRHNAELVAAAQIAADYQVKDYKVIKLGLGSIGGSALTDSHIDVPNTPQTGIPVTYVPARNTIFLSFALGWAEVLHIQDIFIGVNAVDYSGYPDCRPEFIKAFQQLANLATRSSVEGEAFTIHTPLIALSKAEIIKQGIALGVNYQRTVSCYSADVNGHACGVCDACRIRKAGFAEANVADPTIYAH

SEQ ID NO: 39719 - protein, 225 aa, Methylococcales bacterium
  misc_feature (1)..(225): tr|A0A418RGL3|A0A418RGL3_9GAMM 7-cyano-7-deazaguanine s ynthase OS=Methylococcales bacterium OX=2304002 GN=queC PE=3 SV=1
MQKKAIILLSGGLDSITVLALAKQQGYQCYALSFDYGQRHNAELVAAAQIAKDYQVIDHKIIKLGLGSIGGSALTDENIAVPNKLEAGIPVTYVPARNTIFLSFALGWAEVLKLSDIFIGVNAVDYSGYPDCRPEFISAFQKLANLATKAGVDGDSFHIHTPLISLSKAEIIKQGIALGVDYRKTVSCYSADEQGEACGVCDACRIRISGFLEADEEDPTRYQKK

SEQ ID NO: 39720 - protein, 223 aa, Methylococcus capsulatus
  misc_feature (1)..(223): sp|Q609K0|QUEC_METCA 7-cyano-7-deazaguanine synthase OS =Methylococcus capsulatus (strain ATCC 33009 / NCIMB 11 132 / Bath) OX=243233 GN=queC PE=3 SV=1
MKPAVVLLSGGLDSATTLAIARREGFACHAMSFDYGQRHGAELKAARRLAQSLGAIEHKTVHIGLDAIGGSALTDLRIAVPDHPQNGIPVTYVPARNTVFLSFALGWAEVLGALDIFIGVNAVDYSGYPDCRPEFIRAFEQLANLATKVGVEGGRFRIHTPLIDLSKADIIRTGTALGIDYAMTVSCYAADAEGLACGVCDSCRLRRQGFEQAGIADPTRYRS

SEQ ID NO: 39721 - protein, 227 aa, Methylococcus sp.
  misc_feature (1)..(227): tr|A0A432RN23|A0A432RN23_9GAMM 7-cyano-7-deazaguanine s ynthase OS=Methylococcus sp. OX=39769 GN=queC PE=3 SV=1
MKLGEKPKAVILLSGGLDSITALVLARKQGFECHALSFDYGQRHNAELVAARRIAAHYSLIEHRVMQLGLGSIGGSALTDESIDVPQEAAEGIPVTYVPARNTVFLALALGWAEVLEAHDIFVGVNAVDYSGYPDCRPEYIEAFQAMANLATRAGVEGAAIRINAPLIQMSKADIVRMGTEFGVDYSMTVSCYAADSEGRGCRSCDACRLRSEGFQSAGIHDPTRYR

SEQ ID NO: 39722 - protein, 244 aa, Methylocystaceae bacterium
  misc_feature (1)..(244): tr|A0A395CVZ5|A0A395CVZ5_9RHIZ 7-cyano-7-deazaguanine s ynthase OS=Methylocystaceae bacterium OX=2052174 GN=que C PE=3 SV=1
MTDAIASLQTAAGALVLFSGGQDSTTCLAWALARFSHVETIGFDYGQRHRVELGQRAALRDGLAHISPLWQERLGADHTIGVEALGAISETALTRDAEIAFDAQGLPNTFVPGRNILFLTFAAALAYRRGLEHIVAGMCETDYSGYPDCRDETIRAVGTALDLGMGRHFSIHTPLMWIDKAATWSLAEELGGEPLVRLVVEESHTCYLGERGARFDWGYGCGECPACRLRAAGWEKYAAGRPKK

SEQ ID NO: 39723 - protein, 247 aa, Methylocystaceae bacterium
  misc_feature (1)..(247): tr|A0A5C9D6D8|A0A5C9D6D8_9RHIZ 7-cyano-7-deazaguanine s ynthase OS=Methylocystaceae bacterium OX=2052174 GN=que C PE=3 SV=1
MTNDLPTHSSAALVLFSGGQDSTTCLAWALSRFERVETVGFDYGQRHRVELSRRAGLREGLVRLSPLWAERLGEDRTISIEALGAISETALTRNAEIAFAADGLPNTFVPGRNLLFLTFAAALAYRRGVNDLVGGMCETDYSGYPDCRDQTIRAMAQALSLGMDRSMNIHTPLMWIDKAATWRLAESLGGEALVRLIVEETHTCYLGERGRRFDWGYGCGECPACKLRAHGWENYRAGQTRAAAETV

SEQ ID NO: 39724 - protein, 240 aa, Methylocystis bryophila
  misc_feature (1)..(240): tr|A0A1W6MUW8|A0A1W6MUW8_9RHIZ 7-cyano-7-deazaguanine s ynthase OS=Methylocystis bryophila OX=655015 GN=queC PE =3 SV=1
MSEPSTPAPSSGALVLFSGGQDSTVCLALALSRFERVETIGFDYGQRHAVELTQRSRIRAGLSDLFPEWRARLGEDHSLAIPTLNEISDTALTRDAEIVFSADGLPNTFVPGRNILFLTFAAALGYRRHIGTLVGGMCETDYSGYPDCREATIKATEQALSLGLDRPMEILTPLMHIDKAATWRLAEELGGEALVALVVEESHSCYLGDRSRRFDWGYGCGECPACTLRAAGWERYRAGR

SEQ ID NO: 39725 - protein, 250 aa, Methylocystis heyeri
  misc_feature (1)..(250): tr|A0A4S4MH71|A0A4S4MH71_9RHIZ 7-cyano-7-deazaguanine s ynthase OS=Methylocystis heyeri OX=391905 GN=queC PE=3 SV=1
MNSETTPTNAKGDAALVLFSGGQDSTTCLAYALKRFGRVETIGFDYGQRHAVELDRREVLRSGLAAMSPLWRERLGADHVVSLPALGEISQTALTRETEIAFNETGLPNTFVPGRNIVFLTFAAALAYRRGVSHLVGGMCETDYSGYPDCRDATIRATENALSLGMDREFAIHTPLMWIDKADTWRLAEKLGGEALVRLIIEETHTCYLGERGRRFDWGYGCGECPACRLRAAGWEKYAREKAASPGLRP

SEQ ID NO: 39726 - protein, 247 aa, Methylocystis hirsuta
  misc_feature (1)..(247): tr|A0A3M9XLR3|A0A3M9XLR3_9RHIZ 7-cyano-7-deazaguanine s ynthase OS=Methylocystis hirsuta OX=369798 GN=queC PE=3 SV=1
MTNNLSTHSAAALVLFSGGQDSTTCLAWALSRFDRVETVGFDYGQRHRVELSRRAGLRDGLIRLSPLWAERLGEDRTILIEALGAISETALTRDAEIAFAADGLPNTFVPGRNLLFLTFAAALAYRRGIADLVGGMCETDYSGYPDCRDQTIRAMAQALSLGMDRSMNIHTPLMWIDKAATWRLAESLGGEPLVRLIVEETHTCYLGERGRRFDWGYGCGECPACKLRAHGWETYRAGETSAAAETF

SEQ ID NO: 39727 - protein, 247 aa, Methylocystis rosea
  misc_feature (1)..(247): tr|A0A3G8M198|A0A3G8M198_9RHIZ 7-cyano-7-deazaguanine s ynthase OS=Methylocystis rosea OX=173366 GN=queC PE=3 S V=1
MTNDLPTQPAAALVLFSGGQDSTTCLAWALSRFERVETVGFDYGQRHRVELSRRAGLRDGLIRLSPLWAERLGEDRTISIEALGAISETALTRHAEIAFAADGLPNTFVPGRNLLFLTFAAALAYRRGVADLVGGMCETDYSGYPDCRDQTIRAMAQALSLGMDRSIAIHTPLMWIDKAATWRLAESLGGEALVRLIVEETHTCYLGERGRRFDWGYGCGECPACKLRAHGWENYRAGQTSAAAETF

SEQ ID NO: 39728 - protein, 68 aa, Methylocystis sp.
  misc_feature (1)..(68): tr|A0A2P5MCB1|A0A2P5MCB1_9RHIZ 7-cyano-7-deazaguanine s ynthase (Fragment) OS=Methylocystis sp. OX=1911079 GN=C TY30_03315 PE=4 SV=1
ATWRLAESLGGEALVRLIVEETHTCYLGERGRRFDWGYGCGECPACKLRAHGWEKYRAGQTSAPAEPF

SEQ ID NO: 39729 - protein, 244 aa, Methylocystis sp.
  misc_feature (1)..(244): tr|J7QII4|J7QII4_METSZ 7-cyano-7-deazaguanine synthase OS=Methylocystis sp. (strain SC2) OX=187303 GN=queC PE= 3 SV=1
MTNDLPTHASAALVLFSGGQDSTTCLAWALSRFERVETVGFDYGQRHRVELSRRAGLREGLARLSPLWAERLGEDSTISIEALGAISETALTRNAEIAFAADGLPNTFVPGRNLLFLTFAAALAYRRGIADLVGGMCETDYSGYPDCRDETIRAMAQALSLGMDRSMNIHTPLMWIDKAATWRLAESLGGEPLVGLIVEETHTCYLGERGRHFDWGYGCGECPACKLRAHGWEKFRAESVRATA

SEQ ID NO: 39730 - protein, 224 aa, Methyloglobulus morosus
  misc_feature (1)..(224): tr|V5BH91|V5BH91_9GAMM 7-cyano-7-deazaguanine synthase OS=Methyloglobulus morosus KoM1 OX=1116472 GN=queC PE=3 SV=1
MSKNAIILLSGGLDSITVLALAKQQGFGCYALSFDYGQRHNAELNAASEIAKLYQVIDHKIINLGLGSIGGSALTDQNIQVPDKLEEGIPVTYVPARNTLFLAFALGWAEVLKITDIFIGVNAIDYSGYPDCRPEFINAFQHLANLATKAGAEGEHFTIHTPLISLSKAAIIKLGVELGVDYAPTVSCYSANSQGQACRVCDACRLRMIGFAEAGIPDPTRYQQ

SEQ ID NO: 39731 - protein, 240 aa, Methyloligella halotolerans
  misc_feature (1)..(240): tr|A0A1E2S1T3|A0A1E2S1T3_9RHIZ 7-cyano-7-deazaguanine s ynthase OS=Methyloligella halotolerans OX=1177755 GN=qu eC PE=3 SV=1
MAYNSHRALVLFSGGQDSTVCLAHALSRYTHVETVGFDYGQRHAVELECRQTVLDRLREAFPDWARKLGADHMLDLSGFGAISDTALTGQSEIVMLESGLPSTFVPGRNLVFFTYASALAYRRDLRVLVGGMCETDYSGYPDCRHETLEALERALRLGTEFDFAIETPLMWLSKAETWALADRLGGQPLVDLIIEHSHTCYRGDHQTRHDWGYGCGDCPACELRARGYREWHAARDTAGD

SEQ ID NO: 39732 - protein, 225 aa, Methylomagnum ishizawai
  misc_feature (1)..(225): tr|A0A1Y6D8S3|A0A1Y6D8S3_9GAMM 7-cyano-7-deazaguanine s ynthase OS=Methylomagnum ishizawai OX=1760988 GN=queC P E=3 SV=1
MMKPAVILLSGGLDSATVLAIAQAQGYECHALSFDYGQRHGAELAAAVRVADHFGVADRKLIRIGLDAIGGSALTDANIAVPDHPQAGIPVTYVPARNTVFLSFALGWAEVLGNADIFIGVNAVDYSGYPDCRPEYIEAFRNLAKLATKAGVEGADIHIHTPLIQLSKAEIIQQGVALGVDYALTVSCYAADPEGRACGVCDACRLRAAGFREAGVVDPTRYVAR

SEQ ID NO: 39733 - protein, 226 aa, Methylomicrobium album
  misc_feature (1)..(226): tr|H8GL33|H8GL33_METAL 7-cyano-7-deazaguanine synthase OS=Methylomicrobium album BG8 OX=686340 GN=queC PE=3 SV =1
MQKKAIILLSGGLDSITVLALAQSQGYHCHALSFDYGQRHNAELEAARRIAEHYRVAEHKIIPLGLGAIGGSALTDDHIPVPTTPQTGIPATYVPARNTIFLAFALGWAEVLNARDIFIGVNAVDYSGYPDCRPEFIAAFRKLADLATKAGVEGDHFTIHTPLISLSKADIIKTGLALGVDYSQTVSCYAADANGRACGLCDACRLRKNGFDAAGIEDPTRYRPPL

SEQ ID NO: 39734 - protein, 254 aa, Methylomicrobium alcaliphilum
  misc_feature (1)..(254): tr|G4ST29|G4ST29_META2 7-cyano-7-deazaguanine synthase OS=Methylomicrobium alcaliphilum (strain DSM 19304 / NC IMB 14124 / VKM B-2133 / 20Z) OX=1091494 GN=queC PE=3 S V=1
MQKKAVVLLSGGLDSITVLALAKKQGYVCYALSFDYGQRHNAELQAAKRIAAEYGVIDHKIIHIGLNDIGGSALTDEHIAVPSSLQPGIPVTYVPARNTIFLSFALGWAEVLNSRDIFIGVNAIDYSGYPDCRPEFIKAFQSLAELATKVGVEGGHFLIHSPLIEMSKADIIRVGSELGVDYSQTVSCYSADKFGNACGVCDACRLRKAGFELAGIEDPTRYQKNKKRVAQIRNIIIIVNLCWVVSSAGRAPHF

SEQ ID NO: 39735 - protein, 225 aa, Methylomicrobium buryatense
  misc_feature (1)..(225): tr|A0A4P9UVD9|A0A4P9UVD9_9GAMM 7-cyano-7-deazaguanine s ynthase OS=Methylomicrobium buryatense OX=95641 GN=queC PE=3 SV=1
MQKKAVVLLSGGLDSITVLALAKRQGYACYALSFDYGQRHNAELQAAKHIAAEYGVVDHKIIHIGLNDIGGSALTDEHIAVPNSLQPGIPVTYVPARNTIFLSFALGWAEVLNSRDIFIGVNAIDYSGYPDCRPEFIKAFQSLAELATKAGVEGGHFSIHVPLIEMSKADIIRTGSELGVDYSQTVSCYSADKFGNACGVCDACRLRKAGFELAGIEDPTRYQKK

SEQ ID NO: 39736 - protein, 225 aa, Methylomicrobium kenyense
  misc_feature (1)..(225): tr|A0A543VDQ3|A0A543VDQ3_9GAMM 7-cyano-7-deazaguanine s ynthase OS=Methylomicrobium kenyense OX=269709 GN=queC PE=3 SV=1
MQKKAVILLSGGLDSITVLAFAKQQGYACYALSFDYGQKHNAELEAAKRIAARYGVSDHKIIQLGLSSIGGSALTDQHIAVPDTPQQGIPVTYVPARNTIFLSFALGWAEVLDCRDIFIGVNAIDYSGYPDCRPEFIKAFQSLADLATKAGVEGGHFLIHAPLIEMSKADIIRTGSELGIDYSQTVSCYSADKFGNACGVCDACRLRKAGFEEAGIQDPTRYQNR

SEQ ID NO: 39737 - protein, 201 aa, Methylomonas denitrificans
  misc_feature (1)..(201): tr|A0A126T332|A0A126T332_9GAMM 7-cyano-7-deazaguanine s ynthase OS=Methylomonas denitrificans OX=1538553 GN=JT2 5_008345 PE=3 SV=1
MRTALLLSGGMDSLAVAWWKRPDHCITIDYGQLAAEAEITASKVICEKLGIEHHVISVDCRSMGSGDMAGTPPDGYAPASDWWPYRNQMLLTFAAMKALPLGVKAIWIGSVKSDKSHQDGTIQFLESMNALLSLQEGGMTVSAPAIDMTTPQLIRHAGVPKNILGWAHSCHKANVACANCRGCNKYFEVLYELDGGMDRPG

SEQ ID NO: 39738 - protein, 230 aa, Methylomonas denitrificans
  misc_feature (1)..(230): tr|A0A126T6C9|A0A126T6C9_9GAMM 7-cyano-7-deazaguanine s ynthase OS=Methylomonas denitrificans OX=1538553 GN=que C PE=3 SV=1
MENNSSSRPAIILLSGGLDSITVLALAKQQGFTCYALSFDYGQRHNAELEASRRIAKHYQVADHKIINLGLSAIGGSALTDARIDVPTSPQAGIPVTYVPARNTIFLAFALGWAEVVKAHDVFIGVNAVDYSGYPDCRPEFIKAFQDMANLGTKAGVEGHKIQIHTPLIALSKAEIIQQGLALGVDYADTVSCYSADIKGRACGVCDACRLRAAGFQSLGVADPTHYRPK

SEQ ID NO: 39739 - protein, 232 aa, Methylomonas koyamae
  misc_feature (1)..(232): tr|A0A291IFH8|A0A291IFH8_9GAMM 7-cyano-7-deazaguanine s ynthase OS=Methylomonas koyamae OX=702114 GN=queC PE=3 SV=1
MREENNAGAKPAVILLSGGLDSITVLALAQQQGFVCHALSFDYGQRHNAELEAARNIASHYQVAAHKVINLGLSSIGGSALTDAKIDVPTSPQTGIPVTYVPARNTIFLAFALGWAEVLQAHDVFIGVNAVDYSGYPDCRPEFIKAFQDMANLGTKAGVEGHKIQIHTPLISFSKAQIIQQGMALGVDYAATVSCYSADAEGRACGVCDACRLRAAGFAAAGVADPTRYRPH

SEQ ID NO: 39740 - protein, 232 aa, Methylomonas koyamae
  misc_feature (1)..(232): tr|A0A177NLT9|A0A177NLT9_9GAMM 7-cyano-7-deazaguanine s ynthase OS=Methylomonas koyamae OX=702114 GN=queC PE=3 SV=1
MREENNAGAKPAVILLSGGLDSITVLALAQQQGFVCHALSFDYGQRHNAELEAARNIASHYQVAAHKVINLGLSSIGGSALTDANIDVPTSPQTGIPVTYVPARNTIFLAFALGWAEVLQAHDVFIGVNAVDYSGYPDCRPEFIKAFQDMANLGTKAGVEGHKIQIHTPLISFSKAQIIQQGMALGVDYAATVSCYSADAEGRACGVCDACRLRAAGFAAAGVADPTRYRPH

SEQ ID NO: 39741 - protein, 236 aa, Methylomonas lenta
  misc_feature (1)..(236): tr|A0A177NJJ6|A0A177NJJ6_9GAMM 7-cyano-7-deazaguanine s ynthase OS=Methylomonas lenta OX=980561 GN=queC PE=3 SV =1
MLEENKFKLVNRGAKKGAIILLSGGLDSITVLAHAQQQGYACYALSFDYGQRHNAELEAAKKIAQHYQVLDHKILHVGLDSFGGSALTDNHIAVPKSPQQGIPVTYVPARNTIFLSFALGWAEVLNVHDVFIGVNAVDYSGYPDCRPAFIEAFQAMANLATKAGVEGHEIHIHTPLIHLTKAQIIEQGLNLGVDYANTVSCYAADKQGRACGDCDACRLRKAGFEAFGVSDPTRYQ

SEQ ID NO: 39742 - protein, 230 aa, Methylomonas methanica
  misc_feature (1)..(230): tr|A0A177LXP6|A0A177LXP6_METMH 7-cyano-7-deazaguanine s ynthase OS=Methylomonas methanica OX=421 GN=queC PE=3 S V=1
MENNSSSRPAIILLSGGLDSITVLALAKQQGFACYALSFDYGQRHNAELEASRRIAKHYQVADHKIISLGLSAIGGSALTDARIDVPTSPQAGIPVTYVPARNTIFLAFALGWAEVVKAHDVFIGVNAVDYSGYPDCRPEFIKAFQDMANLGTKAGVEGHKIQIHTPLIALSKAEIIQKGLALGVNYADTVSCYSADIKGRACGVCDACRLRAAGFENLGVDDPTHYRPK

SEQ ID NO: 39743 - protein, 236 aa, Methylomonas methanica
  misc_feature (1)..(236): tr|F9ZZV2|F9ZZV2_METMM 7-cyano-7-deazaguanine synthase OS=Methylomonas methanica (strain MC09) OX=857087 GN=qu eC PE=3 SV=1
MHEENSLKAMNSGEQKKAIILLSGGLDSITVLALAKQQGYGCYALSFDYGQRHNAELVAAKKIAEKYQVLDHKIIRLGLDSIGGSALTDDHIDVPQSPQEGIPVTYVPARNTIFLSFALGWAEVLNVHDVFIGVNAVDYSGYPDCRPAFIKAFQDMANLATKAGVEGHEIQIHTPLIAMSKAEIIARGIGLGVDYSSTVSCYAADREGRACGSCDACRLRKAGFAALAVSDPTCYQ

SEQ ID NO: 39744 - protein, 232 aa, Methylomonas sp.
  misc_feature (1)..(232): tr|A0A172U4T6|A0A172U4T6_9GAMM 7-cyano-7-deazaguanine s ynthase OS=Methylomonas sp. DH-1 OX=1727196 GN=queC PE= 3 SV=1
MREENNAGAKPAVILLSGGLDSITVLALAQQQGFICHALSFDYGQRHNAELEAARNIASHYQVAAHKVINLGLSSIGGSALTDANIDVPTSPQAGIPVTYVPARNTIFLAFALGWAEVLQAHDVFIGVNAVDYSGYPDCRPEFIKAFQDMANLGTKAGVEGHKIQIHTPLISFSKAQIIQQGMALGVDYAATVSCYSADAEGRACGVCDACRLRAAGFAAAGIADPTRYCPR

SEQ ID NO: 39745 - protein, 230 aa, Methylomonas sp.
  misc_feature (1)..(230): tr|A0A2N0V2C6|A0A2N0V2C6_9GAMM 7-cyano-7-deazaguanine s ynthase OS=Methylomonas sp. Kb3 OX=1611544 GN=queC PE=3 SV=1
MENSSSSRPAIILLSGGLDSITVLALAKQQGFTCYALSFDYGQRHNAELEASRRIAKHYQVADHKIINLGLSAIGGSALTDARIDVPTSPQAGIPVTYVPARNTIFLAFALGWAEVVNAHDVFIGVNAVDYSGYPDCRPEFIKAFQDMANLGTKAGVEGHKIQIHTPLIALSKAEIIRQGLALGVDYADTVSCYSADIKGRACGVCDACRLRAAGFQNLGVTDPTHYRPK

SEQ ID NO: 39746 - protein, 228 aa, Methylomusa anaerophila
  misc_feature (1)..(228): tr|A0A348AQF4|A0A348AQF4_9FIRM 7-cyano-7-deazaguanine s ynthase OS=Methylomusa anaerophila OX=1930071 GN=queC P E=3 SV=1
MKEKAVILLSGGLDSTVCMAVAKNLGFELLPLSFNYHQRHKRELEAAAKVAAYFDVSKHLVIETNMESIGGSALTDDDMSVPAGNIERDDIPITYVPARNLIFLSYALGYAEVSGSNRIFIGVNALDYSGYPDCRPEFIRMFQQLADYSTKATTQDGRRIVIETPLINFTKKDIVLLGHQLKAPLQLTTSCYQGGEAACGQCDSCLLRLKGFAEAGLTDPILYDDRSE

SEQ ID NO: 39747 - protein, 223 aa, Methylophaga aminisulfidivorans
  misc_feature (1)..(223): tr|F5SXU2|F5SXU2_9GAMM 7-cyano-7-deazaguanine synthase OS=Methylophaga aminisulfidivorans MP OX=1026882 GN=que C PE=3 SV=1
MKKAVILLSGGLDSATVLAIAQQQGYKCFTMSFDYGQRHRAELHASAKLAEAMGVTEHKVINIDLTAIGGSALTDSSIAVPQQHEEGIPITYVPARNTVFLSIALGWAEVLEADAIFVGVNAVDYSGYPDCRPEYIAAFEKMANLATKTGVEGHKLTIETPLIDLSKQAIIEKGISLGVDYSLTVSCYQADNEGRACGECDSCRFRKEGFRQAGITDPTPYQD

SEQ ID NO: 39748 - protein, 223 aa, Methylophaga frappieri
  misc_feature (1)..(223): tr|I1YIX2|I1YIX2_METFJ 7-cyano-7-deazaguanine synthase OS=Methylophaga frappieri (strain ATCC BAA-2434 / DSM 2 5690 / JAM7) OX=754477 GN=queC PE=3 SV=1
MTEQRAVILLSGGLDSATVLAMARAQGYRCYALSFDYGQRHRTELQAAQKIADRIGVDQYKTVRIDLRNIGGSALTSDIAVPEQESTGIPITYVPARNTVFMSIALGWAEVLEADAIFVGVNAVDYSGYPDCRPDYIHAFEAMANLATKRGVEGHKLKIHTPLMQLTKAQIIKEGTALGVDYALTISCYQANDFGQACGRCDSCRLRRQGFIEAGLSDPTLYQ

SEQ ID NO: 39749 - protein, 225 aa, Methylophaga lonarensis
  misc_feature (1)..(225): tr|M7NZD5|M7NZD5_9GAMM 7-cyano-7-deazaguanine synthase OS=Methylophaga lonarensis MPL OX=1286106 GN=queC PE=3 SV=1
MTDKRAVVMLSGGLDSATALAIAKSQGYDCHTISFDYGQRHRAELEAAAKLSKALSASSHKVITIDLQTIGGSALTDTDIDVPEQHQEGIPVTYVPARNTVFLSIALGWAEVLQADAIFLGVNAVDYSGYPDCRPEYIKAFETMANLATKRGVEGDRLYIYAPLMHMTKAEIIQAGIQLGIDYSQTISCYQADASGRACGQCDSCRFRKEGFEQAGVSDPTHYQI

SEQ ID NO: 39750 - protein, 222 aa, Methylophaga muralis
  misc_feature (1)..(222): tr|A0A1E3GVF0|A0A1E3GVF0_9GAMM 7-cyano-7-deazaguanine s ynthase OS=Methylophaga muralis OX=291169 GN=queC PE=3 SV=1
MTKRAVVLLSGGLDSVTALAIAKSEGYACHTISFDYGQRHRTELDAAENLARKAGVVTHKVIQIDLRAIGGSALTDDIAVPETEQQGIPVTYVPARNTIFLSIALGWAEVLNAEAIFVGVNAVDYSGYPDCRPEFIDAFERLANLATKSAVEGSAIYIRAPLMMFTKSQIIKCGTELGIDYSETVSCYQADAQGRACGQCDSCRLRRQGFHDAGVADPTHYQ

SEQ ID NO: 39751 - protein, 222 aa, Methylophaga nitratireducenticrescens
  misc_feature (1)..(222): tr|I1XEP4|I1XEP4_METNJ 7-cyano-7-deazaguanine synthase OS=Methylophaga nitratireducenticrescens OX=754476 GN=q ueC PE=3 SV=1
MTKRAVILLSGGLDSVTALAIAKAEGYECFSISFDYGQRHKTELLAAENLAKKAGVASHKVIQIDLRAIGGSALTDDIDVPETEQQGIPITYVPARNTVFLSIALGWAEVLNAEAIFVGVNAVDYSGYPDCRPEFIDAFEKLANLATKSAVEGSAIYIKAPLMYLSKSEIVKRGTELGIDYSETVSCYQADAQGRACGQCDSCRFRRQGFIDAGLADPTRYQ

SEQ ID NO: 39752 - protein, 223 aa, Methylophaga sp.
  misc_feature (1)..(223): tr|A0A2E2D4Y9|A0A2E2D4Y9_9GAMM 7-cyano-7-deazaguanine s ynthase OS=Methylophaga sp. OX=2024840 GN=queC PE=3 SV= 1
MKKAVVLLSGGLDSATVLAIAKQQGYQCYTMSFDYGQRHRAELNASAILAEAMSAVEHKVINIDLTAIGGSALTDTTIAVPKQHQDGIPITYVPARNTVFLSIALGWAEVLEADAIYVGVNAVDYSGYPDCRPEYIAAFETMANLATKTGIEGNKLTIETPLIDLSKQAIIEKGISLGVDYSLTVSCYQADSEGRACGECDSCRFRHEGFMQAGIADPTRYQA

SEQ ID NO: 39753 - protein, 222 aa, Methylophaga sp.
  misc_feature (1)..(222): tr|A0A2G2ED14|A0A2G2ED14_9GAMM 7-cyano-7-deazaguanine s ynthase OS=Methylophaga sp. OX=2024840 GN=queC PE=3 SV= 1
MTKRAVILLSGGLDSVTALAIAKAEGYECFSISFDYGQRHKTELLAAENLAKKAGVASHKVIQIDLRAIGGSALTDDIDVPETEQQGIPVTYVPARNTVFLSIALGWAEVLNAEAIFVGVNAVDYSGYPDCRPEFIDAFEKLANLATKSAVEGCAIYIKAPLMHLSKSEIVKRGTELGIDYSETVSCYQADAQGRACGQCDSCRFRRQGFIDAGIADPTRYQ

SEQ ID NO: 39754 - protein, 223 aa, Methylophaga sulfidovorans
  misc_feature (1)..(223): tr|A0A1I3Y8Q5|A0A1I3Y8Q5_9GAMM 7-cyano-7-deazaguanine s ynthase OS=Methylophaga sulfidovorans OX=45496 GN=queC PE=3 SV=1
MKKAVILLSGGLDSATVLAIAKQQGYECFTMSFDYGQRHRAELHASAKLAEAMGVAEHKVINIDLTGIGGSALTDSSIAVPHQHEEGIPITYVPARNTVFLSIALGWAEVLKADAIFVGVNAVDYSGYPDCRPEYIAAFEKMANLATKTGVEGHTLTIETPLIDLSKQAIIEKGMSLGVDYSLTVSCYQADNEGRACGECDSCRFRKEGFRQAGITDPTPYQV

SEQ ID NO: 39755 - protein, 223 aa, Methylophaga thiooxydans
  misc_feature (1)..(223): tr|C0N2U2|C0N2U2_9GAMM 7-cyano-7-deazaguanine synthase OS=Methylophaga thiooxydans DMS010 OX=637616 GN=queC PE =3 SV=1
MKRAVILLSGGLDSATVLAIAKSQGYDCYTISFDYGQRHRAELEASARLSKSLGATEHKVINIDLTAIGGSALTDSSIDVPSQHEEGIPITYVPARNTVFMSIALGWAEVLNAQAIFVGVNAVDYSGYPDCRPDYIAAFEKMANLATKTGVEGLKLTIETPLIDLTKQAIIEKGIALGVDYGQTVSCYQADNQGRACGQCDSCRFRKQGFEKAGIEDPTPYQP

SEQ ID NO: 39756 - protein, 223 aa, Methylophaga thiooxydans
  misc_feature (1)..(223): tr|A0A0A0BIS3|A0A0A0BIS3_9GAMM 7-cyano-7-deazaguanine s ynthase OS=Methylophaga thiooxydans OX=392484 GN=queC P E=3 SV=1
MKRAVILLSGGLDSATVLAIAKSQGYDCYTISFDYGQRHRAELEASARLSKSLGATEHKVINIDLTAIGGSALTDSSIDVPSQHEEGIPITYVPARNTVFMSIALGWAEVLNAQAIFVGVNAVDYSGYPDCRPDYIAAFEKMANLATKTGVEGLKLTIETPLIDLTKQAIIEKGVALGVDYGQTVSCYQADNQGRACGQCDSCRFRKQGFEKAGIEDPTPYQP

SEQ ID NO: 39757 - protein, 229 aa, Methylophilaceae bacterium
  misc_feature (1)..(229): tr|Y0KK56|Y0KK56_9PROT 7-cyano-7-deazaguanine synthase OS=Methylophilaceae bacterium 11 OX=1101195 GN=queC PE= 3 SV=1
MMQNSTKKAVVLLSGGLDSATCLAIAKSQGFECYCLSLDYHQRHIAELNAANRVAQALGACSHKTAQLDLSLFGGSALTDNSIDVPQTPTEGIPVTYVPARNTIMLSLALAWAEVLQSQDIFIGVNALDYSGYPDCRGEYVHAFQAMANLATKSAVEGHRITIHAPLIDLTKSQIIALGTSLGVDYGITVSCYQADALGRACGQCDSCRLRSAGFEGAGLADPTIYLNP

SEQ ID NO: 39758 - protein, 222 aa, Methylophilaceae bacterium
  misc_feature (1)..(222): tr|A0A4P5TTE7|A0A4P5TTE7_9PROT 7-cyano-7-deazaguanine s ynthase OS=Methylophilaceae bacterium OX=2030816 GN=que C PE=3 SV=1
MSKAVVLLSGGLDSATTLAIAKNEGYECYALSVNYHQRHIAELEAAKKIAVLFQVQDHKTVEMDLSWMLTSALTNPDLKVPTELTSHIPITYVPARNTLMLTLALGWAEVIGAHDIFIGVNAVDYSGYPDCRPEYIEQFQKMANLATKSAIEGQNIQLHTPLIHLSKEAIILQGMKLGVDYGLTVSCYQADKNGRACGVCDSCRLRQNGFKAAGVNDPTSYQ

SEQ ID NO: 39759 - protein, 227 aa, Methylophilales bacterium
  misc_feature (1)..(227): tr|A0A0H4IY75|A0A0H4IY75_9PROT 7-cyano-7-deazaguanine s ynthase OS=Methylophilales bacterium MBRS-H7 OX=1623450 GN=queC PE=3 SV=1
MSKKAIVLLSGGLDSLTTLAIAQNDGFDCYGLHIIYGQRHSSETMAARNIAKIYNLAEYREINVDMSWLKSSALTNHDITIPEERSEGIPVTYVPARNTIMMSFAAAWAESLAISHLFLGVNAVDYSGYPDCRPEFIDAFKKMVNLGTKAAIEGTPFNIHTPLIGLTKDEIIAKGSNLGVDYSMSISCYQADQNGNACGKCDSCYLRRQGFEKAGIKDPTPYQNVIN

SEQ ID NO: 39760 - protein, 228 aa, Methylophilales bacterium
  misc_feature (1)..(228): tr|A0P5E3|A0P5E3_9PROT 7-cyano-7-deazaguanine synthase OS=Methylophilales bacterium HTCC2181 OX=383631 GN=queC PE=3 SV=1
MKKKVSKSAVILLSGGLDSATVLAIAKAEGYQCYAMNINYQQRHSAELKYAKRLAHHYDVEEYKVVDIDLSWLTGSSLTNKSMIIPQSASEGIPSTYVPARNTIMMTLALAWAETIKSQAIFIGVNAIDYSGYPDCREEYIKSFEVMANLATKTGVEGSRITIHAPLIHLDKAEIISLGIQKGLDYSKTVSCYQATEEGHACGKCDSCRLRREGFEKLGVADPTLYVR

SEQ ID NO: 39761 - protein, 233 aa, Methylophilus medardicus
  misc_feature (1)..(233): tr|A0A5B8CUN6|A0A5B8CUN6_9PROT 7-cyano-7-deazaguanine s ynthase OS=Methylophilus medardicus OX=2588534 GN=queC PE=3 SV=1
MVASNKPKAVILLSGGLDSTTVLAIAKSQGYDSYCLSLDYHQRHNVELLAAKRVAAALGAVEHKTVQLDLSLFGGSALTDNAIAVPEHETQGIPVTYVPARNTIMLSLALAWAEVLQARDIFIGVNALDYSGYPDCRTEYVKAFQQMANLATKAAVEGQTITVHAPLIDMTKADIIRAGDALGVDYGLTVSCYQANQQGVACGVCDSCRFRKAGFTQAGVVDPTPYLTTISAK

SEQ ID NO: 39762 - protein, 233 aa, Methylophilus rhizosphaerae
  misc_feature (1)..(233): tr|A0A1G9CL00|A0A1G9CL00_9PROT 7-cyano-7-deazaguanine s ynthase OS=Methylophilus rhizosphaerae OX=492660 GN=que C PE=3 SV=1
MAVPHQPKAVILLSGGLDSSTVLAIAQSKGYECYCLSLDYHQRHNVELLAAQRVAKALGAAGHKTVQLDLSLFGGSALTDSNIAVPEQETQGIPVTYVPARNTIMLSLSLAWAEVLQARDIFIGVNALDYSGYPDCRGEYVDAFQRMANLATKAAVEGQTITVHAPLIDMTKADIIRTGHALGLDYGLTVSCYQADDNGVACGVCDSCRFRKAGFEQAGVTDPTPYKNTHSGP

SEQ ID NO: 39763 - protein, 233 aa, Methylophilus sp.
  misc_feature (1)..(233): tr|A0A2S5NB46|A0A2S5NB46_9PROT 7-cyano-7-deazaguanine s ynthase OS=Methylophilus sp. OX=29541 GN=queC PE=3 SV=1
MAASQQPKAVILLSGGLDSSTVLAIAKSQGYDCYCLSLDYHQRHNVELLAAQRVAKALGATEHKTVQLDLSLFGGSALTDNNIAVPEQETQGIPVTYVPARNTIMLSLSLAWAEVLQARDIFIGVNALDYSGYPDCRGEYVKAFQQMANLATKAAVEGQTITVHAPLIDMTKADIIRTGHALGVDYGLTVSCYQADDQGAACGVCDSCRFRKAGFAQAGVADPTPYRNTHSGK

SEQ ID NO: 39764 - protein, 234 aa, Methylophilus sp.
  misc_feature (1)..(234): tr|A0A0Q6BB06|A0A0Q6BB06_9PROT 7-cyano-7-deazaguanine s ynthase OS=Methylophilus sp. Leaf416 OX=1736373 GN=queC PE=3 SV=1
MNQHNNSTGQKPKAVILLSGGLDSTTVLAIAQSQGYECYCLSLDYHQRHNVELLAAQRVAKALGAAEHKTVQLDLSLFGGSALTDNAIAVPEHETQGIPVTYVPARNTIMLSLSLAWAEVLEAHDIFIGVNALDYSGYPDCRGEYVKAFQQMANLATKAAVEGQPITVHAPLIDMTKADIIRTGHALGVDYGLTVSCYQADDAGAACGVCDSCRFRKTGFVQAGVKDPTLYRNT

SEQ ID NO: 39765 - protein, 242 aa, Methylopila sp.
  misc_feature (1)..(242): tr|A0A2H6BFW9|A0A2H6BFW9_9RHIZ 7-cyano-7-deazaguanine s ynthase OS=Methylopila sp. Yamaguchi OX=1437817 GN=queC PE=3 SV=1
MTAAAGSDGALVLFSGGQDSTTCLAWALDHFARVETLGFDYGQRHRVELDQRAALREGLARLKPEWAARLGEDHTLALPVLGELSDTALTRDVAIEAEAGGLPNTFVPGRNLVFLTFAAALAWRRGLRRIVGGMCETDFSGYPDCRDDTIKALQVALNLGMERRFVLDTPLMWLDKADTWALADGLGGAGLVELIVEDSHTCYLGERGARHAWGYGCGGCPACDLRAKGFARWRERAAAAGA

SEQ ID NO: 39766 - protein, 229 aa, Methyloprofundus sedimenti
  misc_feature (1)..(229): tr|A0A1V8M0P6|A0A1V8M0P6_9GAMM 7-cyano-7-deazaguanine s ynthase OS=Methyloprofundus sedimenti OX=1420851 GN=que C PE=3 SV=1
MTKKAIILLSGGLDSVTVLAMAKRQGYTVYALSFDYGQKHNAELISARKIAPDYQVAVHKVIKLGLGEIGGSALTDDALNVPVTPQTGIPVTYVPARNTVFLSFALGWAEVLDAHDIFIGVNAVDYSGYPDCRPQFIEAFQALANVATKAGVEGHKIKIHAPLIHMSKGEIIQSGIELQVNYAQTVSCYAASPEGFACGECDACRLRKTGFAEAGVPDPTRYQAGCAGE

SEQ ID NO: 39767 - protein, 243 aa, Methylorubrum extorquens
  misc_feature (1)..(243): tr|H1KQE0|H1KQE0_METEX 7-cyano-7-deazaguanine synthase OS=Methylorubrum extorquens DSM 13060 OX=882800 GN=queC PE=3 SV=1
MPEDAAVAGGEAGALVLFSGGQDSATCLAWALDRFPHVETLGFDYGQRHRVELDRRAALRQGLTALDPAWGRRLGPDHTLALAALGEISDTALTRDSAIAFARDGLPNTFVPGRNLAFLTFAAALAYRRGLRHIVGGMCETDYSGYPDCRDDTIKALQVALNLGMERRFVLHTPLMWIDKAQTWALAETLGGRALVYLVVEESHTCYLGERGARHEWGYGCGTCPACDLRAKGFSRYLAARAE

SEQ ID NO: 39768 - protein, 243 aa, Methylorubrum extorquens
  misc_feature (1)..(243): sp|A9W222|QUEC_METEP 7-cyano-7-deazaguanine synthase OS =Methylorubrum extorquens (strain PA1) OX=419610 GN=que C PE=3 SV=1
MPEDAAVAGGETGALVLFSGGQDSATCLAWALDRFPHVETLGFDYGQRHRVELDRRAALRQGLTALDPAWGRRLGPDHTLALAALGEISDTALTRDSAIAFARDGLPNTFVPGRNLAFLTFAAALAYRRGLRHIVGGMCETDYSGYPDCRDDTIKALQVALNLGMERRFVLHTPLMWIDKAQTWALAETLGGRALVDLVVEESHTCYLGERGARHEWGYGCGTCPACDLRAKGFSRYLAARAE

SEQ ID NO: 39769 - protein, 239 aa, Methylorubrum populi
  misc_feature (1)..(239): tr|B1ZBZ2|B1ZBZ2_METPB 7-cyano-7-deazaguanine synthase OS=Methylorubrum populi (strain ATCC BAA-705 / NCIMB 13 946 / BJ001) OX=441620 GN=queC PE=3 SV=1
MAGEAAEAGALVLFSGGQDSATCLAWALDRFPHVETLGFDYGQRHRVELDRREALRRGVTALDPGWRRRLGEDHTLSLAALGAISDTALTRDSAIAFARDGLPNTFVPGRNLAFLTFAAALAYRRGLRHIVGGMCETDFSGYPDCRDDTIKALQVALNLGMERRFVLHTPLMWIDKAQTWALAEALGGRPLVDLIVEESHTCYLGERGERHDWGYGCGTCPACDLRAKGFARYLAARAD

SEQ ID NO: 39770 - protein, 210 aa, Methylorubrum populi
  misc_feature (1)..(210): tr|A0A160PHK2|A0A160PHK2_9RHIZ 7-cyano-7-deazaguanine s ynthase OS=Methylorubrum populi OX=223967 GN=MPPM_2746 PE=3 SV=1
MRALLLSGGLDSAAIAAWQRPDVCLTVDYGQRPAKGEIAAAASVARELGLRHEVARVDLSALGLGPLAGRAASDLARAPEWWPYRNQMLVTLAGMRFVAEGLTEILLGAIRTDVHADGRAPFLRTVDRLMHLQEGGVRVMAPARHLSALELVRRSGIPRSLLGATFSCHVMEYACGRCRGCEKHQETLARIDGGRARAGTAARASAATGG

SEQ ID NO: 39771 - protein, 238 aa, Methylorubrum salsuginis
  misc_feature (1)..(238): tr|A0A1I3ZTG9|A0A1I3ZTG9_9RHIZ 7-cyano-7-deazaguanine s ynthase OS=Methylorubrum salsuginis OX=414703 GN=queC P E=3 SV=1
MTEDGDSGALVLFSGGQDSATCLAWALDRFPRVETLGFDYGQRHRIELERRSALRKGMTAHDRAWWRRLGRDHTLDLSSLGEISETALTRESEIRLDRDGLPNTFVPGRNLAFLTFAAALAYRRGLRHIVGGMCETDYSGYPDCRDDTIKALQVALNLGMERRFVLHTPLMWLDKAQTWALAEELGGRALVDLIVEESHTCYLGERGERHPWGYGCGTCPACDLRAKGFSRYLAGRAD

SEQ ID NO: 39772 - protein, 243 aa, Methylorubrum sp.
  misc_feature (1)..(243): tr|A0A4Z0E7K1|A0A4Z0E7K1_9RHIZ 7-cyano-7-deazaguanine s ynthase OS=Methylorubrum sp. Q1 OX=2562453 GN=queC PE=3 SV=1
MPEDAAVANGEAGALVLFSGGQDSATCLAWALDRFAHVETLGFDYGQRHRVELDRRAALRQGLTALDPAWGRRLGPDHTLALAALGEISDTALTRDSAIAFARDGLPNTFVPGRNLAFLTFAAALAYRRGLRHIVGGMCETDYSGYPDCRDDTIKALQVALNLGMERRFVLHTPLMWIDKAQTWALAESLGGRALVDLVVEESHTCYLGERGARHAWGYGCGTCPACDLRAKGFSRYLAARAE

SEQ ID NO: 39773 - protein, 243 aa, Methylorubrum zatmanii
  misc_feature (1)..(243): tr|A0A1W6RJL2|A0A1W6RJL2_9RHIZ 7-cyano-7-deazaguanine s ynthase OS=Methylorubrum zatmanii OX=29429 GN=queC PE=3 SV=1
MPEDAAVAGGEAGALVLFSGGQDSATCLAWALDRFPHVETLGFDYGQRHRVELDRRAALRQGLTALDPAWGRRLGPDHTLALAALGEISDTALTRDSAIAFARDGLPNTFVPGRNLAFLTFAAALAYRRGLRHIVGGMCETDYSGYPDCRDDTIKALQVALNLGMERRFVLHTPLMWIDKAQTWALAETLGGRALVDLVVEESHTCYLGERGARHEWGYGCGTCPACDLRAKGFSRYLAARAE

SEQ ID NO: 39774 - protein, 243 aa, Methylosinus sp.
  misc_feature (1)..(243): tr|A0A177PN79|A0A177PN79_9RHIZ 7-cyano-7-deazaguanine s ynthase OS=Methylosinus sp. R-45379 OX=980563 GN=queC P E=3 SV=1
MISPSASDSALVLFSGGQDSATCLAFALSRFARVETVGFDYGQRHRVELEQRGVLREGMKRISPLWAERLGEDHTISIEALGAISDTALTREAEIAFDASGLPNTFVPGRNILFLTFAAALAYRRGIGSLVGGMCETDFSGYPDCRDATIRAVETALTLGMDRKLAILTPLMSIDKAATWKLAEELGGEPLVRLIVEESHTCYLGERGKRFDWGYGCGECPACRLRAAGWEKYRAAQPSGAPS

SEQ ID NO: 39775 - protein, 238 aa, Methylosinus sp.
  misc_feature (1)..(238): tr|A0A1A6FQB2|A0A1A6FQB2_9RHIZ 7-cyano-7-deazaguanine s ynthase OS=Methylosinus sp. 3S-1 OX=1849840 GN=queC PE= 3 SV=1
MTIADPPADASALVLFSGGQDSATCLAFALSRFARVETIGFDYGQRHRVELDQRAVLRAGMASLSPLWAERLGEDHTVSIEALGALSETALTREAAIAFDSTGLPNTFVPGRNILFLTFAAALAYRRGIGDLVGGMCETDYSGYPDCRDATIRAVETALRLGMDRPLTIHTPLMWIDKAATWRLARELGGEALVSLIVEESHTCYLGERGKRFDWGHGCGECPACRLRAAGWENFRAG

SEQ ID NO: 39776 - protein, 241 aa, Methylosinus sporium
  misc_feature (1)..(241): tr|A0A2U1SWC3|A0A2U1SWC3_METSR 7-cyano-7-deazaguanine s ynthase OS=Methylosinus sporium OX=428 GN=queC PE=3 SV= 1
MTTPSPSTSDSALVLFSGGQDSATCLAFALSRFARVETIGFDYGQRHRVELEQRGKIREGLARISLLWAERLGEDHTITIEALGAISDTALTREAEIAFDASSLPNTFVPGRNILFLTFAAALAYRRGIGQLVGGMCETDYSGYPDCRDATIRATQTALSLGMDRPLEILTPLMWIDKAATWKLAEELGGEPLVRLIVEESHTCYLGERGTRFDWGHGCGECPACRLRAAGWEKYRAAREQ

SEQ ID NO: 39777 - protein, 241 aa, Methylosinus sporium
  misc_feature (1)..(241): tr|A0A549SPQ6|A0A549SPQ6_METSR 7-cyano-7-deazaguanine s ynthase OS=Methylosinus sporium OX=428 GN=queC PE=3 SV= 1
MSVTDASSSDSALVLFSGGQDSATCLAFALSRFARVETIGFDYGQRHRVELEQRGVLREGMKRISPLWAERLGEDHTITIEALGAISDTALTREAEIAFDASGLPNTFVPGRNILFLTFAAALAYRRGIGQLVGGMCETDYSGYPDCRDATIHATQTALSLGMDRPLEILTPLMWIDKAATWKLAEELGGEPLVRLIVEESHTCYLGERGARFDWGHGCGECPACRLRAAGWEKYRADREQ

SEQ ID NO: 39778 - protein, 238 aa, Methylosinus trichosporium; identical to SEQ ID NO: 39775
  misc_feature (1)..(238): tr|A0A2D2CZP4|A0A2D2CZP4_METTR 7-cyano-7-deazaguanine s ynthase OS=Methylosinus trichosporium OB3b OX=595536 GN =queC PE=3 SV=1

SEQ ID NO: 39779 - protein, 226 aa, Methylotenera mobilis
  misc_feature (1)..(226): tr|C6WZ29|C6WZ29_METML 7-cyano-7-deazaguanine synthase OS=Methylotenera mobilis (strain JLW8 / ATCC BAA-1282 / DSM 17540) OX=583345 GN=queC PE=3 SV=1
MTKNAVVLLSGGLDSATVLAYARSQGFECYCLSLDYHQRHIAELQAAKNVAKVMGAAAHKTAQLDLSLFGGSALTDDAIAVPVSATEGIPITYVPARNTIMLSLALAWAEVLQAQDIFIGVNALDYSGYPDCRGEYVKAFQDMANLATKSAVEGKTITIHAPLIDMTKAQIVTLGTELGVDYAMTVSCYQADSEGEACGLCDSCRLRRDGFFAAGLADPTRYKMHA

SEQ ID NO: 39780 - protein, 225 aa, Methylotenera sp.
  misc_feature (1)..(225): tr|A0A1G1B3H1|A0A1G1B3H1_9PROT 7-cyano-7-deazaguanine s ynthase OS=Methylotenera sp. RIFCSPLOWO2_02_FULL_45_14 OX=1801615 GN=queC PE=3 SV=1
MKKRAVVLLSGGLDSATVLAFARSQGFECYCLSLDYHQRHIAELEAAKNVAKVMGATAHKTAQLDLSLFGGSALTDDAIAVPESATEGIPITYVPARNTIMLSLALAWAEVLGSQDIFIGVNALDYSGYPDCRGEYVKAFQTMANLATKSAVEGKTITVHAPLIDMTKAQIVQLGTTLGVDYAMTVSCYQADSHGEACGLCDSCRLRREGFAAAGLADPTRYKAH

SEQ ID NO: 39781 - protein, 226 aa, Methylotenera sp.
  misc_feature (1)..(226): tr|A0A2S5L9M4|A0A2S5L9M4_9PROT 7-cyano-7-deazaguanine s ynthase OS=Methylotenera sp. OX=2051956 GN=queC PE=3 SV =1
MTKNAVVLLSGGLDSATVLAYARSQGFDCYCLSLDYHQRHIAELQAAKNVAKVMGAAAHKTAQLDLSLFGGSALTDDAIAVPESATEGIPITYVPARNTIMLSLALAWAEVLQAQDIFIGVNALDYSGYPDCRGEYVKAFQAMANLATKSAVEGKTITIHAPLIDMTKAQIVTLGTTLGVDYAMTVSCYQADSEGEACGLCDSCRLRRDGFLAAGLVDPTRYKVHL

SEQ ID NO: 39782 - protein, 230 aa, Methylotenera versatilis
  misc_feature (1)..(230): tr|D7DMT7|D7DMT7_METV0 7-cyano-7-deazaguanine synthase OS=Methylotenera versatilis (strain 301) OX=666681 GN=q ueC PE=3 SV=1
MENKTKKNAVVLLSGGLDSATCLAIAKSQGFDCYCLSLDYHQRHIAELHAAKNVANVMGAAAHKTANLDLSLFGGSALTDDAIAVPESETAGIPITYVPARNTIMLSLALAWAEVLKSQDIFIGVNALDYSGYPDCRGEYVKAFQAMANLATKSAVEGHAITIHAPLIDMTKAQIVTLGTELGVDYAMTVSCYQADSHGEACGLCDSCRLRREGFAAAGLADPTRYKKHV

SEQ ID NO: 39783 - protein, 222 aa, Methylothermaceae bacteria
  misc_feature (1)..(222): tr|A0A148N777|A0A148N777_9GAMM 7-cyano-7-deazaguanine s ynthase OS=Methylothermaceae bacteria B42 OX=1798802 GN =queC PE=3 SV=1
MKKAVILLSGGLDSMTTLLMAKNEGFACHCLSFDYGQRQRAELLAAKNIAKRLEAAEHKVIHIGLGEIGGSALTDNAIAVPETATEGIPVTYVPARNTVFLSFALGYAEVLGSLDIFIGVNAVDYSGYPDCRPEYIKAFQNLANLATKAGVEGGRFQIHTPLIHLSKAEIIQAGVQLGADYALTVSCYAADEEGRACGKCDACRLRRQGFDAAGIPDPTRYR

SEQ ID NO: 39784 - protein, 229 aa, Methyloversatilis sp.
  misc_feature (1)..(229): tr|A0A1B3LHR9|A0A1B3LHR9_9PROT 7-cyano-7-deazaguanine s ynthase OS=Methyloversatilis sp. RAC08 OX=1842540 GN=qu eC PE=3 SV=1
MGSTVSSRPAVVLLSGGLDSATVLAMARAQGHDCHCLSVDYGQRHRAELVAAARVAKALGAASHRTLTLDLRAFGGSALTDSAIEVPVDGVAPGIPVTYVPARNTIMLSLALAWAEVLGAQDIHCGVNAVDYSGYPDCRPEYIKAFEAMANLATKAAVEGARLTVHAPLIALTKAGIIRAGADLGVDYGLTVSCYQADDNGRACGVCDACRLRREGFAAAGIADPTPYF

SEQ ID NO: 39785 - protein, 229 aa, Methyloversatilis sp.
  misc_feature (1)..(229): tr|A0A257XK48|A0A257XK48_9PROT 7-cyano-7-deazaguanine s ynthase OS=Methyloversatilis sp. 12-65-5 OX=1970398 GN= queC PE=3 SV=1
MGSTVSSRPAVVLLSGGLDSATVLAMARAQGHDCHCLSVDYGQRHRAELVAAARVAKALGAASHRTLTLDLRAFGGSALTDSTINVPVDGVAPGIPVTYVPARNTIMLSLALAWAEVLGAQDIHCGVNAVDYSGYPDCRPEYIKAFEAMANLATKAAVEGARLTVHAPLIALTKAGIIRAGADLGVDYGLTVSCYQADDNGRACGVCDACRLRREGFATADIADPTPYI

SEQ ID NO: 39786 - protein, 230 aa, Methyloversatilis universalis
  misc_feature (1)..(230): tr|F5RG06|F5RG06_METUF 7-cyano-7-deazaguanine synthase OS=Methyloversatilis universalis (strain ATCC BAA-1314 / JCM 13912 / FAM5) OX=1000565 GN=queC PE=3 SV=1
MSASPASRRPAVVLLSGGLDSATVLAMARAQGFDAYCLSLDYGQRHRAELVAAGRVAQALGAAGHRTISLDLRAFGGSALTDSAIDVPTGGVAEGIPVTYVPARNTIMLSLSLAWAEVLGANDIFCGVNAVDYSGYPDCRPEYIRAFEAMANLATKAAVEGAKLTVHAPLIDLSKAGIIRAGTQLGVDYALTVSCYQADDDGRACGVCDSCRLRREGFATAGVPDPTRYR

SEQ ID NO: 39787 - protein, 236 aa, Methylovirgula ligni
  misc_feature (1)..(236): tr|A0A3D9Z2C0|A0A3D9Z2C0_9RHIZ 7-cyano-7-deazaguanine s ynthase OS=Methylovirgula ligni OX=569860 GN=queC PE=3 SV=1
MTKALVLFSGGQDSTTCLAFALARFDHVETIGFDYGQRHRVELDQRAKIRERIVLRDPLWARRLGEDHLIDLTVLGQISATAMTRDVAIVTEANGLPNTFVPGRNLIFLAFAAAVAYRRGLKHIVGGMCETDFSGYPDCRDATIKAMQTALNLGMEKDFVLDTPLMWLDKATTWKLAEELGGQALVDLIVEDTHTCYLGERGTRHAWGYGCGACPACQLRAQGWAKYRAEAAASAG

SEQ ID NO: 39788 - protein, 242 aa, Methylovirgula sp.
  misc_feature (1)..(242): tr|A0A371WS78|A0A371WS78_9RHIZ 7-cyano-7-deazaguanine s ynthase OS=Methylovirgula sp. 4M-Z18 OX=2293567 GN=queC PE=3 SV=1
MRSGDVTMGDTALVLFSGGQDSATCLAWALARFSHVETVGFDYGQRHRVELDQRAVLRERMLRDMPQWAGRLGPDHTLSLAALGEISDTALTSTAEIAFNAQGLPNTFVPGRNLIFLTFAAALAYRRGIKHIVGGMCETDFSGYPDCRDDTVKAMQVALNLGMDQRFVLHTPLMWIDKAATWRLAEELGGESLVRLIVEDTHTCYLGTRGALHEWGHGCGECPACKLRAEGWRKYRQMKTAA

SEQ ID NO: 39789 - protein, 225 aa, Methylovorus glucosetrophus
  misc_feature (1)..(225): tr|C6XA91|C6XA91_METGS 7-cyano-7-deazaguanine synthase OS=Methylovorus glucosetrophus (strain SIP3-4) OX=58274 4 GN=queC PE=3 SV=1
MSKKAVVLLSGGLDSATVLAIARSQGYECYCLSLDYHQRHSAELLAAQRVAECLGAAEHKTVQLDLSLFGGSALTDNRIDVPQSPTEGIPVTYVPARNTIMLSLALAWAEVLKSRDIFIGVNALDYSGYPDCRAEYVRAFQSMANLATKAAVEGDTITVHAPLIDLSKADIVKRGSALGFDYGMTVSCYQADEEGRACGKCDSCRFRREGFLAAGLADPTRYQPG

SEQ ID NO: 39790 - protein, 230 aa, Methylovorus sp.
  misc_feature (1)..(230): tr|A0A1A9T2N2|A0A1A9T2N2_9PROT 7-cyano-7-deazaguanine s ynthase OS=Methylovorus sp. MM2 OX=1848038 GN=queC PE=3 SV=1
MKKAVVLLSGGLDSATVLAIARSQGYECYCLSLDYHQRHSAELHAAERVAKTLGAQAHKTVTLDLSLFGGSALTDMKIDVPEAPSQGIPITYVPARNTIMLSLSLAWAEVLGAQDIFIGVNALDYSGYPDCRGEYVKAFQQMANLATKSAVEGHEITIHAPLIDMTKADIIRHGHALGFDYGMTVSCYQANAQAEACGLCDSCRFRREGFAAAGVIDPTIYQSRYHPIDQ

SEQ ID NO: 39791 - protein, 223 aa, Methylovulum psychrotolerans
  misc_feature (1)..(223): tr|A0A2S5CR23|A0A2S5CR23_9GAMM 7-cyano-7-deazaguanine s ynthase OS=Methylovulum psychrotolerans OX=1704499 GN=q ueC PE=3 SV=1
MQKHAIVLLSGGLDSITTLALAQQQGFACYALSFDYGQRHNAELLAASQIAKDYQVLDHKIISLGLGAIGGSALTDDHIAVPDSLQPGIPVTYVPARNTIFLSFALGWAEVLKLQDIFIGVNAVDYSGYPDCRPEFINAFQNLANLATKAGVEGERFTIHTPLISLSKGEIIRQGTRLGVDYSRTVSCYSADPQGHACGICDACRLRKTGFQEAGLNDPTRYQ

SEQ ID NO: 39792 - protein, 223 aa, Methylovulum psychrotolerans
  misc_feature (1)..(223): tr|A0A1Z4BVB4|A0A1Z4BVB4_9GAMM 7-cyano-7-deazaguanine s ynthase OS=Methylovulum psychrotolerans OX=1704499 GN=q ueC PE=3 SV=1
MQKHAIVLLSGGLDSITTLALAQQQGFACYALSFDYGQRHNAELLAASQIAKDYQVLDHKIISLGLGAIGGSALTDDHIAVPDSLQPGIPVTYVPARNTIFLSFALGWAEVLKLQDIFIGVNAVDYSGYPDCRPEFIHAFQNLANLATKAGVEGERFTIHTPLISLSKGEIIRQGTRLGVDYSRTVSCYSAAPQGHACGICDACRLRKTGFQEAGLNDPTRYQ

SEQ ID NO: 39793 - protein, 223 aa, Methylovulum sp.
  misc_feature (1)..(223): tr|A0A522DJE9|A0A522DJE9_9GAMM 7-cyano-7-deazaguanine s ynthase OS=Methylovulum sp. OX=1916980 GN=queC PE=3 SV= 1
MQKKAIVLLSGGLDSITVLALAKQQGFTCYALSFDYGQRHNAELIAATQIAKDYQVEDHKIIKLGLGSIGGSALTDDHIAVPDQLQEGIPVTYVPARNTIFLSFALGWAEVLKLQDIFIGVNAIDYSGYPDCRPEFIKTFQQLANLATKAGVEGKHFTIHTPLISLSKAEIIKKGIALGVNYKHTVSCYSADEQGRACRVCDACRLRKAGFIEAGIIDPTQYQ

SEQ ID NO: 39794 - protein, 229 aa, Micavibrio sp.
  misc_feature (1)..(229): tr|A0A1Z8KQX9|A0A1Z8KQX9_9PROT 7-cyano-7-deazaguanine s ynthase OS=Micavibrio sp. TMED2 OX=1986633 GN=queC PE=3 SV=1
MKTLVVCSGGLDSITLAHMVARDHDLIGLISFDYGQRHKKELGFAKEHADDLGVEHILIDISAIGRQLSGSALTDDVTVPDGHYAEESMRITVVPNRNAIMLSIAFGVASARGAEAVATAVHGGDHFIYPDCRPDFIEAFQTMQDHALEGMGRIRLYTPFVHRTKGDIAAEGLKLGVDFTRTWSCYKGGDIHCGRCGTCVERREAFHLAGGIDPTVYADPEFWKEACNV

SEQ ID NO: 39795 - protein, 231 aa, Micavibrio sp.
  misc_feature (1)..(231): tr|A0A1Z8PXG6|A0A1Z8PXG6_9PROT 7-cyano-7-deazaguanine s ynthase OS=Micavibrio sp. TMED27 OX=1986607 GN=queC PE= 3 SV=1
MKILVVCSGGMDSITLAYKAAKEYELAGLISFDYGQRHKKELEFAALAAKRLNTIHKCIDLSSLGSVLSGSALTDDIDVPDGHYAEETMKITVVPNRNAIMLSIAYGAAAAMGADTVATAVHGGDHFIYPDCRPDFINSFSTMQNHALEGVAEISLYTPYLDKTKAQIAEEGGALGVPYEETWSCYKGGAQHCGRCGTCVERREAFALAGLDDPTIYQDPDFWIKAVQDAQ

SEQ ID NO: 39796 - protein, 429 aa, Microbacterium hominis
  misc_feature (1)..(429): tr|A0A2K9D5I2|A0A2K9D5I2_9MICO Uncharacterized protein OS=Microbacterium hominis OX=162426 GN=CXR34_00740 PE=4 SV=1
MTSIALCLSREDAAKSGADEVFLWDGTPGDSFNTGLRPDLRQLGTVPSINADFVRVALTVYVADHSVRRERGGSNWNQRDLVLTVPVIHAEKWQAVAAELERTLAFLTGDRWTLQFARLAASETSGVLVPDTAARTVLVSGGADSASGALVSAASLRSGEGQRLVSHSSSGAGASAPQQRVAAALEALFSGTTIHHYQVHLQRRTHRLNGTRFRREPSSRSRSLLFLALGLAVASQSGRGLWIAENGFASINPPLGPERVGALSTRTTQPWFLWRVGSLLTDLGGYGEIENPFQALTKGDEYRRVVELVGADRAAAFLSATNSCSHSDQQYLGQVASGSHCGKCFGCVLRRAAFAAADLSDATPYLADRGGRFAKYAEQRSIENAVRDFVDAGVDESFLMTTPLPPALTVADARTLYARGLAELENYLG

SEQ ID NO: 39797 - protein, 431 aa, Microbacterium ketosireducens
  misc_feature (1)..(431): tr|A0A0M2H1Z7|A0A0M2H1Z7_9MICO 7-cyano-7-deazaguanine s ynthase OS=Microbacterium ketosireducens OX=92835 GN=qu eC PE=4 SV=1
MVFSYELTVTPVPSTPTSDADRTFYWHDAHSHRYFRANYGPLLGGLGAVNDRNIDLVRIAIAVLAADRSSLRSGRLSNWNQRDISVAVEVLAASPWRTVQPELEKLLGFLTGDIWRFTFREDAGGPEQIATVGLGATRVVLLSGGADSATGALLSAVDLASRGEQQVLVSHWASSNLTPVQSRVAAAIEEIAPGTTADHVKVLLARGRHSPTGKAYGKENSTRSRSFLFIALGLAVASVHKVPLWLPENGYASINPPLSRSRRGSLSTKTTHPKFLGDLISLLASVGAHHDLVNPHAAETKGEMFQRVRELLGNERASKFLSDTWSCSHTGQKSYGIPASVACGVCFGCVLRRASFHASGLDDSTPYLVPADDQQTAWVKEKSVVPAMSDFLRDSFGESDLAKLQLPSSIALADALELCRRGREELQGLDL

SEQ ID NO: 39798 - protein, 738 aa, Microbacterium lacticum
  misc_feature (1)..(738): tr|A0A4Y3UP80|A0A4Y3UP80_9MICO Queuosine biosynthesis p rotein QueC OS=Microbacterium lacticum OX=33885 GN=FHX6 8_3044 PE=4 SV=1
MSNLAIPGSAAQPLDLSSLPDVAALTAQQAHLIERDAETWLLEHPAVEDAAVVVTGFTRDERVTKCARCGIASVFPGLDFDDQLVCSLCRDYEENRDQILRYFGRPDAFGELIRKRAAEADGEFDCLLLYSGGKDSTYVLFQLLELGLKVMTYTFDNGFISKTALRNVEEITQELGVPHVTLTRADQPKIFLESLHEHKSVCNGCFRSLLEIGHQVAAEHGIPSIVTGLSRGQIIDERLSWFYRNGIYDPERIDADLDSGRQVYHLLHRGGENYIGDRVKVVDFFRYSEVTKEDIRRFLAEHPSWSQPADTGFCSSNCLINDVGVFVHKLERGYHNYEAPTRWEVRLGHLTKSVADEELVDPTVNRRVTTLLDRIGYEQPVTREILAARMIAYVVTNGTSIDEVRAWAEQNALGSVPRILPSRWVPLSAVPRIGGALEFRSLPRMSDSRFDAVPMEPEATPTPVGFLEPTRALALAGADRPRARAVALDIPWGIAAGRIAVAVAAAASEVPAARLQWTASEPPEFERVPAGRAWVKRLDLARSSSEEWPQQVRTLTARLLARHDPHAGCLQAFMLDGPKGTRVLVLTADESGLGPDGLAPVVGAIGRILGIWETPQSTGAAQAREEAVRWLRARDGGARIRVSGGGAPEGDASEHGVVDVAAEDWTTELVVYDGAGVPGAAAPYRELDARFRRFADPVRPDGAPADSIVVEPAADGWRLVPESGEAVEMPVTAAVGGR

SEQ ID NO: 39799 - protein, 426 aa, Microbacterium oxydans
  misc_feature (1)..(426): tr|A0A3S9X148|A0A3S9X148_9MICO 7-cyano-7-deazaguanine s ynthase OS=Microbacterium oxydans OX=82380 GN=queC PE=4 SV=1
MRHFKLLLDTAEASDGEESFYWTRDADSTFLGSLGSSLGSVGAVPSLNIDLVRIAVGVYAADRSVPRKYGGSDWNQREISLTLPLLNVDHWTSRERELASMLDFLSGDSWTLKFVESTPPDEDVALTTVDAARVVLFSGGADSAIGALKSKTELSEKGHHVLVSHYSANHIAPIQKALEAHLAAVSPRRSQSHEVFHLARRAVRLDGSEFESEPSSRSRSFLFLALGLATAAVHGVDLWIPENGFASINPPLGPGRRGSLSTRTTHPAFLKAFNSLLSGSGINSRIRNPFASWTKGEMVAWAIQVLGKERASVYLSTSNSCSSTGQRSFGVPLRVHCGVCFGCVLRRSSFAAADLADKTEYADSRSNAGLANWLERISVVPAVREFVSTGVRPRDLMALSLPHDYKLADALDLTSRGIAELKEYVR

SEQ ID NO: 39800 - protein, 429 aa, Microbacterium oxydans; identical to SEQ ID NO: 39796
  misc_feature (1)..(429): tr|A0A3Q9J8E0|A0A3Q9J8E0_9MICO 7-cyano-7-deazaguanine s ynthase OS=Microbacterium oxydans OX=82380 GN=queC PE=4 SV=1

SEQ ID NO: 39801 - protein, 210 aa, Microbacterium sp.
  misc_feature (1)..(210): tr|A0A1N7GE65|A0A1N7GE65_9MICO 7-cyano-7-deazaguanine s ynthase OS=Microbacterium sp. RURRCA19A OX=1907391 GN=S AMN05880568_2823 PE=3 SV=1
MSSIRREVLLLSGGLDSVALAYEIRPAYTLFINYGQRASVAEERSARAVANALGLEFHSLVVDLSATSGGLMSTESLSIDNAPSVEWWPFRNQMLISLAAAWACRNTGALSGAESVSLLIGCVQGDGDRHIDGSEQFVDQISRLLQLQEGAMTVVAPAIHRSSEQLVVDSTIPDALLAYSHSCHRASLPCMECPGCYKRERVLVSLGRLQ

SEQ ID NO: 39802 - protein, 220 aa, Microbacterium sp.
  misc_feature (1)..(220): tr|A0A542GTY5|A0A542GTY5_9BACI 7-cyano-7-deazaguanine s ynthase OS=Microbacterium sp. SLBN-1 OX=1489561 GN=queC PE=3 SV=1
MKNDKAVVVFSGGQDSTTCLFWAKKNFKEVEAVTFNYGQRHVAELDCAREIAEELDIPHHVLDMSLLNQLAPSALTRDEDIVQKDGELPSTFVPGRNLMFLSFAGVLAKQIGAKHIVTGVCETDFSGYPDCRDVFVKSLNVTLNLSMDDEFVIHTPLMWIDKAETWELADQLGAFEYVQEKTLTCYNGIKGAGCGECPACELRQRGLDQYLERRAGGDTE

SEQ ID NO: 39803 - protein, 234 aa, Microbispora rosea
  misc_feature (1)..(234): tr|A0A1N7HHT8|A0A1N7HHT8_9ACTN 7-cyano-7-deazaguanine s ynthase OS=Microbispora rosea OX=58117 GN=queC PE=3 SV= 1
MTTTKRKAVVLLSGGLDSTTVLAIAREQGYETYALSFRYGQRHTEELEAAKRVAAELGVAEHVIADINLAVFGGSALTDDALDVPHHESVDDLGSEIPITYVPARNTVFLSFALAWAETLSSSDVFIGVNALDYSGYPDCRPEYIEAYERMANLATKAGVEGTQKLKIHTPLIELTKAQTIERGLELGVDYSWTHSCYDPIDGRACGTCDSCLLRGRGFAELGLVDPSLVSAKS

SEQ ID NO: 39804 - protein, 234 aa, Microbispora triticiradicis
  misc_feature (1)..(234): tr|A0A372PCA7|A0A372PCA7_9ACTN 7-cyano-7-deazaguanine s ynthase OS=Microbispora triticiradicis OX=2200763 GN=qu eC PE=3 SV=1
MATSKPKAVVLLSGGLDSTTVLAIARHEDYETYALSFRYGQRHTEELEAAKKIAVELGAAQHVITDINLSIFGGSALTDDKLEVPHHDSVEELGTEIPITYVPARNTIFLSFALAWAETLGSSDVFIGVNALDYSGYPDCRPEYIEAYERMANLATKAGVEGIQKLRIHTPLIELTKAQTIQRGLELGVNYAWTHSCYDPVDGKACQTCDSCLLRSRGFAELGLTDPSFTSLRA

SEQ ID NO: 39805 - protein, 224 aa, Microbulbifer agarilyticus
  misc_feature (1)..(224): tr|A0A1Q2M7B3|A0A1Q2M7B3_9GAMM 7-cyano-7-deazaguanine s ynthase OS=Microbulbifer agarilyticus OX=260552 GN=queC PE=3 SV=1
MSSKKAVVLLSGGLDSATVLAMARAEGYECYALGFDYGQRHSAELMAAQRVAADLGASEHKVVKLDLRVIGGSALTDDSIDVPEEETSGIPVTYVPARNTVFLSIALGWAEVLGAQDIFVGVNAVDYSGYPDCRPEYIEAYEKMANLATRAGVEGNKLTIHAPLMKMSKADIVERGTGLGVDYSLTVSCYQALPSGAACGRCDSCRLRAAGFAEAGLADPTVYA

SEQ ID NO: 39806 - protein, 226 aa, Microbulbifer aggregans
  misc_feature (1)..(226): tr|A0A1C9W3D4|A0A1C9W3D4_9GAMM 7-cyano-7-deazaguanine s ynthase OS=Microbulbifer aggregans OX=1769779 GN=queC P E=3 SV=1
MTAKKAVVLLSGGLDSATVLAMAQEQGYECYALGFDYGQRHRSELAAAQRVATAGGAVEHKVVQLDLRSIGGSALTDENIAVPEDEPGGIPVTYVPARNTVFLSIALGWAEVLGAQDIFVGVNAVDYSGYPDCRPEYIEAFERMANLATRAGVEGQRLHIRAPLMEMSKADIVRRGTELGVDYSLTVSCYQADEGGAACGRCDSCRLRAAGFAEAGLADPTVYRGT

SEQ ID NO: 39807 - protein, 225 aa, Microbulbifer donghaiensis
  misc_feature (1)..(225): tr|A0A1M5CVL6|A0A1M5CVL6_9GAMM 7-cyano-7-deazaguanine s ynthase OS=Microbulbifer donghaiensis OX=494016 GN=queC PE=3 SV=1
MTAKKAVVLLSGGLDSATVLAMARADGYECFALGFDYGQRHSAELMAAQRVAADLDAREHKVVKLDLRAIGGSALTDDSIEVPEEETSGIPVTYVPARNTVFLSIALGWAEVLGAQDIFVGVNAVDYSGYPDCRPEYIAAFEKMANLATRAGVEGHKLSVRTPLMHMSKAEIVRRGTELGVDYSLTVSCYQALPNGAACGRCDSCRLRAAGFIEAGLPDPTVYVG

SEQ ID NO: 39808 - protein, 225 aa, Microbulbifer marinus
  misc_feature (1)..(225): tr|A0A1H4AJK0|A0A1H4AJK0_9GAMM 7-cyano-7-deazaguanine s ynthase OS=Microbulbifer marinus OX=658218 GN=queC PE=3 SV=1
MTAKKAVVLLSGGLDSATVLAMARADGYECYALGFDYGQRHSAELMAAQRVAADLEAREHKVVKLDLRAIGGSALTDDDIEVPEEETSGIPVTYVPARNTVFLSIALGWAEVLGAQDIFVGVNAVDYSGYPDCRPEYISAFEKMANLATRAGVEGHKLSIRTPLMHMSKAEIVRRGTELGVDYSLTVSCYQAQPNGAACGRCDSCRLRAAGFIEAGLADPTVYVG

SEQ ID NO: 39809 - protein, 225 aa, Microbulbifer sp.
  misc_feature (1)..(225): tr|A0A2S1JNJ2|A0A2S1JNJ2_9GAMM 7-cyano-7-deazaguanine s ynthase OS=Microbulbifer sp. A4B17 OX=359370 GN=queC PE =3 SV=1
MTAKKAVILLSGGLDSATVLAMARSEGYECYALGFDYGQRHEAELLAAQKVAKDLGAVEHKVVKLDLRSIGGSALTDDSIEVPEEETTGIPVTYVPARNTVFLSIALGWAEVLGAQDIFVGVNAVDYSGYPDCRPEYIEAYEKMANLATRAGVEGKKLSIRAPLMDMSKADIVTEGARLGVDYSLTVSCYQALPDGAACRRCDSCRLRAAGFAKAGLEDPTVYAS

SEQ ID NO: 39810 - protein, 225 aa, Microbulbifer sp.
  misc_feature (1)..(225): tr|A0A510IPD5|A0A510IPD5_9GAMM 7-cyano-7-deazaguanine s ynthase OS=Microbulbifer sp. GL-2 OX=2591606 GN=queC PE =3 SV=1
MTAKKAVILLSGGLDSATVLAMARADGYECYALGFDYGQRHEAELLAAERVAEAQGAREHKVVKLDLRAIGGSALTDDSIEVPEEETSGIPVTYVPARNTIFLSIALGWAEVLGAQDIFVGVNAVDYSGYPDCRPEYIEAYEKMANLATRAGVEGYKLSIRAPLMQMSKADIVCEGTRLGVDYSLTVSCYQARPDGAACGRCDSCRLRAAGFNDAGLQDPTVYAQ

SEQ ID NO: 39811 - protein, 225 aa, Microbulbifer thermotolerans
  misc_feature (1)..(225): tr|A0A143HJ69|A0A143HJ69_9GAMM 7-cyano-7-deazaguanine s ynthase OS=Microbulbifer thermotolerans OX=252514 GN=qu eC PE=3 SV=1
MTAKKAVVLLSGGLDSATVLAMARAEGYECYALGFDYGQRHSAELVAAQRVAADLGAREHKVVKLDLRAIGGSALTDDNIAVPEEETSGIPVTYVPARNTVFLSIALGWAEVLEARDIFVGVNAVDYSGYPDCRPEYIDSFEKMANLATRAGVEGHKLRIRAPLMHMSKADIVRRGTELGVDYSLTVSCYQARPDGGACGRCDSCRLRAAGFAEAGLADPTVYAG

SEQ ID NO: 39812 - protein, 226 aa, Microbulbifer yueqingensis
  misc_feature (1)..(226): tr|A0A1G8VT11|A0A1G8VT11_9GAMM 7-cyano-7-deazaguanine s ynthase OS=Microbulbifer yueqingensis OX=658219 GN=queC PE=3 SV=1
MTAKKAVVLLSGGLDSATVLAMARAEGYECYALGFDYGQRHRAELLAARRVAADLGATEHKVVELDLRAIGGSALTDDSIAVPEEETGGIPVTYVPARNTVFLSIALGWAEVLGAQDIFVGVNAVDYSGYPDCRPEYIAAFEKMANLATRAGVEGRRLHIRTPLMHMSKAEIVRVGSGLGVDYSLTVSCYQAQADGAACGRCDSCRLRAAGFIEAGLADPTVYAGG

SEQ ID NO: 39813 - protein, 203 aa, Micrococcales bacterium
  misc_feature (1)..(203): tr|A0A1Q4A0E3|A0A1Q4A0E3_9MICO 7-cyano-7-deazaguanine s ynthase OS=Micrococcales bacterium 72-143 OX=1895790 GN =BGO94_08330 PE=3 SV=1
MSAGGTVLLLSGGLDSAALAMMIRPALTVFVDYGQTPREAESRAARAVAAHLALPFTAIQLPLGELGGGLMHNDTPLPNAPSPEWWPFRNQFLATAGAAVALRHGLTAVALASVRGDGDRHVDGSLPFYVQLDAVMKMQEGGVGVIAPAIHLSTVELLREVGADRSLIGWTVSCHRANEPCGDCPGCWKRELVLTEYLPSLDQ

SEQ ID NO: 39814 - protein, 297 aa, Micrococcales bacterium
  misc_feature (1)..(297): tr|A0A2E0WAB0|A0A2E0WAB0_9MICO TIGR00268 family protein OS=Micrococcales bacterium OX=2026762 GN=CMH41_02760 P E=4 SV=1
MTSPPEMSLRQRLTDLTEQLGGYRGILVAFSGGADSAFLLAAAARSEAEVLAATSTSASLASGEWAAASKFARNLGVEHIRIDSRELDREGYRANGPDRCYHCKSELLDILVDVAQQRDLATVATGTNADDVAQEHRPGLLAAQERKIVTPLADAGFSKTEVREASRLWGLSTWDKPQAACLASRIAYGVSVDEERLRRIDRAEVAVRAALGRAGITSTNLRVRDRGDSALIEVDYSVVAEAIAEPTVVTAVLEAGFSTAEIDPRGFRSGSMNSDLLPEQQIRLGSGVSSWNLPFVD

SEQ ID NO: 39815 - protein, 398 aa, Micrococcus aloeverae
  misc_feature (1)..(398): tr|A0A5F0UJY3|A0A5F0UJY3_9MICC Queuosine biosynthesis p rotein queC OS=Micrococcus aloeverae OX=1391911 GN=E4T8 7_10885 PE=4 SV=1
MAGGTDTVRSAVGWWLPSLGPVPTQAIDLVRIAGGAYLVDRLSGRPSAFTRRLHLTVEVADPEPWEGEAIDQLAQLLFWLTGDTWELQLVQDPTTPNDPIAGPSGGADSVALLSGGLDSYLGALHLLATLDEEPLFVGHYDTATAVRRAQNTVHSWLEEAHTPPPSYTQIEFTQVADKKESSSRSRSLLFLALGTAVATSRGASKLFVPENGFTSLNLPLHPNRAGALSTRSTHPETFYRVNLLLQSLNLSLAVTNPFATFTKGEEMRLVADSHPPGGWDRIAGLTVSCSKLDGARIKGGNSTLNCGLCYACVTRRGAFIAAGVNDSTSYLSDGLTGNARLELLDRRYSDRAAISYATTRGIDDDVIDAGTWPPDADLDEISDLARRGLAELGKVTLI

SEQ ID NO: 39816 - protein, 398 aa, Micrococcus luteus; identical to SEQ ID NO: 39815
  misc_feature (1)..(398): tr|A0A5E8QAE0|A0A5E8QAE0_MICLU Queuosine biosynthesis p rotein queC OS=Micrococcus luteus OX=1270 GN=CYJ94_1114 0 PE=4 SV=1

SEQ ID NO: 39817 - protein, 222 aa, Micrococcus lylae; identical to SEQ ID NO: 39415
  misc_feature (1)..(222): tr|A0A378P0N2|A0A378P0N2_9MICC 7-cyano-7-deazaguanine s ynthase OS=Micrococcus lylae OX=1273 GN=queC PE=3 SV=1

SEQ ID NO: 39818 - protein, 220 aa, Micrococcus sp.
  misc_feature (1)..(220): tr|A0A2J9IQB2|A0A2J9IQB2_9MICC 7-cyano-7-deazaguanine s ynthase OS=Micrococcus sp. FDAARGOS_333 OX=1930558 GN=q ueC PE=3 SV=1
MKTVAVLLSGGLDSTAAIAVADREADLRLAISVDYGQRHRREIDSARRVAEMYRIPLTVLDLRDWGRSLKGSALTDPSVPVPADSYDVDSMAVTVVPNRNATMLMAAAGVAHAWGIEEVWTAVHSGDHVIYPDCRPEFIASAAQTAELGTGGHVTIRAPFVHMDKAQIVATGARLGAPFELTWSCYEGSETHCGVCGTCRERADAFDRAGVIDPTFYRKA

SEQ ID NO: 39819 - protein, 224 aa, Microcoleaceae bacterium
  misc_feature (1)..(224): tr|A0A355CIL2|A0A355CIL2_9CYAN 7-cyano-7-deazaguanine s ynthase OS=Microcoleaceae bacterium UBA10368 OX=2055793 GN=queC PE=3 SV=1
MKAVILLSGGLDSSTVLYQAKADGCECYAISFDYKQRHRRELESARAIALSASVKAHQIVNFDLTLWGGSALTDNEIDLPIDRSLTEMSQNIPITYVPARNTIFLSFALAYAETLGAQRIYIGVNALDYSGYPDCRLDYIQAMQEVFRLGTKQGREGEPINIVTPLIELKKTEIIQLGNKLGVPWEQTWSCYAGGENACGVCDSCRLRLAAFEELGLQDPVPYA

SEQ ID NO: 39820 - protein, 224 aa, Microcoleaceae bacterium; identical to SEQ ID NO: 39819
  misc_feature (1)..(224): tr|A0A3D5GAZ1|A0A3D5GAZ1_9CYAN 7-cyano-7-deazaguanine s ynthase OS=Microcoleaceae bacterium UBA9251 OX=2055794 GN=queC PE=3 SV=1

SEQ ID NO: 39821 - protein, 231 aa, Microcoleus sp.
  misc_feature (1)..(231): tr|K9W8J4|K9W8J4_9CYAN 7-cyano-7-deazaguanine synthase OS=Microcoleus sp. PCC 7113 OX=1173027 GN=queC PE=3 SV= 1
MKAVILLSGGLDSSTTLYQAKADGYECYAISFDYQQRHRRELEYAKAIAGCARVKEHQIVSFDLRQWGGSALTDNDLDLPEERTLDEMSQNIPITYVPARNTIFLSFGLSYAEAIDAQRVYVGVNALDYSGYPDCRPDYIQAMQKVFDLGTKQGREGTAIEIATPLIDLKKTEIIQLGNQLGVPWEHTWSCYAGGDLACGVCDSCRLRLAAFAELGLQDPLPYSVRSKELN

SEQ ID NO: 39822 - protein, 224 aa, Microcoleus vaginatus
  misc_feature (1)..(224): tr|F5UN93|F5UN93_9CYAN 7-cyano-7-deazaguanine synthase OS=Microcoleus vaginatus FGP-2 OX=756067 GN=queC PE=3 S V=1
MKAVILLSGGLDSSTVLYQAKADGCECYAISFDYKQRHRRELESARAIALAAGVKAHQIVNFDLTLWGGSALTDNEMELPIDRNLAEMSQNIPITYVPARNTIFLSFALAYAETLEADRIYIGVNALDYSGYPDCRLDYIQAMQEVFRLGTKQGREGNAINIITPLIELKKTEIIQLGNQLGVPWEQTWSCYAGGENACGVCDSCRLRLAAFEELGLKDPVPYA

SEQ ID NO: 39823 - protein, 230 aa, Microcystis aeruginosa
  misc_feature (1)..(230): sp|B0JIA6|QUEC_MICAN 7-cyano-7-deazaguanine synthase OS =Microcystis aeruginosa (strain NIES-843) OX=449447 GN= queC PE=3 SV=1
MTKKAIILLSGGLDSATTAAIALAAGYQLIALSFRYGQRHERELAAAKKIANFLNIKEHHLIEVNLSLWGGSALTDQSIAIPQEGINPDIIPITYVPGRNTVFISIALSLAEAREAEAIYLGINAVDYSGYPDCRPEYLDAFQTLANLSSKAGLEGKAPQLIAPLVMDSKVDIVRRAVSLGVPIADTWSCYQGEVEPCGLCDSCRIRDQALIEAGYPELATPLLKNSRGK

SEQ ID NO: 39824 - protein, 232 aa, Microcystis aeruginosa
  misc_feature (1)..(232): tr|A0A5J5LUK8|A0A5J5LUK8_MICAE 7-cyano-7-deazaguanine s ynthase QueC OS=Microcystis aeruginosa EAWAG127a OX=252 9855 GN=queC PE=4 SV=1
MTKKAIILLSGGLDSATTAAIASAAGYQLIALSFRYGQRHERELAAAKKIANFLEIKEHHLLEVNLSLWGGSALTDQSIAIPQEGINPNIIPITYVPGRNTVFISIALSLAEAREAEAIYLGINAVDYSGYPDCRPEYLDAFQTLANLSSKAGLEGKAPQLIAPLVMDSKVDIVRRAVSLGVPIADTWSCYQGEVEPCGLCDSCRIRDQALIEAGYPELATPLFKQRGDSQQ

SEQ ID NO: 39825 - protein, 232 aa, Microcystis flosaquae
  misc_feature (1)..(232): tr|A0A552KL64|A0A552KL64_9CHRO 7-cyano-7-deazaguanine s ynthase OS=Microcystis flos-aquae Mf_QC_C_20070823_S10D OX=2486236 GN=queC PE=3 SV=1
MTKKAIILLSGGLDSATTAAIALAAGYQLIALSFRYGQRHERELAAAKKIANFLEIKEHHLIEVNLSLWGGSALTDQSIAIPQEGINPNIIPITYVPGRNTVFISIALSLAEAREAEAIYLGINAVDYSGYPDCRPEYLEAFQTLANLSSKAGLEGKAPQLIAPLVMDSKVDIVRRAVSLGVPIADTWSCYQGEVEPCGLCDSCRIRDQALIEAGYPELATSFLKQSGKGGA

SEQ ID NO: 39826 - protein, 232 aa, Microcystis flosaquae
  misc_feature (1)..(232): tr|A0A552LDH7|A0A552LDH7_9CHRO 7-cyano-7-deazaguanine s ynthase OS=Microcystis flos-aquae Mf_WU_F_19750830_S460 OX=2486237 GN=queC PE=3 SV=1
MTKKAIILLSGGLDSATTAAIALAAGYQLIALSFRYGQRHERELAAAKKIANFLDIKEHHLIEVNLSLWGGSALTDQSIAIPQEGINPNIIPITYVPGRNTVFISIALSLAEAREAEAIYLGINAVDYSGYPDCRPEYLEAFQTLANLSSKAGLEGKAPQLIAPLVMDSKVDIVRRAVSLGVPIADTWSCYQGEVEPCGLCDSCRIRDQALIEAGYPELATSFLKQSGKGGA

SEQ ID NO: 39827 - protein, 242 aa, Microcystis novacekii
  misc_feature (1)..(242): tr|A0A552J5C8|A0A552J5C8_9CHRO 7-cyano-7-deazaguanine s ynthase OS=Microcystis novacekii Mn_MB_F_20050700_S1D O X=2486266 GN=queC PE=3 SV=1
MTKKAIILLSGGLDSATTAAIALAAGYQLIALSFRYGQRHERELAAAKKIANFLNIKEHHLIEVNLSLWGGSALTDQSIAIPQEGINPNIIPITYVPGRNTVFISIALSLAEARAAEAIYLGINAVDYSGYPDCRPQYLDAFQTLANLSSKAGLEGKAPQLIAPLVMDNKVDIVRRAVSLGVPIADTWSCYQGEVEPCGLCDSCRIRDRALIEAGYPELATPLLKQSGKIGRIVKNGDNLGN

SEQ ID NO: 39828 - protein, 242 aa, Microcystis panniformis
  misc_feature (1)..(242): tr|A0A0K1S541|A0A0K1S541_9CHRO 7-cyano-7-deazaguanine s ynthase OS=Microcystis panniformis FACHB-1757 OX=163878 8 GN=queC PE=3 SV=1
MTKKAIILLSGGLDSATTAAIALAAGYQLIALSFRYGQRHERELAAAKKIANFLDIKEHHLIEVNLSLWGGSALTDQSIAIPQEGINPNIIPITYVPGRNTVFISIALSLAEAREAEAIYLGINAVDYSGYPDCRPQYLEAFQTLANLSSKAGLEGKAPQLIAPLVMDSKVDIVRRAVSLGVPIADTWSCYQGEVEPCGLCDSCRIRDQALIEAGYPELATPLLKQSGKIGRIVKNGDNLGN

SEQ ID NO: 39829 - protein, 225 aa, Microcystis panniformis
  misc_feature (1)..(225): tr|A0A552PZJ4|A0A552PZJ4_9CHRO 7-cyano-7-deazaguanine s ynthase OS=Microcystis panniformis Mp_MB_F_20051200_S9 OX=2486223 GN=queC PE=3 SV=1
MTKKAIILLSGGLDSATTAAIALAAGYQLIALSFRYGQRHERELAAAKKIANFLNIKEHHLIEVNLSLWGGSALTDQSIAIPQEGINPNIIPITYVPGRNTVFISIALSLAEARAAEAIYLGINAVDYSGYPDCRPQYLEAFQTLANLSSKAGLEGKAPQLIAPLVMDSKVDIVRRAVSLGVPIADTWSCYQGEVKPCGLCDSCRIRDQALIEAGYPELATRLWK

SEQ ID NO: 39830 - protein, 242 aa, Microcystis sp.; identical to SEQ ID NO: 39828
  misc_feature (1)..(242): tr|A0A552AMT9|A0A552AMT9_9CHRO 7-cyano-7-deazaguanine s ynthase OS=Microcystis sp. M_OC_Ca_00000000_C217Col OX= 2486213 GN=queC PE=3 SV=1

SEQ ID NO: 39831 - protein, 225 aa, Microcystis sp.
  misc_feature (1)..(225): tr|A0A552C3D3|A0A552C3D3_9CHRO 7-cyano-7-deazaguanine s ynthase OS=Microcystis sp. Msp_OC_L_20101000_S702 OX=24 86218 GN=queC PE=3 SV=1
MTKKAIILLSGGLDSATTAAIAIAAGYQLIALSFRYGQRHERELAAAKKIANFLNIKEHHLIEVNLSLWGGSALTDQSIAIPQEGINPNIIPITYVPGRNTVFISIALSLAEARAAEAIYLGINAVDYSGYPDCRPQYLEAFQTLANLSSKAGLEGKAPQLIAPLMMDSKVDIVRRAVSLGVPIADTWSCYQGEVKPCGLCDSCRIRDQALIEAGYPELATRLWK

SEQ ID NO: 39832 - protein, 230 aa, Microcystis viridis
  misc_feature (1)..(230): tr|A0A3G9JAV0|A0A3G9JAV0_MICVR 7-cyano-7-deazaguanine s ynthase OS=Microcystis viridis NIES-102 OX=213615 GN=qu eC PE=3 SV=1
MTKKAIILLSGGLDSATTAAIALAAGYQLIALSFRYGQRHERELAAAKKIANFLDIKEHHLIEVNLSLWGGSALTDQSIAIPQEGINPNIIPITYVPGRNTVFISIALSLAEAREAEAIYLGINAVDYSGYPDCRPQYLEAFQTLANLSSKAGLEGKAPQLIAPLVMDSKVDIVRRAVSLGVPIADTWSCYQGEVEPCGLCDSCRIRDHALIEAGYPELATPLLKNSRGK

SEQ ID NO: 39833 - protein, 242 aa, Microcystis viridis
  misc_feature (1)..(242): tr|A0A552HL16|A0A552HL16_MICVR 7-cyano-7-deazaguanine s ynthase OS=Microcystis viridis Mv_BB_P_19951000_S68D OX =2486270 GN=queC PE=3 SV=1
MTKKAIILLSGGLDSATTAAIALAAGYQLIALSFRYGQRHERELAAAKRIANFLNIKEHHLIEVNLSLWGGSALTDQSIAIPQEGINPNIIPITYVPGRNTVFISIALSLAEARAAEAIYLGINAVDYSGYPDCRPEYLDAFQTLANLSSKAGLEGKAPQLIAPLVMNSKVDIVRRAVSLGVPIADTWSCYQGEVEPCGLCDSCRIRDQALIEAGYPELATPLLKQPGKIGRIVKNGDNLGN

SEQ ID NO: 39834 - protein, 242 aa, Microcystis wesenbergii
  misc_feature (1)..(242): tr|A0A552JS23|A0A552JS23_9CHRO 7-cyano-7-deazaguanine s ynthase OS=Microcystis wesenbergii Mw_QC_S_20081001_S30 D OX=2486245 GN=queC PE=3 SV=1
MIKKAIILLSGGLDSATTAAIALAAGYQLIALSFRYGQRHERELAAAKKIANFLDIKEHHLIEVNLSLWGGSALTDQSIAIPQEGINPNIIPITYVPGRNTVFISIALSLAEARAAEAIYLGINAVDYSGYPDCRPQYLEAFQTLANLSSKAGLEGKAPQLIAPLVMDSKVDIVRRAVSLGVPIADTWSCYQGEVEPCGLCDSCRIRDQALIEAGYPELATPLLKQSGKIGRIVKNGDNLGN

SEQ ID NO: 39835 - protein, 230 aa, Microcystis wesenbergii
  misc_feature (1)..(230): tr|A0A552MC07|A0A552MC07_9CHRO 7-cyano-7-deazaguanine s ynthase OS=Microcystis wesenbergii Mw_MB_S_20031200_S10 9D OX=2486241 GN=queC PE=3 SV=1
MTKKAIILLSGGLDSATTAAIALAAGYQLIALSFRYGQRHERELAAAKKIANFLNIKEHHLIEVNLSLWGGSALTDQSIAIPQEGINPNIIPITYVPGRNTVFISIALSLAEARAAEAIYLGINAVDYSGYPDCRPEYLDAFQTLANLSSKAGLEGKAPQLIAPLVMDSKVDIVRRAVSLGVPIADTWSCYQGEVEPCGLCDSCRIRDRALIEAGYPELATSLLKNSQGK

SEQ ID NO: 39836 - protein, 268 aa, Microgenomates group
  misc_feature (1)..(268): tr|A0A0G1IBD8|A0A0G1IBD8_9BACT 7-cyano-7-deazaguanine s ynthase OS=Microgenomates group bacterium GW2011_GWC1_4 4_23 OX=1618523 GN=UW48_C0001G0165 PE=3 SV=1
MKKSTFPIRVFSNRDEDSKILEMMNNIFLYRRGYISKVPKNEDVVFIFSGGLDSSITLDMIINEWGVNVFPLFVRRSARATKFEEESVRFFVDFYQKKYPGRMQNLEVVEIEVPPLPFKKYPEVDRLKKLGHPMRNAVLQSLGVQYAQKLRATVSPKLNTVLTATVGDDSFPHSSLQALRSVNLGVCIDTGDWGWQVTSPLVDVVYEGRPLFKKDLIGYAIKHNLPLDKTRTCIEGGEKPDGTCPECLCRLRAFEAAGVIDPLDYQNQ

SEQ ID NO: 39837 - protein, 258 aa, Microgenomates group; identical to SEQ ID NO: 37086
  misc_feature (1)..(258): tr|A0A0G1IA56|A0A0G1IA56_9BACT 7-cyano-7-deazaguanine s ynthase OS=Microgenomates group bacterium GW2011_GWC1_4 4_23 OX=1618523 GN=UW48_C0001G0162 PE=3 SV=1

SEQ ID NO: 39838 - protein, 200 aa, Microlunatus phosphovorus
  misc_feature (1)..(200): tr|F5XIP1|F5XIP1_MICPN 7-cyano-7-deazaguanine synthase OS=Microlunatus phosphovorus (strain ATCC 700054 / DSM 10555 / JCM 9379 / NBRC 101784 / NCIMB 13414 / VKM Ac-1 990 / NM-1) OX=1032480 GN=MLP_52650 PE=3 SV=1
MNRVLLLSGGLDSTAVAAMVRPEHCVHVDYGQIPAEAELRAAAQVAVDLGLPFTSLAVPAGQVGAGLMSAEAADGLPVDVSPEWWPFRNQLLITLAAAWAVQRGFEVVIIGTVASDGARHADGTRDFLTRIDDLLAVQEGHLRVEAPAAGMSSAELITTSGVTDAVLGWTHSCHRANFPCGACPGCVKRQEVLQQLDRLR

SEQ ID NO: 39839 - protein, 231 aa, Micromonospora aurantiaca
  misc_feature (1)..(231): tr|A0A3M9KB59|A0A3M9KB59_9ACTN 7-cyano-7-deazaguanine s ynthase OS=Micromonospora aurantiaca OX=47850 GN=EEZ25_ 27345 PE=3 SV=1
MSEILLFSAGLDSFPAWHYLGKPRTLYFDSGHYGRQQEIDTVRALAAAHGMDLEISNELDLSGRATPQGDLIPFRNVLFAMLAAFRAEVIWCVGVKGDHTADKSPEAFARMSEMLTTFAGRPIRVDSPFWDMTKSDIVAWYLKAGLPVDDLLQTFSCATPGTAFTHCGRCPSCLRRWIALTNNDITGHFASPPWTWDRIRTYYLPAMASGGYPPHRVEEFRRAMATVGALP

SEQ ID NO: 39840 - protein, 234 aa, Micromonospora chokoriensis
  misc_feature (1)..(234): tr|A0A1C4UPY5|A0A1C4UPY5_9ACTN 7-cyano-7-deazaguanine s ynthase OS=Micromonospora chokoriensis OX=356851 GN=que C PE=3 SV=1
MSAAKRRAVVLLSGGLDSATVLAMAVHEGYEAYALSFRYGQRHTVELEAASRVAANLGAVKHVVADIDLRVFGGSALTDDALAVPHHDSADDLGSDIPITYVPARNTIFLSFALAWAETLDASDVFIGVSALDYSGYPDCRPEYIAAYEQMANLATKAGVEGRQRLRIHTPLIQLTKAETIRRGLELGVDYAWTHSCYDPVDGRACGTCDSCLLRGRGFAELGRTDPALAPTAG

SEQ ID NO: 39841 - protein, 233 aa, Micromonospora echinospora
  misc_feature (1)..(233): tr|A0A0K0K531|A0A0K0K531_MICEC 7-cyano-7-deazaguanine s ynthase OS=Micromonospora echinospora OX=1877 GN=genA P E=3 SV=1
MPTEKRRAVVLLSGGLDSATVLAMAVHEGYDAYALSFRYGQRHTVELEAAARVAKALGATRHVVADIDLRVFGGSALTDDALAVPHHDSADELGDEIPVTYVPARNTIFLSFALAWAETLDASDIFIGVSALDYSGYPDCRPEYVAAYETMANLATKAGVEGRQRLRIHTPLIQLTKAETIRRGLELGVDYAWTHSCYDPVDGRACGTCDSCLLRGRGFAELGLTDPALSATG

SEQ ID NO: 39842 - protein, 233 aa, Micromonospora echinospora
  misc_feature (1)..(233): tr|A0A1C4WLJ1|A0A1C4WLJ1_MICEC 7-cyano-7-deazaguanine s ynthase OS=Micromonospora echinospora OX=1877 GN=queC P E=3 SV=1
MPTEKRRAVVLLSGGLDSATVLAMAVHEGYEAHALSFRYGQRHTVELEAAARVAKALGATRHVVADIDLRVFGGSALTDDTLAVPHHDSADELGDEIPVTYVPARNTIFLSFALAWAETLDASDIFIGVSALDYSGYPDCRPEYVAAYETMANLATKAGVEGRQRLRIHTPLIQLTKAETIRRGLELGVDYAWTHSCYDPVDGRACGSCDSCLLRGRGFAELGLTDPALSATG

SEQ ID NO: 39843 - protein, 428 aa, Micromonospora globbae
  misc_feature (1)..(428): tr|A0A420EJV8|A0A420EJV8_9ACTN Uncharacterized protein OS=Micromonospora globbae OX=1894969 GN=D7I43_31695 PE= 4 SV=1
MPAYTMRFRLPEKISPGIAASRFYWSPNDLGSFISPFGPGLGLLGPVPEPNIELVRLAVMVYAADRSTPRRAGSSNWSCRDLDIEVPVQRPERWEPVRERLEALLGFLSGDAWTLQFRQATTPTEQVSAYRYGGAKRVVLASGGADSTIGALMSRHGLRDATHILVSHVGATNIAPVQRNIVQQIGALIAGPEQFHRQIRFSRRQMQPGGFPFHNEYSTRTRSLLFLALGLAVASIERLPLWIPENGFASLNPPMTSDQRGTLSTRTTHPLFLQQLSDLATEAGAHAEIENPFALMTKGEMFGMAADLVGLDAASSLLSATHSCAHTGHRSHRLPVSSHCGVCFGCLLRRASFLASGVPDRTNYLVNHEARPEAYLRNKSVEASIRHFVTRGLRPSDVSVLSLPPWYSTQDAYGLCKRGITELELLFA

SEQ ID NO: 39844 - protein, 234 aa, Micromonospora haikouensis
  misc_feature (1)..(234): tr|A0A1C4YJI6|A0A1C4YJI6_9ACTN 7-cyano-7-deazaguanine s ynthase OS=Micromonospora haikouensis OX=686309 GN=queC PE=3 SV=1
MSAAKRRAVVLLSGGLDSATVLAMAVHEGYEAYALSFRYGQRHTVELEAASRVAANLGAVKHVVADIDLRVFGGSALTDDALAVPHHASADDLGSDIPITYVPARNTIFLSFALAWAETLDASDVFIGVSALDYSGYPDCRPEYIAAYEQMANLATKAGVEGRQRLRIHTPLIQLTKAETIRRGLELGVDYAWTHSCYDPVDGRACGTCDSCLLRSRGFAELDRTDPALAPPAG

SEQ ID NO: 39845 - protein, 431 aa, Micromonospora inyonensis
  misc_feature (1)..(431): tr|A0A1C6RST5|A0A1C6RST5_9ACTN Queuosine biosynthesis p rotein QueC OS=Micromonospora inyonensis OX=47866 GN=GA 0074694_2928 PE=4 SV=1
MTTGRHAYHFTTGRYRRFPGHYRALDERHFRAGPSAITNNLAPAPDVPPVWAQDLLQVAKAVYLVDKLSRRATAPDRWTRDLTLSVQVIEPERWSDRVEPLLTALLELLTADRWTVGFHGGAAALRTVPTRLFEGDPAEEVTLFSGGLDSTGWVAQRIGVDAGPLLLVSYYEGTLKTRQNQVFAALRRLGARAVERRQVLQQVKGFGPPLELSSRSRGLLYLATAVHVAAAHRVREVAVPENGQLAVNPPLTASRLAASSTRSVHPRTLHLLNRLIAAVGGDVTVVNPLVDDTKGDVCRRALTAGLPLPTLAETVSCGQPPENRGASRFAQCGCCYPCLIRRSGLLAGTGRDDTAYRTDVWALPDDADLARHRRALAAWMSRGFGIRDLTTDVPLPPGADPAALLRTVRRGRDEIRQLFERFAPGTLPAGT

SEQ ID NO: 39846 - protein, 236 aa, Micromonospora inyonensis
  misc_feature (1)..(236): tr|C9W390|C9W390_9ACTN 7-cyano-7-deazaguanine synthase OS=Micromonospora inyonensis OX=47866 GN=sis24 PE=3 SV= 1
MWRVPTGKRKAVVLLSGGLDSATVLAMAVHEGYEAHALSFRYGQRHTVELEAAARVAKALGATRHVVADIDLRVFGGSALTDDTLVVPHHASADEMGDEIPVTYVPARNTIFLSFALAWAETLDASDIFIGVSALDYSGYPDCRPEYVAAYETMANLATKAGVEGRQRLRIHTPLIQLTKAETIRRGLEMGVDYAWTHSCYDPVDGRACGTCDSCLLRGRGFAELGLTDPALSTTG

SEQ ID NO: 39847 - protein, 243 aa, Micromonospora lupini
  misc_feature (1)..(243): tr|I0L1T4|I0L1T4_9ACTN 7-cyano-7-deazaguanine synthase OS=Micromonospora lupini str. Lupac 08 OX=1150864 GN=qu eC PE=3 SV=1
MAAVTAAVLPLVTPVPAHVVVIVSGGMDSTVLAYALQQGGSTVTLLSCDYGQRHRRELDYAARTAEALHAPHVVVDLTGIVGVLTGSALTDAQVDVPDGHYTDGSMRATVVPNRNAIMLDVAVARAVSGGADAVAFGAHAGDHPIYPDCRPAFLAAYESTVRLANEGFLPAGFRVVAPFIECSKADIARLGDTIGVRFADTWSCYKGGERHCGTCGTCVERREAFAMAGVTDPTEYATASGVI

SEQ ID NO: 39848 - protein, 443 aa, Micromonospora mirobrigensis
  misc_feature (1)..(443): tr|A0A1C5AH50|A0A1C5AH50_9ACTN 7-cyano-7-deazaguanine s ynthase (Queuosine biosynthesis) OS=Micromonospora miro brigensis OX=262898 GN=GA0070564_110106 PE=4 SV=1
MTAAGHAYHYTTYGRPSFERHRRSIDRKLLAQADVQLQRLAEVPQDRPIWAQDLLQVARAVFLADKLSLRSGSADRWTRRIDLSVQVAEFDRWTDRALRLLTELTEALTSDKWHIRVHPGATAWPHQNRIHSPQAAEEVALFSGGLDSSAYAAERARASGGELLLVSYYEPQWASQQEAVLAAIHELSSRAVRQSRSPQQIKARQELEPSARSRGLLYTATAVYLAAAHGVAQVAVPENGQLALNPALTPARVAACSTRSVHPYTLSLLNALIHEVGGSVTVVNPYLHLTKGEVCERALAAGLTPTTLTHATMSCGRPPRNQPELQCGHCYPCLVRRSGLLAALGSDGTPYAKNVWAVADRSDAAADRRALHRWLTHPFGVRDLFTDMPLPEGTNLGPLVGVVQRGREEMARMFADAGVTTAPAAAVAFWPGMGAGCRGMPEP

SEQ ID NO: 39849 - protein, 470 aa, Micromonospora musae
  misc_feature (1)..(470): tr|A0A3A9XSJ8|A0A3A9XSJ8_9ACTN Uncharacterized protein OS=Micromonospora musae OX=1894970 GN=D7044_27280 PE=4 SV=1
MNPLPETSLSIDHRHAPSDFETRPSGDRQRGARPRRHGLGDGCVSPARFAYQYQTDGPTAVDRNRVPIDRGLLAGADEPLQALAEVARERPVWAQDLVHLTRAVYLADKMSLRATAEDGWSRQIDLSVQVQAPGIWAGPALGLLSRVAETLTADQWTISLRPGASAWPHQQRAVADTPVAEVALFSGGLDSFAYTAERSQVPAGDVLLVSYYEPQWKGQQDRALGAIRAVSRRTLRQLQASQQISVRRQKLEPSARTRGLLYVATAVYLAAAHDVPRVAIPENGQLALNAALTPARAAACSTRSVHPYTLSLLNQMIRSVGGSVAVVNPYLHLTKGEVCQRAIEAGLPQMTLTSTTLSCGRPPRSQPELHCGCCYPCLVRRSGLLASVRADDTSYAKDVWTLPGDVRAAADRRALHRWLDNPFNLRDLVTDMPLPNELDLAPLIDVVQRGRTELAQMFAQHGKPVRSSTR

SEQ ID NO: 39850 - protein, 235 aa, Micromonospora narathiwatensis
  misc_feature (1)..(235): tr|A0A1A8ZA81|A0A1A8ZA81_9ACTN 7-cyano-7-deazaguanine s ynthase OS=Micromonospora narathiwatensis OX=299146 GN= GA0070621_1058 PE=3 SV=1
MREVLLFSAGLDSFPAWHYLGKPPALYFDIRHYGRQQEIDTVQALASAHGMDLTISNELDLSAWATPQGDLIPFRNVLFAMLAGFRADVVWCVGVKGDHTADKSPEAFIRMSEMLTAFAGRPIRVDSPFWNMTKSEIVAWYLEAGLPVNDLLQTFSCATPEDAFAHCGRCPSCLRRWIALTNNDIAGHFASPPWTWDRIRAYYLPAMASGGYPPHRVEEFRRAMATVGVFPEPPR

SEQ ID NO: 39851 - protein, 231 aa, Micromonospora nigra
  misc_feature (1)..(231): tr|A0A1C6R867|A0A1C6R867_9ACTN 7-cyano-7-deazaguanine s ynthase OS=Micromonospora nigra OX=145857 GN=GA0070616_ 0131 PE=3 SV=1
MSEILLFSAGLDSFPAWHYLGKPRTLYFDSGHYGRQQEIDTVQALAAAHGMDLEISNELDLSRWATPQGDLIPFRNVLFAMLAAFRAEVIWCVGVKGDHTADKSPEAFARMSEMLSTFVDRPIRVDSPFWNMTKSDIVAWYLKSGLPVNHLLQTFSCATPGSAFTHCGRCPSCLRRWIALTNNDITGHFAAPPWTWDRIRTYYVPAMASGGYPPHRVEEFHRAMATVGALP

SEQ ID NO: 39852 - protein, 432 aa, Micromonospora nigra
  misc_feature (1)..(432): tr|A0A1C6SJP6|A0A1C6SJP6_9ACTN 7-cyano-7-deazaguanine s ynthase (Queuosine biosynthesis) OS=Micromonospora nigr a OX=145857 GN=GA0070616_3938 PE=4 SV=1
MKTGRYAYHYTTDGRVRFSSSHQPLDDRLFRARGSAIERNLSPAPPPPDWAQDLLRIAKAVYLADKLSGRELAPDRWTRTIELSVQVIDPDRWHHAAPTLTALLEILTADRWSIRFHSGAARHPGVQGRLLDDARVEEVSLFSGGLDSTAYAAERVQQAGGPLLLVSYYDPTLKRRQEQILDHLRRLRSRPVEHRAVLLQSRANGVRLDRSSRSRGLLFLATAVFAAAAHRARQVAVPENGQLAVNPPLTAARVAACSTRSVHPRTLDLVNDLINSAEGDVRVENPLLPATKGEVCRRARDLGLPLAALMVTVSCGQSPCKFGGASRPHHCGHCYPCLIRQSGLLAGVGHDDTPYETDVWALPTTDRKAQHLRALRAWLAASFGVRDLTTDLPLPPQTDTASLLRTLVRGREELRNLFARHGGQSPGSSPSL

SEQ ID NO: 39853 - protein, 195 aa, Micromonospora olivasterospora
  misc_feature (1)..(195): tr|A0A562I4H2|A0A562I4H2_MICOL Queuosine biosynthesis p rotein QueC OS=Micromonospora olivasterospora OX=1880 G N=JD77_00858 PE=4 SV=1
MPRVAVPENGQLALNPALTPARVAACSTRSVHPHTLSLLNELIRSVGGEVSLVNPYLHLTKGEVCQHALTAGLPPAVLTGATVSCGHPPRDRSEFHCGHCYPCLVRRSGLLAAIGADDTPYAKDVWSLPDDLDAAADRRALHRWLSRRFGVRDLFTDMPLPDGLDLCPLLQVVERGRAELATLFARHGQPVPSSR

SEQ ID NO: 39854 - protein, 233 aa, Micromonospora olivasterospora
  misc_feature (1)..(233): tr|Q2MFY8|Q2MFY8_MICOL 7-cyano-7-deazaguanine synthase OS=Micromonospora olivasterospora OX=1880 GN=fosE PE=3 SV=1
MPTEKRKAVVLLSGGLDSATVLAMAVHEGYEAHALSFRYGQRHTVELKAAARVAKALGATRHVVADIDLRVFGGSALTDDSLAVPHHASADELGGDIPVTYVPARNTIFLSFALAWAETLDASDIFIGVSALDYSGYPDCRPEYIAAYEAMANLATKAGVEGRQRLRIHTPLIQLTKAETIRRGLELGVDYAWTHSCYDPVDGRACGTCDSCLLRGRGFAELGLTDPALSAGG

SEQ ID NO: 39855 - protein, 437 aa, Micromonospora orduensis
  misc_feature (1)..(437): tr|A0A5C4QW70|A0A5C4QW70_9ACTN Uncharacterized protein OS=Micromonospora orduensis OX=1420891 GN=FHG89_08725 P E=4 SV=1
MSRASFAYHYAARGGVSTDRKREMIGWPLLEHADQRLQKLAEVPQDRPDWAQDLLQIARAVYLADKLSLREYAVDGWTRRIDLSVEVVDPSVWSPPTLRLLSHLAETLSADQWTINVRVGGQRWPQQGRTTYADVGEVALFSGGLDSTAWVAERAKVAAGPLLLVSYFEPQWGSQQDQTLSAIESSARRDIEQLKASQQVRLTRKLEKSARTRGLLYLATAIYLAAAHGVPQVVVPENGQLAVNPPLTPARVAACSTKSVHPGTLHLLNSLIDALGGAVTVVNPYLHLTKGEVCRQALDAGLAPATLTHATISCGRPPRDRPGAEHYHCGTCYPCLVRHSGLLTALGSDSTPYKTDVWMLGDRERAAIDRRALHRWLCRPISIRDLTIDTPLPDTVASGPLLDVVERGRRELVQMFARHGQPITPTETPPRRLAWAG

SEQ ID NO: 39856 - protein, 236 aa, Micromonospora pallida
  misc_feature (1)..(236): tr|A0A1C6TDG1|A0A1C6TDG1_9ACTN 7-cyano-7-deazaguanine s ynthase OS=Micromonospora pallida OX=145854 GN=queC PE= 3 SV=1
MRRVPTGKRKAVVLLSGGLDSATVLAMAVHEGYEAHALSFRYGQRHTVELSAAARVAKELGATRHVIADIDLRVFGGSALTDDALAVPHHASADELGDEIPVTYVPARNTIFLSFALAWAETLDASDIFIGVSALDYSGYPDCRPEYVAAYEAMANLATKAGVEGRQRLRIHTPLIQLTKAETIRRGLELGVDYAWTHSCYDPVDGRACGTCDSCLLRGRGFAELGLTDPALATAE

SEQ ID NO: 39857 - protein, 426 aa, Micromonospora palomenae
  misc_feature (1)..(426): tr|A0A561VPP7|A0A561VPP7_9ACTN 7-cyano-7-deazaguanine s ynthase in queuosine biosynthesis OS=Micromonospora pal omenae OX=1461247 GN=FHX75_13650 PE=4 SV=1
MSPARYAYHYTTNGRPVPAVERGREPIDRSLLAQADPRLQRMAEVNRDRPIWAQDLLQVARAIYLADKLSLRFDADDSWTRQIDLSVQVTEVDAWTGRAGELVSQLTETLTADRWAIQMHSGAVAWPHQGRVLTAPPVEEVALFSGGLDSSAYAAERSRVSGDDLLAVSYYEPQWGMQQESVLTTIRNSSLRNIRQFKTSQQVRAQQRELEPSARTRGLLYVATAVYLAAAHDVPQVAVPENGQLALNPALTPARVAACSTRSVHPYTLSLLNELIRALGGSVAVVNPYLHLTKGEVCRRALEAGMPASALTGLTLSCGHPPRDQPELHCGHCYPCLVRRSGLLTALNSDDTPYAKDVWTVSDDLDAAVDRRALQRWLHRPFGVRDLITDMPLPHGLELAPLVEVVRRGRVELANLFARHGEAVRQ

SEQ ID NO: 39858 - protein, 426 aa, Micromonospora peucetia
  misc_feature (1)..(426): tr|A0A1C6VLU3|A0A1C6VLU3_9ACTN 7-cyano-7-deazaguanine s ynthase (Queuosine biosynthesis) OS=Micromonospora peuc etia OX=47871 GN=GA0070608_3457 PE=4 SV=1
MTSNFAYQYMTSGRPVVEHGRELIDRTLLARADEALQGQAEVTGDRPVWAQDLLHMARAVHLADKLSLRAAADDRWSRQIDLSVQVRAVDRWAGRPLELLSRLAEALTADRWMISARPGAAAWPHQQRTHPGPPVEEVALFSGGLDSFAYAAERSRASDGNILFVSYYEPQWKAQQDRAIAMIRDAAGSNAMPVRASQQVFAGRRKLEPSARTRGLLYAATAVYLAAAHDVSHVAVPENGQLALNPALTPARVAACSTRSVHPYTLSLLNELIHTLGGSMTVVNPYLHLTKGEVCERALRAGLAPATLSSTTLSCGRPPRNRPELHCGCCYPCLIRRSGLLAASGVDSTPYAKDVWALPDHQKAATDRRALHRWLNREFTLRDLVTDMPLPDGLDLAPLLDVVQRGRVELTDMFVRHARSAGQLNP

SEQ ID NO: 39859 - protein, 340 aa, Micromonospora radicis
  misc_feature (1)..(340): tr|A0A418MUU4|A0A418MUU4_9ACTN Uncharacterized protein OS=Micromonospora radicis OX=1894971 GN=D2L64_13850 PE= 4 SV=1
MTSAGTWSGRAIELLASLVETLTADRWEISVRSGAQPLPHQSRSHYDIPIGEVALFSGGLDSTAYVAERSLVPAGDLLLVSYFEPKWKAPQDDVFGAIDRSRRRGLPRFTATQQVRAGRPGLEKSARTRGLLYAATAVFFAAVHRVARVAVPENGQLALNPALTPARVAACSTRSVHPFTLGLLNEVIREVGGAVEVVNPYLYLTKGEVCRRALGAGLTPTTLTQQTVSCGHASSSRPKLHCGHCYPCLMRHSGLLAALGDDDTPYSQRVWDLPDHDRKTEDRRALHRWLERRFQVRDLVTDMPVPAGIDLAPLVAVVNRGRAELSAMFDSHRETGRERG

SEQ ID NO: 39860 - protein, 234 aa, Micromonospora rifamycinica
  misc_feature (1)..(234): tr|A0A109IPR2|A0A109IPR2_9ACTN 7-cyano-7-deazaguanine s ynthase OS=Micromonospora rifamycinica OX=291594 GN=que C PE=3 SV=1
MSAAKRKAVVLLSGGLDSATVLAMAVHEGYEAYALSFRYGQRHTVELDAARRVAERLGAARHVIADIDLRVFGGSALTDDALAVPHHDSADDLGTDIPVTYVPARNTIFLSFALAWAETLDASDVFIGVSALDYSGYPDCRPEYIAAYEQMANLATKAGVEGRQRLRVHTPLIQLTKAETIRRGLELGVDYAWTHSCYDPVEGRACGTCDSCLLRARGFAELGLVDPALTPAGG

SEQ ID NO: 39861 - protein, 237 aa, Micromonospora sagamiensis
  misc_feature (1)..(237): tr|A0A562W8F7|A0A562W8F7_9ACTN 7-cyano-7-deazaguanine s ynthase OS=Micromonospora sagamiensis OX=47875 GN=queC PE=3 SV=1
MVWRVPTGKRKAVVLLSGGLDSATVLAMAVHEGYDAHALSFRYGQRHTIELEAAARVAKALGATRHVVADIDLRVFGGSALTDDTLAVPHHASADELGDEIPVTYVPARNTIFLSFALAWAETLDASDIFIGVSALDYSGYPDCRPEYVAAYETMANLATKAGVEGRQRLRIHTPLIQLTKAETIRRGLELGVDYAWTHSCYDPVDGRACGTCDSCLLRGRGFAELGLTDPALSTTG

SEQ ID NO: 39862 - protein, 233 aa, Micromonospora sp.
  misc_feature (1)..(233): tr|A0A2G6XP14|A0A2G6XP14_9ACTN 7-cyano-7-deazaguanine s ynthase OS=Micromonospora sp. CNZ299 OX=2035244 GN=queC PE=3 SV=1
MAQRKAVVLLSGGLDSATVLAIARNEGYETFALSFRYGQRHTVELQAAERVAAALGATKHVVADIDLRVFGGSALTDASIAVPHHDSVDDLSANDIPVTYVPARNTIFLSFALAWAETLDASDVFIGVSALDYSGYPDCRPEYIKAYEEMANLATRAGVEGRQRLKVHTPLIQLTKADTIRRGLELNVDYALTHSCYDPVDDRACGTCDSCLLRNRGFAELGMTDPALTTSQS

SEQ ID NO: 39863 - protein, 224 aa, Micromonospora sp.
  misc_feature (1)..(224): tr|A0A4R4Q130|A0A4R4Q130_9ACTN 7-cyano-7-deazaguanine s ynthase OS=Micromonospora sp. 15K316 OX=2530376 GN=queC PE=3 SV=1
MTHTIALLSGGLDSTVLVAHLLDQGHTVDAISVDYGQRHARELDAATAIADHYRIRHQLVDLTAVGRLLTGSALTDPTVAVPHGHYADESMRATVVPNRNAILLMVAVGVAATRNATAVATAVHAGDHPIYPDCRPEFITAADRCARAATAGYGDVTVTAPFVAMSKTGIAALGGRLGAPLHLSWSCYEGGAQHCGQCGTCVERRESFTDAGLTDPTTYRTVTA

SEQ ID NO: 39864 - protein, 437 aa, Micromonospora violae
  misc_feature (1)..(437): tr|A0A4Q7UGF0|A0A4Q7UGF0_9ACTN 7-cyano-7-deazaguanine s ynthase in queuosine biosynthesis OS=Micromonospora vio lae OX=1278207 GN=EV382_3656 PE=4 SV=1
MSRASFAYHYAARGGVSTDRKREAIGWPLLEHADERLQKLAEVPQDRPDWAQDLLQIARAVYLADKLSLREYAVDGWTRRIDLSVEVVDPSVWSPPTLRLLSHLAETLSADQWTINVRVGGQRWPQQGRTIYADVGEVALFSGGLDSTAWAAERAKVTAGPLLLVSYFEPQWGSQQDQTLNAIESSARRDIEQLKASQQVRLTRKLEKSARTRGLLYLTTAIYLAAAHGVPQVVVPENGQLAVNPPLTPARVAACSTKSVHPGTLHPLNSLIDALGGGVTVINPYLHLTKGEVCQQALDAGLAPATLTHATISCGRPPRDRPGAEHYHCGTCYPCLVRHSGLLTALGSDSTPYKTDVWMLGDREKAAVDRRALHQWLCRPISVRDLTTDTPLPDTVGPGPLLDVVERGRTELGQMFAWHGRPITPTETSPRRLAWAG

SEQ ID NO: 39865 - protein, 240 aa, Micromonospora wenchangensis
  misc_feature (1)..(240): tr|A0A246RK54|A0A246RK54_9ACTN 7-cyano-7-deazaguanine s ynthase OS=Micromonospora wenchangensis OX=1185415 GN=q ueC PE=3 SV=1
MTHDENRSGSSSALIVLSGGMDSTTLLAYYSALRFSLIAVTVDYGQRHRREIDSARAIADHYGAVHQVVDLSGLGGLLPGSALTDDTVTVPDGHYAEASMRATVVPNRNAILANVAVAVGVAHRVGVVALGMHSGDHFVYPDCRPAFVTALRELVTVANEGFPTPRVEVPFMTWTKAEIAAHGTRLGAPLSLSWSCYKGGDQHCGTCGTCYERREAFREAGVPDPTHYLDDVTQFAHPGR

SEQ ID NO: 39866 - protein, 148 aa, Microvirga aerophila
  misc_feature (1)..(148): tr|A0A512BL08|A0A512BL08_9RHIZ 7-cyano-7-deazaguanine s ynthase OS=Microvirga aerophila OX=670291 GN=MAE02_0309 0 PE=3 SV=1
MGNDGLPNTFVPGRNLIFLTFAAALAYRRGLKHIVGGMCETDFSGYPDCRDDTVKAMQLALNLGMDRRFVLHTPLMWINKAETWELAQELGGDALVEIVRTETHTCYRGDRGDLHDWGYGCGECPACELRAAGYEQWGVASVQEGVSQ

SEQ ID NO: 39867 - protein, 424 aa, Microvirga guangxiensis
  misc_feature (1)..(424): tr|A0A1G5KE29|A0A1G5KE29_9RHIZ 7-cyano-7-deazaguanine s ynthase (Queuosine biosynthesis) OS=Microvirga guangxie nsis OX=549386 GN=SAMN02927923_03257 PE=4 SV=1
MRLVCGPETFEVPAGEESLRVILYGQPGAEDRGSAGDAARSEILRRKLMVAPRAWDLLSLALSVVAADLAGQRDRSPDGWTREFELEVAVTDPSFWNCQATAITEALAFLTTDRWQLRFHDGGMLPAPPRDPAFPEDDCVVLLSGGLDSLVGAVDLVAAGRRPLAVSQIVRGDAEKQVDFASSIGGGLTHLQLNHNAHIPGNEESSQRARSLIFLTFGVLAATALRRYHDGDVVPLYVCENGFIAINPPLTGARLGSLSTRTAHPEFLAKLQGVLDAADLRVDVKNPYQLKTKGEMLAGCADQAFLRAQAASSTSCGRFQRFNYRQCGRCVPCQVRRAAFVAWGVPDTTSYVYEPIGQDDAEHAGFDDVRSVAIAIAQVEADGFDGWIGASLSSRVVGNPGPLKTLVKRGLDELKALHRIYGVT

SEQ ID NO: 39868 - protein, 246 aa, Microvirga lotononidis
  misc_feature (1)..(246): tr|I4YR48|I4YR48_9RHIZ 7-cyano-7-deazaguanine synthase OS=Microvirga lotononidis OX=864069 GN=queC PE=3 SV=1
MTTADSSALVVFSGGQDSATCLAWALSRYERVETIGFSYGQRHAVEMECREPIRQALARLSPLWAGRLGPDRVIPLNVLGEVSVSALTADLPVAGSRLDGLPATFVPGRNLVFLTFAAIVAFQRGLKRVVTGVCETDFSGYPDCRDDTVKALQTALNLGMNARLVLETPLMWIDKAETWTLAETLGGNALVDIIVQETHTCYKGDRSTRHDWGFGCGECDACRLRAAGWQRYSRLRSEEVEDLPSR

SEQ ID NO: 39869 - protein, 255 aa, Microvirga lotononidis
  misc_feature (1)..(255): tr|I4YK77|I4YK77_9RHIZ 7-cyano-7-deazaguanine synthase OS=Microvirga lotononidis OX=864069 GN=MicloDRAFT_00070 220 PE=3 SV=1
MNILVVLSGGQDSTTCLFWARGLLTDKGDALHAVTFDYGQRHRIEIEAARKIAGMANVDSHEVIEVPNYLQSASPLTSENELERYESYAQMDRVIGSRVELTFVPMRNTLFLTIAANRAVALGCNHIVTGISEQDNANYPDCRQLFLSQMEEAINQSLGRHMEERIKILAPLLNLSKAQSIALAMELAGCIEALAYSHTSYDGKYPPTDMNHSNVLRAQGFLEAGVPDPLVVRAWREGRMELPTTANYASLRGDA

SEQ ID NO: 39870 - protein, 238 aa, Microvirga ossetica
  misc_feature (1)..(238): tr|A0A1B2EZ49|A0A1B2EZ49_9RHIZ 7-cyano-7-deazaguanine s ynthase OS=Microvirga ossetica OX=1882682 GN=queC PE=3 SV=1
MKTLVICSGGLDSVTLAHKVAAEHTLTRLVSFDYGQRHKKELDAARACAVRLAVPHDTVDITAVGRLLTGSALTSGEPVPEGHYAEETMRITVVPNRNAIMLAIAFGGAAAGQVEAVAAAVHGGDHFIYPDCRPDFIESFETMQRHALEGIARIALYTPFVRLNKADIVREGARLGVPFADTWSSYQGGERHCGRCGTCVERREAFHLAGIEDPTPYEDPDYWIEACREHQAGQLPQA

SEQ ID NO: 39871 - protein, 236 aa, Microvirga sp.
  misc_feature (1)..(236): tr|A0A2T7TQV6|A0A2T7TQV6_9RHIZ 7-cyano-7-deazaguanine s ynthase OS=Microvirga sp. KLBC 81 OX=1862707 GN=queC PE =3 SV=1
MKTLVICSGGLDSVTLAHKVAAERTLTRLVSFDYGQRHKKELDSARACATRLGVPHDIVDISAVGRLLTGSALTSGEPIPEGHYAEDTMRITVVPNRNAIMLAIAFGIAAAEQAEAVAAAVHGGDHFIYPDCRPDFVEAFETMQRHALEGLANIALYTPFVRLSKADIVREGARLGVPFAETWSCYQGGNIHCGRCGTCVERREAFHLAGVEDPTPYEDPDYWIEACREHQARQPA

SEQ ID NO: 39872 - protein, 235 aa, Microvirga sp.
  misc_feature (1)..(235): tr|A0A086MQ81|A0A086MQ81_9RHIZ 7-cyano-7-deazaguanine s ynthase OS=Microvirga sp. BSC39 OX=1549810 GN=queC PE=3 SV=1
MKTLVICSGGLDSVTLAHKVAAEQILTRLVSFDYGQRHRKELDSARACAVSLGVPHDIVDISAVGRLLTGSALTSGEPVPDGHYAEDTMRITVVPNRNAIMVAIAFGVAAAEQAEAVAAAVHGGDHFIYPDCRPDFIESFETMQRHALEGLASITLYAPFVRQGKADIVREGARLRVPFAETWSCYQGGKHHCGRCGTCVEREAFHLAGVGDPTSYEDPDYWIAACHEHQAKQLS

SEQ ID NO: 39873 - protein, 237 aa, Microvirga vignae
  misc_feature (1)..(237): tr|A0A0H1RB92|A0A0H1RB92_9RHIZ 7-cyano-7-deazaguanine s ynthase OS=Microvirga vignae OX=1225564 GN=queC PE=3 SV =1
MNAADFSALVVFSGGQDSTTCLAWALSRYERVETIGFSYGQRHAVEMDCREPIRRALASLSPFWASRLGPDRVIPLDVLGEVSVSALTADLPVASSRADGLPATFVPGRNLVFLTFAAIVAFQRGLKRVVTGVCETDFSGYPDCRDDTVKALQTALNLGMNARLVLETPLMWIDKAETWALAETVGGDALVELIVRETHTCYNGDRGTRHDWGFGCGECDACRLRSAGWQRYTQVRS

SEQ ID NO: 39874 - protein, 236 aa, Microvirga vignae
  misc_feature (1)..(236): tr|A0A0H1RDB7|A0A0H1RDB7_9RHIZ 7-cyano-7-deazaguanine s ynthase OS=Microvirga vignae OX=1225564 GN=queC PE=3 SV =1
MKTLVICSGGLDSVTLAHKVAAERTLTRLVSFDYGQRHKKELDSARACAARFGVPHDIIDISAVGRLLSGSALTSGEPVPEGHYAEDTMRVTVVPNRNAIMLAIAFGIAAAEQAEAVAAAVHGGDHFIYPDCRPDFIEAFEAMQRHALEGLATIALYTPFVRLSKADIVREGARLGVPFAETWSCYQGGERHCGRCGTCVERREAFHLAGVEDPTPYEDPHFWIEACREHQAGQPA

SEQ ID NO: 39875 - protein, 225 aa, Microvirgula aerodenitrificans
  misc_feature (1)..(225): tr|A0A2S0PD49|A0A2S0PD49_9NEIS 7-cyano-7-deazaguanine s ynthase OS=Microvirgula aerodenitrificans OX=57480 GN=q ueC PE=3 SV=1
MTASVDAGRALVVLSGGQDSTTCLYWALARFSHVEAVTFDYGQRHRVELASARTIATLAGVRQTVLPIDTFSALGGNALTDDIAPEAAAGDALPNTFVPGRNLIFLTFAAAYAYQHQLGHIVTGVAQTDYSGYPDCRENTLKALELAINLGMDARLQLHAPLMFLSKADTVRLAQSVGAFDALAHSHTCYEGQVPPCGQCAACQLRARGFAEAGVADPLLVRTGG

SEQ ID NO: 39876 - protein, 225 aa, Microvirgula sp.; identical to SEQ ID NO: 39875
  misc_feature (1)..(225): tr|A0A329B2H8|A0A329B2H8_9NEIS 7-cyano-7-deazaguanine s ynthase OS=Microvirgula sp. AG722 OX=2183901 GN=queC PE =3 SV=1

SEQ ID NO: 39877 - protein, 226 aa, Midichloria mitochondrii
  misc_feature (1)..(226): tr|F7XV14|F7XV14_MIDMI 7-cyano-7-deazaguanine synthase OS=Midichloria mitochondrii (strain IricVA) OX=696127 G N=queC PE=3 SV=1
MPRKAIVLLSGGLDSSTVLAVAKSEGYECCCLSFRYGQKHLFEIESAKNLAKIYDAAVHKIIDIDLTVFGGSSLTSALEVPKHTDLNHLKSGQIPPTYVHGRNTIFLSYAFAYAEALNIPNLFIGCNAIDYSNYPDCRPEYISAYERMINLAKARIQREIKIYAPLLHLSKSEIIILGRSLGVDYSLTTSCYNPYESGRPCGQCDACLLRIEGFTKAGLSDPLHYI

SEQ ID NO: 39878 - protein, 239 aa, Minwuia thermotolerans
  misc_feature (1)..(239): tr|A0A2M9G6I7|A0A2M9G6I7_9PROT 7-cyano-7-deazaguanine s ynthase OS=Minwuia thermotolerans OX=2056226 GN=queC PE =3 SV=1
MKTDNDEGALVLFSGGQDSAVCLAWALARFGRVETVGFDYGQRHRAELDVRRDVRNGVAVAMPEGERRLGEDHMVDLGVLGEISETALTRESGIALRDDGLPTTFVPGRNLIFFSFAAAVAYRRDLRRIVGGMCETDYSGYPDCRDDTIKAMQLALNLGMDRRFVLETPLMWLTKAGTWRLAEDLGGRMLVEVVRERTLSCYLGDAETRHDWGMGCGGCPACDLRRRGYREYRGAADRA

SEQ ID NO: 39879 - protein, 254 aa, Mitsuaria sp.
  misc_feature (1)..(254): tr|A0A1A9HQ06|A0A1A9HQ06_9BURK 7-cyano-7-deazaguanine s ynthase OS=Mitsuaria sp. 7 OX=1658665 GN=queC PE=3 SV=1
MSDAATAPIPAVHASCRKALVLFSGGQDSTACLAWALERFAEVETLGFDYGQRHRVELDCRQTVRAQIAGQFPQWAAKLGEDHLLDLSLLGQISDTALTQERAIELQANGLPNTFVPGRNLLFLTFAATLAYRRGASVLVGGMCETDFSGYPDCRDNTLKALQVALSLGLDTPMTLETPLMFLTKAQTWALTESLGGEAFNALIIEHTHTCYLGERKTRHPWGWGCGHCPACELRAKGWNEFQQAKTAGKAVAP

SEQ ID NO: 39880 - protein, 254 aa, Mitsuaria sp.
  misc_feature (1)..(254): tr|A0A1I6KVF0|A0A1I6KVF0_9BURK 7-cyano-7-deazaguanine s ynthase OS=Mitsuaria sp. PDC51 OX=1881035 GN=queC PE=3 SV=1
MSDAAPAPIPAVHASRRKALVLFSGGQDSTACLAWALDRFAEVETLGFDYGQRHRIELDCRRTVRAEIAAQFPHWAPKLGEDHLLDLGLLGQISDTALTQEREIELQANGLPNTFVPGRNLLFLTFAATLAYRRGASVLVGGMCETDFSGYPDCRDNTLKALQVALSLGLDTPMTLDTPLMFLTKAQTWAMTEALGGTALNDLIVEHTHTCYLGERTTRHAWGWGCGHCPACELRARGWDEFQRARSGGAAVSP

SEQ ID NO: 39881 - protein, 227 aa, Mitsuokella jalaludinii
  misc_feature (1)..(227): tr|A0A173XZV0|A0A173XZV0_9FIRM 7-cyano-7-deazaguanine s ynthase OS=Mitsuokella jalaludinii OX=187979 GN=queC PE =3 SV=1
MEKAVVLLSGGLDSCTCMAVAKSKGYDVYPISFNYHQRHSIELEGAKKIAAYYGVKKHLIIETNMEAIGGSALTDEKIEVPEGDVNRHSVPPTYVPARNLIFLSYAMGYAEVLGATHVYIGVNSVDYSGYPDCRPEFIQKFQALANYATTATAVEGRKITIETPLQDLSKKDIVLLGTKLGAPFQFTHSCYKGGEKACGICDSCKLRLRGFAEAGVEDPIDYETREI

SEQ ID NO: 39882 - protein, 227 aa, Mitsuokella multacida
  misc_feature (1)..(227): tr|A0A414NUN5|A0A414NUN5_9FIRM 7-cyano-7-deazaguanine s ynthase OS=Mitsuokella multacida OX=52226 GN=queC PE=3 SV=1
MEKAVVLLSGGLDSCTCMAVAKSKGYEVYPISFNYHQRHSIELEGAKKIASYYGVKKHLIIETNMEAIGGSALTDEKIEVPEGDVNRHSVPPTYVPARNLIFLSYAMGYAEVLGATHVYIGVNSVDYSGYPDCRPEFIEKFQALADYATTATAVKGQKITIETPLQDLSKKDIVLLGTKLGAPFQFTHSCYKGGEKACGICDSCKLRLRGFTEAGVEDPIAYETREV

SEQ ID NO: 39883 - protein, 210 aa, Mitsuokella multacida
  misc_feature (1)..(210): tr|C9KJ40|C9KJ40_9FIRM 7-cyano-7-deazaguanine synthase OS=Mitsuokella multacida DSM 20544 OX=500635 GN=queC PE =3 SV=1
MAVAKSKGYDVYPISFNYHQRHSIELEGAKKIASYYGVKKHLIIETNMEAIGGSALTDEKIEVPEGDVNRHSVPPTYVPARNLIFLSYAMGYAEVLGATHVYIGVNSVDYSGYPDCRPEFIEKFQALADYATTATAVKGQKITIETPLQDLSKKDIVLLGTKLGAPFQFTHSCYKGGEKACGICDSCKLRLRGFAEAGVEDPIAYETREV

SEQ ID NO: 39884 - protein, 227 aa, Mitsuokella sp.
  misc_feature (1)..(227): tr|A0A412L2Q9|A0A412L2Q9_9FIRM 7-cyano-7-deazaguanine s ynthase OS=Mitsuokella sp. AF21-1AC OX=2292235 GN=queC PE=3 SV=1
MEKAVVLLSGGLDSCTCMAVAKSKGYEVYPISFNYHQRHSIELEGAKKIAAFYGVKKHLIIETNMEAIGGSALTDEHIEVPEGDVNRTSVPPTYVPARNLIFLSYAMGYAEVLGATHVYIGVNSVDYSGYPDCRPEFIQKFQALADYATTATAVKGQHITIETPLQDLSKKDIVLLGTKLGAPFQFTHSCYKGGEKACGVCDSCKLRLRGFAEAGVEDPVPYETRDI

SEQ ID NO: 39885 - protein, 227 aa, Mitsuokella sp.
  misc_feature (1)..(227): tr|U2UJB6|U2UJB6_9FIRM 7-cyano-7-deazaguanine synthase OS=Mitsuokella sp. oral taxon 131 str. W9106 OX=1321781 GN=queC PE=3 SV=1
MEKAVVLLSGGLDSCTCMAVAKSKGYALYPISFNYHQRHGIELEGAKKIADFYGVEKHLIIETNMEAIGGSALTDSRIKVPDGDVGRGDVPPTYVPARNLIFLSYAVGYAEVLGASHVYIGVNSVDYSGYPDCRPAFIEKFQALSDYATTATAVKGRKITVETPLQNRSKKDIVLLATKLGAPLQFTHSCYRGGEKACGVCDSCKLRLRGFGEAGVKDPIAYETREA

SEQ ID NO: 39886 - protein, 231 aa, Mixta gaviniae
  misc_feature (1)..(231): tr|A0A1X1E2L7|A0A1X1E2L7_9GAMM 7-cyano-7-deazaguanine s ynthase OS=Mixta gaviniae OX=665914 GN=queC PE=3 SV=1
MKRAVVVFSGGQDSTTCLIQALAQYDEVHCVTFDYGQRHRQEIEVARTLSARLGARAHKVLDVTLLNELAISSLTRDNIPVPEYDANATGLPSTFVPGRNILFLTLASIYAYQVEAEAVITGVCETDFSGYPDCRDEFVKALNHAVELGMAKAVRFETPLMWLNKAETWALADYWQQLPLVRQQTLTCYNGIQGDGCGECAACHLRAKGLKNYQDDMAGVMQSMKQKTGLR

SEQ ID NO: 39887 - protein, 231 aa, Mixta sp.
  misc_feature (1)..(231): tr|A0A506V6K9|A0A506V6K9_9GAMM 7-cyano-7-deazaguanine s ynthase OS=Mixta sp. BIT-26 OX=2562439 GN=queC PE=3 SV= 1
MKRAVVVFSGGQDSTTCLIQALAQYDEVHCVTFDYGQRHRQEIEVARKLAVQLGARAHKVLDVTLLNELAISSLTRDNIPVPSFDAEAGGLPSTFVPGRNILFLTLAAVYAYQVAAEAVITGVCETDFSGYPDCRDEFVKALNHAVELGMARPVRFETPLMWLNKAETWALADYWQQLPLVRQQTLTCYNGIQGDGCGECAACHLRANGLKNYQDDAAAVMQSMKRKTGLR

SEQ ID NO: 39888 - protein, 231 aa, Mixta theicola
  misc_feature (1)..(231): tr|A0A2K1QC40|A0A2K1QC40_9GAMM 7-cyano-7-deazaguanine s ynthase OS=Mixta theicola OX=1458355 GN=queC PE=3 SV=1
MKRAVVVFSGGQDSTTCLIQALAQYDEVHCVTFDYGQRHRQEIDVARELAIRLGARAHKVLDVTLLNELAISSLTRDNIPVPQYDANASGLPSTFVPGRNILFLTLASIYAYQVEAEAVITGVCETDFSGYPDCRDEFVKALNHAVELGMARPVRFETPLMWLNKAETWALADYWQQLPLVRQDTLTCYNGIKGDGCGECAACHLRANGLKNYQEDSAAVMHSMQQKTGLR

SEQ ID NO: 39889 - protein, 237 aa, Mizugakiibacter sediminis
  misc_feature (1)..(237): tr|A0A0K8QSU4|A0A0K8QSU4_9GAMM 7-cyano-7-deazaguanine s ynthase OS=Mizugakiibacter sediminis OX=1475481 GN=queC PE=3 SV=1
MTFDVLLQPEHFRMTTPRNAVVLVSGGMDSAVTLAIARERGFACHALSVAYGQRHTSELDAAARIAQALGALAHKTVQVDLRSIGGSALTDDIAVPEQGGAGIPVTYVPARNTIMLAIALGWAEVLGAADIFCGVNAVDYSGYPDCRPAFIEAFERLANLATKAGVEGAQIRVHAPLLAMSKAAIVREGVRLGVDFAATVSCYQADADGRACSRCDACRLRAQGFREAGVADPTRYR

SEQ ID NO: 39890 - protein, 705 aa, Mizugakiibacter sediminis
  misc_feature (1)..(705): tr|A0A0K8QRA3|A0A0K8QRA3_9GAMM Uncharacterized protein OS=Mizugakiibacter sediminis OX=1475481 GN=MBSD_0469 PE =4 SV=1
MQDKRYVLCGNASAKGISEDPSRDLRLRLSGKAGHGNITLRIEDVHTKMFRGVPPLFHDLLEIATYVYSADQVVRRGADDVDSFGDGWRRDLHFVVPVRNPDFWNSAEVQETLCSTLGFLSDDQYEFDFVKLDQDHQFQEYLEFNDTQQMYGMPEQVVMFSGGLDSLAGAIDEVVNQKRRVLLVTHKSTSKLNKRHRVLEEMLAAKAGDNVPHRITVRVHKTKELNHEYTQRSRSFLYVSIGATIARMLNLKSVRFYENGVISLNLPVCAQVVGGRATRTTHPRVMKGFQDLLSLVAGEPFTVENPYIWKTKADVVKIITDAGCHDLIKHSMTCTHTWEMTNQHTHCGGCSQCIDRRFAILAAKADQHDPVEHYKVDVFTQSRDKGEDKIMAAAYLERANQVKNLTDVTQFVSSYPDVGRVLKYLNYSSTGQAAQRVFDLYKRHADEVTGALDELGRRYFTQIRERSLPGDCLLRTVYESASVNSVPAVISMEKQPENFFRKRGAVWETRFQGRNTICLLNVDKGAEYINLLLAFPDREMSVYEIAVGNAVNTIEQPAGSGIAPEDIEDGYQVTQGIPLGDAGDVADRRALNECKQQARELFEEMEEARERGDHARIEEIEKEMAALVKYIEGGKGLGGRQRRVGDKRKNVRDAFRNAVDRAIRQIEKYDKPLAEHLKASIKYGNEVVYRPDMAITWEVRPIVNG

SEQ ID NO: 39891 - protein, 229 aa, Mobilisporobacter senegalensis
  misc_feature (1)..(229): tr|A0A3N1X340|A0A3N1X340_9FIRM 7-cyano-7-deazaguanine s ynthase OS=Mobilisporobacter senegalensis OX=1329262 GN =queC PE=3 SV=1
MKALVLFSGGIDSSTCLAMAINSFGNNNVICLTISYGQKHKKELEAAQNIVEYYGVDNIIIDLSTIFIMSNCSLLSHSDQEIPNTSYMEQLNSINGQPVSTYVPFRNGTFLSIAASIAISNDCDFIYYGAHMDDAAGNAYPDCSISFYKSIGSAIYEGSGQKLKVIAPFISLNKTQIVAHGITLGVPYNLTWSCYNGSKIPCGKCGTCLDRQKAFENNHLTDPLIEERI

SEQ ID NO: 39892 - protein, 232 aa, Moellerella wisconsensis
  misc_feature (1)..(232): tr|A0A0H2QT16|A0A0H2QT16_9GAMM 7-cyano-7-deazaguanine s ynthase OS=Moellerella wisconsensis OX=158849 GN=queC P E=3 SV=1
MKRAVVVFSGGQDSTTCLIQALKNYDDVHCVTFDYGQRHRAEIQVAQRLSKNLGASAHKTLDVTLLNELAISSLTRDNIPVPDFSESEKSAIPSTFVPGRNILFLTLAAIYAYQVQAEAVITGVCETDFSGYPDCRNDFVKALNTAVSAGLARDIRFETPLMWLDKAETWALADYYEHLETIRQDTLTCYNGIQGDGCGECAACHLRANGLERYQDNKSAIMQSMKQKVGLA

SEQ ID NO: 39893 - protein, 232 aa, Moellerella wisconsensis; identical to SEQ ID NO: 39892
  misc_feature (1)..(232): tr|A0A0N0IBD1|A0A0N0IBD1_9GAMM 7-cyano-7-deazaguanine s ynthase OS=Moellerella wisconsensis ATCC 35017 OX=13542 67 GN=queC PE=3 SV=1

SEQ ID NO: 39894 - protein, 365 aa, Mogibacterium sp.
  misc_feature (1)..(365): tr|J6HKI5|J6HKI5_9FIRM Queuosine biosynthesis protein Q ueC-like protein OS=Mogibacterium sp. CM50 OX=936375 GN =HMPREF1152_1732 PE=4 SV=1
MKEIRYCRRCIMNDKADPYITFDESGICNYCTEALTHINTDVYFPNEEGGIRLNRMIEKIKSENADKKYDCIMGISGGLDSAYLAYLGYKWGLRILAVHIDDGYDTEISKENIKKLCDAANIEMRTITPDAEQFNALTLAYMKAGVPDVAVPQDNILFAFLYDTVEHEGIKYFLSGGNFALECVLQKGNGYSAMDVTNIKDIHKRFGTKSINRLKFITSYKKYMRIKRGSVITLRPLDLVDYNRERAFKELAEFCDFKYYGSKHLENVLTAFIQLYWLPKKFGVDKRSSHLSSMIVSGQMTREEAMAEMQKPAYDKELMDEYISIIKKNLGIDDEEFDEIMSSPTHQHTEYRTEKFAPFIRKLLR

SEQ ID NO: 39895 - protein, 227 aa, Monoglobus pectinilyticus
  misc_feature (1)..(227): tr|A0A2K9P4M7|A0A2K9P4M7_9FIRM 7-cyano-7-deazaguanine s ynthase OS=Monoglobus pectinilyticus OX=1981510 GN=queC PE=3 SV=1
MDNKKALVLFSGGVDSTTALAMAVKKYGADKTAALSISYGQKHSKEIEAARKIADYYGTELLELDLSKMFEYSSCSLLKQNEDADIPKESYEEQLKDTDGEPVSTYVPFRNGLFLASAASIALSLEAEIIYYGAHSDDAAGSAYPDCSKVFNDAMNTAIYEGSGHKIKILAPFVEWNKKQVVAEGVKLGVPYEMTWSCYEGGDEPCGECGTCRDRREAFLANGLDIK

SEQ ID NO: 39896 - protein, 228 aa, Moorea bouillonii
  misc_feature (1)..(228): tr|A0A1U7N8E6|A0A1U7N8E6_9CYAN 7-cyano-7-deazaguanine s ynthase OS=Moorea bouillonii PNG OX=568701 GN=queC PE=3 SV=1
MSKKVIVLLSGGLDSATVLYQSVGDGYECYALSFDYQQRHRRELKSAYAIASAAGVKEHQVVRFDLRQWGGSALTDDNLDLPKERSLEQMSQEIPITYVPARNTIFLSFGLSYAEAIGAEAVYVGVNALDYSGYPDCRPDYIQAMQTAFDLGTKQGREGNGIKIVSPLIDLKKTEIIQLGNQLGVPWEKTWSCYTGNDLACGVCDACRLRLAAFAELGLDDPLTYQEG

SEQ ID NO: 39897 - protein, 228 aa, Moorea producens
  misc_feature (1)..(228): tr|A0A1D8U3W4|A0A1D8U3W4_9CYAN 7-cyano-7-deazaguanine s ynthase OS=Moorea producens PAL-8-15-08-1 OX=1458985 GN =queC PE=3 SV=1
MSKKVIVLLSGGLDSATVLYQSVGDGYECYALSFDYQQRHRRELKSAYAIASAAGVKEHQVVRFDLRQWGGSALTDDNLDLPKERSLEQMSQEIPITYVPARNTIFLSFGLSYAEAIGAEGVYVGVNALDYSGYPDCRPDYIQAMQTAFDLGTKQGREGNGIKIVTPLIDLKKTEIIQLGNQLGVPWEKTWSCYTGNDLACGVCDACRLRLAAFAELGLDDPLTYQEG

SEQ ID NO: 39898 - protein, 228 aa, Moorea producens
  misc_feature (1)..(228): tr|A0A1D9G7U3|A0A1D9G7U3_9CYAN 7-cyano-7-deazaguanine s ynthase OS=Moorea producens JHB OX=1454205 GN=queC PE=3 SV=1
MSKKVIVLLSGGLDSATVLYQSVGDGYECYALSFDYQQRHRRELKSAYAIATAAGVKEHQVVRFDLRQWGGSALTDDNLDLPKERSLEQMSQEIPITYVPARNTIFLSFGLSYAEAIGAEGVYVGVNALDYSGYPDCRPDYIKAMQTAFDLGTKQGREGNGIKIFTPLIDLKKTEIIQLGNQLGVPWEKTWSCYTGNDLACGVCDACRLRLAAFAELGLDDPLPYQEG

SEQ ID NO: 39899 - protein, 228 aa, Moorella glycerini
  misc_feature (1)..(228): tr|A0A0C7NEV4|A0A0C7NEV4_9THEO 7-cyano-7-deazaguanine s ynthase OS=Moorella glycerini OX=55779 GN=queC PE=3 SV= 1
MEKVIVVLSGGLDSTTCMAIARAAGKEIYPLTFAYGQKHTVELEAARQVASYYGVSGRHKIINLEGLLSGSALTDADKEIPTGRSISEIGRVIPSTYVPARNIVFLALALAQAEPLDARAIYLGVNALDFSGYPDCRPEFISAFQEVINKGTAAGVEGHGIRIETPLIHLTKAEIIKTGIKLGAPYHLSYSCYQGSVPSCGTCDACLLRLKGFQEAGVTDPIPYRNKG

SEQ ID NO: 39900 - protein, 293 aa, Moorella humiferrea
  misc_feature (1)..(293): tr|A0A2T0AS89|A0A2T0AS89_9THEO NH(3)-dependent NAD(+) s ynthetase OS=Moorella humiferrea OX=676965 GN=nadE_1 PE =4 SV=1
MANADHLNKISAGVVKVMLSPLLQEKLDNLLKKIEEMEGVLIAFSGGVDSTLLLKAATMTSTRVMAVTASSPTYPEAEIAAAVQLARDLGVQHQIIKTNEMEDPNFTANPTERCYHCKRELFATLRRLASEHALKTIVDGANADDEDDFRPGRRAAREFGVRSPLQEVGLTKDEIRQLARYLHLPNWDKPSMACLSSRIPYGQAITPEKLRQIAAAEDFLCRLGLKEVRVRHHDTIARIEVNPAAFALLIDAAIRVKIVKYFQDLGFTYIVLDLEGFRSGSMNAVLKQEDLHR

SEQ ID NO: 39901 - protein, 271 aa, Moorella thermoacetica
  misc_feature (1)..(271): tr|A0A1J5NTK3|A0A1J5NTK3_MOOTH GMP synthase OS=Moorella thermoacetica OX=1525 GN=guaA_1 PE=4 SV=1
MLPADLTAKLEHLKKNLTELESILVAYSGGVDSSLLLKVASTTPVKVLAVTAASPTYPQAEIEAATRLARELGVQHLIINTNEMDNPEFCANPPERCYHCKKELFATLLELAREHGIKAIVDGANADDRSDFRPGSQAAREFGVKSPLQEAGLTKDDIRQLARHLGLPNWDKPSMACLSSRIPYGQAITTEKLKQVAAAEDYLRQLGIKEIRVRHHGTIARIEVNPAAFALLIDSKVRANLINYFHELGFTYITMDLEGFRSGSMNAVLDK

SEQ ID NO: 39902 - protein, 271 aa, Moorella thermoacetica
  misc_feature (1)..(271): tr|A0A1J5JQH1|A0A1J5JQH1_MOOTH GMP synthase OS=Moorella thermoacetica OX=1525 GN=guaA_1 PE=4 SV=1
MLPADLTAKLEQLKKNLTELESILVAYSGGVDSSLLLKVASTTPVKVLAVTAASPTYPQAEIEAATRLARELGVQHMVINTNEMDNPEFFANPPERCYHCKKELFATLQELAREHGLKAIVDGANADDRSDFRPGSQAAREYGVKSPLQEAGLTKDDIRQLARHLGLPNWDKPSMACLSSRIPYGQAITAEKLKQVAAAEDYLRQFGIKEIRVRHHGTIARIEVNPSAFALLIDSKVRANLVNYFHTLGFTYITMDLEGFRSGSMNAVLNK

SEQ ID NO: 39903 - protein, 247 aa, Moraxella atlantae
  misc_feature (1)..(247): tr|A0A1B8QEV1|A0A1B8QEV1_9GAMM 7-cyano-7-deazaguanine s ynthase OS=Moraxella atlantae OX=34059 GN=queC PE=3 SV= 1
MPSQTSSTFTESGVSSNNAVVLLSGGLDSVTCLYWAKARFDNVTAVSFDYGQRHNSELAAAKRIAKHAQVAHRIINIDLAQLGGSALTDPSMQVPTGHAHDFAEQHDDNAIPSTYVPARNTIFLAYALAVAEVTQARTIVIGVNAVDYSGYPDCRPDYIAAFNHMANLATKAGRLGQTLTIATPLLDLSKADIIRLGTSLGVDYSLTVSCYQADDAGRACGVCDSCVLRQQGFLQAEIDDPTRYRVG

SEQ ID NO: 39904 - protein, 247 aa, Moraxella atlantae
  misc_feature (1)..(247): tr|A0A378Q8B4|A0A378Q8B4_9GAMM 7-cyano-7-deazaguanine s ynthase OS=Moraxella atlantae OX=34059 GN=queC PE=3 SV= 1
MPSQTSSTFTESGVSSNNAVVLLSGGLDSVTCLYWAKVRFDNVTAVSFDYGQRHNSELAAAKRIAKHAQVAHRIINIDLAQLGGSALTDPSMQVPTGHAHDFAEQHDDNAIPSTYVPARNTIFLAYALAVAEVTQARTIVIGVNAVDYSGYPDCRPDYIAAFNHMANLATKAGRLGQTLTIATPLLDLSKADIIRLGTSLGVDYSLTVSCYQADDAGRACGVCDSCVLRQQGFLQAEIDDPTRYRVG

SEQ ID NO: 39905 - protein, 249 aa, Moraxella bovis
  misc_feature (1)..(249): tr|A0A2Z4R831|A0A2Z4R831_MORBO 7-cyano-7-deazaguanine s ynthase OS=Moraxella bovis OX=476 GN=queC PE=3 SV=1
MTTFCPDNNNLNIPHSDDFARQKAVVLLSGGLDSTTCLYWAKAVFKEITAISFRYGQRHSSELAFSSAIAQTLGVSHRIIDIDIAQLGGSALTDTSIDVPDYQADSDAVPVTYVPARNTIFLSYALAVAEVTEACAIIIGVSSVDFSGYPDCRDDYIRAFETMANLATVAGRAGRRLSIIAPLQHLSKAETLTLGLSLGVDYAQTVSCYRADSDGRACGECDSCVLRHQGFVQAGVPDPTRYQNKPTQG

SEQ ID NO: 39906 - protein, 249 aa, Moraxella bovis
  misc_feature (1)..(249): tr|A0A378Q105|A0A378Q105_MORBO 7-cyano-7-deazaguanine s ynthase OS=Moraxella bovis OX=476 GN=queC PE=3 SV=1
MTTFYPDNNNLNIPHSDDFAHQKAAVLLSGGLDSTTCLYWAKAVFKEITAISFRYGQRHSSELAFSSAIAQTLGVSHRIIDIDIAQLGGSALTDTSIDVPDYQADSDAVPVTYVPARNTIFLSYALAVAEVTEACAIIIGVSSVDFSGYPDCRDDYIRAFETMANLATVAGRAGRCLSIIAPLQHLSKAETLTLGLSLGVDYAQTVSCYRADSDGRACGECDSCVLRHQGFVQAGVPDPTRYQNKPTQG

SEQ ID NO: 39907 - protein, 231 aa, Moraxella bovoculi
  misc_feature (1)..(231): tr|A0A0U2B231|A0A0U2B231_9GAMM 7-cyano-7-deazaguanine s ynthase OS=Moraxella bovoculi OX=386891 GN=queC PE=3 SV =1
MNSDFKNHHAIVLFSGGLDSTTCLYWARANFKDITAISFRYGQRHSSELIAATKITKQLGVSHRIIDIDIAQLGGSALTDQNIDVPNYDAASDAVPVTYVPARNTIFLSYALAAAEVMQANYIVIGVSSVDFSGYPDCRPDFIEAFENLANLATVAGRAGNRLSVVAPLQNLSKAQTLELGLSLGVDYGKTVSCYQADSDGRACGVCDSCALRRQGFIDAGVPDPTCYQNA

SEQ ID NO: 39908 - protein, 231 aa, Moraxella bovoculi
  misc_feature (1)..(231): tr|A0A066UF17|A0A066UF17_9GAMM 7-cyano-7-deazaguanine s ynthase OS=Moraxella bovoculi 237 OX=743974 GN=queC PE= 3 SV=1
MNSDFKNHHAIVLFSGGLDSTTCLYWARANFKDITAISFRYGQRHSSELIAATKITKQLGVSHRIIDIDIAQLGGSALTDQNIDVPNYDAASDAVPATYVPARNTIFLSYALAAAEVMQANYIVIGVSSVDFSGYPDCRPDFIEAFENLANLATVAGRAGNRLSVVAPLQNLSKAQTLELGLSLGVDYGETVSCYQADSDGRACGVCDSCALRRQGFIDAGVPDPTRYQNA

SEQ ID NO: 39909 - protein, 232 aa, Moraxella canis
  misc_feature (1)..(232): tr|A0A1S9ZIB1|A0A1S9ZIB1_9GAMM 7-cyano-7-deazaguanine s ynthase OS=Moraxella canis OX=90239 GN=queC PE=3 SV=1
MNNNQNAVVLFSGGLDSTTCLYWAKSQFNTVTAVSFRYGQRHSSELDAAQNIAKKLGIRHHVIDIDIAKLGGSALTDMTLSVPDHDESIIYNDDDQVAPITYVPARNTIFLSYALAVAEVTQASAIIIGVSSVDYSGYPDCRPDYIAAFETMANLATVAGRQGNHLSIIAPLQHLSKAETLKLGVSLGVDYSLTVSCYQADESGRACGHCDSCHLRKQGFMDAQIADPTRYQ

SEQ ID NO: 39910 - protein, 249 aa, Moraxella caprae
  misc_feature (1)..(249): tr|A0A378R541|A0A378R541_9GAMM 7-cyano-7-deazaguanine s ynthase OS=Moraxella caprae OX=90240 GN=queC PE=3 SV=1
MTTFCSDNNSLNIPHSDDFAHQKAVVLLSGGLDSTTCLYWAKAVFKEITAISFRYGQRHSSELAFSSAIAQTLGVSHRIIDIDIAQLGGSALTDTSIDVPDYQADSDAVPVTYVPARNTIFLSYALAVAEVTEACAIIIGVSSVDFSGYPDCRDDYIRAFETMANLATVAGRAGRRLSIIAPLQHLSKAETLTLGLSLGVDYAQTVSCYRADSDGRACGECDSCVLRHQGFVQAGVPDPTRYQNKPTQG

SEQ ID NO: 39911 - protein, 232 aa, Moraxella catarrhalis
  misc_feature (1)..(232): tr|A0A198XTM5|A0A198XTM5_MORCA 7-cyano-7-deazaguanine s ynthase OS=Moraxella catarrhalis OX=480 GN=queC PE=3 SV =1
MNNNQNAVVLFSGGLDSTTCLYWAKSQFKTVTAVSFCYGQRHSSELNAAQNITKKLSVRHHVIDIDIAKLGGSALTDMNLSVPNHDESVTYSDADRVAPITYVPARNTIFLSYALAVAEVTQASTIIIGVSSVDYSGYPDCRPDYIAAFETMANLATVSGRQGNHLSIIAPLQNLSKADTLKLGISLGVDYSLTVSCYQADALGRACGHCDSCHLRKQGFMDAKIADPTRYQ

SEQ ID NO: 39912 - protein, 232 aa, Moraxella catarrhalis
  misc_feature (1)..(232): tr|A0A198WZM3|A0A198WZM3_MORCA 7-cyano-7-deazaguanine s ynthase OS=Moraxella catarrhalis OX=480 GN=queC PE=3 SV =1
MNNNQNAVVLFSGGLDSTTCLYWAKSQFKTVTAVSFCYGQRHSSELNAAQNITKKLSVRHHVIDIDIAKLGGSALTDMNLSVPNHDESVTYSDADRVAPITYVPARNTIFLSYALAVAEVTQASAIIIGVSSVDYSGYPDCRPDYIAAFETMANLATVSGRQGNHLSIIAPLQNLSKADTLKLGISLGVDYSLTVSCYQADALGRACGHCDSCHLRRQGFMDAKIADPTRYQ

SEQ ID NO: 39913 - protein, 240 aa, Moraxella caviae
  misc_feature (1)..(240): tr|A0A1T0A7F4|A0A1T0A7F4_9GAMM 7-cyano-7-deazaguanine s ynthase OS=Moraxella caviae OX=34060 GN=queC PE=3 SV=1
MTTSQIHSTNQPTDTKNARAVVLFSGGLDSTTCLYWARANFADVTAISFRYGQRHSSELDAAGRIAKSLGVAHRVIDIDIAQLGGSALTDLSIDVPPADTAQDGVPITYVPARNTIFLSYALAAAEVTGATYIVIGVSSVDFSGYPDCRPDFIAAFETMANLATVAGRAGNRLSITAPLQHLSKAETLQLGLSLGVDYAATVSCYQADSEGRACGVCDSCTLRRQGFLGAGVPDPTRYQN

SEQ ID NO: 39914 - protein, 239 aa, Moraxella cuniculi
  misc_feature (1)..(239): tr|A0A448GXC2|A0A448GXC2_9GAMM 7-cyano-7-deazaguanine s ynthase OS=Moraxella cuniculi OX=34061 GN=queC PE=3 SV= 1
MSNHHQNAVVLFSGGLDSTTCLYWAKSQFAHITAISFRYGQRHSSELIAAEKISKILGIAHHIIDIDIAKLGGSALTDPNLSVPDYDQSVIYDDSQRVAPITYVPARNTIFLSYALAVAEVSKASAIVIGVSSVDYSGYPDCRPDYIAAFEQLANLATVAGRQGHRLSIIAPLQHLSKAQTLKLGLSLGVDYAQTVSCYQADGDGRACGVCDSCHLRKQGFADAGIIDPTHYQHAPKSQ

SEQ ID NO: 39915 - protein, 239 aa, Moraxella cuniculi; identical to SEQ ID NO: 39914
  misc_feature (1)..(239): tr|A0A1N7FUL2|A0A1N7FUL2_9GAMM 7-cyano-7-deazaguanine s ynthase OS=Moraxella cuniculi DSM 21768 OX=1122245 GN=q ueC PE=3 SV=1

SEQ ID NO: 39916 - protein, 438 aa, Moraxella equi
  misc_feature (1)..(438): tr|A0A378QNL6|A0A378QNL6_9GAMM Queuosine biosynthesis p rotein QueC OS=Moraxella equi OX=60442 GN=NCTC11012_005 25 PE=4 SV=1
MTQLVFHHDIEQLKNLPNGIMPVRLYEMGDKNLQIAQIGNKVLDCVERLGVELNSQVMDFLTIAMAVTAADTFVLRKDTANGWYRSFSITLPLCQPDIWQANKTHLEQILHFLSGDIWQFNFQAGGQLPPQPYKLNRRAKLVDLRNKDSVCLFSGGLDSAIGAIDLLEQGYSPVLVSHSYKGDKSRQQMIVEKFNQSRYANQFSQFNAIAQPHLNNGGTTEITMRTRSLNFLAFAVISAYALQEVVQEAIDIFVPENGVISINAPLTPRRVGTLSTRTTHPYFIQELQKLFTAVNIPFILKNPYQFKTKGQMIAECANLPLLRQIIPDTVSCSHWKRKNQQCGVCVPCLIRRASLYYADITNDADYEFNNIRQILTHQDRRDDLFALMGAIGQKNHRNMNQWVLQSGSLPIQQLNQFSDVFMNGLNEVEQLLIANQVL

SEQ ID NO: 39917 - protein, 249 aa, Moraxella equi
  misc_feature (1)..(249): tr|A0A378QMZ2|A0A378QMZ2_9GAMM 7-cyano-7-deazaguanine s ynthase OS=Moraxella equi OX=60442 GN=queC PE=3 SV=1
MTTFCPDNNNLNIPHSDDFAHQKAVVLLSGGLDSTTCLYWAKAVFKEITAISFRYGQRHSSELAFSSAIAQTLGVSHRIIDIDIAQLGGSALTDTSIDVPDYQADSDAVPVTYVPARNTIFLSYALAVAEVTEACAIVIGVSSVDFSGYPDCRDDYIRAFETMANLATVAGRAGRRLSIIAPLQHLSKAETLTLGLSLGVDYAQTVSCYRADSDGRACGECDSCVLRHQGFVQAGVPDPTRYQNKPTQG

SEQ ID NO: 39918 - protein, 249 aa, Moraxella lacunata
  misc_feature (1)..(249): tr|A0A378T4A2|A0A378T4A2_MORLA 7-cyano-7-deazaguanine s ynthase OS=Moraxella lacunata OX=477 GN=queC PE=3 SV=1
MTTFCPDSNNLNIPHSDDFAHQKAVVLLSGGLDSTTCLYWAKAVFKEITAISFRYGQRHSSELAFSSAIAQTLGVSHRIIDIDIAQLGGSALTDTSIDVPDYQADSDAVPVTYVPARNTIFLSYALAVAEVTEACAIIIGVSSVDFSGYPDCRDDYIRAFETMANLATVAGRAGRRLSIIAPLQYLSKAETLTLGLSLGVDYAQTVSCYRADSDGRACGECDSCVLRHQGFVQAGVPDPTRYQNKPTQG

SEQ ID NO: 39919 - protein, 251 aa, Moraxella lacunata
  misc_feature (1)..(251): tr|A0A1V4GZI3|A0A1V4GZI3_MORLA 7-cyano-7-deazaguanine s ynthase OS=Moraxella lacunata OX=477 GN=queC PE=3 SV=1
MTFCPYDPKNNDLNIPHSDDFASQKAVVLFSGGLDSTTCLYWAKAVFKEVTAISFCYGQRHLSELAFSSAIAQMLGVSHRIIDIDIAQLGGSALTDSSIEVPDHQADSDAVPVTYVPARNTIFLSYALAVAEVTEACAIIIGVSSVDFSGYPDCRDDYIRAFETMANLATVAGRAGRRLSIIAPLQYLSKAQTLKLGLSLGVDYAQTVSCYRADSDGRACGECDSCVLRHQGFVQAGISDPTRYQDKTGIN

SEQ ID NO: 39920 - protein, 255 aa, Moraxella lincolnii
  misc_feature (1)..(255): tr|A0A1T0CI42|A0A1T0CI42_9GAMM 7-cyano-7-deazaguanine s ynthase OS=Moraxella lincolnii OX=90241 GN=queC PE=3 SV =1
MNSVTVFKNPASGFPQHGNAVVLLSGGLDSVTCLYWAKANFQRVTAVSFHYGQRHDSELQFAIKNAKKAGVAHRIIDIDIAQLGGSSLTDHALTVPMGDVNKFDHQQINNDAIPNTYVPARNTIFLSYALAVAEVTDATHIVIGVSSVDYSGYPDCRPEYIQAFETMANLATKAGVMGNRLHVDTPLQTLSKADTIALGVSLGVDYADTVSCYQADANGLACGHCDSCVLRRQGFKQAKITDPTRYQKPSTLSTL

SEQ ID NO: 39921 - protein, 247 aa, Moraxella macacae
  misc_feature (1)..(247): tr|L2F777|L2F777_9GAMM 7-cyano-7-deazaguanine synthase OS=Moraxella macacae 0408225 OX=1230338 GN=queC PE=3 SV =1
MNKPQNFIPTTAKPNNNQNAVVLLSGGLDSVTCLYWAKANFNHVTAVSFDYGQRHNSELNAAKNIAKIASVDHRVIGIDLAQLGGSALTDQNLHIPNADKTADFSNHQNNANIPITYVPARNTIFLSYALAVAEVTKANTIVIGVNAVDYSGYPDCRPEYIDAFAKMANLATKAGVMGNHLTIATPLLHLSKAEIIKLGVSLGVDYGLTVSCYQANRDGLACGKCDSCYLRQQGFLQAEIDDPTCYQ

SEQ ID NO: 39922 - protein, 237 aa, Moraxella nonliquefaciens
  misc_feature (1)..(237): tr|A0A1B8QJF6|A0A1B8QJF6_MORNO 7-cyano-7-deazaguanine s ynthase OS=Moraxella nonliquefaciens OX=478 GN=queC PE= 3 SV=1
MPHSDDFASQKAVVLFSGGLDSTTCLYWAKAVFKEVTAISFRYGQRHLSELAFSSAIAQMLGVSHRIIDIDIAQLGGSALTDSSIEVPDHQADSDAVPVTYVPARNTIFLSYALAVAEVTEACAIIIGVSSVDFSGYPDCRDDYIRAFETMANLATVAGRAGRRLSIIAPLQYLSKAQTLKLGLSLGVDYAQTVSCYRADSDGRACGECDSCVLRHQGFVQAGISDPTRYQDKTGIN

SEQ ID NO: 39923 - protein, 237 aa, Moraxella nonliquefaciens
  misc_feature (1)..(237): tr|A0A1B8PN19|A0A1B8PN19_MORNO 7-cyano-7-deazaguanine s ynthase OS=Moraxella nonliquefaciens OX=478 GN=queC PE= 3 SV=1
MPHSDDFASQKAVVLFSGGLDSTTCLYWAKAVFKEVTAISFCYGQRHLSELAFSSAIAQTLGVSHRIIDIDIAQLGGSALTDSSIEVPDHQADSNAVPVTYVPARNTIFLSYALAVAEVTEACAIIIGVSSVDFSGYPDCRDDYIRAFETMANLATVAGRAGRRLSIIAPLQYLSKAQTLKLGLSLGVDYAQTVSCYRADSDGRACGECDSCVLRHQGFVQAGISDPTRYQDKTGIN

SEQ ID NO: 39924 - protein, 236 aa, Moraxella osloensis
  misc_feature (1)..(236): tr|A0A2K8K1E2|A0A2K8K1E2_9GAMM 7-cyano-7-deazaguanine s ynthase OS=Moraxella osloensis OX=34062 GN=queC PE=3 SV =1
MSTSTTPQNAVVLLSGGLDSVTCLYWAKANYANVTAVSFNYGQRHDSELNAAKKIAATAQVNHRIIDIDLAQLGGSALTDASLVVPDAKQTDFSDNQHNDSIPITYVPARNTIFLSYALALAEVTQSNAIVIGVNAVDYSGYPDCRPEYIEAFENMANLATKAGVMGNHLYIATPLLHLSKAAIIKLGVSLGVDYALTVSCYRADSEGRACGHCDSCYLRQQGFLQAEIDDPTIYQ

SEQ ID NO: 39925 - protein, 236 aa, Moraxella osloensis
  misc_feature (1)..(236): tr|A0A270AXF5|A0A270AXF5_9GAMM 7-cyano-7-deazaguanine s ynthase OS=Moraxella osloensis OX=34062 GN=queC PE=3 SV =1
MSTSTTPQNAVVLLSGGLDSVTCLYWAKANYANVTAVSFNYGQRHNSELNAAKKIAATAQVNHRIIDIDLAQLGGSALTDASLVVPDAKQTDFSDNQHNDSIPITYVPARNTIFLSYALALAEVTQSNAIVIGVNAVDYSGYPDCRPEYIEAFEKMANLATKAGVMGNHLHIATPLLHLSKAEIIKLGVSLGVDYALTVSCYRADSEGRACAHCDSCYLRQQGFLQAEIDDPTIYQ

SEQ ID NO: 39926 - protein, 231 aa, Moraxella ovis
  misc_feature (1)..(231): tr|A0A378PLH9|A0A378PLH9_9GAMM 7-cyano-7-deazaguanine s ynthase OS=Moraxella ovis OX=29433 GN=queC PE=3 SV=1
MNSDFKNHHAIVLFSGGLDSTTCLYWAQANFKDIIAISFRYGQRHSSELIAATKITKQLGVSHRIIDIDIAQLGGSALTDQNIDVPNYDAASDAVPVTYVPARNTIFLSYALAAAEVMQANYIVIGVSSVDFSGYPDCRPDFIEAFENLANLATVAGRAGNRLSVVAPLQNLSKAQTLELGLSLGVDYGKTVSCYQADSDGRACGVCDSCALRRQGFIDAGVPDPTRYQNA

SEQ ID NO: 39927 - protein, 236 aa, Moraxella pluranimalium
  misc_feature (1)..(236): tr|A0A1T0CUB9|A0A1T0CUB9_9GAMM 7-cyano-7-deazaguanine s ynthase OS=Moraxella pluranimalium OX=470453 GN=queC PE =3 SV=1
MNTYQDQNAVVLFSGGLDSTTCLYWAKSQFKNIVALSFRYGQRHSSELNAAINIAKSLGVDHRIIDIDIAQLGGSALTDHNIDVPDHDDSIVYDDTTNTAPITYVPARNTIFLSYALAAAEVTNANAIVIGVSSVDYSGYPDCRPDFIAAFESLANLATVAARQGRKLSVIAPLQTLSKAETLQLGLSLGVDYSQTVSCYQANADGQACGVCDSCHLRRQGFIDAGVADPTRYANS

SEQ ID NO: 39928 - protein, 238 aa, Moraxella porci
  misc_feature (1)..(238): tr|A0A1T0CVZ8|A0A1T0CVZ8_9GAMM 7-cyano-7-deazaguanine s ynthase OS=Moraxella porci DSM 25326 OX=573983 GN=queC PE=3 SV=1
MNEHQHQNAVVLFSGGLDSTTCLYWAKSEFANITAVSFSYGQRHSSELMAAQNITKALGVKHLIIDIDIAKLGGSALTDPDLHVPDYDASIVYGDDDKVAPITYVPARNTIFLSYALAVAEVTQASAIIIGVSSVDYSGYPDCRPDFIQAFEHMANLATVAGRQGRRLSIIAPLQQLSKAETLQLGLSLGVDYALTVSCYQADAQGRACGHCDSCHLRKQGFMDAGVSDPTRYQQLDQ

SEQ ID NO: 39929 - protein, 235 aa, Moraxella sp.
  misc_feature (1)..(235): tr|A0A229GW52|A0A229GW52_9GAMM 7-cyano-7-deazaguanine s ynthase OS=Moraxella sp. VT-16-12 OX=2014877 GN=queC PE =3 SV=1
MNDITLTPSHPNDRAVVLFSGGLDSTTCLYWAKAHFKDVTAISFRYGQRHCSELIFAQKIAKKLGISHRIIDIDIAQLGGSALTDTTIDVPNHSDHIDSVPITYVPARNTIFLSYALAVAEVTGANHIIIGVSSVDFSGYPDCRADFIQAFELMANLATVAGRAGNRLSIIAPLQHLSKAQTLQLGLSLGVDYAQTVSCYQADTDGRACGVCDSCVLRRQGFIDAGVLDPTRYKA

SEQ ID NO: 39930 - protein, 238 aa, Moraxella sp.
  misc_feature (1)..(238): tr|A0A2K0XX71|A0A2K0XX71_9GAMM 7-cyano-7-deazaguanine s ynthase OS=Moraxella sp. RCAD0137 OX=1775913 GN=queC PE =3 SV=1
MNEHQHQNAVVLFSGGLDSTTCLYWAKSEFANITAVSFSYGQRHSSELMAAQNITKALGVKHLVIDIDIAKLGGSALTDPDLHVPDYDASIVYGDDDKVAPITYVPARNTIFLSYALAVAEVTQASAIIIGVSSVDYSGYPDCRPDFIQAFELMANLATVAGRQGHRLSIIAPLQQLSKAETLQLGLSLGVDYALTVSCYQADAQGRACGHCDSCHLRKQGFMDAGVSDPTRYQQLDQ

SEQ ID NO: 39931 - protein, 226 aa, Moraxellaceae bacterium
  misc_feature (1)..(226): tr|A0A345P6H9|A0A345P6H9_9GAMM 7-cyano-7-deazaguanine s ynthase OS=Moraxellaceae bacterium HYN0046 OX=2283318 G N=queC PE=3 SV=1
MAFTHSPRAIVLLSGGLDSATCLAWAMQRYQCEALSFAYGQRHSSELDAAKKLAAQAGVPHRIINIDLRSLGGSALTDDSIDVPENEPGGIPVTYVPARNTIFLSYALAVAEVTQSQAIVIGVNAVDYSGYPDCRSEYIDAFARMAALATKAGVEGNPLTIDTPLLHLSKANIIRLGTELGIDYSLTVSCYQADLQGRACGRCDSCRLRRQGFDDAGVADPTHYQS

SEQ ID NO: 39932 - protein, 236 aa, Moraxellaceae bacterium
  misc_feature (1)..(236): tr|A0A2A5CRG5|A0A2A5CRG5_9GAMM 7-cyano-7-deazaguanine s ynthase OS=Moraxellaceae bacterium OX=1889775 GN=queC P E=3 SV=1
MGGRGRTLMSTVNKKKAVILLSGGLDSATCLAIANKQGYACYAVSFDYGQRHKAELLAAKRLADELGVEGFKTIRIDMDGIGGSALTDDSIAVPEGGVAEGIPVTYVPARNTIFLSLALGWAEVLDADDIFIGVNAVDYSGYPDCRPEFVSAFEKLANVATKKGVETHSLSIKTPLIDMSKADIINKGISLGVDYGLTVSCYQANDAGEACGKCDSCRLRTEGFAAAGVPDPTRYR

SEQ ID NO: 39933 - protein, 232 aa, Morganella morganii
  misc_feature (1)..(232): tr|M7CTL2|M7CTL2_MORMO 7-cyano-7-deazaguanine synthase OS=Morganella morganii SC01 OX=1239989 GN=queC PE=3 SV= 1
MKRAVVVFSGGQDSTTCLIQALHNYDEVHCVTFDYGQRHSQEIDVARKLSLKLGAAAHKVLDVSLLNELAVSSLTRDNIPVPGFSESEQSDIPNTFVPGRNILFLTLTAIYAYQVNAEAIITGVCETDFSGYPDCRDEFVKALNKAVNAGLARDIRFETPLMWLDKAQTWALADYYGQLDTVRTETLTCYNGIQGDGCGECAACHLRRNGLDSYLADRSAVMAAMKKITGLQ

SEQ ID NO: 39934 - protein, 232 aa, Morganella morganii
  misc_feature (1)..(232): tr|J7U892|J7U892_MORMO 7-cyano-7-deazaguanine synthase OS=Morganella morganii subsp. morganii KT OX=1124991 GN =queC PE=3 SV=1
MKRAVVVFSGGQDSTTCLIQALRNYDEVHCVTFDYGQRHSQEIDVARKLSLKLGAAAHKVLDVSLLNELAVSSLTRDNIPVPGFSESEQSDIPNTFVPGRNILFLTLTAIYAYQVNAEAIITGVCETDFSGYPDCRDEFVKALNKAVNAGLARDIRFETPLMWLDKAQTWALADYYGQLDTVRTETLTCYNGIQGDGCGECAACHLRRNGLDSYLADRSAVMAAMKKITGLH

SEQ ID NO: 39935 - protein, 232 aa, Morganella psychrotolerans
  misc_feature (1)..(232): tr|A0A1B8H165|A0A1B8H165_9GAMM 7-cyano-7-deazaguanine s ynthase OS=Morganella psychrotolerans OX=368603 GN=queC PE=3 SV=1
MKRAVVVFSGGQDSTTCLIQALRNYDEVHCVTFDYGQRHSQEIEVARRLSLKLGAAAHKVLDVTLLSELAVSSLTRDNIPVPGFSESEKSDIPNTFVPGRNILFLTLTAIYAYQVSAEAIITGVCETDFSGYPDCRDEFVKALNHAVNLGIAREIRFETPLMWLDKAQTWALAEYYGQLDTVRRETLTCYNGIQGDGCGECAACHLRQNGLAHYLANRDAVMSSMKKLTGLS

SEQ ID NO: 39936 - protein, 232 aa, Morganella psychrotolerans
  misc_feature (1)..(232): tr|A0A1B8HSX2|A0A1B8HSX2_9GAMM 7-cyano-7-deazaguanine s ynthase OS=Morganella psychrotolerans OX=368603 GN=queC PE=3 SV=1
MKRAVVVFSGGQDSTTCLIQALRNYDEVHCVTFDYGQRHRQEIEVARQLSLKLGAAAHKVLDVTLLSELAVSSLTRDNIPVPGFSESEKSDIPNTFVPGRNILFLTLTAIYAYQVGAEAIITGVCETDFSGYPDCRDEFVKALNHAVNLGIAREIRFETPLMWLDKAQTWALAEYYGQLDTVRRETLTCYNGIQGDGCGDCAACHLRQNGLEHYLANRDAVMSSMKKLTGLS

SEQ ID NO: 39937 - protein, 232 aa, Morganella sp.
  misc_feature (1)..(232): tr|A0A3D3HT19|A0A3D3HT19_9GAMM 7-cyano-7-deazaguanine s ynthase OS=Morganella sp. (in: Bacteria) OX=1912315 GN= queC PE=3 SV=1
MKRAVVVFSGGQDSTTCLIQALRNYDEVHCVTFDYGQRHNQEIEVARRLSLKLGAAAHKVLDVTLLSELAVSSLTRDNIPVPGFSESEKSDIPNTFVPGRNILFLTLTAIYAYQVSAEAIITGVCETDFSGYPDCRDEFVKALNHAVNLGIAREIRFETPLMWLDKAQTWALAEYYGQLDTVRRETLTCYNGIQGDGCGECAACHLRQNGLAHYLENRDTVMSSMKKLTGLS

SEQ ID NO: 39938 - protein, 242 aa, Moritella marina
  misc_feature (1)..(242): tr|A0A5J6WNB4|A0A5J6WNB4_MORMI 7-cyano-7-deazaguanine s ynthase QueC OS=Moritella marina ATCC 15381 OX=1202962 GN=queC PE=4 SV=1
MSQQTANKAVLVFSGGQDSTTCLVDALQRYDSVDCITFDYGQRHSQEIEVAKKTAAYFGVKNHKIINVDLLGELAISSLTRDDIAVSHELMDNGLPNSFVPGRNILFMTLASIYAYQVGANTVITGVCETDFSGYPDCRDEFIKSINQACNLGMAKEFKFETPLMWLNKAETWALADLHDELDFVTHQSLTCYNGVIGKGCGDCPACLLRNNGLNDYLSNKTLHITALKGKLPRLANIKATS

SEQ ID NO: 39939 - protein, 236 aa, Moritella sp.
  misc_feature (1)..(236): tr|A0A2G2IQF3|A0A2G2IQF3_9GAMM 7-cyano-7-deazaguanine s ynthase OS=Moritella sp. OX=78556 GN=queC PE=3 SV=1
MSQQTANKAVLVFSGGQDSTTCLVDALQRYDSVDCITFDYGQRHSQEIEVAKKTAAYFGVKNHKIINVDLLGELAISSLTRDDIAVSHELMENGLPNSFVPGRNILFMTLASIYAYQIGANTVITGVCETDFSGYPDCRDEFIKSINQACNLGMAKDFKFETPLMWLNKAETWALADLHDELDFVTHQSLTCYNGIVGKGCGDCPACLLRNNGLNDYLTNKTLHITALKDKLPRLK

SEQ ID NO: 39940 - protein, 242 aa, Moritella sp.
  misc_feature (1)..(242): tr|A6FAU7|A6FAU7_9GAMM 7-cyano-7-deazaguanine synthase OS=Moritella sp. PE36 OX=58051 GN=queC PE=3 SV=1
MSQQTANKAVLVFSGGQDSTTCLVDALQRYDSVDCITFDYGQRHSQEIEVAKKTAAYFGVKNHKIINVDLLGELAISSLTRDDIAVSHELMENGLPNSFVPGRNILFMTLASIYAYQIGANTVITGVCETDFSGYPDCRDEFIKSINQACNLGMAKDFKFETPLMWLNKAETWALADLHDELDFVTHQSLTCYNGIVGKGCGDCPACLLRNNGLNDYLTNKTLHITALKDKLPRLASIQATS

SEQ ID NO: 39941 - protein, 242 aa, Moritella viscosa
  misc_feature (1)..(242): tr|A0A1L0AMY9|A0A1L0AMY9_9GAMM 7-cyano-7-deazaguanine s ynthase OS=Moritella viscosa OX=80854 GN=queC PE=3 SV=1
MSQQTAKKAVLVFSGGQDSTTCLVDALQRYDSVDCITFDYGQRHSQEIEVAKKTAAHFGIKNHKIINVDLLSELAISSLTRDDIAVSHELMDNGLPNSFVPGRNILFMTLASIYAYQVGANTVITGVCETDFSGYPDCRDEFIKSINQACNLGMAKDFKFETPLMWLNKAETWALADLHDELDFVTHQSLTCYNGVVGKGCGDCPACLLRNNGLNDYLTNKTMHITALKEKLPRLASTQAKS

SEQ ID NO: 39942 - protein, 242 aa, Moritella viscosa
  misc_feature (1)..(242): tr|A0A090IF23|A0A090IF23_9GAMM 7-cyano-7-deazaguanine s ynthase OS=Moritella viscosa OX=80854 GN=queC PE=3 SV=1
MSQQTANKAVLVFSGGQDSTTCLVDALQRYDSVDCITFDYGQRHSQEIEVAKKTAAHFGIKNHKIINVDLLSELAISSLTRDDIAVSHELMDNGLPNSFVPGRNILFMTLASIYAYQVGANTVITGVCETDFSGYPDCRDEFIKSINQACNLGMAKDFKFETPLMWLNKAETWALADLHDELDFVTHQSLTCYNGVVGKGCGDCPACLLRNNGLNDYLTNKTMHITALKEKLPRLASTQAKS

SEQ ID NO: 39943 - protein, 242 aa, Moritella yayanosii
  misc_feature (1)..(242): tr|A0A330LQH4|A0A330LQH4_9GAMM 7-cyano-7-deazaguanine s ynthase OS=Moritella yayanosii OX=69539 GN=queC PE=3 SV =1
MSQQTANKAVLVFSGGQDSTTCLVDALQRYDSVDCITFDYGQRHSQEIEVAKKTAAYFGIKNHKIINVDLLSELAISSLTRDDIAVSHELMDNGLPNSFVPGRNILFMTLASIYAYQVGANTVITGVCETDFSGYPDCRDEFIKSINQACNLGMAKDFKFETPLMWLNKAETWALADLHDELDFVIHQSLTCYNGIVGKGCGDCPACLLRNNGLNDYLTNKTQHISALKGKLPRLANIQATL

SEQ ID NO: 39944 - protein, 218 aa, Motilimonas sp.
  misc_feature (1)..(218): tr|A0A418YG87|A0A418YG87_9GAMM 7-cyano-7-deazaguanine s ynthase OS=Motilimonas sp. PLHSC7-2 OX=2303987 GN=queC PE=3 SV=1
MNKKVVVIYSGGMDSFTVLNQAIQQGYQVFALTFNYGQRHVKEVEVAKAFCQRQNINHKVIDISAINEIIAGSSLTSDIDVPTGDYDNDNMASTVVPNRNMILLSLAIGYAVSIKAEKVFYGAHSGDHLIYPDCRPEFVEQMNQVAAIANFEKVTIETPFLHSSKIEILQAGIEMKLNYGDTWTCYNGREQACGQCGSCIERLAAFAHFGETDPLSYE

SEQ ID NO: 39945 - protein, 227 aa, Motiliproteus coralliicola
  misc_feature (1)..(227): tr|A0A369WXM0|A0A369WXM0_9GAMM 7-cyano-7-deazaguanine s ynthase OS=Motiliproteus coralliicola OX=2283196 GN=que C PE=3 SV=1
MSEQAKKAVVLLSGGLDSSTVLAIAKQQGYQCYALSFDYGQRSLAELNAASAVAKQLGAVEHKLVRFDMGEIGGSALTDHSISVPEQMEEGVPVTYVPARNTVFLSMALGLAEVVEAEAIFIGVNAVDYSGYPDCRPAFIEAFQAMANLATKAGVEGRQIRIETPLMSLTKAQIIDHGITAGLDYGLTVSCYQADEQGRACRVCDSCRLRAQGFVDAGVEDPTRYQD

SEQ ID NO: 39946 - protein, 231 aa, Motiliproteus sp.
  misc_feature (1)..(231): tr|A0A1R1MG12|A0A1R1MG12_9GAMM 7-cyano-7-deazaguanine s ynthase OS=Motiliproteus sp. MSK22-1 OX=1897630 GN=queC PE=3 SV=1
MSDKLKKAIVLLSGGLDSSTVLAMANRQGYQCYALSFDYGQRSLAELNAARAVAGQQGVIDHKIVRLSLEDIGGSALTDRSIDVPESIEEGVPVTYVPARNTVFLSLALGWAEVVEAQAIFIGVNAVDYSGYPDCRPAFIEAFQALANVATKIGVDGGCIKIETPLMTLTKAEIIQQGINHGLDYSLTVSCYQADDEGNACGVCDSCRLRSQGFADAGVEDVTRYVSQKQG

SEQ ID NO: 39947 - protein, 197 aa, Mucilaginibacter gracilis
  misc_feature (1)..(197): tr|A0A495J530|A0A495J530_9SPHI 7-cyano-7-deazaguanine s ynthase OS=Mucilaginibacter gracilis OX=423350 GN=BDD43 _4333 PE=3 SV=1
MDKGILLSGGLDSVSLAYWKRPDIALSLDYGQAAAEKEIEVSAIIAKELGMDHYIVRVDCSSLGSGDLVNGSAINGSPSTEWWPYRNQLLVTLACMKGISLGINELMAGSVLSDGFHKDGTIGFYERINELMSYQEGNIKITAPAIHLSSVELIKISGIPASLLHWAHSCHTGSVACGKCRGCLKYQYTLRTLYGDQ

SEQ ID NO: 39948 - protein, 224 aa, Mucispirillum schaedleri
  misc_feature (1)..(224): tr|V2QAR6|V2QAR6_9BACT 7-cyano-7-deazaguanine synthase OS=Mucispirillum schaedleri ASF457 OX=1379858 GN=queC P E=3 SV=1
MDKAIVLASGGLDSCVTIACAVNDGYDAALLHINYGQRTQKREDKAFDDIAAYYNIKNKMTVDIDYLKRIGGSSLTDMSMKVEEDTIPASILSSLPSTYVPFRNANMISIAVSWAEVIGAEKIYIGAVEEDSSGYPDCREIFYKKFNDLLSVALAPESNVQIVTPVIHLTKKDIVKKGIELNAPLHLTWSCYQNEYTACGVCESCKLRLKGFELAGIKDPIPYK

SEQ ID NO: 39949 - protein, 219 aa, Muribacter muris
  misc_feature (1)..(219): tr|A0A0J5P594|A0A0J5P594_9PAST 7-cyano-7-deazaguanine s ynthase OS=Muribacter muris OX=67855 GN=queC PE=3 SV=1
MQHSNKAAVIFSGGQDSTTCLLLAIREFGKENVEAITFQYGQRHTIELEKAAWIAQDLGIKQTLIDTSVIKAITHNALMDENATIAQNGSTPNTFVDGRNALFLLYAGIYAKSQGIQTLYTGVCETDFSGYPDCRDVFVKSMNVTMNLAMDYNFNIRTPLMYLTKKETWALADELGAFDYIRQHTHTCYLGIEGGCHDCPSCQLREKGLNEYLAERANV

SEQ ID NO: 39950 - protein, 219 aa, Muribacter muris
  misc_feature (1)..(219): tr|A0A4Y9JXW4|A0A4Y9JXW4_9PAST 7-cyano-7-deazaguanine s ynthase OS=Muribacter muris OX=67855 GN=queC PE=3 SV=1
MQHSNKAAVIFSGGQDSTTCLLLAIHEFGKENVEAITFQYGQRHAIELEKAAWIAQDLGIKQTLIDTSVIKAITHNALMDENATIAQNGSTPNTFVDGRNALFLLYAGIYAKSQGIQTLYTGVCETDFSGYPDCRDVFVKSMNVTMNLAMDYNFNIRTPLMYLTKKETWALADELGAFDYIRQHTHTCYLGIEGGCHDCPSCQLREKGLNDYLAERANV

SEQ ID NO: 39951 - protein, 218 aa, Muribaculaceae bacterium
  misc_feature (1)..(218): tr|A0A4Q0IN35|A0A4Q0IN35_9BACT 7-cyano-7-deazaguanine s ynthase OS=Muribaculaceae bacterium Isolate-007 (NCI) O X=2489217 GN=queC PE=3 SV=1
MEKECIIVLSGGMDSTTLLYDYKDEIAIALTFDYGSNHNAREIECARIHCERLGIEHIVIPLDFMHQYFHSSLLDGADAIPEGHYADDNMRSTVVPFRNGIMLAVACGMAESRGLKKVLIANHSGDHAVYPDCRAAFIDAMSEAMQAGTYDRISILAPYTGKDKTFIAARGAELGVDFSLTYSCYKGRERHCGRCGTCVERREAFRIAGIPDHTLYEE

SEQ ID NO: 39952 - protein, 212 aa, Muribaculaceae bacterium
  misc_feature (1)..(212): tr|A0A3N2NP33|A0A3N2NP33_9BACT 7-cyano-7-deazaguanine s ynthase OS=Muribaculaceae bacterium Isolate-114 (HZI) O X=2486475 GN=queC PE=3 SV=1
MEQKDSIIVLSGGMDSVTLLHDRKSRIALAVTFDYGSNHNAREIECARWQCELLGIEHIVIPLSFMGEYFSSSLLSGADAIPEGHYADDNMKSTVVPFRNGIMLSVACGLAESRGLKHVMIANHGGDHAIYPDCRAGFVDAMSLAMKEGTYDGVTIIAPYTDITKGEIAVIGKKLGVDYTHTYSCYKGGEEHCGKCGTCVERAEALAYAGIE

SEQ ID NO: 39953 - protein, 218 aa, Muribaculum intestinale
  misc_feature (1)..(218): tr|A0A1B1SAH1|A0A1B1SAH1_9BACT 7-cyano-7-deazaguanine s ynthase OS=Muribaculum intestinale OX=1796646 GN=queC P E=3 SV=1
MEKECIIVLSGGMDSTTLLYDYKDEIAIALTFDYGSNHNAREIECARIHCERLGIEHIVIPLDFMHKYFHSSLLDGADAIPEGHYADDNMRSTVVPFRNGIMLAVACGMAESRGLKKVLIANHSGDHAVYPDCRAAFIDAMSEAMQAGTYDRISILAPYTGKDKTFIAARGAELGVDFSLTYSCYKGRERHCGRCGTCVERREAFRIAGIPDHTLYEE

SEQ ID NO: 39954 - protein, 218 aa, Muribaculum intestinale; identical to SEQ ID NO: 39951
  misc_feature (1)..(218): tr|A0A4S2FS50|A0A4S2FS50_9BACT 7-cyano-7-deazaguanine s ynthase OS=Muribaculum intestinale OX=1796646 GN=queC P E=3 SV=1

SEQ ID NO: 39955 - protein, 215 aa, Muribaculum sp.
  misc_feature (1)..(215): tr|A0A4P7W3H9|A0A4P7W3H9_9BACT 7-cyano-7-deazaguanine s ynthase OS=Muribaculum sp. H5 OX=2530393 GN=queC PE=3 S V=1
MAKDTLLVLSGGMDSVTMLWEYVDSIAAAVTFQYGSNHNMREAACAKWNCGHLNVKWYEIDLSFMGKYFESSLLSGAEAIPEGNYDDDNMRSTVVPFRNGIMLSVAAGLAESLGLKKVMIANHSGDHAIYPDCRPDFIKSMKNAIADGTYEHLELVAPYTDLTKGEIALRGKTLGVDYSHTYSCYKGGEHHCGKCGTCVERREALDFAGIKLEND

SEQ ID NO: 39956 - protein, 221 aa, Muribaculum sp.
  misc_feature (1)..(221): tr|A0A4S2AS57|A0A4S2AS57_9BACT 7-cyano-7-deazaguanine s ynthase OS=Muribaculum sp. NM65_B17 OX=2516961 GN=queC PE=3 SV=1
MKKDAVMVLSGGMDSVTMLHDYADDIALAVTFGYGSNHNAREAECARLHCELTGIELIEIDLAFMGRYFESSLLSGADAIPEGHYTADNMKSTVVPFRNGIMLAVAAGLAESRGLKAVMIANHAGDHAIYPDCRAGFIDAMGKAIAEGTFDRLELRAPYTLLTKSDIARRGKELGIDYSTTYSCYKGREHHCGKCGTCVERREALADAGIVDTTVYDSDLL

SEQ ID NO: 39957 - protein, 199 aa, Muricauda sp.
  misc_feature (1)..(199): tr|A0A3D9EZQ9|A0A3D9EZQ9_9FLAO 7-cyano-7-deazaguanine s ynthase OS=Muricauda sp. ARW7G5W OX=2135618 GN=C7971_11 09 PE=3 SV=1
MHQNKSGILLSGGMDSIALAYWRKPSYSFTLNYGQRAALAEIQAAAQVSNFLGIEHHIIEVDCSKLGSGDMSGTEPLSVSPISEWWPFRNQLLVTLACMKGVELGINELLVGSVKTDSSHKDGTAEFYSRLSSLMSFQEGNIIVSCPSIEMTTKELIEESGIPESILLWAHSCHTSNSPCMNCNGCSKYLSTLQELGLD

SEQ ID NO: 39958 - protein, 205 aa, Muricauda taeanensis
  misc_feature (1)..(205): tr|A0A3A1NS67|A0A3A1NS67_9FLAO 7-cyano-7-deazaguanine s ynthase OS=Muricauda taeanensis OX=1005926 GN=D2V93_178 40 PE=3 SV=1
MREKVILLASGGLDSTTMAFWLLQNKIDFIPVFINYGQHCADTELSTLKNVLPNEYKGKIEIIDVNGVYKYSRSRFIKKANLWEDNITADDLYIPYRNILILTLGASFAQSLNIDRLYSAFINSNHAKEIDCSKDFFLKMEDMLGEYGSVKMEMPFLEMSKFEVAKLGIELNAPIGKTFSCQASPYIPCGACPNCVDRLEALKNL

SEQ ID NO: 39959 - protein, 241 aa, Mycoavidus cysteinexigens
  misc_feature (1)..(241): tr|A0A2Z6EY83|A0A2Z6EY83_9BURK 7-cyano-7-deazaguanine s ynthase OS=Mycoavidus cysteinexigens OX=1553431 GN=queC PE=3 SV=1
MAAQTNPHSRALVLFSGGQDSATCLAWALQRFHHVETIGFDYGQRHRVELECRSHFRTRLIETEAFAPWRTRLHGDHLVDLSVFGAISDTAMTRDIQIETLANGLPNTFVPGRNLLFLTVAAALAYRRNLQVLVAGMCETDFSGYPDCRDDTVKALQVALNLGMDRRFVIETPLMWLDKAQTWQLAYTLGGPLLVDLVRRETHTCYLGERNTLHDWGYGCGECPSCALRKQGYTAFVTGLS

SEQ ID NO: 39960 - protein, 229 aa, Mycobacterium angelicum
  misc_feature (1)..(229): tr|A0A1W9ZW45|A0A1W9ZW45_9MYCO 7-cyano-7-deazaguanine s ynthase OS=Mycobacterium angelicum OX=470074 GN=queC PE =3 SV=1
MDKPAVILLSGGLDSTTVLAIAKHEGYTPYALSFRYGQRHAVELDAARRVAQAQGVARHVVAEIDLRVFGGSALTADLDVPKHASVEELTADIPSTYVPARNTIFLSFVLAYAETVGAHDVFLGVNALDYSGYPDCRPEYIAAFQDMARLATKAAITGAALTIHTPLIDMTKAEIIRTGLKLAVDYGCTSSCYDPDDAGIPCRHCDSCLLRAKGFADAGAADPLLDRVA

SEQ ID NO: 39961 - protein, 431 aa, Mycobacterium avium
  misc_feature (1)..(431): tr|A0A2A2ZYB9|A0A2A2ZYB9_MYCAV Uncharacterized protein OS=Mycobacterium avium OX=1764 GN=CKJ75_12020 PE=4 SV=1
MPDFTLRLSVPEAPKPAELRENFYWTAEGPSSFEAPYGPRLGKLGPVRPENVDFVRLALLVFAADRTTLRSGGGSNWSQREFRLRVPVGKPEPWLAAKAELERLLDFLTGDAWTLEFYRARPPKEPVAKQLPLVAPKRVVLLSGGADSAVGALLSRSQLAGDEGHLLLSHVGAKNLAPIQRDVATTAEKLIPGPAQVHVQIGLRRSSKQIDGSPFANEPSSRSRSLLLLSLGLAAASVDGVPLWIPENGFASLNPPLDPNRRGSLSTRTTHPAFLDGLAQILSGVGAHGEIQNPFTAMTKGEMFTKAAELVGGDKSAVCLSATHSCGLTGQRAFGLPVTKQCGVCFGCVVRRASFKAAGLQDTTDYIDPNTSTRVKDWLIRNSVERSMKGFLRRSVRTRDLATMSLPPNYPISAAAELCRRACIELENYFA

SEQ ID NO: 39962 - protein, 431 aa, Mycobacterium avium; identical to SEQ ID NO: 39961
  misc_feature (1)..(431): tr|A0A5A4W980|A0A5A4W980_MYCAV Uncharacterized protein OS=Mycobacterium avium subsp. hominissuis OX=439334 GN= JPH1_22340 PE=4 SV=1

SEQ ID NO: 39963 - protein, 230 aa, Mycobacterium bohemicum
  misc_feature (1)..(230): tr|A0A1X1QWU2|A0A1X1QWU2_9MYCO 7-cyano-7-deazaguanine s ynthase OS=Mycobacterium bohemicum OX=56425 GN=queC PE= 3 SV=1
METPAVILLSGGLDSTTVLAIAKHRGYVPYALSFRYGQRHAVELASARRVAAAHGVARHVVADIDLRVFGGSSLTTDIDVPKHASVAELSDDDIPSTYVPARNTIFLSFALAYAETVGAQDIFIGVNALDYSGYPDCRPEYIAAFQAMANLATKAGVEGSAMTIHTPLITKTKADIVRLGLDLGVDYSLTSSCYDPDDAGRPCGRCDSCLLRLKGFAEAGHPDPLVYQAA

SEQ ID NO: 39964 - protein, 230 aa, Mycobacterium bohemicum; identical to SEQ ID NO: 39963
  misc_feature (1)..(230): tr|A0A0U0W708|A0A0U0W708_9MYCO 7-cyano-7-deazaguanine s ynthase OS=Mycobacterium bohemicum DSM 44277 OX=1236609 GN=queC PE=3 SV=1

SEQ ID NO: 39965 - protein, 431 aa, Mycobacterium europaeum
  misc_feature (1)..(431): tr|A0A0U1DP57|A0A0U1DP57_9MYCO 7-cyano-7-deazaguanine s ynthase OS=Mycobacterium europaeum OX=761804 GN=queC PE =4 SV=1
MSEPFMLSVEPVPAEPTAGADRTFFWNGTGSHPWFVSTVGPNLGAFGEVNDRNIDFVRIASAVLSADRSVSRSGRLASWNKRDIAVVVDVLSVDPWDSVRGELQELLGFLTGDTWHLGFREQRGTPEQIAIHAAGASRVVLFSGGGDSGVGALLSAHELHGTAKHTLVSHFSDKYLPPLQRCLAERTDTLYPGTLADHIQVHHSRGRKTVNGNYYRKENSTRSRSLLFLAFGLAVASVDQLPLWIPENGYASINPPLSPNRRGSLSTKTTHPTFLLGVRNILTKVGAHGDLSNPFADRTKGEMFSEVRDLIGEQAASEYLSATTSCSHTGAKTYGISRRAQCGVCFGCLLRKASFISSGIPDRSEYICPKDDARVADWLASKSVESAMRDFLRTDLQESDLATMRLPNTVRLADAAALCNRAMDELRGLAL

SEQ ID NO: 39966 - protein, 402 aa, Mycobacterium indicus
  misc_feature (1)..(402): tr|J9WC85|J9WC85_MYCIP Queuosine biosynthesis protein q ueC OS=Mycobacterium indicus pranii (strain DSM 45239 / MTCC 9506) OX=1232724 GN=MIP_00107 PE=4 SV=1
MEWPSRPKGATSTVISDLAWNLVPLPATTARVADLVHVTAGAYMADRNTARGVRFSRDLALRVAVLDPDAWSDDVLDVVADLLGWLTGDVWDVTITPAPRIVLPDRWPSESNDRPVSLLSGGLDSFMGAVQLMQSGPTPSLTGHKDSATAVRAAQRRTWLWLARSFSPPPSYTRVALTQAGQRIEASSRSRALMFMSLGVAVATGLGARTVVIPENGYTSINLPLRPNRGGALSTRSTHPETLHRFAGILRTLNIDVAVENPYEWMTKGEMMAALAGSAPPDGWQTAAAHTLSCSKLDGRWFGAPPSFNCGLCVPCMVRRATFLKADVPDGTTYVFDNIAQDQRHKLIEARRGDIEAVKYAIASGVDPDAIDAGTWPPGYDLDRAEHLVQRGLDELAMLALP

SEQ ID NO: 39967 - protein, 431 aa, Mycobacterium palustre
  misc_feature (1)..(431): tr|A0A1X1YY82|A0A1X1YY82_9MYCO Uncharacterized protein OS=Mycobacterium palustre OX=153971 GN=AWC19_23085 PE=4 SV=1
MPDFTLRLSVPAEPKPAELRENFYWTADGPSSFEGPYGPRLGKLGPVRTENTDFVRLALLVFAADRTTPRSGGGSNWSQRGFRLRVPVGNPEQWLAARAELEHLLNFLTGDAWTLDFYRARPPKEPVAKQLPLVAPKRVVLLSGGADSAVGALLSRSQLAADEGHLLLSHVGAKNLAPIQREVATIAEKLIPGLSQAHLQIGLRRSSKQIDGSSFTNEPSSRSRSLLFLSLGLAAASIDRVPLWIPENGFASLNPPLDPNRRGSLSTRTTHPAFLEGLAHVLAGVGAHGEIHNPFTEMTKGEMFAKAAELVGSDEAAAYLSATHSCGLTGQRAFGVPVTKQCGVCFGCVVRRASFKAAGLQDATAYIDLDTSTRVKGWLTKNSVERSMQGFLRRGVRTRDLATMSLPPSYPTSAAAELCRRACAELENYFT

SEQ ID NO: 39968 - protein, 229 aa, Mycobacterium scrofulaceum
  misc_feature (1)..(229): tr|A0A1A2UDN2|A0A1A2UDN2_MYCSC 7-cyano-7-deazaguanine s ynthase OS=Mycobacterium scrofulaceum OX=1783 GN=queC P E=3 SV=1
MNTPAVVLLSGGLDSTTVLALAKDRGYVPYALSFRYGQRHAIELAAARRVAQAQGVARHVVADIDLRVFGGSALTSDVAVPKHDTVDALTDEIPSTYVPARNTIFLSFALAYAETVGARDIFIGVNALDYSGYPDCRPEYIAAFQTMANLATKAGVGGSSVTIHTPLIEMTKAEIVRTGLGLGVDYSLTSSCYDPDVEGKPCGHCDSCLLRRKGFAEAGEVDPLTYQAA

SEQ ID NO: 39969 - protein, 134 aa, Mycobacterium sp.
  misc_feature (1)..(134): tr|A0A554TVS2|A0A554TVS2_9MYCO Uncharacterized protein OS=Mycobacterium sp. KBS0706 OX=2578109 GN=FFK22_041730 PE=4 SV=1
MQRAGLHLVHRGRCRQTLRGRRLLRFERRRLFLLRRRFDLKNDKGALVVFSDVQDSTTCHAWALNRFEHLEAVSFDCGQRHRVELECRGRACHVVERGRDEAGILRAQAATPAASRHAANASARKRRCVRAVVR

SEQ ID NO: 39970 - protein, 241 aa, Mycobacterium sp.
  misc_feature (1)..(241): tr|A0A554U8X3|A0A554U8X3_9MYCO 7-cyano-7-deazaguanine s ynthase OS=Mycobacterium sp. KBS0706 OX=2578109 GN=queC PE=3 SV=1
MAGDQGERGAAEGALVLFSGGQDSATCLAWALERFGRVETVGFDYGQRHRVELDVRPGILDAMRRRFPEWAGRLGDDHVLDLSVLGQVSDTALTRDVEIAMQDNGLPNTFVPGRNLVFVTFAAALAYRRGLRHLVAGVCETDYSGYPDCRDDTMKAMQLALNLGMETRFVLHTPLMWIDKAETWRLAESLGGEALVDLVRDQTHSCYRGDRSRRHDWGHGCGECPACALRAEGWRRFRAAP

SEQ ID NO: 39971 - protein, 229 aa, Mycobacterium szulgai
  misc_feature (1)..(229): tr|A0A1X2F3M4|A0A1X2F3M4_MYCSZ 7-cyano-7-deazaguanine s ynthase OS=Mycobacterium szulgai OX=1787 GN=queC PE=3 S V=1
MEKPAVILLSGGLDSTTLLAIAKHEGYTPYALSFRYGQRHAVELDAARRVAQAQGVARHVVADIDLRVFGGSALTADLDVPKHASVEELTADIPSTYVPARNTIFLSFALAYAETVGAQDVFIGVNALDYSGYPDCRPEYIAAFQELARLATKAAITDAALTIHTPLIHMTKAQIISTGLKLAVDYGCTSSCYDPDDAGKPCRHCDSCLLRAKGFADAGAVDPLLDRVA

SEQ ID NO: 39972 - protein, 431 aa, Mycobacteroides abscessus
  misc_feature (1)..(431): tr|A0A1N0MPI0|A0A1N0MPI0_9MYCO Queuosine biosynthesis p rotein queC OS=Mycobacteroides abscessus subsp. bolleti i OX=319705 GN=SAMEA2259698_03369 PE=4 SV=1
MPDFTLRLSAPMEPKPAELRENFYWTADGPTSFEGPYGPRLGKLGPVRPENVDFVRLALLVFAADRTTPRSGGGSNWSQREFRLRVPVRTPEPWLAAKAELERLLDFLTGDAWTLDFYRARPPKEPVAKRLPLVAPKRAVLLSGGADSAVGAVLSRSQLAADQGHLLLSHVGAKNLAPIQRDVSATAEKLIPGPSQVHLQIGLRRNTKQIDGSPFTDEPSSRSRSLLFLSLGLAAASVDEVPLWIPENGFASLNPPLDPNRRGSLSTRTTHPAFLAGLAQVLTGAGAHGEIHNPFTEMTKGEMFAKAAELVGRDEAAAYLSATHSCGLTGQRTFGLPVTEQCGVCFGCVVRRASFQAAGLQDSTRYIDPDVSTRVKGWLTKNSVERSMQGFLRRGVRSLDLATMSLPPSYPTSVAADLCRRACTELGNYFA

SEQ ID NO: 39973 - protein, 431 aa, Mycobacteroides abscessus; identical to SEQ ID NO: 39972
  misc_feature (1)..(431): tr|A0A1T8V157|A0A1T8V157_9MYCO Queuosine biosynthesis p rotein queC OS=Mycobacteroides abscessus subsp. massili ense OX=1962118 GN=EXM25_12550 PE=4 SV=1

SEQ ID NO: 39974 - protein, 362 aa, Mycolicibacter arupensis
  misc_feature (1)..(362): tr|A0A5B1M5H3|A0A5B1M5H3_9MYCO Queuosine biosynthesis p rotein queC (Fragment) OS=Mycolicibacter arupensis OX=3 42002 GN=F0402_20390 PE=4 SV=1
MEWPTRPKGATSTVTSDLAWNLAPLAATTPRVADLLHIAAGAYMADRKTARGVRFSRDLTLRVAVLDSEAWTDEVLDAVAELLGWLTGDVWDVTTTPAPAVDLPDHWPSEDHCGPVSLLSGGLDSFMGAVQLLQSGPTPSLTAHKDSAMAIRNAQRRTWVWLARNFTPPPSYTRAALTQAGPRIEASSRSRALMFMSLGVAVAIARRARTLVIPENGYTSINLPLRPNRGGALSTRSTHPETLHRFASILEELGIDVSVENPYEWMTKGEVMSSLVGGEPPEGWRAAAAHTLSCSKLDGRWFGAKPTFNCGLCVPCMVRRATFLSAGVPDDTTYVFNNVAEDQRRKLIEARRGDIEAVKYAV

SEQ ID NO: 39975 - protein, 41 aa, Mycolicibacter arupensis
  misc_feature (1)..(41): tr|A0A5B1M375|A0A5B1M375_9MYCO Queuosine biosynthesis p rotein queC (Fragment) OS=Mycolicibacter arupensis OX=3 42002 GN=F0402_20585 PE=4 SV=1
VAGGVDANAIDAGTWPPGYDLDRAENLVQRGLDELAMLTLP

SEQ ID NO: 39976 - protein, 421 aa, Mycolicibacterium hodleri
  misc_feature (1)..(421): tr|A0A544W6Y3|A0A544W6Y3_9MYCO Uncharacterized protein OS=Mycolicibacterium hodleri OX=49897 GN=D8S82_02715 PE =4 SV=1
MNLEIRPSGSSPVHGDFAQVRWGNPGTPDSDVNSTVDAWLSELGDVSDRVVDLVRLASSAYIADRLRARGAGFSRTMRVHVHLTDSVAWTPLLGDVERILGWVSGDKWELSVSCETGTRTSNGQQRFVLDDDPPDAVSLLSGGLDSLSGAVLRRRPSLFLSHTDNPTVTGAQRRTWKWLTNNGVDGTCVRISISEASRKRESTTRTRALLFYALAVALADACHIGRVEVPENGFTGLNLSFGNDRGGVLSTRSTHPWTMHLVQNLLDDAGIEVKLLNPYEWLTKGELVRAALEVSAEFDLGLVTSLSCAKLDGRTYKGGNQNWNCGLCVACLTRRAAIRMAGIQDKTPYLATSLTGPALIQLQARRGLDVRAVTSRIDVELDEFTLLEGGPYPGEFDLGAAVELCRRGFVELAALMPELNL

SEQ ID NO: 39977 - protein, 436 aa, Mycolicibacterium rhodesiae
  misc_feature (1)..(436): tr|G4I7W5|G4I7W5_MYCRH Uncharacterized protein OS=Mycol icibacterium rhodesiae JS60 OX=931627 GN=MycrhDRAFT_617 8 PE=4 SV=1
MRKFAVVVNDCAAPPITGILPIRSRNTGEQGERERNFNLNFDELVAGLPDRLSDLHMDWMEILGFLFATDLVCERGEGDVEWAREIELWLPVRDPEFWELRRPLIERIWTDLTNDGLRMHFEQENEPDPPPRQGREPHPTHDCVALVSGGQDSYVGALDLIKDGREPLLVSHSASGAVNSAQNAVEANLQEVEPSIMRLKLSAGKARGAVAAGEEPSQRSRTLLFVGAAALVASLGGSREVFLNENGIMAIHVPLTAARMGSLSTHTASPPILDRMATLANDVFDIPISVENRLVHLTKPEVVGRAVDLGFGHHMINTVSCWQIGRTSRHCGICSPCIMRRISNEYNNVADISYDADIFDDSAAVDEPKARDNLTHFISLVDDLRELPDVELEFEYPELLRAAPAMTLTEAIALHRRWADQAASVLFAHPVPAGLR

SEQ ID NO: 39978 - protein, 200 aa, Mycolicibacterium sp.
  misc_feature (1)..(200): tr|A0A1E7YG48|A0A1E7YG48_9MYCO 7-cyano-7-deazaguanine s ynthase OS=Mycolicibacterium sp. (ex Dasyatis americana ) OX=1866905 GN=BA059_05100 PE=3 SV=1
MKRVVLLSGGIDSAALTAWIRPEQCLHVNYGQRPAVAEARAARQIALELGLPFEQVVVPAAAIGAGLMAEGADETSLPEVSPEWWPYRNQLLITIAAAWGVRRGFDAVLIGTVASDSARHADGGAEFRTHMDALLALQEGGMRLHAPAAHLSAPELIAESGISDAVLGWTHSCHRANLPCAHCPGCLKHIEALHAAGRLQ

SEQ ID NO: 39979 - protein, 425 aa, Mycolicibacterium sp.
  misc_feature (1)..(425): tr|A0A5A7ZFX8|A0A5A7ZFX8_9MYCO 7-cyano-7-deazaguanine s ynthase OS=Mycolicibacterium sp. P9-22 OX=2024613 GN=CI W51_18900 PE=3 SV=1
MRYSSGPSSALRKLDESTVPIVLFEHAISDQTPTAGWSAAETVRRRSLQPDPAAWDLLSIALSVVVADGETRRSASPDGWTREFQLNVALHDATRWEALADPFSLALAFLTTDRWSMTFTDGGSVPTAPSKPRYPQTNAVALLSGGLDSLVGAIDLTSQGRNLFAVSQTVRGDAEKQTRFAELIGSGLDHLQINHNASTRRGQKETSQRSRSLIFLAFGVLAATATQRYIDGETVPLYVCENGFIAINPPLTGARIGSLSTRTAHPEFLGRMQNLLDQAGLRIRIENPYAEKTKGEMMRECLNQTLLTHEASVSTSCGRFQKFNYNHCGRCVPCQIRRAAFIASGYDDNTDYIYEDLGKSDEYHAAFDDVRSVAVARLTVKDDGLDRWLGPALSSSLITNRPALREMLRRGLDELGLLHAKYGLA

SEQ ID NO: 39980 - protein, 199 aa, Myroides indicus
  misc_feature (1)..(199): tr|A0A4R7EQ76|A0A4R7EQ76_9FLAO 7-cyano-7-deazaguanine s ynthase OS=Myroides indicus OX=1323422 GN=C8P70_1318 PE =3 SV=1
MESLKRAILLSGGIDSISLAYNLKPEIAYTINYGQTVAEREIYVSEYICKVLNIKHKVISVDCSSLGSGTLANKKNLKSSPSEEWWPFRNQLLITLSAMQAINDGVSEIYLASVKSDKFHTDGTKKFYDLINETVVFQEGNIKILCPTLELYSHELVQNFNVPLELISIAHSCHISNLACGKCSGCTKQLRVKYEIGLE

SEQ ID NO: 39981 - protein, 21 aa, Myxococcaceae bacterium
  misc_feature (1)..(21): tr|A0A4Q5ZCL9|A0A4Q5ZCL9_9DELT Uncharacterized protein (Fragment) OS=Myxococcaceae bacterium OX=2484252 GN=EOO 71_41055 PE=4 SV=1
MAKRAVVLLSGGLDSTTCLAM

SEQ ID NO: 39982 - protein, 113 aa, Myxococcaceae bacterium
  misc_feature (1)..(113): tr|A0A4V2ASQ3|A0A4V2ASQ3_9DELT 7-cyano-7-deazaguanine s ynthase (Fragment) OS=Myxococcaceae bacterium OX=248425 2 GN=EOO71_24160 PE=3 SV=1
TDLYIGVNAVDYSGYPDCRPEFIRSFEAMAQLATKAGVEGARFQVHAPLSGLTKAQIIQAGVKLGVDYGMTHSCYDPDAQGRACGRCDSCLLRSKGFQEAGVPDPTTYVDGVR

SEQ ID NO: 39983 - protein, 229 aa, Myxococcales bacterium
  misc_feature (1)..(229): tr|A0A3A4K5E3|A0A3A4K5E3_9DELT 7-cyano-7-deazaguanine s ynthase OS=Myxococcales bacterium OX=2026763 GN=C4523_1 8840 PE=3 SV=1
MERMVVLMSGGLNGVVAASRMLANVELHFLHVDYGQAAAKSERLAVARISTALAGKLHVADLPRFDRNGMPGPGGAVDAKRPTSNERVLETRPSGVMLAILALAQQLAAQVGAEDIVCGASEACSRSDAEAGFCSPAADGRRAFFHACSIALEMGSPSAKRMSLELPFIDVSREDIIRTGLRLGAPLPMTWSCHAGGEAPCGSCAGCRSRAAAFEMLGLDDPALAAATR

SEQ ID NO: 39984 - protein, 287 aa, Myxococcales bacterium
  misc_feature (1)..(287): tr|A0A2E8S4A9|A0A2E8S4A9_9DELT Uncharacterized protein OS=Myxococcales bacterium OX=2026763 GN=CMH54_14940 PE= 4 SV=1
MNRTQTDIIDQEVATRPNLAPGVYPEVKEKEIALMFSGGVDSTATAIMLAEHYDKVHLVTYKNGYGHYYHHRTRKRVDELNKALGDKFIYTLMSTKEYFDQIVVNSVLKDYAKYKSGFIWFMGCKMAMHMRSAIYCMENGLRYMTDGSNEDTNEMVEQMLISLTLIRFFYGNYGIHFGTPVYDIERDESRQLIKKLGLKMGVQVMDRHLCIQPTCIAGELYYMPYLLFNKKVRHDEDTVARFIDEKQKICDTITRSYFDKIHVDLDALVADRQAQIEALDAQKVGTG

SEQ ID NO: 39985 - protein, 229 aa, Myxococcus fulvus
  misc_feature (1)..(229): tr|F8CEC9|F8CEC9_MYXFH 7-cyano-7-deazaguanine synthase OS=Myxococcus fulvus (strain ATCC BAA-855 / HW-1) OX=48 3219 GN=queC PE=3 SV=1
MKRAVVLISGGLDSTTCLAMAKAKGFEPVCLAVAYGQRHAVELEQAKQVAAAMGVTDFRVVSIDLRQVGGSALTADIEVPKDRPADELSHGIPVTYVPARNALFLSLALGLAEVVGSTDLYIGVNAVDYSGYPDCRPEFIRAFESMANLATKAGVEGARFTVHAPLSGLTKADIIREGVKLGVDYGLTHSCYDPDAQGRACGRCDSCVLRKKGFEEAGVPDPTRYTESA

SEQ ID NO: 39986 - protein, 232 aa, Myxococcus fulvus
  misc_feature (1)..(232): tr|A0A511SZB6|A0A511SZB6_MYXFU 7-cyano-7-deazaguanine s ynthase OS=Myxococcus fulvus OX=33 GN=queC PE=3 SV=1
MTKRAVVLTSGGLDSTTCVAMAKAKGFEPVCLAVAYGQRHAVELERAREVATALGVKDFRVVGIDLRQVGGSALTADIDVPKDRPADEMSHGVPVTYVPARNALFLSLALGLAEVVGATDIYIGVNAVDYSGYPDCRPEFIRSFEAMANLATKAGVEGARFTVHAPLSGLTKADIIREGVRLGVDYGITHSCYDPDTQGRACGRCDSCLLRKKGFEEAGVPDPTRYTVEAGA

SEQ ID NO: 39987 - protein, 231 aa, Myxococcus hansupus
  misc_feature (1)..(231): tr|A0A0H4X6T0|A0A0H4X6T0_9DELT 7-cyano-7-deazaguanine s ynthase OS=Myxococcus hansupus OX=1297742 GN=queC PE=3 SV=1
MMVKRAVVLISGGLDSTTCLAMAKAKGFEPVCLAVAYGQRHAVELEQAKKVCAAMGVSDFRVVSIDLRQVGGSALTADIEVPKDRPADEMSHGIPVTYVPARNALFLSLALGLAEVVGSTDIYIGVNAVDYSGYPDCRPEFIRAFESMANLATKAGAEGARFTVHAPLSGLTKADIIREGVKLGVDYGLTHSCYDPDAQGRACGRCDSCVLRKKGFEDAGVPDPTRYTESA

SEQ ID NO: 39988 - protein, 230 aa, Myxococcus macrosporus
  misc_feature (1)..(230): tr|A0A250K2Z2|A0A250K2Z2_9DELT 7-cyano-7-deazaguanine s ynthase OS=Myxococcus macrosporus DSM 14697 OX=1189310 GN=queC PE=3 SV=1
MVKRAVVLISGGLDSTTCLAMAKAKGFEPVCLAVAYGQRHAVELEQAKQVAAAMGVTDFRVVSIDLRQVGGSALTADIEVPKDRPADELSHGIPVTYVPARNALFLSLALGLAEVVGSTDLYIGVNAVDYSGYPDCRPEFIRAFESMANLATKAGVEGARFTVHAPLSGLTKADIIREGVKLGVDYGLTHSCYDPDAQGRACGRCDSCVLRKKGFEEAGVPDPTRYTESA

SEQ ID NO: 39989 - protein, 230 aa, Myxococcus sp.
  misc_feature (1)..(230): tr|A0A540X293|A0A540X293_9DELT 7-cyano-7-deazaguanine s ynthase OS=Myxococcus sp. AM401 OX=2590453 GN=queC PE=3 SV=1
MAKRAVVLISGGLDSTTCVAMAKAKGFEPVCLAVAYGQRHVVELERARDVASAMGVKDFRVVSIDLRQIGGSALTADIDVPKDRPADEMSHGIPVTYVPARNALFLSLALGLAEVVGSTDIYIGVNAVDYSGYPDCRPEFIRSFEAMANLATKAGVEGASFTVHAPLSGLTKADIIREGTRLGVDYGMTHSCYDPDAQGLACGRCDSCLLRKKGFEEAGVPDPTRYTVGA

SEQ ID NO: 39990 - protein, 232 aa, Myxococcus stipitatus
  misc_feature (1)..(232): tr|L7UH29|L7UH29_MYXSD 7-cyano-7-deazaguanine synthase OS=Myxococcus stipitatus (strain DSM 14675 / JCM 12634 / Mx s8) OX=1278073 GN=queC PE=3 SV=1
MTKRAVVLFSGGLDSTTCVAMAKAQGFEPVCLAVSYGQRHSVELEKAREVARALGVKDFRVVGIDLRQIGGSALTADIDVPKDRPADEMSHGVPVTYVPARNALFLSLALGLAEVVEATDLYIGVNAVDYSGYPDCRPEFIRSFEAMANLATKAGAEGARFTVHAPLSGMSKADIIREGTRLGVDYGMTHSCYDPDEQGGACGRCDSCMLRKKGFEEAGVPDPTHYAAGARG

SEQ ID NO: 39991 - protein, 230 aa, Myxococcus virescens
  misc_feature (1)..(230): tr|A0A511H9S7|A0A511H9S7_9DELT 7-cyano-7-deazaguanine s ynthase OS=Myxococcus virescens OX=83456 GN=queC PE=3 S V=1
MVKRAVVLISGGLDSTTCLAMAKAKGFEPVCLAVAYGQRHAVELEQARKVAAAMGVTDFRVVSIDLRQVGGSALTADIEVPKDRPSDEMSHGIPVTYVPARNALFLSLALGLAEVVGSTDIYIGVNAVDYSGYPDCRPEFIRSFESMANLATKAGVEGARFTVHAPLSGLTKADIIREGVKLGVDYGLTHSCYDPDAQGRACGRCDSCVLRKKGFEEAGVPDPTRYAESA

SEQ ID NO: 39992 - protein, 230 aa, Myxococcus xanthus
  misc_feature (1)..(230): sp|Q1CYI2|QUEC_MYXXD 7-cyano-7-deazaguanine synthase OS =Myxococcus xanthus (strain DK 1622) OX=246197 GN=queC PE=3 SV=1
MVKRAVVLISGGLDSTTCLAMAKAKGFEPVCLAVAYGQRHAVELEQARKVAAAMGVTDFRVVSIDLRQVGGSALTADIEVPKDRPSDEMSHGIPVTYVPARNALFLSLALGLAEVVGSTDIYIGVNAVDYSGYPDCRPEFIRSFESMANLATKAGVEGAHFTVHAPLSGLTKADIIREGVKLGVDYGLTHSCYDPDAQGRACGRCDSCVLRKKGFEEAGVPDPTRYTESA

SEQ ID NO: 39993 - protein, 230 aa, Myxococcus xanthus
  misc_feature (1)..(230): tr|A0A4Y6DQX4|A0A4Y6DQX4_MYXXA 7-cyano-7-deazaguanine s ynthase OS=Myxococcus xanthus OX=34 GN=queC PE=3 SV=1
MVKRAVVLISGGLDSTTCLAMAKAKGFEPVCLAVAYGQRHAVELEQAKKVAAAMGVTDFRVVSIDLRQVGGSALTADIEVPKDRPSDEMSHGIPVTYVPARNALFLSLALGLAEVVGSTDIYIGVNAVDYSGYPDCRPEFIRSFESMANLATKAGVEGARFTVHAPLSGLTKADIIREGVKLGVDYGLTHSCYDPDTQGRACGRCDSCVLRKKGFEEAGVPDPTRYTESA

SEQ ID NO: 39994 - protein, 433 aa, Nakamurella silvestris
  misc_feature (1)..(433): tr|A0A399UR45|A0A399UR45_9ACTN Uncharacterized protein OS=Nakamurella silvestris OX=1645681 GN=D1871_18465 PE= 4 SV=1
MTRCFLAISEQDADAAITGGTFDEVFLWSRSAKSSFTGSLSPYLESLGPVNPRNVDLVRIALGVLASDRSVLREGGGASWNTRDLDLTVQVDDPAAWLGVAGELATLVGFLSGDRWTFTFTQAPTDSIEALPLEEAVYQRAVLLSGGADSAAGALISARQLGDGGSQALASQYSSTALSPLQQDLVKAIGGHAPRVTQVHHQFHLNRGSRRLDGTAFRDEPSTRSRSLLFLALGLAVAERANAPLWIAENGFASLNPPLGADRRGALSTHTTHPRFLHDLQTLVQRVGGHGQIQNPFESLTKGEMFALVAKEIGTDAASEYLSFTNSCSHTDARYSGAQPGSSCGVCFGCLVRRAAFVAAGIPDRTDYLCDDTTGRFTSFVQQKSIVEPMRDFAMRGIRARDIMAMSLPTRYSAADALDLCWRGTDELRGLLS

SEQ ID NO: 39995 - protein, 247 aa, Nannocystis exedens
  misc_feature (1)..(247): tr|A0A1I2GHH2|A0A1I2GHH2_9DELT 7-cyano-7-deazaguanine s ynthase OS=Nannocystis exedens OX=54 GN=queC PE=3 SV=1
MTARVRHSSEVAMTEPMRAVVLLSGGLDSTTVLALAAAEGRETYALSFRYGQRHEVELASAARQAARFGARAHEVVDLAHLGRLVAAGTSLLRASSEAVPKDSEPAAGAIPSTYVPARNTLFLAYALGWAEVLGAAEIWVGVNAVDYSGYPDCRPQFLAAFERLAAEATRAGVEGKPLRVRAPLISWSKSQIVQAGLAAGVDYADTVSCYDPAVEGDRPRACGRCDSCRLRRDGFAAAGVPDPTRYA

SEQ ID NO: 39996 - protein, 218 aa, Natranaerobius trueperi
  misc_feature (1)..(218): tr|A0A226BVL1|A0A226BVL1_9FIRM 7-cyano-7-deazaguanine s ynthase OS=Natranaerobius trueperi OX=759412 GN=queC PE =3 SV=1
MKKALVVLSGGQDSTTCLFWALENFDEIKAVSFDYGQRNEIELEFAKQICEQHNISHQIVNMDLLSELTNNSLTKHYIEIEEKEGGVPNTFVDGRNMLFLTFAAIVAKNNDIRHVVTGVSQEDFSGYPDCRNVFIKSLNTTLNLAMDYEFELETPLIFLNKEETWKLAYDLGVFDIIKENTVTCYEGKPGAGCGECPACKLRSEGLKKFLERKEKNHE

SEQ ID NO: 39997 - protein, 217 aa, Natranaerovirga hydrolytica
  misc_feature (1)..(217): tr|A0A4R1MLS9|A0A4R1MLS9_9FIRM 7-cyano-7-deazaguanine s ynthase OS=Natranaerovirga hydrolytica OX=680378 GN=que C PE=3 SV=1
MNKKKAVVVFSGGQDSTTCLFWAKEKFDEVIAVTFDYNQKHSLEIECAKEICEKYGIEQHILDLSLLNQLAPNALTRDEIKVDENAPTEGTPNTFVDGRNMIFLTYAAVIAKQKGINNIVTGVSQSDFSGYPDCRDVFIKSLNVTLNLAMGYEFDIHTPLMWIDKAQTWHLAYDLGVLDIIEAETLTCYNGIKGEGCKACPACELRNKGYETFKKSL

SEQ ID NO: 39998 - protein, 221 aa, Natranaerovirga pectinivora
  misc_feature (1)..(221): tr|A0A4V2V0D1|A0A4V2V0D1_9FIRM 7-cyano-7-deazaguanine s ynthase OS=Natranaerovirga pectinivora OX=682400 GN=que C PE=3 SV=1
MTTERAVVVFSGGQDSTTCLFWAKERFKEVVAVTFDYNQKHSLEIDCAKDICKKYNVEHHILDLSLLNQLAPNALTRDDIQVDKDAPIEGTPNTFVDGRNMIFLTYAAVIAKQKGINNIVTGVSQSDFSGYPDCRDVFIKSLNVTLNLAMGYEFNIHTPLMWIDKAETWKLADDLGVLEVIENETLTCYNGIKGTGCKECPACELRNKGFLNFMALKRNLY

SEQ ID NO: 39999 - protein, 220 aa, Natribacillus halophilus
  misc_feature (1)..(220): tr|A0A1G8PCT5|A0A1G8PCT5_9BACI 7-cyano-7-deazaguanine s ynthase OS=Natribacillus halophilus OX=549003 GN=queC P E=3 SV=1
MKQGSAVVVFSGGQDSTTCLFWALERFEKVYAVTFAYGQRHDKEIEVAREIAHDVGVEHTVLDMSLLNQLAPNALTRDDIEVSEGEDGELPSTFVPGRNLLFLSFASIFGEQRGAYHIVTGVCETDYSGYPDCRDGFVKSLNVTLNLSMDDTFVLHTPLMWLDKAETWRLADDLGQLKYVRERTLTCYHGVIGAGCGECPACQLRRQGLETYLTSKDRDA

SEQ ID NO: 40000 - protein, 201 aa, Natribacillus halophilus
  misc_feature (1)..(201): tr|A0A1G8KF92|A0A1G8KF92_9BACI Queuosine biosynthesis p rotein QueC OS=Natribacillus halophilus OX=549003 GN=SA MN04488123_10268 PE=4 SV=1
MDKIKDLINEKNQGAENNILETKYITKEDIPLNGEITKKYNKLAAKSHLGGQYDWLARFSYAEGIYDLELSIHVDDKAQGFIKEDVEKIEKHNDSYFKMKQEPSVQELDIFLYYHFPLLDMSKIDMEKKAKESGFDDIMEQTWFCFFPRKDGTPCGLCNPCKYTREEGMGRRVPDPTIKDKTEFFLRKVNQKVKSVVGGRK

SEQ ID NO: 40001 - protein, 228 aa, Natronoflexus pectinivorans
  misc_feature (1)..(228): tr|A0A4R2GDT2|A0A4R2GDT2_9BACT 7-cyano-7-deazaguanine s ynthase OS=Natronoflexus pectinivorans OX=682526 GN=que C PE=3 SV=1
MKRAVILLSGGLDSAVTLWLAKSEGYELHTLSFDYGQRHKRELEAAAKIAEVAGVKEHRLVTINMDQWGGSSLTDKNMEVEDGDVNRTDIPVTYVPARNMVFLSIAASYAEAIDAQNIFIGVSQVDYSGYVDCRESFIKAMENAINQGTVMAAEKNRPITIHAPFIYKTKTEEIQIGAKLGVPFGLTWSCYRGGEKPCGTCDSCLLRAKAFQEAGVVDEGGTEIGNRK

SEQ ID NO: 40002 - protein, 222 aa, Natronospirillum operossus
  misc_feature (1)..(222): tr|A0A4Z0WGZ8|A0A4Z0WGZ8_9BACT 7-cyano-7-deazaguanine s ynthase OS=Natronospirillum operossus OX=2562806 GN=que C PE=3 SV=1
MSSAIVLLSGGLDSATAVAIAAQRHDKVYGLSFRYGQRHSAELLAAQRVAARQNLAEHRIIDIDLAQLGGSSLTDGSLSVPETPTEGIPNTYVPARNTVFLSYGLAYAEVTGAQAIYLGINAVDYSGYPDCRPEFVAAYQNLVNVATRATVTGSTIQIEAPLIDLSKADIIRWGVELGVDYGITVSCYQADEAGTACGVCDSCRLRHQGFVDAGVEDPTPYR

SEQ ID NO: 40003 - protein, 222 aa, Nautilia profundicola
  misc_feature (1)..(222): sp|B9L986|QUEC_NAUPA 7-cyano-7-deazaguanine synthase OS =Nautilia profundicola (strain ATCC BAA-1463 / DSM 1897 2 / AmH) OX=598659 GN=queC PE=3 SV=1
MKKAVVILSGGMDSTTAAFIAKSEGYEIIPVHFNYSQRTEKRELKAFNDICDYLNLDNRYIIDIPFFKQIGASALVDENIDVPVDGVKPGIPVTYVPFRNGIFLSIAAAVAEKEGAEAIYIGVVEEDSSGYPDCTEDFIQNMQKAVNSGTKPETNIEIKTPLVHLKKEDIVKTAVKYNVPLHLTWSCYKNEDEACGVCDSCRLRLKGFEKAGIEDRIPYKQK

SEQ ID NO: 40004 - protein, 222 aa, Nautilia sp.
  misc_feature (1)..(222): tr|A0A3T0L1L4|A0A3T0L1L4_9PROT 7-cyano-7-deazaguanine s ynthase OS=Nautilia sp. PV-1 OX=2579250 GN=queC PE=3 SV =1
MKKAVVILSGGMDSTTAAFIAKSEGYEIIPVHFNYGQRTEKRELKAFNDICDYLNLDNRYIIDIPFFKQIGASALVDENIDVPVDGVKPGIPVTYVPFRNGIFLSIAAAIAEKEGADAIYIGVVEEDSSGYPDCREDFIQNMQNAINSGTKPETKIEIKTPLVHLKKEDIVKTAIEYGVPLNLTWSCYKYEDEACGVCDSCRLRLKGFEKAGSKDPIPYKTK

SEQ ID NO: 40005 - protein, 217 aa, Neisseria animalis
  misc_feature (1)..(217): tr|A0A3N3EHJ4|A0A3N3EHJ4_NEIAN 7-cyano-7-deazaguanine s ynthase OS=Neisseria animalis OX=492 GN=queC PE=3 SV=1
MHNQKALVIFSGGQDSTTCLLQAIETYGRGNVQAITFQYGQRHAVELERACWIAQDLGIPQTVLDLSLMQHITRNALMSDGAEIQTAENGIPNTFVDGRNALFLLYAAIFAKGQGIRHIIAGVCETDFSGYPDCRDIFVKSMNVTLNLAMDYDFQIHTPLMYLTKAQTWKLADDLGRLNYVREHTHTCYNGVIGGCGECPSCILRERGLAEYLAEKP

SEQ ID NO: 40006 - protein, 216 aa, Neisseria animaloris
  misc_feature (1)..(216): tr|A0A3S4YRQ5|A0A3S4YRQ5_9NEIS 7-cyano-7-deazaguanine s ynthase OS=Neisseria animaloris OX=326522 GN=queC PE=3 SV=1
MHNEKALVVFSGGQDSTTCLIQAVQTYGRENVQAITFQYGQRHAIELERARWIAEDLGIAQTVLDLSLMQQITHNALIDGTAEIQTGINGVPNTFVDGRNALFLLYAAIYAKSQNIKHIIVGVCETDFSGYPDCRDVFVKSMNVTLNLAMDYAFQIHTPLMYLTKAQTWALADRLGCLDYIREHTHTCYHGVEGGCGECPSCVLRERGLAEYLASR

SEQ ID NO: 40007 - protein, 218 aa, Neisseria arctica
  misc_feature (1)..(218): tr|A0A0J0YS37|A0A0J0YS37_9NEIS 7-cyano-7-deazaguanine s ynthase OS=Neisseria arctica OX=1470200 GN=queC PE=3 SV =1
MTTEKALVIFSGGQDSTTCLIQAIRQYGRENVEAITFQYGQRHNIELEKARSIAADLGIPQTLLDLTLMQQVTRNALMDETAAIQTGENGLPNTFVDGRNALFLLYAAIYAKSRGIRHIITGVCETDFSGYPDCRDVFIKSMNVTLNLAMDYAFQIHTPLMYLTKAQTWALADEMGVLDYIRTHTHTCYLGTEGGCGECPSCVLRERGLAEYLAGKSR

SEQ ID NO: 40008 - protein, 384 aa, Neisseria bacilliformis
  misc_feature (1)..(384): tr|F2BCV8|F2BCV8_9NEIS 7-cyano-7-deazaguanine synthase OS=Neisseria bacilliformis ATCC BAA-1200 OX=888742 GN=e xsB PE=3 SV=1
MNSEKALVIFSGGQDSTTCLIQAIQTYGRENVQTISFQYGQRHAVELERARSIAQDWGVKQTILDLSLIKHITQNALTDNTAAIQTAANGLPNTFVDGRNALFLLYAAICAKGQNIRHIITGVCETDFSGYPDCRDVFVKSMNVTLNLAMDYPFQIHTPLMYLTKAQTWELADKLGCLDYIRDHTHTCYNGVIGGCHQCPACQLRERGLAQYLQNKAAAPAFYDCEKNLTEHDLAQAEHTLAATLPDSFKAHYLKYNGGTPARTLFDAGGSGCDNIEISDFIPIRYAQAFADDPDFTLEGRAAAEWARNEIPPALIPFALDWGGNYICLEKDSGKITYYVRDVWSDKLSREANFKSNTRPLADTFPAFLARLRDNPDDVDSDDE

SEQ ID NO: 40009 - protein, 216 aa, Neisseria canis
  misc_feature (1)..(216): tr|A0A1X3CYG6|A0A1X3CYG6_9NEIS 7-cyano-7-deazaguanine s ynthase OS=Neisseria canis OX=493 GN=queC PE=3 SV=1
MQNEKALVVFSGGQDSTTCLIQAVQTYGRENVQAITFQYGQRHAIELERARRIAEDLGIAQTVLDLSLMQQITHNALMDDTAEIQTASNGMPNTFVDGRNALFLLYAAIYAKSQNIKHIIVGVCETDFSGYPDCRDVFVKSMNVTLNLAMDYAFQIHTPLMYLTKAQTWALADRLGCLDYIREHTHTCYHGVEGGCGECPSCVLRERGLAEYLASR

SEQ ID NO: 40010 - protein, 219 aa, Neisseria cinerea
  misc_feature (1)..(219): tr|D0W2U0|D0W2U0_NEICI 7-cyano-7-deazaguanine synthase OS=Neisseria cinerea ATCC 14685 OX=546262 GN=queC PE=3 SV=1
MSNQQALVIFSGGQDSTTCLIQAIQTYRRENVQAITFQYGQRHVVELERARWIAQDLGVKQTVLDLSLMRQITHNALMDEAAAIETADNGVPNTFVDGRNALFLLYAAIYAKGQGIRHIIAGVCETDFSGYPDCRDVFVKSMNVTLNLAMDYDFQIHTPLMYLTKAQTWALADEMGVLDYIREQTHTCYNGIVGGCHECPSCVLRERGLAEYLESKKAV

SEQ ID NO: 40011 - protein, 219 aa, Neisseria cinerea
  misc_feature (1)..(219): tr|A0A2X4BFA5|A0A2X4BFA5_NEICI 7-cyano-7-deazaguanine s ynthase OS=Neisseria cinerea OX=483 GN=queC PE=3 SV=1
MSNQQALVIFSGGQDSTTCLIQAIQTYRRENVQAITFQYGQRHAVELERACWIAQDLGIKQTVLDLSLMRQITHNALMDEAAAIETAKNGVPNTFVDGRNALFLLYAAIYAKGQGIRHIIAGVCETDFSGYPDCRDVFVKSMNVTLNLAMDYDFQIHTPLMYLTKAQTWAFADEMGALDYIREQTHTCYNGIVGGCHECPSCVLRERGLAEYLESKKAV

SEQ ID NO: 40012 - protein, 218 aa, Neisseria dentiae
  misc_feature (1)..(218): tr|A0A1X3DFR7|A0A1X3DFR7_9NEIS 7-cyano-7-deazaguanine s ynthase OS=Neisseria dentiae OX=194197 GN=queC PE=3 SV= 1
MNPQKAVVVFSGGQDSTTCLIQAIRRYGNDNVEAITFRYGQRHAIELERARRIAQDLGVRQTVLDLSLMQQITHNALMDETAEIQAPAGGVPNTFVDGRNALFLLYAAIYAKSRNARHLITGVCETDFSGYPDCRDIFIKSMNVTLNLAMDYDFQIHTPLMYLTKAQTWALADELGCLDYIREHTHTCYHGVAGGCGECPSCVLRERGLTEYLAGKTA

SEQ ID NO: 40013 - protein, 216 aa, Neisseria dumasiana
  misc_feature (1)..(216): tr|A0A1X3DJQ3|A0A1X3DJQ3_9NEIS 7-cyano-7-deazaguanine s ynthase OS=Neisseria dumasiana OX=1931275 GN=queC PE=3 SV=1
MHNEKALVVFSGGQDSTTCLIQAVQTYGRENVQAITFQYGQRHAIELERARWIVEDLGIAQTVLDLSLMQQITHNALMDDTAEIQTASNGVPNTFVDGRNALFLLYAAIYAKSQNIKHIIVGVCETDFSGYPDCRDVFVKSMNVTLNLAMDYAFQIHTPLMYLTKAQTWALADRLGCLDYIRQHTHTCYHGVEGGCGECPSCVLRERGLTEYLASR

SEQ ID NO: 40014 - protein, 438 aa, Neisseria elongata
  misc_feature (1)..(438): tr|A0A378TZG8|A0A378TZG8_NEIEL 7-cyano-7-deazaguanine s ynthase OS=Neisseria elongata OX=495 GN=NCTC10660_00995 PE=3 SV=1
MTQLFFHHDINQLNNLQNGTIPVHLYGMGNKNLQIAHIGNMVLDRVRRLGIRLNNQVMDFLTIAMAVTAADTFVLRKDTANGWCRSFSITLPLCQPAIWQANKVHLEHILHFLSGDIWQFDFQENGQNPPQPYSQNGRTKLVDLRNKDCVCLFSGGLDSSIGAIDLLEQGHSPVLVSHSYKGDKSRQQAIIQQLNQNGYINQFSQFNAIAQPHLNNGRATEITMRTRSLNFLAFAIISAYALQEFVQEEIDVFVPENGVISINAPLTVRRVGTLSTRTTHPYFIQEIQRLFTAVNIPFTLRNPYQFKTKGQMIAECENLPLLQQIIPDTVSCSHWKRKNQQCGVCVPCLIRRASLHYAGITNDAQYEFNDIRQILTNQDRRDDLFALISAIRQKSHRNINQWVSQSGPLPTQQLNQFANVFRSGLDEVEQLLIVNQIL

SEQ ID NO: 40015 - protein, 219 aa, Neisseria elongata
  misc_feature (1)..(219): tr|A0A378TW94|A0A378TW94_NEIEL 7-cyano-7-deazaguanine s ynthase OS=Neisseria elongata OX=495 GN=queC PE=3 SV=1
MQNPQALVIFSGGQDSTTCLIQAIQTYGRENVQAITFQYGQRHAVELERARWIAQDLGVKQTVLDLSLMQQITHNALMDDTAAIETASDGLPNTFVDGRNALFLLYAAIYAKGQGIKHIIAGVCETDFSGYPDCRDVFVKSMNVTLNLAMDYAFQIHTPLMYLTKAQTWALADEMGALDYIREQTHTCYNGIVGGCHECPSCVLRERGLAEYLESQKAV

SEQ ID NO: 40016 - protein, 219 aa, Neisseria flavescens
  misc_feature (1)..(219): tr|A0A154TYR9|A0A154TYR9_NEIFL 7-cyano-7-deazaguanine s ynthase OS=Neisseria flavescens OX=484 GN=queC PE=3 SV= 1
MEKQQSLVIFSGGQDSTTCLIQAIQTYGRENVQAITFQYGQRHAIELERARWIAQDLGVKQTVLDLSLMQQITHNALMDDTASIETASDGLPNTFVDGRNALFLLYAAIYAKGQGIRHIIAGVCETDFSGYPDCRDVFVKSMNVTLNLAMDYAFQIHTPLMYLTKAQTWALADEMGALDYIRKHTHTCYNGVVGGCHECPSCILRERGLSEYLESKKAV

SEQ ID NO: 40017 - protein, 219 aa, Neisseria flavescens
  misc_feature (1)..(219): tr|C0ENR7|C0ENR7_NEIFL 7-cyano-7-deazaguanine synthase OS=Neisseria flavescens NRL30031/H210 OX=546264 GN=queC PE=3 SV=1
MEKQQALVIFSGGQDSTTCLIQAIQTYGRENVQAITFQYGQRHAIELERARWIAQDLGVKQRVLDLSLMQQITHNALMDDTASIETASDGLPNTFVDGRNALFLLYAAIYAKGQGIRHIIAGVCETDFSGYPDCRDVFVKSMNVTLNLAMDYAFQIHTPLMYLTKAQTWALADEMGALDYICEHTHTCYNGVVGGCHECPSCILRERGLSEYLESKKAV

SEQ ID NO: 40018 - protein, 219 aa, Neisseria gonorrhoeae
  misc_feature (1)..(219): tr|A0A0M3GWJ2|A0A0M3GWJ2_NEIGO 7-cyano-7-deazaguanine s ynthase OS=Neisseria gonorrhoeae MIA_2011_03-10 OX=1351 790 GN=queC PE=3 SV=1
MSNQKALVIFSGGQDSTTCLIQAIQTYGRENVQAITFRYGQRHAVELERAEWIAQDLGVKQTVLDLSLMRQITHNALMDETAAIETADNGVPNTFVDGRNALFLLYAAIFAKGQGIRHIIAGVCETDFSGYPDCRGVFVKSMNVTLNLAMDYDFQIQTPLMYLTKAQTWALADEMGVLDYIREQTHTCYKGIVGGCRECPSCILRERGLAECLESKKAV

SEQ ID NO: 40019 - protein, 224 aa, Neisseria gonorrhoeae
  misc_feature (1)..(224): sp|Q5FA99|QUEC_NEIG1 7-cyano-7-deazaguanine synthase OS =Neisseria gonorrhoeae (strain ATCC 700825 / FA 1090) O X=242231 GN=queC PE=3 SV=1
MSNQKALVIFSGGQDSTTCLIQAIQTYGRENVQAITFRYGQRHAVELERAEWIAQDLGVSQTVLDLSLMRQITHNALMDETAAIETAAIETADNGVPNTFVDGRNALFLLYAAIFAKGQGIRHIIAGVCETDFSGYPDCRGVFVKSMNVTLNLAMDYDFQIHTPLMYLTKAQTWALADEMGVLDYIREQTHTCYKGIVGGCRECPSCILRERGLAECLESKKAV

SEQ ID NO: 40020 - protein, 219 aa, Neisseria iguanae
  misc_feature (1)..(219): tr|A0A2P7TYT0|A0A2P7TYT0_9NEIS 7-cyano-7-deazaguanine s ynthase OS=Neisseria iguanae OX=90242 GN=queC PE=3 SV=1
MHNQKALVIFSGGQDSTTCLLQAIQTYGRDNVQAMTFHYGQRHSIELECAHWIAQDLGIRQTVLDLSLIQQITRNALMEEGAAIQTASNGLPNTFVDGRNALFLLYAGIYAKGQNIKHIIVGVCETDFSGYPDCRDVFVKSMNVTLNLAMDYDFQIHTPLMYLTKAQTWALADELGYLDYIREQTHTCYNGVAGGCSECPSCVLRERGLREYLSARQAV

SEQ ID NO: 40021 - protein, 219 aa, Neisseria lactamica
  misc_feature (1)..(219): tr|E4ZEY4|E4ZEY4_NEIL0 7-cyano-7-deazaguanine synthase OS=Neisseria lactamica (strain 020-06) OX=489653 GN=que C PE=3 SV=1
MSNQQALVIFSGGQDSTTCLIQAVQTYGRENVRAITFQYGQRHAVELERAAWIAQDLGVPQTLVDLNLMKTITHNALMDEAASIETAGNGVPNTFVDGRNALFLLYAAIYAKGQGIRHIIAGVCETDFSGYPDCRDVFVKSMNVTLNLAMDYDFQIHTPLMYLTKAQTWALADEMGALDYIREQTHTCYNGIVGGCHECPSCILRERGLAEYLESKKTV

SEQ ID NO: 40022 - protein, 218 aa, Neisseria lactamica
  misc_feature (1)..(218): tr|D0WB79|D0WB79_NEILA 7-cyano-7-deazaguanine synthase OS=Neisseria lactamica ATCC 23970 OX=546265 GN=queC PE= 3 SV=1
MSNQQALVIFSGGQDSTTCLIQAVQTYGRENVRAITFQYGQRHAVELERAAWIAQDLGVPQTLVDLNLMKTITHNALMDEAAAIETVDNGVPNTFVDGRNALFLLYAAIHAKGQGIRHIIAGVCETDFSGYPDCRDVFVKSMNVTLNLAMDYDFQIHTPLMYLTKAQTWALADEMGALDYIREQTHTCYNGIVGGCHECPSCILRERGLAEYLESIVD

SEQ ID NO: 40023 - protein, 219 aa, Neisseria macacae
  misc_feature (1)..(219): tr|F9EUQ2|F9EUQ2_9NEIS 7-cyano-7-deazaguanine synthase OS=Neisseria macacae ATCC 33926 OX=997348 GN=exsB PE=3 SV=1
MQNQQALVIFSGGQDSTTCLIQAIQTYGRENVQAITFQYGQRHAVELERARWIAQDLGVKQTVLDLSLMQQITHNALMDDTAAIETASDGLPNTFVDGRNALFLLYAAIYAKGQGIRHIIAGVCETDFSGYPDCRDVFVKSMNVTLNLAMDYAFQIHTPLMYLTKAQTWALADEMGALDYIREQTHTCYNGIVGGCHECPSCVLRERGLTEYLESKKAV

SEQ ID NO: 40024 - protein, 88 aa, Neisseria macacae
  misc_feature (1)..(88): tr|F9EWY4|F9EWY4_9NEIS Queuosine biosynthesis protein Q ueC (Fragment) OS=Neisseria macacae ATCC 33926 OX=99734 8 GN=HMPREF9418_1661 PE=4 SV=1
GESVFYDFEDSLTCDPLMDINDNFYTSFLKIKYDNNHNSKISSIVFLSSYIFNLNKNLLEDYRERSKFGKDFQKERDRNRLVNYNINS

SEQ ID NO: 40025 - protein, 219 aa, Neisseria meningitidis
  misc_feature (1)..(219): sp|Q9K0Q9|QUEC_NEIMB 7-cyano-7-deazaguanine synthase OS =Neisseria meningitidis serogroup B (strain MC58) OX=12 2586 GN=queC PE=3 SV=1
MSNQQALVIFSGGQDSTTCLIQAIQTYGRENVQAITFQYGQRHAVELERARWIAQDLGVKQTVLDLSLMRQITHNALMDDTAAIETAENGVPNTFVDGRNALFLLYAAIYAKGQGIRHIIAGVCETDFSGYPDCRDVFVKSMNVTLNLAMDYDFQIHTPLMYLTKAQTWALADEMGVLDYIREQTHTCYNGIVGGCRECPSCILRERGLAEYLESKKAV

SEQ ID NO: 40026 - protein, 220 aa, Neisseria meningitidis
  misc_feature (1)..(220): sp|A9M1Y9|QUEC_NEIM0 7-cyano-7-deazaguanine synthase OS =Neisseria meningitidis serogroup C (strain 053442) OX= 374833 GN=queC PE=3 SV=1
MSNQQALVIFSGGQDSTTCLIQAIQTYGRENVQAITFQYGQRHAVELERARWIAQDLGIKQTVLDLSLMRQITHNALMDDTAAIETAENGVPNTFVDGRNALFLLYAAIYAKGQGIRHIIAGVCETDFSGYPDCRDVFVKSMNVTLNLAMDYDFQIHTPLMYLTKAQTWALADEMGALDYIREQTHTCYNGIVGGGCRECPSCILRERGLAEYLESKKAV

SEQ ID NO: 40027 - protein, 255 aa, Neisseria mucosa
  misc_feature (1)..(255): tr|D2ZU77|D2ZU77_NEIMU 7-cyano-7-deazaguanine synthase OS=Neisseria mucosa ATCC 25996 OX=546266 GN=queC PE=3 S V=1
MFFQAAYIRTKSAIIRTIFSIFAVRKPPALPKLGFTMQHPQALVIFSGGQDSTTCLIQAIQTYGRENVQAITFQYGQRHAVELERARWIAQDLGVKQTVLDLSLMQQITHNALMDDTAAIETASDGLPNTFVDGRNALFLLYAAIYAKGQGIRHIIAGVCETDFSGYPDCRDVFVKSMNVTLNLAMDYAFQIHTPLMYLTKAQTWALADKMGALDYIREQTHTCYNGIVGGCHECPSCVLRERGLAEYLESKRVV

SEQ ID NO: 40028 - protein, 219 aa, Neisseria mucosa
  misc_feature (1)..(219): tr|A0A2R4AW71|A0A2R4AW71_NEIMU 7-cyano-7-deazaguanine s ynthase OS=Neisseria mucosa OX=488 GN=queC PE=3 SV=1
MQNQQALVIFSGGQDSTTCLIQAIQTYGRENVQAITFQYGQRHAVELERARWIAQDLGVKQTVLDLSLMQQITHNALMDDTAAIETASDGLPNTFVDGRNALFLLYAAIYAKGQGIRHIIAGVCETDFSGYPDCRDVFVKSMNVTLNLAMDYAFQIHTPLMYLTKAQTWALADEMGALDYIREQTHTCYNGIVGGCHECPSCVLRERGLAEYLESKRVV

SEQ ID NO: 40029 - protein, 219 aa, Neisseria perflava
  misc_feature (1)..(219): tr|A0A2I1QVL5|A0A2I1QVL5_NEIPE 7-cyano-7-deazaguanine s ynthase OS=Neisseria perflava OX=33053 GN=queC PE=3 SV= 1
MEKQQALVIFSGGQDSTTCLIQAIQTYGRENVQAITFQYGQRHAIELERARWIAQDLGVKQTVLDLSLMQQITHNALMDDTASIETASDGLPNTFVDGRNALFLLYAAIYAKGQGIRHIIAGVCETDFSGYPDCRDVFVKSMNVTLNLAMDYAFQIHTPLMYLTKAQTWALADEMGVLDYICEHTHTCYNGVVGGCHECPSCILRERGLSEYLESKKAV

SEQ ID NO: 40030 - protein, 219 aa, Neisseria polysaccharea
  misc_feature (1)..(219): tr|E2PI34|E2PI34_NEIPO 7-cyano-7-deazaguanine synthase OS=Neisseria polysaccharea ATCC 43768 OX=546267 GN=queC PE=3 SV=1
MSNQQALVIFSGGQDSTTCLIQAIQTYGRENVQAITFQYGQRHDVELERARWIAQDLGVKQTVLDLSLMRQITHNALMDEAAAIETAENGVPNTFVDGRNALFLLYAAIYAKGQGIRHIIAGVCETDFSGYPDCRDVFVKSMNVTLNLAMDYDFQIHTPLMYLTKAQTWALADEMGALDYIREQTHTCYNGIVGGCHECPSCVLRERGLAEYLESKKAI

SEQ ID NO: 40031 - protein, 222 aa, Neisseria shayeganii
  misc_feature (1)..(222): tr|G4CF32|G4CF32_9NEIS 7-cyano-7-deazaguanine synthase OS=Neisseria shayeganii 871 OX=1032488 GN=exsB PE=3 SV= 1
MSQTQALVIFSGGQDSTTCLLQAIARYGRPAVHALTFQYGQRHAIELERARWIAQDLGVAHTEFTLPPLNTLSRNALTDASLPIEQATPDAVPNTLVDGRNALFLLYAAIFAKSKNIRHLILGVCETDFSGYPDCRDIFVRSMNTTLNLAMDYPFEIHTPLMWLTKAQTWALADELGYLNYVREHTHTCYQGVAGGCGQCPACLLRERGLAEYLAQKAERQP

SEQ ID NO: 40032 - protein, 219 aa, Neisseria sicca
  misc_feature (1)..(219): tr|C6M0K7|C6M0K7_NEISI 7-cyano-7-deazaguanine synthase OS=Neisseria sicca ATCC 29256 OX=547045 GN=queC PE=3 SV =1
MQNQQALVIFSGGQDSTTCLIQAIQTYGRENVQAITFQYGQRHAVELERARWIAQDLGVKQTVLDLSLMQQITHNALMDDTAAIETASDGLPNTFVDGRNALFLLYAAIYAKGQGIRHIIAGVCETDFSGYPDCRDVFVKSMNVTLNLAMDYAFQIHTPLMYLTKAQTWALADEMGALDYIREQTHTCYNSIVGGCHECPSCVLRERGLAEYLESKKAV

SEQ ID NO: 40033 - protein, 219 aa, Neisseria sicca; identical to SEQ ID NO: 40028
  misc_feature (1)..(219): tr|A0A1V0HAH0|A0A1V0HAH0_NEISI 7-cyano-7-deazaguanine s ynthase OS=Neisseria sicca OX=490 GN=queC PE=3 SV=1

SEQ ID NO: 40034 - protein, 219 aa, Neisseria sp.
  misc_feature (1)..(219): tr|A0A1F1HVM2|A0A1F1HVM2_9NEIS 7-cyano-7-deazaguanine s ynthase OS=Neisseria sp. HMSC073G10 OX=1739369 GN=queC PE=3 SV=1
MEKQQALVIFSGGQDSTTCLIQAIQTYGRENVQAITFQYGQRHAIELERARWIAKDLGVKQTVLDLSLMQQITHNALMDDTASIETASDGLPNTFVDGRNALFLLYAAIYAKGQGIRHIIAGVCETDFSGYPDCRDVFVKSMNVTLNLAMDYAFQIHTPLMYLTKAQTWALADEMGVLDYIREQTHTCYNGVVGGCHECPSCILRERSLSEYLESKKAV

SEQ ID NO: 40035 - protein, 219 aa, Neisseria sp.
  misc_feature (1)..(219): tr|A0A2H9X015|A0A2H9X015_9NEIS 7-cyano-7-deazaguanine s ynthase OS=Neisseria sp. N95_16 OX=2024408 GN=queC PE=3 SV=1
MHNQKALVIFSGGQDSTTCLLQAIQTYGRDNVQAITFHYGQRHSIELERAHWIAQDLGIAQTVLDLSLIRQITHNALMEEGADIQTAANGMPNTFVDGRNALFLMYAAIYAKGQNIKHIIVGVCETDFSGYPDCRDVFVKSMNVTLNLAMDYDFQIHTPLMYLTKAQTWALADELGYLDYVREQTHTCYNGVVGGCGECPSCVLRERGLQEYLESKQAI

SEQ ID NO: 40036 - protein, 219 aa, Neisseria subflava
  misc_feature (1)..(219): tr|A0A4D7WJS1|A0A4D7WJS1_NEISU 7-cyano-7-deazaguanine s ynthase OS=Neisseria subflava OX=28449 GN=queC PE=3 SV= 1
MEKQQALVIFSGGQDSTTCLIQAIQTYGCENVQAITFQYGQRHAIELERARWIAQDLGVKQTVLDLSLMQQITHNALMDDTAYIETAPDGLPNTFVDGRNALFLLYAAIYAKGQGIRHIIAGVCETDFSGYPDCRDVFVKSMNVTLNLAMDYAFQIHTPLMYLTKAQTWALADEMGVLDYICEHTHTCYNGVVGGCHECPSCILRERGLSEYLESKKVV

SEQ ID NO: 40037 - protein, 219 aa, Neisseria subflava
  misc_feature (1)..(219): tr|D3A3Y2|D3A3Y2_NEISU 7-cyano-7-deazaguanine synthase OS=Neisseria subflava NJ9703 OX=546268 GN=queC PE=3 SV= 1
MEKQQALVIFSGGQDSTTCLIQAIQTYGRENVQAITFQYGQRHAIELERARWIAQDLGVKQTVLDLSLMQQITHNALMDDTVSIETASDGLPNTFVDGRNALFLLYAAIYAKGQGIRHIIAGVCETDFSGYPDCRDVFVKSMNVTLNLAMDYAFQIHTPLMYLTKAQTWALADEMGVLDYIREHTHTCYNGVVGGCHECPSCILRERGLSEYLKSKKAV

SEQ ID NO: 40038 - protein, 220 aa, Neisseria wadsworthii
  misc_feature (1)..(220): tr|G4CSP9|G4CSP9_9NEIS 7-cyano-7-deazaguanine synthase OS=Neisseria wadsworthii 9715 OX=1030841 GN=exsB PE=3 S V=1
MQNEKALVIFSGGQDSTTCLIQAIQTYGRENVQAITFQYGQRHAIELDCARRIAEDLGIAQTVLDLSLMQQITHNALMDGTAEIQTGNNGVPNTFVDGRNALFLLYAAIYAKSQNIKHIITGVCETDFSGYPDCRDVFVKSMNVTLNLAMDYAFQIHTPLMYLTKAQTWALADRLGCFDYIREHTHTCYHGVEGGCGECPSCVLRERGLADYLAVRKSDR

SEQ ID NO: 40039 - protein, 218 aa, Neisseria weaveri
  misc_feature (1)..(218): tr|A0A3S5A916|A0A3S5A916_9NEIS 7-cyano-7-deazaguanine s ynthase OS=Neisseria weaveri OX=28091 GN=queC PE=3 SV=1
MQNEQALVIFSGGQDSTTCLIQAIHTYGRENVHAVTFQYGQRHAVELDCARRIAEDLGIAQTVLDLSLMQQITHNALMDDTAEIQTASNGVPNTFVDGRNALFLLYAAIYAKSQNIKHIITGVCETDFSGYPDCRDVFVKSMNVTLNLAMDYAFQIHTPLMYLTKAQTWALADRLGCLDYIREHTHTCYHGVTGGCGECPSCVLRERGLAEYLADQRP

SEQ ID NO: 40040 - protein, 221 aa, Neisseria zalophi
  misc_feature (1)..(221): tr|A0A5J6PTJ0|A0A5J6PTJ0_9NEIS 7-cyano-7-deazaguanine s ynthase QueC OS=Neisseria zalophi OX=640030 GN=queC PE= 4 SV=1
MLSQKALVIFSGGQDSTTCLLQAIHAYGRENVQAITFEYGQRHAIELERARWIAADLGVPQTVLNLNLIQQITHNALMDDTTDIQTATDGMPNTFVDGRNALFLLYAAIYARSQNIKNIIIGVCETDFSGYPDCRDIFVKSMNVTLNLAMNDSFQIHTPLMYLTKAQTWALADEMGYLDYIREKTHTCYYGVEGGCGECPSCILRERGLAEYLASKNHVSV

SEQ ID NO: 40041 - protein, 216 aa, Neisseria zoodegmatis
  misc_feature (1)..(216): tr|A0A1X3CQ55|A0A1X3CQ55_9NEIS 7-cyano-7-deazaguanine s ynthase OS=Neisseria zoodegmatis OX=326523 GN=queC PE=3 SV=1
MHNEKALVVFSGGQDSTTCLIQAVQTYGRENVQAITFQYGQRHAIELERARWIAEDLGIAQTVLDLSLMQQITHNALMDDTAEIQTASNGVPNTFVDGRNALFLIYAAIYAKSQNIKHIIVGVCETDFSGYPDCRDVFVKSMNVTLNLAMDYAFQIHTPLMYLTKAQTWALADRLGCFDYIREHTHTCYHGVEGGCGECPSCVLRERGLAEYLASR

SEQ ID NO: 40042 - protein, 216 aa, Neisseria zoodegmatis
  misc_feature (1)..(216): tr|A0A378WVK7|A0A378WVK7_9NEIS 7-cyano-7-deazaguanine s ynthase OS=Neisseria zoodegmatis OX=326523 GN=queC PE=3 SV=1
MNNEKALVIFSGGQDSTTCLIQAIQTYGRENVQAITFQYGQRHAVELDCARRIAEDLGIAQTVLDLSLMQQITHNALMDDTAEIQTASNGVPNTFVDGRNALFLLYAAIYAKSQNIKHIIVGVCETDFSGYPDCRDVFVKSMNVTLNLAMDYAFQIHTPLMYLTKAQTWALADRLGCLDYIREHTHTCYHGVEGGCGECPSCVLRERGLAEYLASR

SEQ ID NO: 40043 - protein, 225 aa, Neisseriaceae bacterium
  misc_feature (1)..(225): tr|A0A2I7N315|A0A2I7N315_9NEIS 7-cyano-7-deazaguanine s ynthase OS=Neisseriaceae bacterium DSM 100970 OX=205283 7 GN=queC PE=3 SV=1
MTKKAVVILSGGLDSSTLAYYLADKGYQLICVSYNYGQKHIKELESAAKIAANLGAKHHVIDIRFMNGFLQSSSLVNQDLDNPKEDYARENMLVTVVPNRNTMMLSLAWTIACAENAELLAFGPHKGDNYVYADCRPDYFNALNLALRLGTIDSRHEDLELSAPFINFTKTDIVKTGAKLDVPFADTWSCYDGREQHCGLCGTCRQRRQSFIDAGISDPTSYEVS

SEQ ID NO: 40044 - protein, 224 aa, Neisseriaceae bacterium
  misc_feature (1)..(224): tr|A0A431ITT1|A0A431ITT1_9NEIS 7-cyano-7-deazaguanine s ynthase OS=Neisseriaceae bacterium OX=2014784 GN=queC P E=3 SV=1
MKKKAVVILSGGLDSSTLSYHLASEGYDLICVSFDYGQKHIKELQSAAFIAKELNAPHHIINLSFMHQFLQQSSLVNPDLANPKQDYARENMLVTVVPNRNTMMLSLAWTIACAQNAEVLAFGPHKGDNYVYADCRPDYFLAMNLSLRLGTIDSRHEDLNLSAPFLNWSKTDIIRRGAELNVPFAKTWSCYDGLEEHCGVCGTCRQRKEAFIAANITDPTKYRE

SEQ ID NO: 40045 - protein, 227 aa, Neisseriales bacterium
  misc_feature (1)..(227): tr|A0A5C8B472|A0A5C8B472_9NEIS 7-cyano-7-deazaguanine s ynthase OS=Neisseriales bacterium OX=2053582 GN=queC PE =3 SV=1
MSMTKKAVVILSGGLDSSTLAYYLADKGYKLICVSYNYGQKHIKELESAAKIAHNLGAKHHIIDIRFMNGFLQSSSLVNQDLDNPKEDYARENMLVTVVPNRNTMMLSLAWTIACAENAELLAFGPHKGDNYVYADCRPDYFNALNLALRLGTIDSRHEDLELSAPFINFTKTDIVTTGAKLGVPFADTWSCYDGREKHCGLCGTCRQRRQSFIDAGISDPTSYEVS

SEQ ID NO: 40046 - protein, 234 aa, Neoasaia chiangmaiensis
  misc_feature (1)..(234): tr|A0A1U9KM97|A0A1U9KM97_9PROT 7-cyano-7-deazaguanine s ynthase OS=Neoasaia chiangmaiensis OX=320497 GN=queC PE =3 SV=1
MALSNDTALVLFSGGQDSATCLAWALARFRHVETLGFDYGQRHAVELECRETLRRDMASISAEWAARLGPDHMLDLGVLGALSETALTREAEISLTESGLPSTFVPGRNLIFLNFAAALAVRRQARHIVTGVCETDYSGYPDCRDDTIKALQVALNLGMAQRFVLHTPLMWRDKAQTWSLAEELGGADLVEAINRHSHSCYLGDRTHAHAWGYGCGTCPACELRAKGWAAYVER

SEQ ID NO: 40047 - protein, 229 aa, Neochlamydia sp.
  misc_feature (1)..(229): tr|A0A3Q9XV48|A0A3Q9XV48_9BACT 7-cyano-7-deazaguanine s ynthase OS=Neochlamydia sp. S13 OX=1353976 GN=NCS13_1_0 736 PE=3 SV=1
MRKKKAVVIHSGGMDSSICLALAMQELGKDAVTSLSFYYGQRHASEIIQAEKICKDWNVAHATLNLSCLSQVTTNALINPAVAIEKDPPTTPNTLVVGRNGLMARLGAIYADYLGASFIYLGVIGVEGNYSGYRDCSREYFDLKQKILRIDLANPHFKILTPLVSLTKKETLEIAHRLGILEYLLNTTITCYEGISQAGCQQCPACRLRNKGLQEFKEANPGVLLNVEP

SEQ ID NO: 40048 - protein, 219 aa, Neochlamydia sp.
  misc_feature (1)..(219): tr|A0A3T1C8I7|A0A3T1C8I7_9BACT 7-cyano-7-deazaguanine s ynthase OS=Neochlamydia sp. S13 OX=1353976 GN=queC PE=3 SV=1
MKRAIVLLSGGLDSTVILALALAQGRECYALSFDYGQRHRIELTHASKIATYYQVKHCIVQIDSRVFKSSSLVSDLAVPKNRSKEDIGSGKTPNTYVPARNTLFLAYAMGQAEILDAQEIYLGANALDAPSYPDCTLSYIQAFQQVLNVGTKQAAEGNAPQLLTPLIHWDKAEIIRQGIALDVPMHMTFSCYDPTPQQKPCGQCDACILRAHGFVAAKG

SEQ ID NO: 40049 - protein, 270 aa, Neokomagataea sp.
  misc_feature (1)..(270): tr|A0A506UKH0|A0A506UKH0_9PROT 7-cyano-7-deazaguanine s ynthase OS=Neokomagataea sp. Jb2 OX=2558904 GN=queC PE= 3 SV=1
MTDDIPSLHHSHDLARPSWALSGALPLGVARGAALVLFSGGQDSATCLAWALTAFERVETVGFHYGQRHAVELDCRATLRDQIAALNPLWGARLGADHMIDLPALGKLSETALTREAEITYERDGLPNTFVPGRNIIFMNFAAALAYRRNLRHLVTGVCETDYSGYPDCRDDTMKSLQVTLNLGLGTTPESGGRFVIHTPLMWLDKAQTWRLCEILGGPSLVETIRRDSHSCYQGDRDQEHDWGYGCGHCPACTLRANGWAEYQARKEAR

SEQ ID NO: 40050 - protein, 237 aa, Neokomagataea tanensis
  misc_feature (1)..(237): tr|A0A4Y6V588|A0A4Y6V588_9PROT 7-cyano-7-deazaguanine s ynthase OS=Neokomagataea tanensis OX=661191 GN=queC PE= 3 SV=1
MTVHANESALVLFSGGQDSATCLAWALTHYKRVETMGFDYGQRHSVELSCRETLREQMASLKPEWKDRLGADHMLDLRSLGTLSDTALTREAEISMTESGLPNTFVPGRNLLFLTYAAALAYRRSIKHIVTGVCETDYSGYPDCRDDTIKALQVALNLGMEQRFVLHTPLMWINKAQTWSLTETLGGNALVELINTESHSCYKGDRDHHHAWGFGCGECPACDLRAEGWQQYRETTV

SEQ ID NO: 40051 - protein, 236 aa, Neorhizobium alkalisoli
  misc_feature (1)..(236): tr|A0A561QXK0|A0A561QXK0_9RHIZ 7-cyano-7-deazaguanine s ynthase OS=Neorhizobium alkalisoli OX=528178 GN=queC PE =3 SV=1
MKTIVVCSGGLDSVSLAQRIASQGNLFGLISFDYGQRHRKELDFAAACAKRLGVFHQIIDMTAVGAQLTGSALTDDVEVPDGHYAEETMRVTVVPNRNAIMLTIAFGVAAARQADAVAIAVHGGDHFIYPDCRPGFIDAFQVMQNHALDGYAKVELLAPYVNGSKADIVTDGAKHDTPFAETWSCYKGGARHCGRCGTCVERREAFHLAGVADPTDYEDPDFWKAATAGFSAEEVR

SEQ ID NO: 40052 - protein, 464 aa, Neorhizobium galegae
  misc_feature (1)..(464): tr|A0A0T7G624|A0A0T7G624_RHIGA Putative PP-loop superfa mily ATPase OS=Neorhizobium galegae bv. officinalis OX= 323656 GN=NGAL_HAMBI1146_54990 PE=4 SV=1
MDQMTTEAPTEVHHEKHLFAVERGRGAQRPELDKATVAEIGKHIQFVPDILDTFDVKGFAAKHYDLMVLAAAIEFADRRWRRPASWLRNLHVTIPVIDHACWSRPEVQSSLRSAMNFLTGDSWRFTFVKAAEASPIGWRQVPLMFEQPKTFAIAYSNGLDSRAVSALSGPPSEALCIRVASTRQRRMEGDSHFTQIPFRVKGFKGKESSFRSRGFQFAAMATIASHLSNISRIIVPESGQGALGPVLVPLYGIYTDYRNFPAFFRKMERFTRVLLDCSIKFEQPRLWSTKGETMKAFLGLPGKKQQHLTNTRSCWQTRRIVNAEHRRQCGLCAACLLRRMSLHAAEIVEPGDAYVVSDLSAAEVDSALASITDDADRDIMVEYGSVGARHLDHLATMSELPDAKLRPFASQIAAATGEAYEQTLRNLRIMLMTHTREWRTFLSAQGEKSFLKNWMDGGRYDCSE

SEQ ID NO: 40053 - protein, 236 aa, Neorhizobium galegae
  misc_feature (1)..(236): tr|A0A0T7G319|A0A0T7G319_RHIGA 7-cyano-7-deazaguanine s ynthase OS=Neorhizobium galegae bv. officinalis OX=3236 56 GN=queC PE=3 SV=1
MKTIVVCSGGLDSVSLAHRIAEEQQLLGLISFDYGQRHRKELDFAAACAIRLGVFHEIIDMRGIGSRLTGSALTDDMDVPDGHYAQETMRVTVVPNRNAIMLSIAFGVAAARNADAVAIAVHGGDHFIYPDCRPGFIDAFQAMQDHALDGYASVRLLAPYVHGSKADIVTDGARHATPFAETWSCYKGGALHCGRCGTCVERREAFHLAGIEDPTEYEDPDFWRAATEEFRAEETR

SEQ ID NO: 40054 - protein, 241 aa, Neorhizobium sp.
  misc_feature (1)..(241): tr|A0A386E139|A0A386E139_9RHIZ 7-cyano-7-deazaguanine s ynthase OS=Neorhizobium sp. NCHU2750 OX=1825976 GN=queC PE=3 SV=1
MKTFVVCSGGLDSVSLAHSIAARGELMGLISFDYGQRHQKELEFAALAAKHLGVFHQIIDMRAIGSQLTGSALTDDLDVPDGHYAEETMRITVVPNRNAIMLTIAFGVAAARQADAVAIAVHGGDHFIYPDCRPGFIDSFDAMQRHALDGYASVKLLAPYVTGSKADIVTDGARHGTPFAETWSCYKGGERHCGRCGTCVERREAFHLAGVEDPTDYADPDFWKATTQGFKAPEFKAEEVR

SEQ ID NO: 40055 - protein, 236 aa, Neorhizobium sp.
  misc_feature (1)..(236): tr|A0A4R3A9D5|A0A4R3A9D5_9RHIZ 7-cyano-7-deazaguanine s ynthase OS=Neorhizobium sp. JUb45 OX=2485113 GN=queC PE =3 SV=1
MKTIVVCSGGLDSVSLAHRIADQGDLMGLISFDYGQRHKKELEYAAACAKRLGVFHQIIDMRAIGSQLTGSALTDDLDVPDGHYAEETMRVTVVPNRNAIMLTVAFGVAAARAAEAVAIAVHGGDHFIYPDCRPGFIDSFDAMQRHALDGYASVKLLAPYVNGSKADIVSDGAKHATPFVETWSCYKGGEKHCGRCGTCVERREAFHLAGVEDPTDYADPDFWKAATAGFRAEEIR

SEQ ID NO: 40056 - protein, 233 aa, Neosynechococcus sphagnicola
  misc_feature (1)..(233): tr|A0A098TJQ2|A0A098TJQ2_9CYAN 7-cyano-7-deazaguanine s ynthase OS=Neosynechococcus sphagnicola sy1 OX=1497020 GN=queC PE=3 SV=1
MKAVILLSGGLDSATVLYQAQADGCDCYALSFDYQQRHRRELTAARTIAQCAGVIDHQVVSFDLRQWGGSALTDVEIDLPQSRSLAEMSQTIPVTYVPARNTIFLSFALAYGETIAAERVYLGVNSLDYSGYPDCRPDYIQAMQTVFQLGTKQGREGTAIAIVTPLITLKKTAIIELGDRLGVPWELTWSCYAGGDEACGTCDACQLRLTAFAELGRTDPIPYGLNRNPQASL

SEQ ID NO: 40057 - protein, 227 aa, Neptuniibacter sp.
  misc_feature (1)..(227): tr|A0A136HHU8|A0A136HHU8_9GAMM 7-cyano-7-deazaguanine s ynthase OS=Neptuniibacter sp. Phe_28 OX=1795871 GN=queC PE=3 SV=1
MNTPASPKAVVLLSGGLDSATALAMASDRGYDCYVLSFDYGQRSLTELNAAKEIAKQLKAVEHRVIRLHLEDFGGSALTDHSIDVPEEETDEIPVTYVPARNTVFLSLALGWAEVLEADTIFIGVNAVDYSGYPDCRPEYIAAFETMANLATKRGVSGDPIRIETPLIDLSKEQIIQAGTTLGVDYGLTVSCYQADDDGRACGVCDSCRLRTQGFVDAGIKDPTRYQ

SEQ ID NO: 40058 - protein, 228 aa, Neptunomonas antarctica
  misc_feature (1)..(228): tr|A0A1N7KB07|A0A1N7KB07_9GAMM 7-cyano-7-deazaguanine s ynthase OS=Neptunomonas antarctica OX=619304 GN=queC PE =3 SV=1
MSKPAPKAVVLLSGGLDSATALAMAKKQGFQCFALSFDYGQRSLTELNAARRIVEQMGIAEHRVIRLHLEDFGGSALTDHTIDVPDHDTGGIPVTYVPARNTVFLSLALGWAEVLEADAIFIGVNAVDYSGYPDCRPEFIDAFEKMANLATKTGISGQGIKIHTPLMNMTKADIIREGQYLGVSYADTISCYQADDDGRACGVCDSCRLRAQGFKDAGVTDPTHYIKV

SEQ ID NO: 40059 - protein, 232 aa, Neptunomonas qingdaonensis
  misc_feature (1)..(232): tr|A0A1I2UUF8|A0A1I2UUF8_9GAMM 7-cyano-7-deazaguanine s ynthase OS=Neptunomonas qingdaonensis OX=1045558 GN=que C PE=3 SV=1
MIKPAPKPARKAVVLLSGGLDSATALAMAKNQGFDCYVLSFDYGQRALTELNAARCVVEQLGITEHRVIRLHLEDFGGSALTDHSIDVPDHETGGIPVTYVPARNTVFLSLALGWAEVLEATAIFIGVNAVDYSGYPDCRPEFIDAFEKMANLATKTGVSGQGVKIYTPLMNMTKADIIREGQSLGVNYADTISCYQADDEGRACGVCDSCRLRAKGFEDAGVQDPTRYISA

SEQ ID NO: 40060 - protein, 227 aa, Neptunomonas sp.
  misc_feature (1)..(227): tr|A0A437QCU6|A0A437QCU6_9GAMM 7-cyano-7-deazaguanine s ynthase OS=Neptunomonas sp. HPM-16 OX=1815562 GN=queC P E=3 SV=1
MNKPSPKAVVLLSGGLDSATALAIAKDQGFDCYVLSFDYGQRSLTELNAARKVVEQLGVSEHRTVRLHLEDFGGSALTDHDIDVPEQEEEGIPVTYVPARNTVFLSLALGWAEVLEASAIFIGVNAVDYSGYPDCRPEFIDAFEKMANLATRAGVEGQGVAIHTPLMRLTKSDIIREGQRLGLNYADTVSCYQANDNGEACRVCDSCRLRAKGFEDAGVPDPTRYFA

SEQ ID NO: 40061 - protein, 229 aa, Nevskiales bacterium
  misc_feature (1)..(229): tr|A0A2F0A0V0|A0A2F0A0V0_9GAMM 7-cyano-7-deazaguanine s ynthase OS=Nevskiales bacterium OX=2026766 GN=queC PE=3 SV=1
MSARAVVLVSGGLDSATTLAIARHEGFECHGLSVHYGQRHLSELQAAKRVCSHLGAVDHREVAVGLDALGGSALTDPNIDVPTRQTDGIPVTYVPARNTVMLSIAMAHAEVIGANTVFIGVNAVDYSGYPDCRPAFIDAFANLSRWATRQGVETGQGLAVHAPLIQLTKADIIRRGVALGVDYAMTVSCYQADAGGAACGVCDSCRIRRDGFAQAGVLDPTLYQSGASG

SEQ ID NO: 40062 - protein, 205 aa, Niabella sp.
  misc_feature (1)..(205): tr|A0A5C7W750|A0A5C7W750_9BACT 7-cyano-7-deazaguanine s ynthase (Fragment) OS=Niabella sp. OX=1962976 GN=E6Q58_ 03330 PE=3 SV=1
VLMYSGGVDSTVAGLILQEQGKDVYPLFIDYGQSSVTAERQLVENVPVQLGFQPTQVIETDLLKKLTRSKLLGEESKDDSDAWVPGRNTLFMVIAGIYAEQIDGDGIAIGYMLDDNFVFGDNDYFHHKGVEDILSKSFLRPMEVFLPIRSLTKKDLLKRLSDAGMLDLTVSCWNAQYNDGKITSCHECANCKEREKNIAEIKENI

SEQ ID NO: 40063 - protein, 269 aa, Niastella populi
  misc_feature (1)..(269): tr|A0A1V9G6G7|A0A1V9G6G7_9BACT 7-cyano-7-deazaguanine s ynthase OS=Niastella populi OX=550983 GN=A4R26_33515 PE =3 SV=1
MKNAVVIFSGGVDSTAATLWTLEQGYDDVELLTYRFADERRQYGELKGAMTVASHLNLNHTIIDHQIPYPAYPLTNQPFCQHIERKELPNDVALYGVFPFNVALLLIFGASYAALRNATDIIFGAIADEAHISPDFRTEYTELITQLLNKSKTVTKKEMKVITPLVNKHKWEIMETYKGKEDLFHKTWSCKYSNDSTHCGECYGCEGRRLGALLAGLDDKTAYKKNEIEFPFSDFELNTMKNKETRSSLLSNIDFLSKISLYSHGSGKG

SEQ ID NO: 40064 - protein, 363 aa, Niastella populi
  misc_feature (1)..(363): tr|A0A1V9GB99|A0A1V9GB99_9BACT Uncharacterized protein OS=Niastella populi OX=550983 GN=A4R26_32630 PE=4 SV=1
MDNIADPTIYFDDKGICNYYYGYKEAEKNGILTGREAEMKISEVVRLLKEKGRNKKYDCIIGVSGGIDSTYLSLKAKEYGLRVLCVHFDNGWNSELAVKNIENIVSKCGFDLYTYVIDWEEFKDIQLAYFKAGVIDIEAVTDIAIFDSLDRICAEKNVGFILDGRNICTEQTLPSCWINKNPNNLYAIHQKFGKIPLNRYPAKFKDGKYLRPRGSYESIPLLNYLDYNKKRVKEIIARELGWKDYGGKHYESVFTRFYQGHILPEKFKVDKRKAHLSNLIFSGQLTKEEALLELEKPVYPEGQLEIDKTFVLKKLGFSKEEFDAYINAPSFSHEYYGNNSDTYQTTYVKARHFFGRIKRKLFS

SEQ ID NO: 40065 - protein, 226 aa, Nibricoccus aquaticus
  misc_feature (1)..(226): tr|A0A290QBI1|A0A290QBI1_9BACT 7-cyano-7-deazaguanine s ynthase OS=Nibricoccus aquaticus OX=2576891 GN=queC PE= 3 SV=1
MKVVVLCSGGMDSVTALYWARKEHAVLAAVSFDYGAKHNPKELPFAAEHAAALGVRHEVVSLRFMDRLFTSDLLSSGGEIPEGHYEAANMKQTVVPFRNPIMLSIATGFAESIGAEGLVIAAHGGDHAIYPDCREEFMRAMGEAMRLGTYAGIQLLRPFIAISKGQIAAEGAKLGVDFSRTWSCYKGGAIHCGKCGTCVERREAFLTAGVVDPTVYAETGALPAKP

SEQ ID NO: 40066 - protein, 246 aa, Nicoletella semolina
  misc_feature (1)..(246): tr|A0A4R2N7X2|A0A4R2N7X2_9PAST 7-cyano-7-deazaguanine s ynthase OS=Nicoletella semolina OX=271160 GN=queC PE=3 SV=1
MHSSFLSTPLSQGSLLLDGTSTNDSVQKHALPKAAVIFSGGQDSTTCLFLAIKEFGLKNVEVITFQYGQRHAIELQKAQWIAQDLGVKQTVIDTSVIKAITTNALMDENATIEQQGSMPNTFVDGRNALFLLYAAIYAKGQGIHTIFTGVCETDFSGYPDCRDVFIKSMNVTLNLAMDYPFDIRTPLMFLTKKQTWALADKLGAFDYVRNHTHTCYLGVDGGCHDCPSCRLREKGLAEYLEEKTNV

SEQ ID NO: 40067 - protein, 234 aa, Nisaea sp.; identical to SEQ ID NO: 37116
  misc_feature (1)..(234): tr|A0A2D7JNN3|A0A2D7JNN3_9PROT 7-cyano-7-deazaguanine s ynthase OS=Nisaea sp. OX=2024842 GN=queC PE=3 SV=1

SEQ ID NO: 40068 - protein, 241 aa, Nisaea sp.
  misc_feature (1)..(241): tr|A0A2D7Z479|A0A2D7Z479_9PROT 7-cyano-7-deazaguanine s ynthase OS=Nisaea sp. OX=2024842 GN=queC PE=3 SV=1
  misc_feature (72)..(72): Xaa can be any naturally occurring amino acid
  misc_feature (78)..(78): Xaa can be any naturally occurring amino acid
  misc_feature (191)..(191): Xaa can be any naturally occurring amino acid
  misc_feature (229)..(229): Xaa can be any naturally occurring amino acid
MATMSDTALVLFSGGQDSATCLAWALDRFQHVETIAFDYGQNHRVELAVRGAFLAALRAAYPAWATKLGGDXVIDMGXLATISDTALTHDRAIEMTEAGLPNTFVPGRNLMFFTTAAAVAYRRGARHLVGGMCETDYSGYPDCRDDTLKALQVALTLGLDRRTTVHTPLMWLDKAATWQMAWRLGGQVLVXMLVEHTHTCYRGVRDRRHDWGYGCDDCPACELRKSGWXRFAADREKRGDL

SEQ ID NO: 40069 - protein, 232 aa, Nissabacter sp.
  misc_feature (1)..(232): tr|A0A4P8SEV6|A0A4P8SEV6_9GAMM 7-cyano-7-deazaguanine s ynthase OS=Nissabacter sp. SGAir0207 OX=2126321 GN=queC PE=3 SV=1
MKRAVVVFSGGQDSTTCLIQAMAQYDEVHCVTFDYGQRHRAEIDVARQLAETLGARAHKVLDVGLLNELAVSSLTRDNIPVPGYEANAEGQLPSTFVPGRNILFLTLASIYAYQIGAEAVITGVCETDFSGYPDCRDEFVKALNHAVSLGLARDVRFETPLMWLNKAETWALADYYGQLERVRRDTLTCYNGIQGDGCGECAACHLRANGLAVYQQDRAGVLASLKQKSGLQ

SEQ ID NO: 40070 - protein, 225 aa, Nitratifractor salsuginis
  misc_feature (1)..(225): tr|E6X050|E6X050_NITSE 7-cyano-7-deazaguanine synthase OS=Nitratifractor salsuginis (strain DSM 16511 / JCM 12 458 / E9I37-1) OX=749222 GN=queC PE=3 SV=1
MKKAVCIISGGMDSAVSAALAKREGYEIIAVHFNYGQRTERKELECFRLLAEDLEAVERYEIDLPFFTQIGASALTDPSIDVPTEGLEPGVPVTYVPFRNGIFLSIAAAIAEKHGAEAIVIGVVEEDSSGYPDCRESYIRAMEKAINLGTKEETKITIKMPLVHLRKSEIVTKALEIGVDLSHTWSCYKEEEAACGVCDSCRLRLEGFKQAGVEDPIRYAESKND

SEQ ID NO: 40071 - protein, 237 aa, Nitratireductor aquibiodomus
  misc_feature (1)..(237): tr|I5BY79|I5BY79_9RHIZ 7-cyano-7-deazaguanine synthase OS=Nitratireductor aquibiodomus RA22 OX=1189611 GN=queC PE=3 SV=1
MKTLVVCSGGLDSVSLAHKVAREQNLIGLISFDYGQRHRKELDFAAKAAARLGVPHDLLDISAIGRHLSGSALTDAIDVPDGHYAEETMRVTVVPNRNAIMLAIAFGIAAARGADAVAAAVHGGDHFIYPDCRPGFIDAFQAMQDAALEGMGAVSLYTPFVNGTKGDIVREGARVDTPFAETWSCYRGGENHCGRCGTCVERREAFHEAGVPDPTIYDDPNFWLAATGQTTGEAEHV

SEQ ID NO: 40072 - protein, 234 aa, Nitratireductor indicus
  misc_feature (1)..(234): tr|K2PTC7|K2PTC7_9RHIZ 7-cyano-7-deazaguanine synthase OS=Nitratireductor indicus C115 OX=1231190 GN=queC PE=3 SV=1
MKTLVVCSGGLDSVSLAHKVAREHTLTGLVSFDYGQRHSKELDFAARAAERLGVLHDVIDISAVGSHLGGSALTDAIEVPDGHYAEETMRITVVPNRNAIMLAIAFGMASARRDDAVAAAVHSGDHFIYPDCRPAFINAFQAMQDAALEGMGAIRLYTPFLNGTKGDIVREGARAETPFAETWSCYKGAEHHCGRCGTCVERREAFFEAGIDDPTIYDDPDFWLRATGREARHV

SEQ ID NO: 40073 - protein, 236 aa, Nitratireductor pacificus
  misc_feature (1)..(236): tr|K2MRM4|K2MRM4_9RHIZ 7-cyano-7-deazaguanine synthase OS=Nitratireductor pacificus pht-3B OX=391937 GN=queC P E=3 SV=1
MKTLVVCSGGLDSVTLADKVARENTLVGLISFDYGQRHRTELNRARRAAERLSVPFDLIDISAFGRHLAGSALTDEIDVPDGHYAEETMRITVVPNRNAIMLTVAFGIASARKADAVAAAFHGGDHFIYPDCRPAFTDAFQAMQNAALDGLGRIELYTPFVDRSKAEIVAEGARLGTPFAETWSCYKGGARHCGRCGTCVERREAFHLADVADPTGYDDADFWRAATRGKANHVPG

SEQ ID NO: 40074 - protein, 200 aa, Nitratireductor sp.
  misc_feature (1)..(200): tr|A0A1H4MPV2|A0A1H4MPV2_9RHIZ 7-cyano-7-deazaguanine s ynthase OS=Nitratireductor sp. ES.061 OX=1855335 GN=SAM N05216452_3400 PE=3 SV=1
MRALLFSGGLDSSALAWWLRPEVCVTIDYGQRAAKGEIAASSALCSQIGLEHRTIHANLSSLGSGSMAAKAAADGASAEEFWPYRNQMLVTLAAMKLMPEGVTEIILGSVSTDQHADGKAPFLKSLDRTLSLQEGHVRVTAPARRMSTRTLLRTSGFPYELIGLTFSCHVHEYACGQCNGCLKHRECVEMTYHGSKRGAA

SEQ ID NO: 40075 - protein, 208 aa, Nitratireductor sp.
  misc_feature (1)..(208): tr|A0A5B8L3M3|A0A5B8L3M3_9RHIZ 7-cyano-7-deazaguanine s ynthase OS=Nitratireductor sp. SY7 OX=2599600 GN=FQ775_ 20425 PE=3 SV=1
MTQGVMLLASGGLDSTTVAFGLHAEGKDVTPLFFDYGQHCVETEWDRVNEVLPKGMRRPERVDLSDLFRDSKSRLIVEANLWTDDVRDDDLYIPYRTLLFYAAAAARAQTLGIFEVYTGFINSNHAKEIDCTAEFMNKLDGLTDAIGPVRFMSPYRYSSKTEVTQEAIRLGVPIGRTFSCQASSNLPCGACPNCVERLGALRQTGLLR

SEQ ID NO: 40076 - protein, 220 aa, Nitratiruptor sp.
  misc_feature (1)..(220): sp|A6Q342|QUEC_NITSB 7-cyano-7-deazaguanine synthase OS =Nitratiruptor sp. (strain SB155-2) OX=387092 GN=queC P E=3 SV=1
MKAVVILSGGMDSSITAYMAKKDGYEIIAVHFNYGQRTEQKELEAFRAIAGELNAKTYEIDLPFFEQIGASALIDTNIAIPKQGIEPGIPVTYVPFRNGIFLSVAAAIAEKEGADSIYIGVVEEDSSGYPDCREDFIQKMESAINAGTKPETDIKIKTPLIHLRKEDIVQLGLSLGVPLEKTWSCYESEDEACGECDSCRLRLKGFEKAGAKDKIPYKST

SEQ ID NO: 40077 - protein, 221 aa, Nitratiruptor tergarcus
  misc_feature (1)..(221): tr|A0A1W1WTK5|A0A1W1WTK5_9PROT 7-cyano-7-deazaguanine s ynthase OS=Nitratiruptor tergarcus DSM 16512 OX=1069081 GN=queC PE=3 SV=1
MKKAVCILSGGMDSTLASFIAKNEGYSIIAIHFNYGQRTQTKELEAFRAIAKELGAKIYEIDLPFFKQIGASALVDENIAVPVDGIKPGVPITYVPFRNGIFLSIAAAIAEKEGAEAIYIGVVEEDSSGYPDCRESFIEAMEKAINLGTKDETNIAIKAPLIHLKKEDIVSKAYSLGVPLELTWSCYQNEDEACGVCDSCRLRLKGFKKAGLKDKIPYKAT

SEQ ID NO: 40078 - protein, 231 aa, Nitrincola lacisaponensis
  misc_feature (1)..(231): tr|A0A063Y0V6|A0A063Y0V6_9GAMM 7-cyano-7-deazaguanine s ynthase OS=Nitrincola lacisaponensis OX=267850 GN=queC PE=3 SV=1
MTSGKRAVVLLSGGLDSATVLAMAKDQGYSCYVLSFDYGQRSLTELNAARSVAAELGAVEHRVLRLHLEDFGGSALTDHSLNMPEGAPAEDPADGIPLTYVPARNTVFLSLALGWAEVLDAQAIFIGVNAVDYSGYPDCRPEFIRAFEAMAALATRQGVEGAPIKIVTPLIDLTKAQIIQEGVRLGLDYAKTVSCYQADDQGRACGRCDSCRLRAVGFQQAGIADPTLYQS

SEQ ID NO: 40079 - protein, 228 aa, Nitrincola nitratireducens
  misc_feature (1)..(228): tr|W9VLS5|W9VLS5_9GAMM 7-cyano-7-deazaguanine synthase OS=Nitrincola nitratireducens OX=1229521 GN=queC PE=3 S V=1
MLEKKRAVVLLSGGLDSATVLAIAKNSGYECYVLSFDYGQRSLTELNAARRVSESLHVADHRVLRLNLEDFGGSALTDHSLQMPEEGEQPGIPLTYVPARNTVFLSLALGWAEVLDAQAIFIGVNAVDYSGYPDCRPEFIKAFQDMAALATRQGVEGQPIRIETPLINLTKAEIIRQGLALGLNYAATVSCYQADDEGRACGRCDSCRLRAKGFADAGVADPTLYSPR

SEQ ID NO: 40080 - protein, 230 aa, Nitrincola sp.
  misc_feature (1)..(230): tr|A0A099PF59|A0A099PF59_9GAMM 7-cyano-7-deazaguanine s ynthase OS=Nitrincola sp. A-D6 OX=1545442 GN=queC PE=3 SV=1
MTGKCAVVLLSGGLDSATVLAMAKDQGYSCYVLSFDYGQRSLTELNAARIVAMEADVVEHRVLRLNLEDFGGSALTDHNLSMPESDTDDVQEEGIPLTYVPARNTVFLSLALGWAEVLDASAIFIGVNAVDYSGYPDCRPEFIRAFEAMAALATRQGVEGKPIRIHTPLIDLTKAQIIQAGTALGMDYANTVSCYQADDEGRACGRCDSCRLRAKGFEQAGVPDPTRYQP

SEQ ID NO: 40081 - protein, 228 aa, Nitrincola sp.
  misc_feature (1)..(228): tr|A0A5A9W3D5|A0A5A9W3D5_9GAMM 7-cyano-7-deazaguanine s ynthase OS=Nitrincola sp. MEB193 OX=1708751 GN=queC PE= 3 SV=1
MTQRAVVLLSGGLDSATCLALAQSQGYECYVLSFDYGQRSATELNAARALASAMAVKEHRVLRLHLEDFGGSALTDNTLEVPEYSVEGEIPVTYVPARNTVFLSLALGWAEVLDADAIFIGVNAVDYSGYPDCRPEFIRAFEAMAALATRQGVEGRPIRIETPLLYLTKAEIIQAGLSLGVDYAQTLSCYQADEQGRACGRCDSCRLRAKGFADAGVADPTRYQSSVN

SEQ ID NO: 40082 - protein, 228 aa, Nitrincola tibetensis
  misc_feature (1)..(228): tr|A0A364NNK9|A0A364NNK9_9GAMM 7-cyano-7-deazaguanine s ynthase OS=Nitrincola tibetensis OX=2219697 GN=queC PE= 3 SV=1
MLERKRAVVLLSGGLDSATVLAIAKSSGYECYVLSFDYGQRSLTELNAARRVSESLQVADHRVLRLNLEDFGGSALTDHSLQMPEEGEQPGIPLTYVPARNTVFLSLALGWAEVLDAQAIFIGVNAVDYSGYPDCRPEFIKAFQDMAALATRQGVEGQPIRIETPLINLTKAEIIRQGLDLGLDYAATVSCYQADDEGRACGRCDSCRLRAKGFADAGVVDPTLYSPL

SEQ ID NO: 40083 - protein, 238 aa, Nitrobacter hamburgensis
  misc_feature (1)..(238): sp|Q1QM87|QUEC_NITHX 7-cyano-7-deazaguanine synthase OS =Nitrobacter hamburgensis (strain DSM 10229 / NCIMB 138 09 / X14) OX=323097 GN=queC PE=3 SV=1
MTDQPVSRTALVLFSGGQDSATCLAWALQRFAHVETLGFDYGQRHAIELDCRDALLAGMTSLRPDWAEKLGEGHTLAIPTLAEISDTALTRNVAIEMGEGGLPNTFVPGRNLVFLTFAAALAYRRGMTDIVGGMCETDYSGYPDCRDDTIKALQTALNLGMDKQFELHTPLMWLDKAATWALAHELGGAGLVDLIREHSHTCYLGERGARHDWGYGCGECPACRLRAKGWCEYVARAV

SEQ ID NO: 40084 - protein, 238 aa, Nitrobacter sp.
  misc_feature (1)..(238): tr|A0A1M3CDE5|A0A1M3CDE5_9BRAD 7-cyano-7-deazaguanine s ynthase OS=Nitrobacter sp. 62-23 OX=1895798 GN=queC PE= 3 SV=1
MTDQPASRTALVLFSGGQDSATCLAWALQRFARVETLGFDYGQRHVIELQCRDNLLAGMRSLRPDWTGKLGENHTLAIPTLAEISDTALTRNVAIEMGEGGLPNTFVPGRNLVFLTFAAALAYRRGISHIVGGMCETDYSGYPDCRDDTIKALQAALNLGMARQFELHTPLMRLDKAATWSLAHELGEAGLVDLIRERSHTCYLGERGARHDWGYGCGECPACRLRAKGWREYAARTA

SEQ ID NO: 40085 - protein, 250 aa, Nitrobacter sp.
  misc_feature (1)..(250): tr|A3WWP8|A3WWP8_9BRAD 7-cyano-7-deazaguanine synthase OS=Nitrobacter sp. Nb-311A OX=314253 GN=queC PE=3 SV=1
MARLPRDAIGIAMIDEATSRTALVLFSGGQDSATCLAWALQRFARVETLGFDYGQRHAIELNCRDKLLAGMASLRPDWAKKLGETHTLAVPTLAEISDTALTRNVAIEMGEGGLPNTFVPGRNLVFLTFAAALAYRRGVTDIVGGMCETDYSGYPDCRDETIRALRTALNLGMATRFELHTPLMRLDKGATWSLAHELGGAGLVDLIREHSHTCYLGERGARHAWGYGCATCPACELRAKGWRKYVTQTV

SEQ ID NO: 40086 - protein, 238 aa, Nitrobacter vulgaris
  misc_feature (1)..(238): tr|A0A1V4I0V5|A0A1V4I0V5_NITVU 7-cyano-7-deazaguanine s ynthase OS=Nitrobacter vulgaris OX=29421 GN=queC PE=3 S V=1
MIDEPASRTALVLFSGGQDSATCLAWALQRFARVETLGFDYGQRHAIELDCRDKLLAGLKSLRPDWADKLGESHTLAIPTLAEISDTALTRNVAIEMGEGGLPNTFVPGRNLVFLTFAAALAYRRGVTDIVGGMCETDYSGYPDCRDETIRALRIALNLGMARQFELHTPLMRLDKAATWSLAHELGGAGLVDLIREHSHTCYLGERGARHEWGYGCGDCPACGLRAKGWREYVARSV

SEQ ID NO: 40087 - protein, 452 aa, Nitrobacter winogradskyi
  misc_feature (1)..(452): tr|Q3SW10|Q3SW10_NITWN Uncharacterized protein OS=Nitro bacter winogradskyi (strain ATCC 25391 / DSM 10237 / CI P 104748 / NCIMB 11846 / Nb-255) OX=323098 GN=Nwi_0264 PE=4 SV=1
MTATAFQPRIPDKAIDVVEPGRRARKGHLVCQLGRDLSFSTAALEHYAFARWEPVIYDAMLVAAAVEYADRSIRRPSLGWTRKIALRVPVHDPGRWSDPGVFTALHEALRFLTGDIWDLEFIKRRSAAPKPQQEFLQLPVKTEAVIAYSDGMDSRAVAGLMAESLGERLVRVRVGPKAGGRPFKGQREPFAAVPYSVAATGETSGRSRGFKFALISGIAAYLAEADVILVPESGQGAFGPALVTVAHAYPDYRNHPLFTSRMERFLNALFRRPVRFVFPRLWHTKAETLREYAALPGSKWDDTKSCWRNARWSALNGNLVQCGICAACMLRRMSIHTAGLVDGPDAYVCNDLTAATIEEAVHPGFKKVNSAFREYAIAGTLHLDHLADMAQPNNHAALKRHAALTSTALGMTAAEAEGRLIGLLERHAAEWNKFTDDLGARSFIKKWTRASQ

SEQ ID NO: 40088 - protein, 238 aa, Nitrobacter winogradskyi
  misc_feature (1)..(238): sp|Q3SSM7|QUEC_NITWN 7-cyano-7-deazaguanine synthase OS =Nitrobacter winogradskyi (strain ATCC 25391 / DSM 1023 7 / CIP 104748 / NCIMB 11846 / Nb-255) OX=323098 GN=que C PE=3 SV=1
MIDEPASRTALVLFSGGQDSATCLAWALQRFARVETLGFDYGQRHAIELDCRDSLLAGMASLRPDWAKKLGETHTLAIPTLAEISDTALTRNVAIEVSESGLPNTFVPGRNLVFLTFAAALAYRRGVTDIVGGMCETDYSGYPDCRDETIRALRIALNLGMVRQFELHTPLMRLDKGATWSLAHELGGTGLVDLIREHSHTCYLGERGARHAWGYGCGECPACGLRAKGWREYLARIA

SEQ ID NO: 40089 - protein, 243 aa, Nitrococcus mobilis
  misc_feature (1)..(243): tr|A4BLV0|A4BLV0_9GAMM 7-cyano-7-deazaguanine synthase OS=Nitrococcus mobilis Nb-231 OX=314278 GN=queC PE=3 SV =1
MNERHPRAVVLLSGGLDSTTTLAIAQAQGFCCFALSFDYGQRHASELSAGTAIAKAMSVAEHRVLRIGLDDLGGSALTDVASPLPKPPSKGIPATYVPARNTIFLAYALAYAEVLQAHDIFIGVNAIDYSGYPDCRPEFITAFEHMANLATKSSAEDRSCYHISTPLIQLTKAEIIQCGARLGVDYSITVSCYNADQIGRACGRCDACYYRAKGFRQAGMPDPTRYQPGVSVSDTSPSPEEKS

SEQ ID NO: 40090 - protein, 228 aa, Nitrolancea hollandica
  misc_feature (1)..(228): tr|I4ECX1|I4ECX1_9CHLR 7-cyano-7-deazaguanine synthase OS=Nitrolancea hollandica Lb OX=1129897 GN=queC PE=3 SV =1
MTIRTPADNSAVVLLSGGLDSTTAAYLARASGMAVHALSFDYGQRHRRELDAAATVANRLGVAEHRVIQIGLSDWAGSSLTGTGPIPDQLDETRIPSTWVPARNHIFLAIAHGYAEAIGAKAVYIGTSQVDYSGYPDCRREFLDAYQRAADLASKQFVEEGRSIPVIAPLLYLSKAETIRLGLSLGVDYSLTWSCYAGGETPCGVCDSCRLRAAAFDAAGVPDPLLAR

SEQ ID NO: 40091 - protein, 464 aa, Nitrolancea hollandica
  misc_feature (1)..(464): tr|I4EGF4|I4EGF4_9CHLR Uncharacterized protein OS=Nitro lancea hollandica Lb OX=1129897 GN=NITHO_270012 PE=4 SV =1
MVMAEASEPISCQVTFDVDGRVRTTRGDTLVRPESICYIGDETIARTFRSILPKHLADLIDIALAVYIADRLVRRSQNSSDRYHSRWCRQLHLRLPLRDPEPWQDAPLRMRLREVLTFFTDDEWHFDFIPRSDGWRVSEIQDFLFPTPPRAPVMAALFSGGLDSLAGLCREFIDCPPESVVLLCGGTNGRTVAVQRRLIAALRTRLGKTIIPVIVPFGLRQRGSQYDGDERTQRTRGFVYQTLGAVTAIMAGADSLAVYEPGVGAINLAYTTAQLGTQSARACHPQAVAAMGDLIRMAVGKPFKIRLPFPFFTKAQLCTSLPELGLSDLVEYTVSCDGFPQRVPGRVQCGLCTSCLLRRQAVFASGLMEYDATAAYVNDVFDPMVPLPQAKLYPLRAMLDQVETLQHTLDCAEPWKMLSRRYPQLLEVAVALSATGRQLTDIESQIVDLYRRYCSEWEGFPPRR

SEQ ID NO: 40092 - protein, 224 aa, Nitrosococcus halophilus
  misc_feature (1)..(224): tr|D5C4X4|D5C4X4_NITHN 7-cyano-7-deazaguanine synthase OS=Nitrosococcus halophilus (strain Nc4) OX=472759 GN=q ueC PE=3 SV=1
MSSPKAVVLVSGGLDSATVLAIAREQEFACYTMSFDYGQRHRVELQAAAEISRLLGAVEHKLITIDLGGMGGSALTDSSIAVPEAPTEAIPVTYVPARNTVFLAFALGWAEVLGAQDIFIGVNAVDYSGYPDCRPAFVEAFEHLANLATRAGLEGQRFRIQAPLIHLSKAEIIREGIRLGIDYSRTVSCYQADETGRACGVCDSCRFRKQGFQEAGVPDPTRYH

SEQ ID NO: 40093 - protein, 224 aa, Nitrosococcus oceani
  misc_feature (1)..(224): tr|A0A0E2Z582|A0A0E2Z582_9GAMM 7-cyano-7-deazaguanine s ynthase OS=Nitrosococcus oceani C-27 OX=314279 GN=queC PE=3 SV=1
MTAPKAVVLVSGGLDSATVLAIAREQEFICHTLSFNYGQRHRVELQAAAEISRRMGAVEHKRITIDLGGFGGSALTDPSMAVPEASSGAIPITYVPARNTVFLSFALGWAEVLGAQDIFIGVNAVDYSGYPDCRPAFIKAFEHLAKLATCAGLEGRAFRIQAPLLHLSKAEIIREGMRLGIDYSRTISCYQADENGRACGVCDSCRFRKQGFWDAGVPDPTRYH

SEQ ID NO: 40094 - protein, 425 aa, Nitrosococcus oceani
  misc_feature (1)..(425): tr|Q3JDB4|Q3JDB4_NITOC Uncharacterized protein OS=Nitro sococcus oceani (strain ATCC 19707 / BCRC 17464 / NCIMB 11848 / C-107) OX=323261 GN=Noc_0663 PE=4 SV=1
MRIICGPSNSKFERLRKDDLRCILYGSAENSYHGSAGGTLLKHVQSLKLSPAPRAWDLLSLALSVICADTAVRRGESPDGWTRQISLTVAVSDPDFWTTQRSLIEDQLKFLTTDLWALQFVGYGLYPKPSKVPKLPDGDCVTLLSGGLDSFVGAIDLVADGKAPFAVSQVAAGDKQSQADFAAKIGGGLNHLQLNHNVKCPGENERSQRARSFIFLAYGVLAASAQKHYHDGERVDLYICENGLISINPPLTPARLGSLSTRTTHPVFLGLFQRLLDVAELRIAVRNPYQFRTKGEMLLECKDQAFLRKHAAETTSCGRYARNGWQHCGRCFPCLIRRAAFHAWGKDDRTKYVYADLSKNDSQHARYDDVRCAAMAAALVDADGLDALATNNLNALAMGDLTPYKAILTRGIREVGQFLAAAGVR

SEQ ID NO: 40095 - protein, 224 aa, Nitrosococcus wardiae
  misc_feature (1)..(224): tr|A0A4P7BXS4|A0A4P7BXS4_9GAMM 7-cyano-7-deazaguanine s ynthase OS=Nitrosococcus wardiae OX=1814290 GN=queC PE= 3 SV=1
MSSPKAVVLVSGGLDSATVLAIAQEQKFACYAMSFDYGQRHRAELQAAAEISRLLGAVEHKLVTIDLGGMGGSALTDPSIAVPEASTETIPVTYVPARNTVFLAFALGWAEVLGAQDIFIGINAVDYSGYPDCRPAFVEAFEHLANLATRAGLEGQQFRIQAPLIHLSKAEIIREGIRLGIDYSPTVSCYQADETGRACGVCDSCRFRKQGFQEAGVPDPTRYY

SEQ ID NO: 40096 - protein, 224 aa, Nitrosococcus watsoni
  misc_feature (1)..(224): tr|D8K8Q6|D8K8Q6_NITWC 7-cyano-7-deazaguanine synthase OS=Nitrosococcus watsoni (strain C-113) OX=105559 GN=qu eC PE=3 SV=1
MTAPKAVVLVSGGLDSATVLAIAREQAFICHTLSFNYGQRHSVELQAAAEISRQMGAVEHKCITIDLGGFGGSALTDPSMAVPEASTGTIPITYVPARNTVFLSFALGWAEVLGAQDIFIGVNAVDYSGYPDCRPAFIKAFEQLAKLATCAGLEGRSFRIQAPLLPLSKADIIREGMRLGVNYSRTISCYQADENGRACGVCDSCRLRKQGFWDAGVPDPTHYH

SEQ ID NO: 40097 - protein, 223 aa, Nitrosomonadaceae bacterium
  misc_feature (1)..(223): tr|A0A2E6USQ9|A0A2E6USQ9_9PROT 7-cyano-7-deazaguanine s ynthase OS=Nitrosomonadaceae bacterium OX=2026767 GN=qu eC PE=3 SV=1
MTKAVVLLSGGLDSATILAIARDKGYQCYAMSLDYGQKNRSELIAARYLAQEIGVLKHQIINIDLTVFGGSALTDDSVAMPVEGVKEGIPVTYVPARNTIMLSLALSWAEVLGSGDVFIGVNAVDYSGYPDCRPEYIEAFERMANLATKASTQNKKLNIHAPLMNLSKAEIIQKGKLLDVDYGMTVSCYQANEEGVACGLCDSCRLRRAGFKAARVPDPTRYR

SEQ ID NO: 40098 - protein, 236 aa, Nitrosomonadaceae bacterium
  misc_feature (1)..(236): tr|A0A4P5UDE8|A0A4P5UDE8_9PROT 7-cyano-7-deazaguanine s ynthase OS=Nitrosomonadaceae bacterium OX=2026767 GN=qu eC PE=3 SV=1
MLRIYFVCPMTKAVVLLSGGLDSATTLAIARDQGYECYALSVDYGQRHGVELVAAEKVARSIGVGEHRTVKVDLAGFGGSALTDRSIDVPIEGINAGIPVTYVPARNTIMLSLAIAWAEVLGSYNVFIGVNAVDYSGYPDCRAEYIAAFEQMANLATRAATEGNRLNIYTPLISLTKAEIIRQGALRGVDYSLTVSCYQAGADGLACGVCDSCRLRRMGFEAAGVSDPTRYWPSSP

SEQ ID NO: 40099 - protein, 224 aa, Nitrosomonadales bacterium
  misc_feature (1)..(224): tr|A0A2E0I7C6|A0A2E0I7C6_9PROT 7-cyano-7-deazaguanine s ynthase OS=Nitrosomonadales bacterium OX=2026761 GN=que C PE=3 SV=1
MSKKAIILLSGGLDSSTVLAIAKSKGYECYALTINYQQRHNAELKAAKKIANLYNVKDFKIVDIDLSWLKSSALTNKDIDIPENFSPGIPVTYVPARNTIMMTLALAWAETIKSQDIFIGVNSVDYSGYPDCRPEYIESFQKMANLATKAAIEGNKIKIHTPLINLTKDQIIHEGLKNKVDYKITVSCYQASENGLACGKCDSCRLRKEGFKSAKVKDPTNYKN

SEQ ID NO: 40100 - protein, 232 aa, Nitrosomonadales bacterium
  misc_feature (1)..(232): tr|A0A1E4GIN7|A0A1E4GIN7_9PROT 7-cyano-7-deazaguanine s ynthase OS=Nitrosomonadales bacterium SCN 54-20 OX=1660 164 GN=queC PE=3 SV=1
MVKAVVLLSGGLDSATVLAIARQQGYECHALSVSYGQRHDSELVAAKNLARSLGAAAHKVIEVNLSTLGGSALIDKALEVPTGGVKPGIPSTYVPARNTIMLSLALAWAEALGSGDIFIGVNAIDYSGYPDCRSEYIGAFETMANLATKAGTEGVRLTIHAPLLNLSKAEIIKRGCLLGVDYSMTVSCYQADDAGLACGVCDSCRLRRAGFEAANVPDVTRYHADFRQATAL

SEQ ID NO: 40101 - protein, 225 aa, Nitrosomonas aestuarii
  misc_feature (1)..(225): tr|A0A1I3XC98|A0A1I3XC98_9PROT 7-cyano-7-deazaguanine s ynthase OS=Nitrosomonas aestuarii OX=52441 GN=queC PE=3 SV=1
MSAKAVVLLSGGLDSATALAIAKDQQFECYALSVDYGQRHAAELSAAKKIAQALDATAHKIIKIDLTAFGGSALTDTALEVPIAGENTDIPITYVPARNTIMLSLALAWAETLNCRDIFIGVNAVDYSGYPDCRPAFIQAFENMANLATKAAIEGKKLTIHTPVIDLSKQDIIQTGLELGVDYSLTVSCYQADEAGNACGVCDSCRIRRKGFTEAGIADMTRYQV

SEQ ID NO: 40102 - protein, 225 aa, Nitrosomonas communis
  misc_feature (1)..(225): tr|A0A1H2VW74|A0A1H2VW74_9PROT 7-cyano-7-deazaguanine s ynthase OS=Nitrosomonas communis OX=44574 GN=queC PE=3 SV=1
MRKAVVLLSGGLDSATTLAMACDKGFACYALSIDYGQRHQSELAAARKVGQSMGIKMHRTISIDLSALGGSALTDRSIAVPTEGTTTGIPVTYVPARNTVMLSLALAWAEVLGSHDIFIGVNAIDYSGYPDCRPDYIEAFEKMSNLATKTAREGNKLTLHAPLLNLSKKEIISLGKELGVDYALTVSCYQADESGSACGLCDACRIRKAGFLAADISDPTRYRVG

SEQ ID NO: 40103 - protein, 225 aa, Nitrosomonas communis
  misc_feature (1)..(225): tr|A0A1I4TJ07|A0A1I4TJ07_9PROT 7-cyano-7-deazaguanine s ynthase OS=Nitrosomonas communis OX=44574 GN=queC PE=3 SV=1
MRKAVVLLSGGLDSATTLAIACDKGFVCYALSIDYGQRHQSELAAALKIGQSMGIQAHQTISVDLSALGGSALTDRSIAVPTEGTIAGIPVTYVPARNTIMLSLALAWAEVLGSYDIFIGVNAIDYSGYPDCRPDYIEAFEKMSNLATKTAREGNKLMLHAPLLNLSKKEIICLGTELGVDYALTVSCYQANESGSACGLCDACRIRKAGFLAADISDPTRYRIG

SEQ ID NO: 40104 - protein, 225 aa, Nitrosomonas cryotolerans
  misc_feature (1)..(225): tr|A0A1N6G6I6|A0A1N6G6I6_9PROT 7-cyano-7-deazaguanine s ynthase OS=Nitrosomonas cryotolerans ATCC 49181 OX=1131 553 GN=queC PE=3 SV=1
MKKAVVLLSGGLDSATTLAIARNKQFQCYALSVDYGQRHESELVAARNVARSLGACSQHVIKVDLAAFGGSALTNHSIDIPITGQETDIPVTYVPARNTIMLSLALAWAETLGSHDIFIGVNAVDYSGYPDCRPEYIKAFENMANLATKAATKGHKTAIHTPLIMLPKEAIIRQGIALGLDYSITISCYQADEAGSACGVCDSCRIRRTGFNKAGLMDPTRYRQS

SEQ ID NO: 40105 - protein, 228 aa, Nitrosomonas europaea
  misc_feature (1)..(228): tr|A0A1I0C1Y8|A0A1I0C1Y8_NITER 7-cyano-7-deazaguanine s ynthase OS=Nitrosomonas europaea OX=915 GN=queC PE=3 SV =1
MKKAVVLLSGGMDSATTLAIARQSGFACYALSIDYGQRHVAELAAAARIGQSLQVSDHQFLKLDLAVLASSVLTDISATVPLHGTSTGIPVTYVPARNTIMLALALAWAEVLGSHDIFIGVTAVDYSGYPDCRRDYIDAFEKMANLATKAGREGMVLTVHAPLIDLPKREIIQCGMELGIDYGLTVSCYQADEAGYACGQCDACHIRRAGFEAADIPDPTCYRNKQIS

SEQ ID NO: 40106 - protein, 228 aa, Nitrosomonas europaea; identical to SEQ ID NO: 40105
  misc_feature (1)..(228): sp|Q82XN5|QUEC_NITEU 7-cyano-7-deazaguanine synthase OS =Nitrosomonas europaea (strain ATCC 19718 / CIP 103999 / KCTC 2705 / NBRC 14298) OX=228410 GN=queC PE=3 SV=1

SEQ ID NO: 40107 - protein, 226 aa, Nitrosomonas eutropha
  misc_feature (1)..(226): tr|A0A2V3QTJ1|A0A2V3QTJ1_9PROT 7-cyano-7-deazaguanine s ynthase OS=Nitrosomonas eutropha OX=916 GN=queC PE=3 SV =1
MKKAVVLLSGGLDSTTTLAIARGNGFACYALSVDYGQRHAAELAAATRIGQLLQVCEHQFLKLDLTVLASSALTDPSVTVPIHGTNRGIPATYVPARNTIMLSLALAWAEVLGSQDIFIGVTAVDYSGYPDCRPDYIDAFEKMANLATKAGREGNLLKVHAPLINLPKHDIIRRGLELGIDYSMTVSCYQADASGWACGQCDACHIRRAGFAAANIPDPTYYQDKR

SEQ ID NO: 40108 - protein, 226 aa, Nitrosomonas eutropha; identical to SEQ ID NO: 40107
  misc_feature (1)..(226): sp|Q0AJ94|QUEC_NITEC 7-cyano-7-deazaguanine synthase OS =Nitrosomonas eutropha (strain DSM 101675 / C91) OX=335 283 GN=queC PE=3 SV=1

SEQ ID NO: 40109 - protein, 225 aa, Nitrosomonas halophila
  misc_feature (1)..(225): tr|A0A1H3IT60|A0A1H3IT60_9PROT 7-cyano-7-deazaguanine s ynthase OS=Nitrosomonas halophila OX=44576 GN=queC PE=3 SV=1
MRKAVVLLSGGIDSATTLAIARAQGFACYALSIDYGQRHRSELVAAARIGEFLQASDHQFVQLDLTTLAASALTNATIAVPTDGVSEGIPVTYVPARNTVMLSLALAWAEVLESRDIFIGVTAVDYSGYPDCRPDYIAAYEKMANLATKAGREGEPFTIHAPLIDLSKHAIIRSGMRLGVDYGLTVSCYQADDDGRACGLCDACRLRRAGFEAANVPDPTRYQQD

SEQ ID NO: 40110 - protein, 231 aa, Nitrosomonas marina
  misc_feature (1)..(231): tr|A0A1H8CKS2|A0A1H8CKS2_9PROT 7-cyano-7-deazaguanine s ynthase OS=Nitrosomonas marina OX=917 GN=queC PE=3 SV=1
MTNSTGARAKAVVLLSGGLDSATTLAIAKDRQFDCSALSINYGQRHESELNAARNVANAISVADHKIISVDLSTFGGSALTDPSIAVPTGKNNGGIPITYVPARNTIMLSLALAWAETIGCRDIFIGINAVDYSGYPDCRPEYIQAFEKMANLATKTAIEGNKLTIHTPLIDLPKKDIIKTGAALGVDYSLTISCYQADEAGRACGVCDSCRIRREGFAAAGIADMTRYKT

SEQ ID NO: 40111 - protein, 231 aa, Nitrosomonas marina
  misc_feature (1)..(231): tr|A0A1I0BG56|A0A1I0BG56_9PROT 7-cyano-7-deazaguanine s ynthase OS=Nitrosomonas marina OX=917 GN=queC PE=3 SV=1
MTSSTGAGAKAVVLLSGGLDSATTLAIAKDRQFDCFALSINYGQRHESELNAARNVANAIGVADHKIISVDLSAFGGSALTDPSIAVPAGKNSGGIPITYVPARNTIMLSLALAWAETLGCRDIFIGVNAVDYSGYPDCRPEYIQAFEKMANLATKTAIEGNKLTIHTPLIDLPKKDIIKTGIALGVDYRLTISCYQADEAGRACGICDSCRIRREGFAAAGIVDITRYKT

SEQ ID NO: 40112 - protein, 225 aa, Nitrosomonas mobilis
  misc_feature (1)..(225): tr|A0A1G5SE90|A0A1G5SE90_9PROT 7-cyano-7-deazaguanine s ynthase OS=Nitrosomonas mobilis OX=51642 GN=queC PE=3 S V=1
MKKAVVLLSGGMDSATTLAIAHQAGFLCYALSIDYGQRHHSELQAAANIGNLIQVASHQFIKLDLTTLASSALTDPSTTLPTKEEPGEIPITYVPARNTIMLSLALAWAEVLQSYDIFIGVTAVDYSGYPDCRPDYIAAFQKMTNLATKAGREGKYFQIHAPLINCSKAAIIRKGITLGLDYSLTVSCYQADESGHACGHCNACRIRHAGFIAAGIADPTRYQEK

SEQ ID NO: 40113 - protein, 225 aa, Nitrosomonas nitrosa
  misc_feature (1)..(225): tr|A0A1I4S4A6|A0A1I4S4A6_9PROT 7-cyano-7-deazaguanine s ynthase OS=Nitrosomonas nitrosa OX=52442 GN=queC PE=3 S V=1
MKKAVVLLSGGLDSATVLAIARSERFECYALSVDYGQRHRSELVAAHKVGQSLGVKAHQSIRIDLSVLGKSALTDKSIAIPTEGLTNGIPVTYVPARNTIMLSLALAWAEVLECHDIFIGVNAVDYSGYPDCRPDYIEAFEKMSNLATKAAREGNKLTLHAPLLYLSKKEIIRLGVERGVDYSLTVSCYQADEEGSACGLCDACRLRKAGFLAAEVPDPTRYSLP

SEQ ID NO: 40114 - protein, 188 aa, Nitrosomonas nitrosa
  misc_feature (1)..(188): tr|A0A1I4TI03|A0A1I4TI03_9PROT 7-cyano-7-deazaguanine s ynthase OS=Nitrosomonas nitrosa OX=52442 GN=SAMN0542188 0_1328 PE=3 SV=1
MFTEQLSKEALVLLSGGIDSMSCVHFLKCQNYSVKGIFVNYGQASFEYELCAVKKIQTHFEIDVDHVSIKSDKNIGSGELAGRNALLISTAILYGNINRGLIVIGVHAGTPYYDCSEGFIERMKKVTEEYFHGLVTLSAPFLSWDKATIYKYFCDQNLPVNITYSCESGTLPPCGVCASCLDRSKFGC

SEQ ID NO: 40115 - protein, 224 aa, Nitrosomonas oligotropha
  misc_feature (1)..(224): tr|A0A5C7VTN5|A0A5C7VTN5_9PROT 7-cyano-7-deazaguanine s ynthase OS=Nitrosomonas oligotropha OX=42354 GN=queC PE =3 SV=1
MKKAVVLLSGGLDSATVLAIARDQGFQCYALSVDYGQRHRSELEAARKVAQSLHSHAHQIIRLDLTAFGGSALTDRTMEIPTSGEKTEIPVTYVPARNTIMLSLALAWVETLQSQDIFVGVNAVDYSGYPDCRPEYIQAFEQMANLATKAGVEGKKLNIHVPLMHLSKKEIIQAGLALGVDYGLTVSCYQADEMGRACGICDSCRIRKAGFAAAGVSDSTCYRL

SEQ ID NO: 40116 - protein, 227 aa, Nitrosomonas oligotropha
  misc_feature (1)..(227): tr|A0A1H8NSB7|A0A1H8NSB7_9PROT 7-cyano-7-deazaguanine s ynthase OS=Nitrosomonas oligotropha OX=42354 GN=queC PE =3 SV=1
MKKAVVLLSGGLDSATVLAIARDQGFQCYALSVDYGQRHRSELEAARKVAQSLHSHAHQIIRLDLTAFGGSALTDRTMEIPTSGEKTEIPVTYVPARNTIMLSLALAWAETLQSQDIFVGVNAVDYSGYPDCRPEYIQAFEQMANLATKAGVEGKKLNIHVPLMHLSKKEIIQAGLALGVDYGLTVSCYQADEMGRACGICDSCRIRKAGFAAAGVSDSTCYRLRSV

SEQ ID NO: 40117 - protein, 229 aa, Nitrosomonas sp.
  misc_feature (1)..(229): tr|A0A1H3NGE0|A0A1H3NGE0_9PROT 7-cyano-7-deazaguanine s ynthase OS=Nitrosomonas sp. Nm58 OX=200126 GN=queC PE=3 SV=1
MRKAVVLLSGGLDSTTTLAIARAKQFECYALSIDYGQRHQSELAAALKIGQSMGVQEHRTISIDLSILGRSALTDESIAIPIEGIMAGIPVTYVPARNTIMLSLALAWAEVLESHDIFIGINAIDYSGYPDCRPDYIEAFEKMSNLATKTAREGNKLTLHAPLMHLSKKEIICLGIELGVDYGLTVSCYQADESRFACGLCDACRLRMAGFLAAEIPDPTRYRNALELI

SEQ ID NO: 40118 - protein, 225 aa, Nitrosomonas sp.
  misc_feature (1)..(225): tr|A0A1H3MRE5|A0A1H3MRE5_9PROT 7-cyano-7-deazaguanine s ynthase OS=Nitrosomonas sp. Nm33 OX=133724 GN=queC PE=3 SV=1
MRKAIVLLSGGLDSATTLAIARDKGFECYALSIDYGQRHPSELAAALKIGQSMGVQAHQTISVNLSVLGGSALTDKSIAVPTEGIITGIPVTYVPARNTIMLSLALAWAEVLESHDIFIGVNAIDYSGYPDCRTDYIEAFEKMSNLATKTAREGNKLTLHAPLLNLSKKEIICLGVELGIDYAVTVSCYQADESGFACGLCDACRIRKAGFLAAEIPDPTRYRIC

SEQ ID NO: 40119 - protein, 226 aa, Nitrosomonas stercoris
  misc_feature (1)..(226): tr|A0A4Y1YR81|A0A4Y1YR81_9PROT 7-cyano-7-deazaguanine s ynthase OS=Nitrosomonas stercoris OX=1444684 GN=queC PE =3 SV=1
MKKAVVLLSGGLDSATVLAIAKQSGFACYALSVHYGQRHAAELVAAKQISQALQVHEHQIFELDLSVLTTSALTNSAIAVPTNNNDQGIPVTYVPARNTIMLSLALAWAEVLESQDIFVGVTAVDYSGYPDCRPDYIAAFATMANLATKAGREGKTLTIHTPLIDLPKHEIIRRGTALGIDYSMTVSCYQADDVGRACGKCDACRIRKNGFTAANMADPTRYQQNS

SEQ ID NO: 40120 - protein, 225 aa, Nitrosomonas ureae
  misc_feature (1)..(225): tr|A0A2T5IXI2|A0A2T5IXI2_9PROT 7-cyano-7-deazaguanine s ynthase OS=Nitrosomonas ureae OX=44577 GN=queC PE=3 SV= 1
MKKAIVLLSGGLDSATTLAIARSQDFRCYALSIDYGQRHHVELNAAQKIAQSLGSHNHQIIKIDLTTFGGSALTDQSIKVPTSGENPGIPVTYVPARNTIMLSLALAWAETLDCRDIFTGVNAVDYSGYPDCRAEYIQAFGIMANLATKASVEGKQLTIHAPLILLSKQEIIHAGLALGVDYSLTVSCYQADEAGRACGVCDSCRIRKAGFKAANIPDPTAYKAN

SEQ ID NO: 40121 - protein, 225 aa, Nitrosomonas ureae
  misc_feature (1)..(225): tr|A0A0S3AGL7|A0A0S3AGL7_9PROT 7-cyano-7-deazaguanine s ynthase OS=Nitrosomonas ureae OX=44577 GN=queC PE=3 SV= 1
MKKAIVLLSGGLDSATTLAIARSQDFRCYALSIDYGQRHHVELNAAQKIAQSLGSHNHQIIKIDLTTFGGSALTDQSIKVPTSGENPGIPVTYVPARNTIMLSLALAWAETLDCRDIFTGVNAVDYSGYPDCRAEYIQAFGIMANLATKASVEGKQLTIHAPLMLLSKQEIIHAGLALGVDYSLTVSCYQADEAGRACGVCDSCRIRKAGFKAANIPDPTAYKAN

SEQ ID NO: 40122 - protein, 228 aa, Nitrosospira briensis
  misc_feature (1)..(228): tr|A0A1I5ENB9|A0A1I5ENB9_9PROT 7-cyano-7-deazaguanine s ynthase OS=Nitrosospira briensis OX=35799 GN=queC PE=3 SV=1
MEKAVVLLSGGLDSATTLAIACNRGYECHAFSVDYGQRHRSELEAAKKLARSLGASDHKTIHIDLSAFGGSALVDKFSPVPAGGTDTGIPVTYVPARNTIMLSLALAWAEVLKSRDIFIGVNAVDYSGYPDCRPEYIAAFEQMANLATKAAIEGARLRIHAPLMEMSKAQIIRQGVVLGLDYSLTVSCYQADEAGRACGVCDSCRIRRAGFESADVPDVTRYRSWVRL

SEQ ID NO: 40123 - protein, 228 aa, Nitrosospira lacus
  misc_feature (1)..(228): tr|A0A1W6SLW7|A0A1W6SLW7_9PROT 7-cyano-7-deazaguanine s ynthase OS=Nitrosospira lacus OX=1288494 GN=queC PE=3 S V=1
MTKAVVLLSGGLDSATTLAIARSRGYECYALSVDYGQRHESELAAAATTARFLGTREHKTMKVDLGEIGGSALTDEFIAVPTEGTKAGIPVTYVPARNTIMLSLALAWAEVIKSRDIFIGVNVVDYSGYPDCRPEYIAAFEKMANLATKAAIEGARLSIHAPLINLSKAEIILLGISLGVDYSLTVSCYQADDTGLACGVCDSCRLRQAGFESANVPDVTRYQFGSGG

SEQ ID NO: 40124 - protein, 232 aa, Nitrosospira multiformis
  misc_feature (1)..(232): sp|Q2Y5H4|QUEC_NITMU 7-cyano-7-deazaguanine synthase OS =Nitrosospira multiformis (strain ATCC 25196 / NCIMB 11 849 / C 71) OX=323848 GN=queC PE=3 SV=1
MVKAVVLLSGGLDSATVLAIARQQGYECYALSVSYGQRHGAELAAAKNLARSLGATAHKIIQVDLSTFGGSALIDKEREIPTDGVTPGIPSTYVPARNTIMLSIALAWAEVLGSGDIFIGVNAIDYSGYPDCRPEYIEAFETMANVATKAGIEGTRLAIHAPLMNLSKAEIIKRGGVLGVDYSMTVSCYQADDAGLACGVCDSCRLRRAGFESADVPDVTRYHAGFRQTPAS

SEQ ID NO: 40125 - protein, 232 aa, Nitrosospira multiformis
  misc_feature (1)..(232): tr|A0A2T5I8M0|A0A2T5I8M0_9PROT 7-cyano-7-deazaguanine s ynthase OS=Nitrosospira multiformis OX=1231 GN=queC PE= 3 SV=1
MVKAVVLLSGGLDSATALAIARQQGYECYALSVSYGQRHGSELAAAKNLAHSLGAAAYKVIEVDLSTFGGSALIDKEREIPTGGVTPGIPSTYVPARNTIMLSLALAWAEVLGSGDIFIGVNAVDYSGYPDCRPEYIEAFETMANLATKTGTEGARMTIHAPLMNLSKAEIIKRGCLLGVDYSMTVSCYQADDAGLACGVCDSCRLRRAGFESANVPDVTRYHAGFRQATAL

SEQ ID NO: 40126 - protein, 227 aa, Nitrosospira sp.
  misc_feature (1)..(227): tr|A0A2T5JVH7|A0A2T5JVH7_9PROT 7-cyano-7-deazaguanine s ynthase OS=Nitrosospira sp. Nsp2 OX=136548 GN=queC PE=3 SV=1
MAKAVVLLSGGLDSATALAIAHSRGHECFALSVDYGQRHVSELAAAAALANSIGAVEHRVIKVDLSTFGGSALTDLSTAIPAGGIKPGIPVTYVPARNTIMLSLALAWAEVLRSLDIFIGVNAVDYSGYPDCRPEYITAFENMANLATKAAIEGAKLRIHAPLLNLSKAQIIEQGNLLGLDYSVTVSCYQADEAGWACGICDSCRIRRAGFESAQVPDPTHYRPLFP

SEQ ID NO: 40127 - protein, 227 aa, Nitrosospira sp.
  misc_feature (1)..(227): tr|A0A495EPM9|A0A495EPM9_9PROT 7-cyano-7-deazaguanine s ynthase OS=Nitrosospira sp. Nsp44 OX=1945879 GN=queC PE =3 SV=1
MTKAVVLLSGGLDSATTLAIAHSSGYECFALSIAYGQRHVSELAAAAKLAESVGARDHKVIEVDLSVFGGSALTDPSRIVPAGGIKPGIPVTYVPARNTIMLSLALAWAEVLESRHIFIGVNAVDYSGYPDCRSEYITAFENMANLATKAGIEGARIHIHAPLMHLSKDQIIKRGASLGLDYSLTVSCYQADEAGRACGVCDSCRIRRTGFQSAQMPDPTHYRTPFP

SEQ ID NO: 40128 - protein, 224 aa, Nitrosovibrio sp.
  misc_feature (1)..(224): tr|A0A286C1P6|A0A286C1P6_9PROT 7-cyano-7-deazaguanine s ynthase OS=Nitrosovibrio sp. Nv4 OX=1945880 GN=queC PE= 3 SV=1
MAKAVVLLSGGLDSATTLAIARSRKYECYALSIDYGQRHGSELAAAEKLAHSLGARDHKVIKVDLSAFGGSALTDKSSAIPTEGTEAGIPVTYVPARNTIMLSLALAWAEVLESRDIFIGANVVDYSGYPDCRPEYLAAFERMANLATKAAIEGARLSIHAPLMKLSKAQIIQQGALLGLDYSLTVSCYQADEEGLACGVCDSCRLRRAGFESANIADVTRYQS

SEQ ID NO: 40129 - protein, 228 aa, Nitrosovibrio sp.
  misc_feature (1)..(228): tr|A0A1K1MXY5|A0A1K1MXY5_9PROT 7-cyano-7-deazaguanine s ynthase OS=Nitrosovibrio sp. Nv17 OX=1855339 GN=queC PE =3 SV=1
MNPAVVLLSGGLDSATTLAIARDLGYRCHALSVDYGQRHAAELRAAASVARLLGACEHRTVKVDLGAFGGSALTDASIPLPLAGLRNGIPATYVPARNTIMLSLALAWAEVLGSRDILLGVNVVDYSGYPDCRPEYVAAYQHLANLATRSGIEGRRLSIHAPLMHLSKAEIIRRGLALGVDYALTISCYQADETGAACGACDACRLRRAGFAAAQVSDPTRYRAGTAT

SEQ ID NO: 40130 - protein, 229 aa, Nitrosovibrio tenuis
  misc_feature (1)..(229): tr|A0A1H7LG76|A0A1H7LG76_9PROT 7-cyano-7-deazaguanine s ynthase OS=Nitrosovibrio tenuis OX=1233 GN=queC PE=3 SV =1
MTKAVVLLSGGLDSATTLAIANSRGYECHALSVDYGQRHRSELVAAAKLAQSIGAREHKIVKVDLTLFGGSVLTQKSRAVPVGGIKAGIPVTYVPARNTIMLSLALAWAEVLESSDIFLGVNAIDYSGYPDCRPEYIAAFERMANLATKRSVEGARLSVRAPLIALSKAEIIQQGALLSVDYSLTVSCYQADESGLACGVCDACRIRRTGFQAAGMPDPTRYQFAPVAC

SEQ ID NO: 40131 - protein, 268 aa, Nitrospina gracilis
  misc_feature (1)..(268): tr|M1Z8I7|M1Z8I7_NITG3 Uncharacterized protein OS=Nitro spina gracilis (strain 3/211) OX=1266370 GN=NITGR_10200 06 PE=4 SV=1
MTLHDKHKRMQAQIAALPGAIVAFSGGVDSTLVLAIAHAALGERVLAVTGRSPSVPERELEASKRLARQIGARHLIVDTGEIHNPDYTANPANRCYFCKTELYDHLKRIASEHGLPCILNGTNSDDLGDHRPGLVAADEAKVLSPLADAGMNKQDVRDLSQELELPTWNKPAMACLASRVPYGQEVTGEKLSMIERAEDILLGMGLKQVRVRHHGDIARIEAPQDDLPMLLDPEQARVIESKFREIGFQFVTVDILGFRSGSLNQVLG

SEQ ID NO: 40132 - protein, 229 aa, Nitrospina gracilis
  misc_feature (1)..(229): tr|M1YYL0|M1YYL0_NITG3 7-cyano-7-deazaguanine synthase OS=Nitrospina gracilis (strain 3/211) OX=1266370 GN=que C PE=3 SV=1
MKKAIVLLSGGLDSTTVLAIARNEGFQPFTLSFDYGQRHRIELERAAVVAEALGAKDHRVVSVDLAQFGGSALTADIAVPTGRTAKEMAGEVPVTYVPARNTVFLSYALAYAEVTGSHDLFIGVNALDYSGYPDCRPEYIKAFETMANLATKAGVEGTERLTIHTPLIEMTKAEIIKKGLALGVDYGLTHSCYDPRPGGVPCGACDSCMLRKKGFDEAGVEDPLLQRGT

SEQ ID NO: 40133 - protein, 229 aa, Nitrospina sp.
  misc_feature (1)..(229): tr|A0A0J6YR99|A0A0J6YR99_9BACT 7-cyano-7-deazaguanine s ynthase OS=Nitrospina sp. SCGC_AAA799_C22 OX=1628279 GN =queC PE=3 SV=1
MTPKTIVLLSGGLDSTTTLALAQSEGYDAFTLSFDYGQRHRVELDRAQKLAEQMKTVEHHVVKIDLRQFGGSALTDSIEVPTHRSEGDMASCIPVTYVPARNTIFLSYALAYAEVKDCADIFIGVNALDYSGYPDCRPEYIAAFERLANLATKSGVEGQRKIKIHTPLIRMTKAEIIRKGLDLGVNYGLTHSCYDPGEAGLACGACDSCLLRLKGFKEAGVEDPLEYRA

SEQ ID NO: 40134 - protein, 232 aa, Nitrospina sp.
  misc_feature (1)..(232): tr|A0A523N4U5|A0A523N4U5_9BACT 7-cyano-7-deazaguanine s ynthase OS=Nitrospina sp. OX=2024844 GN=queC PE=3 SV=1
MKKKAIVLLSGGLDSATVLAIALQQGYSPVTLCFDYGQRHRVELAKARALSLKMGALEHREVKVDLRQFGGSALTDEIAVPKGRTDGEMSAEIPITYVPARNTIFLSFALAAAEIAGAEDIFIGVNAIDYSGYPDCRPEYIQAFEQMANLATKAGVEGTSKFKIHTPLIQMTKAEIIKKGLELGVDYSLTHSCYHPDANGRPCGQCDSCLLRKKGFQEAGVVDPLIQIGIQE

SEQ ID NO: 40135 - protein, 241 aa, Nitrospinae bacterium
  misc_feature (1)..(241): tr|A0A1G1DYH6|A0A1G1DYH6_9BACT 7-cyano-7-deazaguanine s ynthase OS=Nitrospinae bacterium RIFCSPLOWO2_12_FULL_45 _22 OX=1801687 GN=queC PE=3 SV=1
MKRAVVLSSGGIDSTTCLAIARQEGYAIYSLSINYGQRHAYELNAARRIANFFRVEQHLIINVDLSVFGGSALTDQKLTVPKERQEPDITTGIPITYVPARNTIFLALALAWAEVLGAEAIFLGANYLDYSGYPDCRPEYIAAFEQLACLATKAGIEGRWKIKVHTPLINLTKAQIIKKGLELGIDFSLTHSCYDPDDKGRPCGRCDSCYWRLKGFQEAGLVDPLIYREQGAGGRGQGDRY

SEQ ID NO: 40136 - protein, 244 aa, Nitrospinae bacterium
  misc_feature (1)..(244): tr|A0A351RW90|A0A351RW90_9BACT 7-cyano-7-deazaguanine s ynthase OS=Nitrospinae bacterium OX=2026769 GN=queC PE= 3 SV=1
MHDKKAIVLSSGGIDSTTAMAIAGAEGYKIYSLSFNYGQRHSFELKKASEVAKFFNAKEHLIFDIDLRKIGGSALTSDIDVPIRVSSQQSAVSSQNIKTKDSRLSTIPITYVPARNTIFLSLALAWAEVLEAEDIFIGANAIDYSGYPDCRPEYIDAFEKMANLATKAGVEGKSRIKIHTPLINLTKGEIIKKGISLGVDYSLTSSCYSPDKGGNPCGLCDSCQFRLKGFKDAGIKDPLTYKQS

SEQ ID NO: 40137 - protein, 246 aa, Nitrospira bacterium
  misc_feature (1)..(246): tr|A0A0S8APY2|A0A0S8APY2_9BACT 7-cyano-7-deazaguanine s ynthase OS=Nitrospira bacterium SG8_35_4 OX=1704025 GN= queC PE=3 SV=1
MSKGNRAVVLLSGGIDSATTVAIAHNESLDIFALSFDYGQRHKIELECAGYIAEKFGAREHLIINFNLRDIGGSALTADLEVPKRSTETQKRGSGKGQDDTSDIQSIPITYVPARNTIFLSFALAWAETLEASEIFIGANIIDYSGYPDCRPEFLEAFQNMANLATKASVEGSIKFTIRAPLIKMTKSDIIKRGADLGVDYSLTWSCYDPQSRGNKVFPCLRCESCQLRAKGFLESGLVDPISLNL

SEQ ID NO: 40138 - protein, 236 aa, Nitrospira bacterium
  misc_feature (1)..(236): tr|A0A0S8DAG0|A0A0S8DAG0_9BACT 7-cyano-7-deazaguanine s ynthase OS=Nitrospira bacterium SG8_35_1 OX=1704024 GN= queC PE=3 SV=1
MKKAVVLLSGGLDSSTMLAYAREKGYEVYALSFNYGQRHRIELESAQRVAASFNVAKHLVIDINLREIGGSALTAEIDVPKDRTQLREDTDLSEIPVTYVPARNAIFLSFALAWAETLEAADIFIGANAIDYSGYPDCRPEFIQAFENMANLATKISVDGTLKFTVHTPLMNLTKAEIIKKGTALNVDYSLTWSCYDPQFLNNRYAACMKCDSCLLRAKGFKEAGVEDPSFRRPGE

SEQ ID NO: 40139 - protein, 232 aa, Nitrospira defluvii
  misc_feature (1)..(232): tr|D8PCP6|D8PCP6_9BACT 7-cyano-7-deazaguanine synthase OS=Nitrospira defluvii OX=330214 GN=queC PE=3 SV=1
MTHVDPKAVILLSGGLDSTVTAAIAKQDGYRLYCLTISYGQRHHVEVERARAVAQALSAAAHVVVDVDLRAFGGSALTDDVTVPKDRTQEDRAGGIPVTYVPARNTIFLSLALAYAETLEAQRIYFGANVLDYSGYPDCRPDFIHAFETVARLGTKIGMEGRSVEVCAPLLMLSKAEIVQRGQELRAPLELTHSCYDPGADGVACGRCDSCRIRREGFRLAGVVDPVPYAIL

SEQ ID NO: 40140 - protein, 232 aa, Nitrospira japonica
  misc_feature (1)..(232): tr|A0A1W1I626|A0A1W1I626_9BACT 7-cyano-7-deazaguanine s ynthase OS=Nitrospira japonica OX=1325564 GN=queC PE=3 SV=1
MSGVNGSRAVVLASGGLDSAVTAAIARRDGHELYFLTFDYGQRHAVEVRQARRLAEAMAVTHHLVCSVDLRAIGGSALTGDQGVPKDFDRPGRASEIPVTYVPGRNLIFLSLASAYAETIGAESVYFGANVLDYSGYPDCRPQFIRAFEKAVKEGTKAGVEGRALRVQAPLLALSKADIIREGVALGVPLALTHSCYDPVGDLACGQCDSCRIRRDGFRTAGVVDPTRYAIT

SEQ ID NO: 40141 - protein, 275 aa, Nitrospira lenta
  misc_feature (1)..(275): tr|A0A330L6Z1|A0A330L6Z1_9BACT Uncharacterized protein OS=Nitrospira lenta OX=1436998 GN=NITLEN_20660 PE=4 SV= 1
MQPLSLEHKLLHLREIFAAMDSVLVAYSGGIDSTVVLKVAHDQLLDRAVGVTAISPTFPAVELDSATRVAKEIGVRHELVQTDQLLISAFTENDANRCFHCKTDLYHLLGKLRKARAAAVIVDGTNLDDLSDDRPGLRAAREWGVRSPLVEANLSKAEIRSLAKDLGLSNWDKPAAACLSSRIPRGITITREKLSRVEQAEEVLLAEGFRHCRVRDHGEIARIEVSQDELARIIEGERGTRISRHVKELGFRFVTIDLDGYRPGGVSIDPPRPAK

SEQ ID NO: 40142 - protein, 234 aa, Nitrospira lenta
  misc_feature (1)..(234): tr|A0A330KZS7|A0A330KZS7_9BACT 7-cyano-7-deazaguanine s ynthase OS=Nitrospira lenta OX=1436998 GN=queC PE=3 SV= 1
MPLDAVPQRRAVILLSGGLDSTVTAAVAKQEGCDLFLLTIAYRQRHAIEIEQAKQVAASFGVQHHQVVEVDLRALGGSALTGNLAVPKDRKEQERTQGIPITYVPARNLIFLSLAAAHAEVVGASVVYFGANVLDYSGYPDCRPEFIRAFEQAVAVGTKSGVEGTRLEVRAPLLTMSKAEIIQLGMTLHAPLHLTHSCYDPVGSLACGHCDSCLIRRQGFAQAGVEDPVAYAVR

SEQ ID NO: 40143 - protein, 232 aa, Nitrospira moscoviensis
  misc_feature (1)..(232): tr|A0A0K2G9F9|A0A0K2G9F9_NITMO 7-cyano-7-deazaguanine s ynthase OS=Nitrospira moscoviensis OX=42253 GN=queC PE= 3 SV=1
MTVQSVPPAVVLASGGLDSTVTAAVARRDGFGLHLLTIAYQQRHAVEVERAGRVAVALHAKRHVVLDVNLRALGGSALTADLPVPKKRDAGARSRGIPATYVPGRNLIFLSLAAAHAEIVGASVIYFGANVVDYSGYPDCRPEFIRAFEAAVHAGTKAGVEGQRIEVRAPLLTLTKAEIIRLGVELQVPFELTHSCYDPIGSLACGECDSCLIRKQGFAQAGVVDPIAYAIG

SEQ ID NO: 40144 - protein, 232 aa, Nitrospira sp.
  misc_feature (1)..(232): tr|A0A136K548|A0A136K548_9BACT 7-cyano-7-deazaguanine s ynthase OS=Nitrospira sp. OLB3 OX=1617410 GN=queC PE=3 SV=1
MTLTRSNAVVLLSGGLDSTVTAAVAKQEGYAIHCLTVAYGQRHRIELDRAKAVAHALGAAGHIVVEVNLRAFGGSALTADLDVPKDRSDEERSTTIPVTYVPARNTIFLSLALAYAETLEAQAIYFGANVLDYSGYPDCRPEFIHAFETVARLGTRMGVAGRTIDVRAPLLMQSKADIIRRGLDLRIPFELTHSCYDPGETGVACGRCDSCLIRREAFRRLGVVDPVPYAVP

SEQ ID NO: 40145 - protein, 232 aa, Nitrospira sp.
  misc_feature (1)..(232): tr|A0A1W9GP11|A0A1W9GP11_9BACT 7-cyano-7-deazaguanine s ynthase OS=Nitrospira sp. SG-bin2 OX=1827377 GN=queC PE =3 SV=1
MNEHTRQRAVILASGGLDSTVVAAVAQRDGYEIYLLTLAYRQRHAIEIERAAQVASALGARQHRVIEVDLRAIGGSALTDDLPVPKKRTEQDRGQGIPITYVPGRNLIFLSLAAAHAEVLGASVIYFGANVVDYSGYPDCRPEFLRAFETVVQAGTKAGAEGRRIEVRTPLLSLTKADIVRLGLTLNAPIHLTHSCYDPVGAVACGLCDSCLIRKQGFADAGVEDPIPYAVS

SEQ ID NO: 40146 - protein, 240 aa, Nitrospiraceae bacterium
  misc_feature (1)..(240): tr|A0A3D1BL94|A0A3D1BL94_9BACT 7-cyano-7-deazaguanine s ynthase (Fragment) OS=Nitrospiraceae bacterium OX=20267 70 GN=queC PE=3 SV=1
MVKRAVILLSGGIDSATTMALAKNEGFELYAVSFDYGQRHRRELESAKLVASSLSAKKHLIIKFDLREIGGSAITSHDIEVPKNRQVLSVRREVIKEIQATEIPVTYVPARNTIFLSFALAWAEVLGAEDIFLGANAVDYSGYPDCRPEFLRAFEAMANLATKASVEGMVRFKINAPLVSFTKAEIIRKGFELGVDFSLTWSCYDPQPAAFPPSSPIHCGSCDSCLLRAKGFREAGIKDP

SEQ ID NO: 40147 - protein, 227 aa, Nitrospiraceae bacterium
  misc_feature (1)..(227): tr|A0A354F1U8|A0A354F1U8_9BACT 7-cyano-7-deazaguanine s ynthase OS=Nitrospiraceae bacterium OX=2026770 GN=queC PE=3 SV=1
MSKKAVVLLSGGIDSATTLAIAGTEGYELYALSINYGQRHLLEIECARKIAAFYNVKEHKIFNVDLRGIGGSALTSDIEVPKDRDREDITHGIPVTYVPARNTIFLAISLSWAEVIGADTIFFGANILDYSGYPDCRPEFIHAFEIMANLATRAGVEGENKFTIKTPLIAMTKAEIIKKGVELGVDFSMTHSCYDPTKDGIACGRCDSCILRQRGFAEAGLNDPIKY

SEQ ID NO: 40148 - protein, 227 aa, Nitrospirae bacterium; identical to SEQ ID NO: 40147
  misc_feature (1)..(227): tr|A0A1G1HK17|A0A1G1HK17_9BACT 7-cyano-7-deazaguanine s ynthase OS=Nitrospirae bacterium RIFCSPLOW2_12_42_9 OX= 1801722 GN=queC PE=3 SV=1

SEQ ID NO: 40149 - protein, 169 aa, Nitrospirae bacterium
  misc_feature (1)..(169): tr|A0A1G1KG75|A0A1G1KG75_9BACT 7-cyano-7-deazaguanine s ynthase (Fragment) OS=Nitrospirae bacterium RIFCSPLOWO2 _12_FULL_63_8 OX=1801718 GN=A3K11_12895 PE=3 SV=1
MPSNSSRAVVLASGGLDSTVAATVAKRDCCRLFLLTIVYGQRHRIEVERARQVARALGAADHRVLGIDLRALGGSALTSDQPVPKDSSEAERRDGIPSTYVPARNTIFLSLALAYAETVEAGSIYIGANVLDYSGYPDCRPEYLSAFEQVSRLGTKAGVEGRGIEIRAP

SEQ ID NO: 40150 - protein, 170 aa, Nitrospirales bacterium
  misc_feature (1)..(170): tr|A0A524IWK8|A0A524IWK8_9BACT 7-cyano-7-deazaguanine s ynthase (Fragment) OS=Nitrospirales bacterium OX=235846 0 GN=E4H32_00925 PE=3 SV=1
MVPVPVVILASGGLDSTVTAALAKAEGCDLYLLTIDYGQRHRFEIECAKKIAVWLEAKDHKILQLDLGLFGGSALTDQIPVPTDRPSHEREHGIPVTYVPARNTIFLSLALAYAEVLNATKIFFGANIRDYSGYPDCRPEFIQAFMEVAKQGTRLGQEGHPMEVMAPLLY

SEQ ID NO: 40151 - protein, 218 aa, Nitrospirillum amazonense
  misc_feature (1)..(218): tr|A0A560I5J6|A0A560I5J6_9PROT 7-cyano-7-deazaguanine s ynthase OS=Nitrospirillum amazonense OX=28077 GN=FBZ92_ 1153 PE=3 SV=1
MCSNQRFHVSYIPSNMDDARMKTGLLLSGGMDSVAIAWWKRPDVAFTIDYGQRAAEAEIDAARAVCDDLSIKHEIIRVDCSSLGSGDMVGASPSAVAPVSEWWPFRNQLLLTLAGMAAIRAEVSEIMIGALRTDGVHADGRSEFLEKISHLMSGQEGGISVSAPAIDLDAVELIKISGIPVGILSWAHSCHIANAACGSCHGCLKHYGTWKVISGAPY

SEQ ID NO: 40152 - protein, 188 aa, Nitrospirillum amazonense
  misc_feature (1)..(188): tr|G1Y1M0|G1Y1M0_9PROT 7-cyano-7-deazaguanine synthase OS=Nitrospirillum amazonense Y2 OX=1003237 GN=AZA_09496 PE=3 SV=1
MDSVAIAWWKRPDVAFTIDYGQRAAEAEIDAARAVCDDLSIKHEIIRVDCSSLGSGDMVGASPSAVAPVSEWWPFRNQLLLTLAGMAAIRAEVSEIMIGALRTDGVHADGRSEFLEKISHLMSGQEGGISVSAPAIDLDAVELIKISGIPVGILSWAHSCHIANAACGSCHGCLKHYGTWKVISGAPY

SEQ ID NO: 40153 - protein, 239 aa, Nocardia brasiliensis
  misc_feature (1)..(239): tr|K0ES65|K0ES65_9NOCA 7-cyano-7-deazaguanine synthase OS=Nocardia brasiliensis ATCC 700358 OX=1133849 GN=O3I_ 023490 PE=3 SV=1
MAMTDTRVVVPLSGGLDSAVAAALAVAAGAEVIAISYRYGQRNQRELEAADVVARKLGVGQHYVIDVALSSWGGSRLFAGTEDSASSYYVPGRNSVFAAIALSLAESRGADAIHLGFTAADRRYPDATAEYLTVLRSLAALTTANAGRPGGIAIDAPLIAMDKLTIVRKAIELQVPVAETWSCYAGGVDPCGCCDACRIRDLSLIRAGVPELATGPGRAAYDDGAERATENLWRFLLRD

SEQ ID NO: 40154 - protein, 231 aa, Nocardia sp.
  misc_feature (1)..(231): tr|A0A3A4KMR6|A0A3A4KMR6_9NOCA 7-cyano-7-deazaguanine s ynthase OS=Nocardia sp. YIM PH 21724 OX=2340916 GN=queC PE=3 SV=1
MDTRPKAVVLLSGGLDSTTVLAIAREQGFDPYAMSFRYGQRHRVELEAAKRVAAALGVAEHVVVDIDLRAFGGSALTADIAVPHHDSVEEIDAEQVPSTYVPARNTIFLSFALAWAETLGASDIFLGVSAVDYSGYPDCRPEYLESFERMADLATRAGVEGEQRLRIHAPLIALSKAQTIQRGLELGVDYAMTHSCYDPDAEGRACGGCDSCLLRGKGFTELGLTDPALAR

SEQ ID NO: 40155 - protein, 232 aa, Nocardioidaceae bacterium
  misc_feature (1)..(232): tr|E9US37|E9US37_9ACTN 7-cyano-7-deazaguanine synthase OS=Nocardioidaceae bacterium Broad-1 OX=408672 GN=queC PE=3 SV=1
MTKKAVVLLSGGLDSTTVLAIAKDQGYEPYALSFRYGQRHEIELEAARRVAEAAGVTRHVLCDIDLRVFGGSALTADVDVPKHGSADELASDDVPITYVPARNTVFLSFALAYAETIEATDIFIGVSALDYSGYPDCRPEYIAAYEQMANLATRAGIEGNRMKIHTPLIELTKGQTVEIGKRLGVDYSLTSSCYDPDAEGHPCGHCDSCLLRLKGFAEVGLEDPLVYQESLA

SEQ ID NO: 40156 - protein, 232 aa, Nocardioides caeni
  misc_feature (1)..(232): tr|A0A4V4HKW2|A0A4V4HKW2_9ACTN 7-cyano-7-deazaguanine s ynthase OS=Nocardioides caeni OX=574700 GN=queC PE=3 SV =1
MTRKAIVLLSGGLDSTTVLAIAKDQGFEPYALSFRYGQRHEIELAAAQRVAEAAGVERHVVCDIDLRVFGGSALTADVAVPKHDSADEIGDDEIPITYVPARNTVFLSFALAYAEVVGATDIFIGVNALDYSGYPDCRPEFIQAYERMANLATRAGVEGNELKIHTPLIDLTKAQTVELGTRLGVDYSLTSSCYDPDDQGRPCGHCDSCLLRLKGFAEAGLSDPLEYQDAPA

SEQ ID NO: 40157 - protein, 527 aa, Nocardioides currus
  misc_feature (1)..(527): tr|A0A2R7YZI9|A0A2R7YZI9_9ACTN GMP synthase [glutamine- hydrolyzing] OS=Nocardioides currus OX=2133958 GN=guaA PE=3 SV=1
MTATPDHDLVLVVDFGAQYAQLIARRVREARVYSEIVPHTLPVAEMLARNPKAIILSGGPSSVYADGAPGIDTAIFTSGTPVFGMCYGFQLMASGLGGEVAHTGAREYGRTPVAVTTPGTLLAGIPEAHNVWMSHGDSVASAPAGFTVLASTDVTPVAAFEDVDRGLAGVQWHPEVLHSEHGQQVLEHFLHEIAGCRQTWTMVNIVEEQVERIRSQIGETGRAICALSGGVDSAVAAAIVQRAIGDRLTCVYVDHGMMRKGETEQVRRDFEEVFAALDVVDASDQFLDALAGVHDPEEKRKIIGREFIRTFEAAEVRVFGGLAAGSADDRATAWLVQGTLYPDVVESGGGAGTSTIKSHHNVGGLPDDLQFELVEPLRTLFKDEVRAVGEQLGLPSTMVWRQPFPGPGLGIRIIGEVTRERLDLLRDADAIAREELTRAGLDRDIWQMPVVLLADVRSVGVQGDGRTYGHPVVLRPVTSEDAMTADWARLPYDVMERISTRITNEVADINRVTVDITSKPPGTIEWE

SEQ ID NO: 40158 - protein, 232 aa, Nocardioides sp.
  misc_feature (1)..(232): tr|A0A1V1W5Z4|A0A1V1W5Z4_9ACTN 7-cyano-7-deazaguanine s ynthase OS=Nocardioides sp. PD653 OX=393303 GN=queC PE= 3 SV=1
MSRKAVVLLSGGLDSTTVLAVAKDQGFEPYAISFRYGQRHAVELEAARRVAKAAGIERHVVCDIDLRVFGGSALTADVDVPKHESAEELSDDEIPITYVPARNTVFLSFALAYAEVIGSTDIFIGVNALDYSGYPDCRPEYIAAYEQMANLATRAGVEGNAMKIHTPLINLTKAETVELGTKLGVDYSLTLSCYDPDTEGRSCGHCDSCLLRLRGFADVGLTDPVSYQEATA

SEQ ID NO: 40159 - protein, 207 aa, Nocardioides sp.
  misc_feature (1)..(207): tr|H0BWW7|H0BWW7_9BURK 7-cyano-7-deazaguanine synthase OS=Nocardioides sp. SLBN-35 OX=512030 GN=queC PE=3 SV=1
METIGFDYGQRHSVELQARQAVLAALRGQFPHWAARLGADHMVDLAVLGNISDTALTRETEIRMTESGLPNTFVPGRNLLFFNLAAAVGYRRGLHTLVGGMCETDFSGYPDCRDDTLKALQVAVSLGMGQRFTFETPLMWLDKADTWELARAMGGEALVALIVSDTHTCYHGVRDTPHAWGYGCGTCPACELRRNGYERWRSVSNHA

SEQ ID NO: 40160 - protein, 243 aa, Nocardiopsis dassonvillei
  misc_feature (1)..(243): tr|A0A223QE18|A0A223QE18_NOCDA 7-cyano-7-deazaguanine s ynthase OS=Nocardiopsis dassonvillei OX=2014 GN=queC PE =3 SV=1
MRGQDTPRDEIGGDPFTVVVVFSGGMDSTTLLAHFAALRFRLVAVTVEYGQRHGKEVDAARAVARHYGAEHHILGIAGFGPLLRGSALTDARVDVPDGHYAEESMRDTVVPNRNAVLANLAASVAVARRAGTVALGMHSGDHFVYPDCRPAFVDALRHLVGVANEGFAAPRVEAPFMAWSKADIARHGVRLGAPLEHSWSCYKGGDIHCGTCGTCYERREAFQEAGLPDPTEYLDGVTRFSAP

SEQ ID NO: 40161 - protein, 243 aa, Nocardiopsis dassonvillei
  misc_feature (1)..(243): tr|D7AWP3|D7AWP3_NOCDD 7-cyano-7-deazaguanine synthase OS=Nocardiopsis dassonvillei (strain ATCC 23218 / DSM 4 3111 / CIP 107115 / JCM 7437 / KCTC 9190 / NBRC 14626 / NCTC 10488 / NRRL B-5397 / IMRU 509) OX=446468
MRGQDTPRDEIGGDPFTVVVVFSGGMDSTTLLAHFAALRFRLVAVTVEYGQRHGKEVDAARAIARHYGAEHHILGIAGFGPLLRGSALTDARVEVPDGHYAEESMRDTVVPNRNAVLANLAASVAVARRAGTVALGMHSGDHFVYPDCRPAFVDALRHLVGVANEGFAAPRVEAPFMAWSKADIARHGVRLGAPLEHSWSCYKGGDIHCGTCGTCYERREAFQEAGLPDPTEYLDGVTRFSAP

SEQ ID NO: 40162 - protein, 231 aa, Nocardiopsis sinuspersici
  misc_feature (1)..(231): tr|A0A1V3BTT3|A0A1V3BTT3_9ACTN 7-cyano-7-deazaguanine s ynthase OS=Nocardiopsis sinuspersici OX=501010 GN=queC PE=3 SV=1
MGRPAVVLLSGGLDSTTVLAIAKNQGFSPYALSFRYGQRHSIELDAARRVAETLGAERHVIADIDLRIFGESALTDEISVPKHDSVEELGSDSVPVTYVPARNTIFLSYALAYAEVVGAKDIFTGVTAVDYSGYPDCRPDYMDAYEKMANLATRAGVEDETPLRLRSPLIEMSKADIVREGLRLGVDYSLTFSCYDPDEQARACGHCDTCLLRLKGFAEAGATDPVQYRVG

SEQ ID NO: 40163 - protein, 434 aa, Nocardiopsis sp.
  misc_feature (1)..(434): tr|A0A317LU49|A0A317LU49_9ACTN 7-cyano-7-deazaguanine s ynthase in queuosine biosynthesis OS=Nocardiopsis sp. L 17-MgMaSL7 OX=1938893 GN=BDW27_112157 PE=4 SV=1
MPREATTRVTYSSDLEPELRAFDQDTEILKVIPELIVDYLDEDHLAADLWTIAATAFAVDRNLRRPALNSWRKGQEWHRTISTTFPVRNPAWWAQRTADVEAPLNWLTADTWHIEFTQGGPVPNQASLFSNAELHLEGATALFSGGLDSVCGIIADLEEEGDPLHAISVSTNNRMENQQKRVHDTLRNADSRLRSWSPFRLQVRLSNRESTARSRGFVFLTAGVLSAIARGTNSLRLYENGPGALNLALSRGQVGAQAAKAVHPKTLRYMEHLARAVTGDSEFQIENRAFERTKAEMVRRVPAHFDGALAASVSCDTGFSHHEGGDAPAHCGRCSSCVLRRQALAAAGRNIPTSVRGVPRRKDDHPRLMAWQVARLRHVLRDGFDWARMVREFPDIVCDPRSFLPERREVLLRVFTEYASEWDLPAVIKEFAEE

SEQ ID NO: 40164 - protein, 226 aa, Nocardiopsis sp.
  misc_feature (1)..(226): tr|A0A495L3P8|A0A495L3P8_9ACTN 7-cyano-7-deazaguanine s ynthase OS=Nocardiopsis sp. Huas11 OX=2183912 GN=queC P E=3 SV=1
MTPRTVVAASGGLDSTVLAYDLARSGHELALLSFDYGQRHRRELHAARRLAHRLSANHRVVDLSSLKTLFSGSALTNPDITVPAGQYTAETLRTTVVPARNAIFLSVAIGAAVSWDAQAVAFAAHSGDHQVYPDCRPAFVRAVQELARASTEGFGDVGVLAPYVTWSKAQIVEHGQRLGVPFETTWSCYQGLEWHCGTCSTCRERRSAFVSAQVPDPTEYMETAGA

SEQ ID NO: 40165 - protein, 225 aa, Nodularia sp.
  misc_feature (1)..(225): tr|A0A218Q4B5|A0A218Q4B5_9CYAN 7-cyano-7-deazaguanine s ynthase OS=Nodularia sp. NIES-3585 OX=1973477 GN=queC P E=3 SV=1
MKAVILLSGGLDSATVLYQAKADGYECYPISFDYQQRHRRELHSAFLVAKKAGVVKHQVINFDLRQWGGSALTDDTINLPQERSLEQMSQNIPVTYVPARNTIFLSFALGYAEAIAAQRVYIGVNALDYSGYPDCRPDYIQAMQKVFQLGTKQGREGDPINIVAPLIDLKKTEIIQLGNQLGVPWDLTWSCYAGNDVACGVCDSCRLRLAAFAELGLKDPLPYRE

SEQ ID NO: 40166 - protein, 234 aa, Nodularia spumigena
  misc_feature (1)..(234): tr|A0A2S0Q929|A0A2S0Q929_NODSP 7-cyano-7-deazaguanine s ynthase OS=Nodularia spumigena UHCC 0039 OX=1914872 GN= queC PE=3 SV=1
MGNLKVETEMKAVILLSGGLDSSTVLYQAKADGYECHPISFDYQQRHRRELHSAFLVAQTLGVVKHQVVNFDLRLWGGSALTDETINLPQERSLDEMSQNIPVTYVPARNTIFLSFALGYAEAIAAQRVYIGVNALDYSGYPDCRPDYIQAMQKVFQLGTKQGREGNPIKIVAPLIDLKKTEIIQLGNQLGVPWELTWSCYAGSDVACGVCDSCRLRLAAFAELGLKDPLPYSP

SEQ ID NO: 40167 - protein, 236 aa, Nodularia spumigena
  misc_feature (1)..(236): tr|W6FPB2|W6FPB2_NODSP 7-cyano-7-deazaguanine synthase OS=Nodularia spumigena CCY9414 OX=313624 GN=queC PE=3 S V=1
MAMGNLKVETEMKAVILLSGGLDSSTVLYQAKADGYECHPISFDYQQRHRRELHSAFLVAQTLGVVKHQVVNFDLRLWGGSALTDETINLPQERSLDEMSQNIPVTYVPARNTIFLSFALGYAEAIAAQRVYIGVNALDYSGYPDCRPDYIQAMQKVFQLGTKQGREGNPIKIVAPLIDLKKTEIIQLGNQLGVPWELTWSCYAGSDVACGVCDSCRLRLAAFAELGLKDPLPYSP

SEQ ID NO: 40168 - protein, 231 aa, Nonomuraea solani
  misc_feature (1)..(231): tr|A0A1H6EYW3|A0A1H6EYW3_9ACTN 7-cyano-7-deazaguanine s ynthase OS=Nonomuraea solani OX=1144553 GN=queC PE=3 SV =1
MANEPAVVLLSGGLDSATVLAIAKHEGYRLHALSFRYGQRHGVELAAARRVAEQFGVERHVVADIDLRLFGGSALTADIAVPRHGHVDELDDSIPVTYVPARNTIFLSFALAWAESLGGNDVFIGVNALDYSGYPDCRPEYIAAFERMAALATKAGVEGTQRLRIHTPLIELTKAQIIERGLALGVDYSLTHSCYDPDSEGRPCGSCDSCLLRGRGFAEAGLPDPALTGRA

SEQ ID NO: 40169 - protein, 231 aa, Nonomuraea sp.
  misc_feature (1)..(231): tr|A0A5C4UTX6|A0A5C4UTX6_9ACTN 7-cyano-7-deazaguanine s ynthase OS=Nonomuraea sp. PA1-10 OX=2219224 GN=queC PE= 3 SV=1
MANEPAVVLLSGGLDSATVLAIAKHEGYRLHALSFRYGQRHGVELAAARRVAEQFGVERHVVADIDLRLFGGSALTADIAVPRHRHVDELDDSIPVTYVPARNTIFLSFALAWAESLGGNDVFIGVNALDYSGYPDCRPEYIAAFERMAALATKAGVEGTQRLRVHTPLIELTKAQIIERGLALGVDYSLTHSCYDPESEGRPCGSCDSCLLRGRGFAEAGLPDPALTGRA

SEQ ID NO: 40170 - protein, 248 aa, Nonomuraea sp.; identical to SEQ ID NO: 35661
  misc_feature (1)..(248): tr|A0A1V0A0E8|A0A1V0A0E8_9ACTN 7-cyano-7-deazaguanine s ynthase OS=Nonomuraea sp. ATCC 55076 OX=1909395 GN=BKM3 1_21330 PE=3 SV=1

SEQ ID NO: 40171 - protein, 213 aa, Nosocomiicoccus massiliensis
  misc_feature (1)..(213): tr|A0A2J6NI13|A0A2J6NI13_9STAP 7-cyano-7-deazaguanine s ynthase OS=Nosocomiicoccus massiliensis OX=1232430 GN=q ueC PE=3 SV=1
MSKALIVFSGGQDSTTCLAYALKHYDEVETITFHYNQRHAEEVEIAQKIAKDFNVKNTCIDVSLINDLTENALTRDIDIKSDGDVPNTFVPGRNILFFNIASIAAYQIGADTIVTGVSETDFSGYPDCRSDFVTALEHAIHLGLDRHIKIDTPLMDKDKSEVWEMADELGVFDYVKNETLTCYNGIKGSGCGECPACILRNEGLEEYEKRKFN

SEQ ID NO: 40172 - protein, 224 aa, Nostoc azollae
  misc_feature (1)..(224): tr|D7DXT8|D7DXT8_NOSA0 7-cyano-7-deazaguanine synthase OS=Nostoc azollae (strain 0708) OX=551115 GN=queC PE=3 SV=1
MKAVILLSGGLDSSTVLYQARADGCECYAISFDYQQQHCRELQSAVLVGKSVGVVQHQVVNFDLRLWGGSALTDDAIALPQARSLDEMSQNIPVTYVPARNTIFLSFALGYAEVIAAERVYIGVNALDYSGYPDCRPDYIQAMQEVFRLGTKQGREGQPINIIAPLVNLKKTEIIQLGNQLGVPWELTWSCYAGGDKACGVCDSCRLRLAAFAELGLEDPVDYV

SEQ ID NO: 40173 - protein, 225 aa, Nostoc calcicola
  misc_feature (1)..(225): tr|A0A1U7IDS8|A0A1U7IDS8_9NOSO 7-cyano-7-deazaguanine s ynthase OS=Nostoc calcicola FACHB-389 OX=1357508 GN=que C PE=3 SV=1
MKAVILLSGGLDSSTILYKAKADGFSCHAISFDYQQRHRRELQSALLVGQKAGVVKHQVVNFDLRQWGGSALTDDAIDLPQERSLDEMAQNIPVTYVPARNTIFLSFALSYAEAIAAERVYIGVNALDYSGYPDCRPDYIQAMQEVFRLGTKQGREGQPINIVAPLINLKKTEIIQLGNQLGVPWELTWSCYAGGDVACGVCDSCRLRLAAFAELGLVDPVAYTF

SEQ ID NO: 40174 - protein, 249 aa, Nostoc carneum
  misc_feature (1)..(249): tr|A0A1Z4HUI3|A0A1Z4HUI3_9NOSO 7-cyano-7-deazaguanine s ynthase OS=Nostoc carneum NIES-2107 OX=1973483 GN=queC PE=3 SV=1
MRSPTGVQRLKQADLAIENLKIKPTMKAVILLSGGLDSSTILYQAKADGYECHALSFDYQQRHQRELESARLVAQKAGVAKHQVVNFDLRQWGGSALTDSSIDLPEERSLDEMSQNIPVTYVPARNTIFLSFALAYAEAIAAERVYIGVNALDYSGYPDCRPDYIQAMQEVFHLGTKQGREGEPITITAPLINLKKTEIIQLGNQLGVPWELTWSCYAGANVACGVCDSCRLRLAAFAELGLKDPVAYV

SEQ ID NO: 40175 - protein, 225 aa, Nostoc commune
  misc_feature (1)..(225): tr|A0A2R5FRS4|A0A2R5FRS4_NOSCO 7-cyano-7-deazaguanine s ynthase OS=Nostoc commune NIES-4072 OX=2005467 GN=queC PE=3 SV=1
MKAVILLSGGLDSSTILYKAKADGCECHAISFDYQQRHRRELQSALTVAQKAAIAKHQVVNFDLRQWGGSALTDDAIDLPQERSLDEMSQNIPVTYVPARNTIFLSFALGYAEAIAAERVYIGINALDYSGYPDCRPDYIQAMQEVFRLGTKQGREGQPINIVTPLINMKKTEIIQLGNELGVPWELTWSCYAGDDVACGVCDSCRLRLAAFAELELVDPVEYAS

SEQ ID NO: 40176 - protein, 218 aa, Nostoc cycadae
  misc_feature (1)..(218): tr|A0A2H6LP33|A0A2H6LP33_9NOSO 7-cyano-7-deazaguanine s ynthase OS=Nostoc cycadae WK-1 OX=1861711 GN=queC PE=3 SV=1
MSGGLDSSTVLYQAKADGCECYAISFDYQQRHRRELNSARHVAQTAQVVEHQVVNFDLRQWGGSALTDDKIDLPEARSLAEMSQNIPVTYVPARNTIFLSFALGYAEAIAAERVYIGVNALDYSGYPDCRPDYIQAMQEVFRLGTKQGREGNPTAIVAPLVNLKKTEIIQLGNTLGVPWDLTWSCYSGGDVACGVCDSCRLRLAAFDELGLTDPVPYA

SEQ ID NO: 40177 - protein, 225 aa, Nostoc flagelliforme
  misc_feature (1)..(225): tr|A0A2K8SYM8|A0A2K8SYM8_9NOSO 7-cyano-7-deazaguanine s ynthase OS=Nostoc flagelliforme CCNUN1 OX=2038116 GN=qu eC PE=3 SV=1
MKAVILLSGGLDSSTILYKAKADGCECHAISFDYQQRHRRELQSALTVAQKAAIAKHQVVNFDLRQWGGSALTDDAIDLPQERSLDEMSQNIPVTYVPARNTIFLSFALGFAEAIAAERVYIGVNALDYSGYPDCRPDYIQAMQEVFRLGTKQGREGQPINIVAPLINLKKTEIIQLGNQLGVPWELTWSCYAGGEVACGVCDSCRLRLAAFAELGLVDPLAYGS

SEQ ID NO: 40178 - protein, 225 aa, Nostoc linckia
  misc_feature (1)..(225): tr|A0A1Z4L755|A0A1Z4L755_NOSLI 7-cyano-7-deazaguanine s ynthase OS=Nostoc linckia NIES-25 OX=1091006 GN=queC PE =3 SV=1
MKAVILLSGGLDSSTILYKAKMDGCECYAISFDYQQRHRRELQSALLVGQKAGVVKHQVVNFDLRQWGGSALTDEAIDLPEERSLDEMAQNIPVTYVPARNTIFLSFALSYAEAIAAERVYIGVNALDYSGYPDCRPDYIQAMQEVFRLGTKQGRQGQPINIVAPLINLKKTEIIQLGNQLGVPWELTWSCYAGGDVACGVCDSCRLRLAAFAELGLVDPVAYSF

SEQ ID NO: 40179 - protein, 225 aa, Nostoc linckia
  misc_feature (1)..(225): tr|A0A2C6TWR4|A0A2C6TWR4_NOSLI 7-cyano-7-deazaguanine s ynthase OS=Nostoc linckia z16 OX=1628751 GN=queC PE=3 S V=1
MKAVVLLSGGLDSSTILYKAKKDGCECYAISFDYQQRHRRELHSAVLVAQKAGVVKHQVVSFDLRQWGGSALTDDAIDLPQERSLDEMAQNIPVTYVPARNTIFLSFALSYAEAIAAQRVYIGVNALDYSGYPDCRPDYIQAMQEVFRLGTKQGREGEAINIVTPLINLKKTEIIELGNQLGVPWELTWSCYAGGDVACGMCDSCRLRLAAFAELGLVDPLAYSI

SEQ ID NO: 40180 - protein, 233 aa, Nostoc minutum
  misc_feature (1)..(233): tr|A0A367QVM6|A0A367QVM6_9NOSO 7-cyano-7-deazaguanine s ynthase OS=Nostoc minutum NIES-26 OX=1844469 GN=queC PE =3 SV=1
MANPKFEIEMKAVILLSGGLDSSTVLYQAKADSHECHTISFDYQQRHRRELQSAFSVAEKAAVVQHQVVNFDLRQWGGSALTDDAIALPQERSIDEMSQNIPITYVPARNTIFLSFALGYAEAIAAELVYIGVNALDYSGYPDCRPDYIQAMQEVFRLGTKQGREGKPITIVAPLINLKKTEIIQLGNQLGVPWEQTWSCYAGGDVACGICDSCRLRLAAFTELGLVDPLSYR

SEQ ID NO: 40181 - protein, 481 aa, Nostoc piscinale
  misc_feature (1)..(481): tr|A0A0M4TJJ2|A0A0M4TJJ2_9NOSO Uncharacterized protein OS=Nostoc piscinale CENA21 OX=224013 GN=ACX27_08630 PE= 4 SV=1
MNYQTSLVQESDYSDYQDYTLDFQPVSNIDGSVLFIDHSRGKQLNFGINVDDKEFKYRVKADFSPVVADLIDIAIAIYTSDRLAPQNLTEKQRRFHVKLPVRNPEWLSSETFRTKLDDLLTWTTDSKWIFDFQKRIAPERLVEQLSLPIAPQGCEVTLWSGGLDALAGLYTRLVMYPEQQFVLFGTGSNDSVYARQERVYQEIQSIFPGRCHLFRIPIRFDSSSEQHKNKLSRARGVVFTLLGSACTYLMGQQVLYLYENGIGAINLPYRESAVGLDHSRSVHPLTLQKVSDVVSQLLGKEFQVKNPFLFWTKAEMCKSLADDGRDDLPPLTMSCDSPHRQKPVQCGYCSSCLLRRQSLAASRITDKTRYVVLHGERSVKKPSLCFLNMQAQVKTLDSLLSISDEPWKNLTKKFPILDDIVDRTATAENLSLIDMQGHLVQLYQKYVSEWNAVESHIATELSNKHSDHKASSKYVVSSQQG

SEQ ID NO: 40182 - protein, 231 aa, Nostoc piscinale
  misc_feature (1)..(231): tr|A0A0M4SIP7|A0A0M4SIP7_9NOSO 7-cyano-7-deazaguanine s ynthase OS=Nostoc piscinale CENA21 OX=224013 GN=queC PE =3 SV=1
MKAVILLSGGLDSSTVLYQAKADGCECYAISFDYQQRHRRELNSAMLVAQTAGVEEHQVVNFDLRKWGGSALTDEKIDVPQARSLEEMSQNIPATYVPARNTIFLSFALGYAEAIAAERVYIGVNALDYSGYPDCRPDYIQAMQEVFRLGTKQGREGNATAIAAPLIHLKKTEIIQLGNKLGVPWHLTWSCYSGADIACGVCDSCRLRLAAFEELGLQDPLAYAAGVGSKE

SEQ ID NO: 40183 - protein, 224 aa, Nostoc punctiforme
  misc_feature (1)..(224): sp|B2IUR7|QUEC_NOSP7 7-cyano-7-deazaguanine synthase OS =Nostoc punctiforme (strain ATCC 29133 / PCC 73102) OX= 63737 GN=queC PE=3 SV=1
MKAVILLSGGLDSSTILYKAKADGCECHAISFDYQQRHRQELQSALTVAKKAAIAKHQVVNFDLRQWGGSALTDDAIDLPQQRSLDEMSQNIPVTYVPARNTIFLSFALGYAEAIAAERVYIGVNALDYSGYPDCRPDYIEAMQEVFRLGTKQGREGQPIKIVAPLINLKKTEIIQLGNELGVPWELTWSCYAGNDVACGVCDSCRLRLAAFAELGLVDPLVYA

SEQ ID NO: 40184 - protein, 484 aa, Nostoc punctiforme
  misc_feature (1)..(484): tr|A0A367R0P2|A0A367R0P2_NOSPU Uncharacterized protein OS=Nostoc punctiforme NIES-2108 OX=1356359 GN=A6769_353 00 PE=4 SV=1
MNYRPLIQQKLNNSDYSDYILHFEPIVNSNGSVHFIDHSQCNNFTIGINVDDTEFKYRVKEEFPAIVADLIDLSVAIHTSDRLAPQNLNGKQRRLYVVLPVRHPELLSAEPFRTKLDDLLKWATDSEWVFDFQRRIATERLVEHPSLPIAPQGSEVALWSGGLDALAGLYTRFRMYPEKRFLLFGTGSNDSVYARQERVATEIKSIFPGRSNLFRVPIRFDDSRVQRKNKLSRARGVVFTLLGAACAHLMGQKVLYLYENGIGAINLPYRESAVGLDHSRSVHPLTLFMVGDVISELLGEEFQVHNPFLFWTKAEMCKALAKDWRNDLPPLSMSCDSPHRQKPIQCGYCSSCLLRRQALAAASIEDKTRYVVLHGERPVKNPSLYFLNMLAQVHTLRCLLSISDEPSLQWKALTGKFPVLDDIVDRSAVAENLVPADMRSHLIKLYQNYVSEWDAVELEISDGLLNKHSNQQEYSKYVVSAQQG

SEQ ID NO: 40185 - protein, 229 aa, Nostoc sp.
  misc_feature (1)..(229): sp|Q8YM45|QUEC_NOSS1 7-cyano-7-deazaguanine synthase OS =Nostoc sp. (strain PCC 7120 / SAG 25.82 / UTEX 2576) O X=103690 GN=queC PE=3 SV=1
MKAVILLSGGLDSSTILYQAKADGCECYSISFDYQQRHRRELHSAFLVAQTAGIVQHQVINFDLRLWGGSALTDDNIDLPQERSLDAMSQNIPVTYVPARNTIFLSFALAYAEAIAAQRVYIGVNALDYSGYPDCRPDYIEAMQEVFRLGTKQGREGQPINIVAPLINLKKTEIIQLGNQLGVPWNLTWSCYAGGDVACGVCDSCRLRLAAFAELGLEDPLPYAYLKGV

SEQ ID NO: 40186 - protein, 224 aa, Nostoc sp.
  misc_feature (1)..(224): tr|K9QZM9|K9QZM9_NOSS7 7-cyano-7-deazaguanine synthase OS=Nostoc sp. (strain ATCC 29411 / PCC 7524) OX=28072 G N=queC PE=3 SV=1
MKAVILLSGGLDSSTILYQAKADGCECYSMSFDYQQRHRRELQSALLVAQKAGVVQHQVVNFDLRQWGGSALTDDAIALPQERSLEEMSQNIPVTYVPARNTIFLSFALAYAEAIAAERVYIGVNALDYSGYPDCRPDYIQAMQEVFRLGTKQGREGKPIQIIAPLLDLKKTEIIQLGNKLGVPWELTWSCYAGGDAACGVCDSCSLRLAAFKELGLVDPLPYA

SEQ ID NO: 40187 - protein, 225 aa, Nostocales cyanobacterium
  misc_feature (1)..(225): tr|A0A1Y0RIC8|A0A1Y0RIC8_9CYAN 7-cyano-7-deazaguanine s ynthase OS=Nostocales cyanobacterium HT-58-2 OX=1940762 GN=queC PE=3 SV=1
MKAVILLSGGLDSSTVLYQALVDGFECHTISFDYQQRHRRELQSALAIAQKAGVVDHQVVRFDLRQWGGSALTDDAIDLPHKRDPEEMSQSIPVTYVPARNTIFLSFALAYAETIVAQRIYIGVNALDYSGYPDCRPDYIQAMQEVFRLGTKQGRSGQPISIVTPLIHLKKTEIIQLGNKLEVPWELTWSCYAGGDVACGICDSCRLRLAAFADLGLKDPLAYAQ

SEQ ID NO: 40188 - protein, 235 aa, Notoacmeibacter marinus
  misc_feature (1)..(235): tr|A0A231UXR9|A0A231UXR9_9RHIZ 7-cyano-7-deazaguanine s ynthase OS=Notoacmeibacter marinus OX=1876515 GN=queC P E=3 SV=1
MQSDTSALVLFSGGQDSTTCLAWALDRFARVETVGFDYGQRHSVELECRQTILGRIASDFPQWAKRLGDDHMVPMKELAVLSQTAMTEEVAFETGQQGLPNTFVPGRNLLFFTYAATIAWRRGIRHLIGGMCETDYSGYPDCRDDTLKALQVTLNLGMDMRSVIHTPLMWLDKGQTFALAEELGGEAFLDLVVENSHSCYRGERDQRHEWGYGCGDCPACELRANGWREFRADSR

SEQ ID NO: 40189 - protein, 235 aa, Notoacmeibacter sp.
  misc_feature (1)..(235): tr|A0A3L7JCK1|A0A3L7JCK1_9RHIZ 7-cyano-7-deazaguanine s ynthase OS=Notoacmeibacter sp. M2BS9Y-3-1 OX=2448481 GN =queC PE=3 SV=1
MQSDTSALVLFSGGQDSTTCLAWALDRYERVETVGYDYGQRHSVELECRKTILETIRRDFPQWADRLGEDHQIPMRELGAISETAMTEEVEFETGKQGLPNTFVPGRNLLFFTYAATIAWRRGIRHLVGGMCETDYSGYPDCRDDTLKALQVTLNLGMEMRSVVHTPLMWLDKAQTFAMAQELGGSAFLDLVVEHSHSCYRGDRTHRHEWGYGCGTCPACELRANGWQKFTAAER

SEQ ID NO: 40190 - protein, 233 aa, Noviherbaspirillum autotrophicum
  misc_feature (1)..(233): tr|A0A0C2BY31|A0A0C2BY31_9BURK 7-cyano-7-deazaguanine s ynthase OS=Noviherbaspirillum autotrophicum OX=709839 G N=queC PE=3 SV=1
MMQSSRALVLFSGGQDSTTCLAWALAHYAHVETIGFDYGQRHAIELAVRPGLLQKMRALSADWSSRLGEDHMIDLSLLSRISDTALTSDVEIAMQENGLPNTFVPGRNLLFMTVAATVAYRRGLDVLVGGMCETDFSGYPDCRDDTMKALQVALNLGMGTRLKIDTPLMWIDKAATWRLAEELGGPALVDLIRTDTHTCYLGERGALHDWGHGCGTCPACELRARGYRQFRQE

SEQ ID NO: 40191 - protein, 235 aa, Noviherbaspirillum denitrificans
  misc_feature (1)..(235): tr|A0A254TDI4|A0A254TDI4_9BURK 7-cyano-7-deazaguanine s ynthase OS=Noviherbaspirillum denitrificans OX=1968433 GN=queC PE=3 SV=1
MTLNNGALVLFSGGQDSATCLAWALARYARVETIGFDYGQRHAIELSVRPALLQKTRALSPEWDARLGEDHMIDLSLLGKISDTALTADVEIAMQSNGLPNTFVPGRNLLFMTVAATVAYRRGLDVLVGGMCETDFSGYPDCRDDTMKALQVALNLGMATRLKVETPLMWIDKAATWRLAQELGGTALVDLIRADTHTCYLGERGELHDWGYGCGKCPACELRARGYRQFAAGAV

SEQ ID NO: 40192 - protein, 246 aa, Noviherbaspirillum humi
  misc_feature (1)..(246): tr|A0A239CGY5|A0A239CGY5_9BURK 7-cyano-7-deazaguanine s ynthase OS=Noviherbaspirillum humi OX=1688639 GN=queC P E=3 SV=1
MSASIPDILLPAEPDKALVLFSGGQDSTTCLAWALARYGHVETIGFDYGQRHAIELEVRPALLDRMRGMSEAWRAKLGEDHMIDLSLIGKISDTALTRDVEINMQENGLPNTFVPGRNLLFMTVAATVAYRRGLNVLVGGMCETDYSGYPDCRDDTMKALQVALNLGMATRLKLETPLMWIDKGDTWRLAENLGGRALVDLIRADTHTCYLGERGALHPWGHGCGTCPACVLRARGYDAYLQRRQA

SEQ ID NO: 40193 - protein, 233 aa, Noviherbaspirillum sp.
  misc_feature (1)..(233): tr|A0A3A3G9M9|A0A3A3G9M9_9BURK 7-cyano-7-deazaguanine s ynthase OS=Noviherbaspirillum sp. K1S02-23 OX=2320865 G N=queC PE=3 SV=1
MNTINGALVLFSGGQDSATCLAWALARYPRVETIGFDYRQRHAIELAVRLPLLDQMRALSPEWDRKLGEDHLIDLGLISTIADTALTRDVAISMQDNGLPNTFVPGRNLLFMMVAATVAYRRGLDVLVGGMCETDFSGYPDCRDDAMKALQVTLNLGMATRLKLETPLMWLDKAATWRLAQDLGGPALVELVRSGTHTCYLGERGVLHDWGYGCGHCPACELRARGYRQFMQA

SEQ ID NO: 40194 - protein, 233 aa, Noviherbaspirillum sp.
  misc_feature (1)..(233): tr|A0A5B8NA63|A0A5B8NA63_9BURK 7-cyano-7-deazaguanine s ynthase OS=Noviherbaspirillum sp. UKPF54 OX=2601898 GN= queC PE=3 SV=1
MMHSSRALVLFSGGQDSTTCLAWALSRYAHVETIGFDYGQRHAIELSVRPLLLQKMRALSAGWNARLGEDHMIDLSLLSRISDTALTSDVAITMQENGLPNTFVPGRNLLFMTVAATVAYRRGLDVLVGGMCETDFSGYPDCRDDTMKALQVALNLGMSTRLKIDTPLMWIDKAATWRLAEELGGPALVDLIRTDTHTCYLGERGALHDWGHGCGTCPACELRARGYRQFRQE

SEQ ID NO: 40195 - protein, 222 aa, Novimethylophilus kurashikiensis
  misc_feature (1)..(222): tr|A0A2R5FB87|A0A2R5FB87_9PROT 7-cyano-7-deazaguanine s ynthase OS=Novimethylophilus kurashikiensis OX=1825523 GN=queC PE=3 SV=1
MKKAVVLLSGGLDSATVLAIARSQGYECYCLSFDYHQRHVAELDASRRVAAALGAAEHRVFQLDLSAFGGSALTDTSIAVPQSPTEGIPVTYVPARNTIMLSLALAWAEVLGSRDIFIGVNAVDYSGYPDCRKEYIEAFQRMANLATKAGVEGDTVEIHTPLIDLSKAEIIRQGTALGVDYSLTVSCYQADAEGHACGQCDSCRLRHEGFVAAGLADPTRMI

SEQ ID NO: 40196 - protein, 233 aa, Novosphingobium aromaticivorans
  misc_feature (1)..(233): sp|Q2G3K1|QUEC_NOVAD 7-cyano-7-deazaguanine synthase OS =Novosphingobium aromaticivorans (strain ATCC 700278 / DSM 12444 / CIP 105152 / NBRC 16084 / F199) OX=279238 G N=queC PE=3 SV=1
MPSNSPAPDAPLAVVLLSGGLDSMVCAGLAQEQGFRVLALTIDYNQRHRVELDAARAIAARLGVERHVILPLDLRQFGGSALTADIAVPKDGVGDDIPVTYVPARNLIFLSLALAWAEAAGSKDLFIGVNALDYSGYPDCRPEFVAGFEDLARIATKVGSEGGTVTVHAPLQHLKKSEIAREAARLGLEAGDSWSCYDPLPDGRACGVCDSCRLRRAGFEEAGLNDGTRYGGG

SEQ ID NO: 40197 - protein, 236 aa, Novosphingobium barchaimii
  misc_feature (1)..(236): tr|A0A561HY26|A0A561HY26_9SPHN 7-cyano-7-deazaguanine s ynthase OS=Novosphingobium barchaimii OX=1420591 GN=que C PE=3 SV=1
MQISQDSSSQDNRGHKAVVLLSGGLDSMVSAGIARETGFAVNALTIDYNQRHRCEIDSARKIAEFVGAERHVVLPLDLRQFGGSALTDNIEVPKDGVSPGVPVTYVPARNLVFLSLTLAWAEAIGATDIFIGVNALDYSGYPDCRPEFIAAFQDIARLATKEGDQGTQFRIHAPLQFMGKADIAREADRLGMDAGMSWSCYDPQPGDVACGECDSCRLRKAGFADAGLIDPTPYAV

SEQ ID NO: 40198 - protein, 231 aa, Novosphingobium barchaimii
  misc_feature (1)..(231): tr|A0A0J8AL62|A0A0J8AL62_9SPHN 7-cyano-7-deazaguanine s ynthase OS=Novosphingobium barchaimii LL02 OX=1114963 G N=queC PE=3 SV=1
MQETTSPEPKQAVVLLSGGLDSMVSAGIAREQGFAVNALTIDYNQRHRRELDAAADIARFIGARRHVVMPLDLRQFGGSALTDDIEVPKEGVGADIPVTYVPARNLVFLSLTLAWAEAIGANDIFIGVNALDYSGYPDCRPEFISAFENIAALATKAGAEGQVLRIHAPLQFMGKADIAREADRLGLDPGMSWSCYDPQPDGTACGLCDSCRLRKAGFADAGLIDPTPYSA

SEQ ID NO: 40199 - protein, 234 aa, Novosphingobium fuchskuhlense
  misc_feature (1)..(234): tr|A0A117UZD1|A0A117UZD1_9SPHN 7-cyano-7-deazaguanine s ynthase OS=Novosphingobium fuchskuhlense OX=1117702 GN= queC PE=3 SV=1
MVAKAVSEQPPLAVVLLSGGLDSMVCAALALEQGFRVLALTIDYNQRHRVEIDAARGIAQSLGVERHIVLPLDLRQFGGSALTADIAVPKGGLGEDIPVTYVPARNLVFLSLALAWAEAAGSGDLFIGVNALDYSGYPDCRPEFIGGFENLARVATARGDRGGTVRVHAPLQHLKKSEIAQEAARLGLDPAASWSCYDPQPDGRACGVCDSCRLRRAGFDAAGIEDGTQYGDDG

SEQ ID NO: 40200 - protein, 231 aa, Novosphingobium ginsenosidimutans
  misc_feature (1)..(231): tr|A0A5B8S3M9|A0A5B8S3M9_9SPHN 7-cyano-7-deazaguanine s ynthase OS=Novosphingobium ginsenosidimutans OX=1176536 GN=queC PE=3 SV=1
MSSAANSSQRQAVVLLSGGLDSMVVAGLAQEAGYAINALTIDYNQRHRRELDAARAIAERIGAVRHVVLPLDLSRFGGSALTADIDVPKQGVGADIPVTYVPARNLVFLSLTLAWAEALGVRDIFIGVNALDYSGYPDCRPEFIAGFQDLARLATKAGAEGDEWRIHAPLQFLGKAEIAAEAHRLELDAGLSWSCYDPQPDGSACGLCDSCRLRREGFAKAGLVDPTRYAA

SEQ ID NO: 40201 - protein, 235 aa, Novosphingobium guangzhouense
  misc_feature (1)..(235): tr|A0A2K2FTD7|A0A2K2FTD7_9SPHN 7-cyano-7-deazaguanine s ynthase OS=Novosphingobium guangzhouense OX=1850347 GN= queC PE=3 SV=1
MHEETSPQPTSAAPQAVVLLSGGLDSMVSAGIARERGFAVNALTIDYNQRHRRELDAAADIARVIGAARHVVLPLDLRRFGGSALTDDIAVPKGGVGTDIPVTYVPARNLVFLSLTLAWAEAIGASDIFIGVNALDYSGYPDCRPEFISAFEDIATLATKAGDEGQKLRIHAPLQFMSKADIAREADRLGLNPGMSWSCYDPQPDGRACGQCDSCRLRKGGFEEAGLIDPTPYAA

SEQ ID NO: 40202 - protein, 233 aa, Novosphingobium kunmingense
  misc_feature (1)..(233): tr|A0A2N0H5K7|A0A2N0H5K7_9SPHN 7-cyano-7-deazaguanine s ynthase OS=Novosphingobium kunmingense OX=1211806 GN=qu eC PE=3 SV=1
MTEMAEEPPRQAVVLLSGGLDSMVTAALAREAGFAVNALTIDYNQRHRIELDAARRVAAEIGVARHVILPLDLRQFGGSALTDEIAVPKDGVGPDIPVTYVPARNLVFLSLTLAWAEALGARDVFIGVNALDYSGYPDCRPEFIAGFADLARLATKAGAEGDAFTVHAPLQFMGKADIARECARLGLDPALSWSCYDPQPGCLACGQCDSCRLRQEGFEKAGIADETRYSAPR

SEQ ID NO: 40203 - protein, 231 aa, Novosphingobium lindaniclasticum
  misc_feature (1)..(231): tr|T0J3T2|T0J3T2_9SPHN 7-cyano-7-deazaguanine synthase OS=Novosphingobium lindaniclasticum LE124 OX=1096930 GN =queC PE=3 SV=1
MQHSPDTVGRKAVVLLSGGLDSMVVAGMAREAGYAVNALTIDYNQRHRCEIDSARTIAAFVGAERHVILPLDLRQFGGSALTDDIDVPKDGIGPGVPVTYVPARNLVFLSLTLAWAEAIGATDIFIGVNALDYSGYPDCRPEFIAAFQDIARLATKEGDQGADFKIHAPLQFLGKADIAREADRLGMDAGMSWSCYDPQPGDLACGECDSCRLRKAGFADAGLTDTTPYAV

SEQ ID NO: 40204 - protein, 231 aa, Novosphingobium malaysiense
  misc_feature (1)..(231): tr|A0A0B1ZT96|A0A0B1ZT96_9SPHN 7-cyano-7-deazaguanine s ynthase OS=Novosphingobium malaysiense OX=1348853 GN=qu eC PE=3 SV=1
MQNSSSPQARQAVVLLSGGLDSMVSAGIARESGFEINALTIDYNQRHRREIEAAGTIAQHLGANRHVVLPLDLRQFGGSALTDDIDVPKEGVGDDIPVTYVPARNLVFLSLTLAWAEALGAHDIFIGVNALDYSGYPDCRPEFIAAFESIADLATKAGAQGQKVKIHAPLQYLGKADIAREADRLGLDAGMSWSCYDPQPDGRACGLCDSCRLRRTGFAEAGLVDPTPYAA

SEQ ID NO: 40205 - protein, 209 aa, Novosphingobium mathurense
  misc_feature (1)..(209): tr|A0A1U6HEQ4|A0A1U6HEQ4_9SPHN 7-cyano-7-deazaguanine s ynthase OS=Novosphingobium mathurense OX=428990 GN=queC PE=3 SV=1
MVSAGLAKEAGFAVNALTIDYNQRHRREIDAARTIADRLGAERHVVLPLDLRRFGGSALTDDIEVPKDGVGPDIPVTYVPARNLVFLSLTLAWAETVGAKDIFIGVNALDYSGYPDCRPEFIAAFENIATLATKVGAQGNAFTIHAPLQYMSKAEIAGEAHRLGLDAGMSWSCYDPQPDGRACGLCDSCRLRKAGFEQAGLVDPTDYAA

SEQ ID NO: 40206 - protein, 214 aa, Novosphingobium nitrogenifigens
  misc_feature (1)..(214): tr|F1ZDR3|F1ZDR3_9SPHN 7-cyano-7-deazaguanine synthase OS=Novosphingobium nitrogenifigens DSM 19370 OX=983920 GN=queC PE=3 SV=1
MVCAGLAREQGFEVLALTFDYNQRHRVELDASRKVAARVGVERHVILPLDLRQFGGSALTDDIAVPKDGVGEEIPVTYVPARNLVFLSLALAWAEAAGSSDIFIGVNALDYSGYPDCRPEFIGGFEALARVATKFGDKGGNVKIHAPLQYLKKADIAREAVRLGLETGESWSCYDPLPDGRACGLCDSCRLRRAGFKEAGIEDGTDYAAGDEAA

SEQ ID NO: 40207 - protein, 231 aa, Novosphingobium pentaromativorans
  misc_feature (1)..(231): tr|A0A2W5Q624|A0A2W5Q624_9SPHN 7-cyano-7-deazaguanine s ynthase OS=Novosphingobium pentaromativorans OX=205844 GN=queC PE=3 SV=1
MQNPQDNEVRKAVVLLSGGLDSMVSAGIAREAGYAVNALTIDYNQRHRCEIDAARTIAEFVGAERHVVLPLDLRQFGGSALTDDIDVPKDGLGDGVPVTYVPARNLVFLSLTLAWAEAIGASDIFIGVNALDYSGYPDCRPEFIAAFQDIARLATKEGDQGTQFQIHAPLQFMGKADIAREAHRLGMDAGMSWSCYDPQPGDLACGECDSCRLRKAGFADAGLIDPTPYAA

SEQ ID NO: 40208 - protein, 231 aa, Novosphingobium pentaromativorans
  misc_feature (1)..(231): tr|G6EC73|G6EC73_9SPHN 7-cyano-7-deazaguanine synthase OS=Novosphingobium pentaromativorans US6-1 OX=1088721 G N=queC PE=3 SV=1
MQDHLSNQSRQAVVLLSGGLDSMVSAALAKEAGFAVNALTIDYNQRHRREIDAARTIAEELGAQRHVVLPLDLRRFGGSALTDDIDVPKGGVGADIPVTYVPARNLVFLSLTLAWAETVGAKDIFIGVNALDYSGYPDCRPEFISAFENIATLATKVGAEGNAFSIHAPLQYMSKAEIASEAHRLGLDAGMSWSCYDPQPDGRACGLCDSCRLRKAGFEQAGLVDPTDYAA

SEQ ID NO: 40209 - protein, 235 aa, Novosphingobium resinovorum
  misc_feature (1)..(235): tr|A0A1D8A7B2|A0A1D8A7B2_9SPHN 7-cyano-7-deazaguanine s ynthase OS=Novosphingobium resinovorum OX=158500 GN=que C PE=3 SV=1
MHEETTPQPGSAAPQAVVLLSGGLDSMVCAGIARERGFAVNALTIDYNQRHRRELDAAAEIASFVGAQRHVVLPLDLRRFGGSALTDDIAVPKDGVGEDIPVTYVPARNLVFLSLTLAWAEAIGANDIFIGVNALDYSGYPDCRPEFISAFENIATLATKAGDEGQKLRIHAPLQFMSKADIARETDRLGLNPGMSWSCYDPQPDGRACGLCDSCRLRKGGFEEAGLTDPTPYAA

SEQ ID NO: 40210 - protein, 235 aa, Novosphingobium resinovorum
  misc_feature (1)..(235): tr|A0A031JH29|A0A031JH29_9SPHN 7-cyano-7-deazaguanine s ynthase OS=Novosphingobium resinovorum OX=158500 GN=que C PE=3 SV=1
MHEETTPQPGSAAPQAVVLLSGGLDSMVCAGIARERGFAVNALTIDYNQRHRRELDAAAEIASFVGAQRHVVLPLDLRRFGGSALTDDIAVPKDGVGEDIPVTYVPARNLVFLSLTLAWAEAIGANDIFIGVNALDYSGYPDCRPEFISAFENIATLATKAGDEGQKLRIHAPLQFMSKADIAGETDRLGLNPGMSWSCYDPQPDGRACGLCDSCRLRKGGFEEAGLTDPTSYAA

SEQ ID NO: 40211 - protein, 234 aa, Novosphingobium sediminis
  misc_feature (1)..(234): tr|A0A512AJ20|A0A512AJ20_9SPHN 7-cyano-7-deazaguanine s ynthase OS=Novosphingobium sediminis OX=707214 GN=queC PE=3 SV=1
MVAETVSQQAPLAVVLLSGGLDSMVCAALAREQGFRILALTIDYNQRHRVEIEAARGIAKALGVERQVILPLDLRQFGGSALTADIAVPKDGVGDDIPVTYVPARNLVFLSLALAWAEAAGASDLFIGVNALDYSGYPDCRPEFIGGFEDLARVATKLGDQGGTVRVHAPLQHLKKSEIAQEAARLGLDPAASWSCYDPLPDGRACGVCDSCRLRRAGFDAAGIEDGTKYGDDG

SEQ ID NO: 40212 - protein, 233 aa, Novosphingobium sp.
  misc_feature (1)..(233): tr|A0A519QY18|A0A519QY18_9SPHN 7-cyano-7-deazaguanine s ynthase OS=Novosphingobium sp. OX=1874826 GN=queC PE=3 SV=1
MSTLPPGNGREAVVLLSGGLDSMVVAGLAREAGYRVNALTIDYNQRHRRELDAARTIAQDIGAARHVILPLDLRQFGGSALTDDIAVPKDGVAEDVIPVTYVPARNLVFLSLTLAWAEALSARDIFIGVNALDYSGYPDCRPEFIAGFADLADLATKAGAEGERFAIHAPLQFLGKAEIAQEAHRLGFDPAMSWSCYDPQPDGRACGRCDSCRLRRAGFADAGLVDGTLYAAD

SEQ ID NO: 40213 - protein, 232 aa, Novosphingobium sp.
  misc_feature (1)..(232): tr|A0A3B7DK26|A0A3B7DK26_9SPHN 7-cyano-7-deazaguanine s ynthase OS=Novosphingobium sp. THN1 OX=1016987 GN=queC PE=3 SV=1
MLQSPEVAQAPLAVVLLSGGLDSMVCAGLAKEQGFRVLALTIDYNQRHRIELDAARVIAERVGVERHVILPLDLRQFGGSALTADIDVPKDGVGDDIPVTYVPARNLVFLSLALAWAEAAGSKDLFIGVNALDYSGYPDCRPEFVQGFEGLARIATKIGSEGGTVTVHAPLQHLKKSQIAQEAARLGLDAGQSWSCYDPLPDGKACGVCDSCRLRRAGFEEAGLNDGTRYSD

SEQ ID NO: 40214 - protein, 209 aa, Novosphingobium subterraneum
  misc_feature (1)..(209): tr|A0A0B8ZNR4|A0A0B8ZNR4_9SPHN 7-cyano-7-deazaguanine s ynthase OS=Novosphingobium subterraneum OX=48936 GN=que C PE=3 SV=1
MVCAGLAKEQGFRVLALTIDYNQRHRIELDAARVIAERVGVERHVILPLDLRQFGGSALTADIDVPKDGVGDDIPVTYVPARNLVFLSLALAWAEAAGSKDLFIGVNALDYSGYPDCRPEFVQGFEGLARIATKIGSEGGTVTVHAPLQHLKKSRIAQEAARLGLDAGQSWSCYDPLTDGRACGVCDSCRLRRAGFEEAGLNDGTRYSD

SEQ ID NO: 40215 - protein, 210 aa, Novosphingobium taihuense
  misc_feature (1)..(210): tr|A0A562K0B8|A0A562K0B8_9SPHN 7-cyano-7-deazaguanine s ynthase OS=Novosphingobium taihuense OX=260085 GN=queC PE=3 SV=1
MVCAGLAKEQGFRVLALTIDYNQRHRVELDAAKVIAGRIGVERHVILPLDLRQFGGSALTSDIAVPKDGVGDDIPVTYVPARNLVFLSLALAWAEAAGSNDLFIGVNALDYSGYPDCRPEFVKGFEGLARVATRIGNDGGTVKVHAPLQHLKKSEIAQEAARLGLEPGQSWSCYDPLPDGRACGTCDSCRLRRAGFEEAGLHDGTRYGED

SEQ ID NO: 40216 - protein, 231 aa, Novosphingobium tardaugens
  misc_feature (1)..(231): tr|U3A2U7|U3A2U7_9SPHN 7-cyano-7-deazaguanine synthase OS=Novosphingobium tardaugens NBRC 16725 OX=1219035 GN= queC PE=3 SV=1
MITPDTPQKRAVVLLSGGLDSMVSAALAQEQGYSVNALTIDYNQRHRRELDAARDVAAMLGVERHVTLPLDLSLFGGSALTDLSIAVPKDGVGPDIPITYVPARNLVFLSLTLAWAEALGAHDIFIGVNALDYSGYPDCRPEFIASFAETARLATKTGAEGAPFTIHAPLQFLGKADIAREAARLGLDPGRSWSCYDPQPDGLACGTCDSCRLRRAGFHDAGIEDPTPYAA

SEQ ID NO: 40217 - protein, 228 aa, Obesumbacterium proteus
  misc_feature (1)..(228): tr|A0A4Q9D799|A0A4Q9D799_9GAMM 7-cyano-7-deazaguanine s ynthase OS=Obesumbacterium proteus OX=82983 GN=queC PE= 3 SV=1
MKRAVVVFSGGQDSTTCLIQALERYDEVHCITFDYGQRHRAEIDVARDLAIKLGASAHKVLDVGLLNELAISSLTRDNIPVPTESEDGIPNTFVPGRNILFLTLAAIYAYQVQAEAVITGVCETDFSGYPDCRDEFVKALNKAIVLGMARDVRFETPLMWLNKAETWALADHYQKLDLVRQETLTCYNGIQGDGCGECAACHLRSHGLNDYLANRAAVSASLKEKAGL

SEQ ID NO: 40218 - protein, 207 aa, Obesumbacterium proteus
  misc_feature (1)..(207): tr|A0A1B7KDZ0|A0A1B7KDZ0_9GAMM 7-cyano-7-deazaguanine s ynthase OS=Obesumbacterium proteus ATCC 12841 OX=135426 8 GN=queC PE=3 SV=1
MERYDEVHCITFDYGQRHRAEIDVARDLAIKLGASAHKVLDVGLLNELAISSLTRDNIPVPTESEDGIPNTFVPGRNILFLTLAAIYAYQVQAEAVITGVCETDFSGYPDCRDEFVKALNKAIVLGMARDVRFETPLMWLNKAETWALADHYQKLDLVRQETLTCYNGIQGDGCGECAACHLRSHGLNDYLANRAAVSASLKEKAGL

SEQ ID NO: 40219 - protein, 237 aa, Oblitimonas alkaliphila
  misc_feature (1)..(237): tr|A0A0K1XG39|A0A0K1XG39_9GAMM 7-cyano-7-deazaguanine s ynthase OS=Oblitimonas alkaliphila OX=1697053 GN=queC P E=3 SV=1
MHSATPPSNPANAQSNTARALVIFSGGQDSTTCLIQAINDYGAAQVEAITFTYGQRHAIELECASKILQHFNIKQTLLDLSLLQQVTTNALMDSSAPIEDYDDAPPNTLVEGRNALFLLYAAIYAKSQGIQQLIIGVSEADSSGYPDCRQAFIQSMENTLQLAMDFPFKIHAPLMQLTKAQTWALADQLQHLEFVRDYSHTCYEGVKGGCHQCPSCLLREKGLAEYLAQRSASTAKE

SEQ ID NO: 40220 - protein, 232 aa, Oceanibaculum indicum
  misc_feature (1)..(232): tr|K2IZT1|K2IZT1_9PROT 7-cyano-7-deazaguanine synthase OS=Oceanibaculum indicum P24 OX=1207063 GN=queC PE=3 SV =1
MKDNAALVLFSGGQDSTACLAWALDRFERVATVGFDYGQRHRVELECRQTVRDAIAATFPTWATKLGEDHLLPLDVLKGISDTALTGEGEIAFQENGLPNTFVPGRNLLFFTFAAAIAYRRGMKHLVGGMCETDYSGYPDCRDDTLKALQVALTLGMDTRLVIHTPLMWIDKAETWRLTERLGGAPLVEITRDLTHSCYLGDRTKVHDWGHGCGSCPACELRAEGWRRYRAG

SEQ ID NO: 40221 - protein, 232 aa, Oceanibaculum indicum
  misc_feature (1)..(232): tr|A0A420WI14|A0A420WI14_9PROT 7-cyano-7-deazaguanine s ynthase OS=Oceanibaculum indicum OX=526216 GN=queC PE=3 SV=1
MKDNAALVLFSGGQDSTACLAWALDRFERVETVGFDYGQRHRVELECRQTVRDAIAATFPTWATKLGEDHLLPLDVLKGISDTALTGEGEIAFQENGLPNTFVPGRNLLFFTFAAAIAYRRGMKHLVGGMCETDYSGYPDCRDDTLKALQVALTLGMDTRLVIHTPLMWIDKAETWRLTERLGGAPLVEITRDLTHSCYLGDRTKVHDWGHGCGSCPACALRAEGWRRYRAG

SEQ ID NO: 40222 - protein, 240 aa, Oceanicaulis sp.
  misc_feature (1)..(240): tr|A0A2T4ZRL2|A0A2T4ZRL2_9RHOB 7-cyano-7-deazaguanine s ynthase OS=Oceanicaulis sp. PT13A OX=2135616 GN=queC PE =3 SV=1
MDTRSSSNAALVLFSGGQDSATCLAWALSRYERVETIGFDYGQRHDVELSARQSVRAEMLRAFPEWSDRLGEDRLVDLSGYGALAESALTADMEIVMTEAGLPSTFVPGRNLVFLTVAAALAYRRGVDVLVGGMCQTDYSGYPDCREDTIQTQAKALGLGLDRPTRVEAPLMHLDKAQTWALAHELGGDAFVDLIVEHSHTCYRGERGQRHDWGYGCGDCPACALRKTGWSRWREGAASL

SEQ ID NO: 40223 - protein, 612 aa, Oceanicaulis sp.
  misc_feature (1)..(612): tr|A0A2E5A9A8|A0A2E5A9A8_9RHOB 7-cyano-7-deazaguanine s ynthase (Fragment) OS=Oceanicaulis sp. OX=1924941 GN=CM H92_00810 PE=3 SV=1
MKRYLIECGASQPSAADAIAMDVQGAAKNVNLRIDYISRTMLGNVPDLLIDLLEVAAYVYCADQRLVRGSDKLRNFGESWRRSLRFSIPVRQLEAWQDPDVQEILADTLGFLSDDSYEFDFRIAEAPVQPRELYFPELLDASAEHDEVALFSGGVDSFAGAVNDIVTLGKSVTLVGHYSSTKVRAVQENLIQGLKQRGLDRRVSYIPVWVSNENERAREFTQRTRSFLFACLGLVVARMSGKDKFSFYENGVVSINPPLAGDVVGGRATRTTHPKVLRGLEALFSLLLDRQIEIQTPLQWLTKKEVTQKIKEAGVADMLGETVSCTRPRKWTEKQKHCGVCSQCIDRRFAVLAAGMGDHEPAENYMRDLLLADRSADDDLRMALSYVSFFQRVAATPKERFLVDFPEVVSALDRFPGLSTQDAGDHVYDLFQRHAKSVEEVITTAVSEHIGPLYRSELPSGSLLATCFSRGHIEAPPPSDYDVQAKAFMDRLGAPVLEFAFDQDAKRVLFQGSHYLEGANFRVVEALIENFREAKRQRADVPFLPATDLADRLGVSDQSMRQQLGRLRKAIEPLTVTLGIPLDQDSFVQTKERAGYRLNPEWREVSVGDIRV

SEQ ID NO: 40224 - protein, 233 aa, Oceanimonas baumannii
  misc_feature (1)..(233): tr|A0A235CLH4|A0A235CLH4_9GAMM 7-cyano-7-deazaguanine s ynthase OS=Oceanimonas baumannii OX=129578 GN=queC PE=3 SV=1
MKALLICSGGFDSVTLAWRLAAEQSLGALLTFDYGQRHKKEIEAARLCAERLGVPHLVMDIAHIGRQLSGSALTDDIDVPHGHYSEENMKVTVVPNRNAIMLTIAFGVAAARGLDTVALAVHGGDHFIYPDCRPDFIRLFGEMQARALDGVAEVALLAPYVDTDKTEIARDAARYRVPVAETWSCYEGGEVHCGRCGTCVERIEAMVLAGVADPTPYKDEQYWRDAVARVKGA

SEQ ID NO: 40225 - protein, 231 aa, Oceanimonas doudoroffii
  misc_feature (1)..(231): tr|A0A233RF51|A0A233RF51_9GAMM 7-cyano-7-deazaguanine s ynthase OS=Oceanimonas doudoroffii OX=84158 GN=queC PE= 3 SV=1
MKALLICSGGFDSVTLAYRLAANNALGALLTFDYGQRHKKEIDAAHLCAERLNVPHLVMDIGHIGRQLSGSALTDDIDVPHGHYSEENMKVTVVPNRNAIMLTIAFGVAAARGLDTVALAVHGGDHFIYPDCRPDFIRLFGEMQARALDGVAEVALLAPYVDADKTEIARDAARFQVPVADTWSCYEGGDIHCGRCGTCVERIEAMALAGVTDTTSYKDEAYWRDAVARVK

SEQ ID NO: 40226 - protein, 231 aa, Oceanimonas sp.
  misc_feature (1)..(231): tr|H2FX33|H2FX33_OCESG 7-cyano-7-deazaguanine synthase OS=Oceanimonas sp. (strain GK1) OX=511062 GN=queC PE=3 SV=1
MKALLICSGGFDSVTLAYRLAADHALGALLTFDYGQRHKKEIDAARRCAERLGVPHLVMDIGHIGRQLSGSALTDDIDVPHGHYSEENMKVTVVPNRNAIMLTIAFGVAAARGLDTVALAVHGGDHFIYPDCRPDFIRLFGDMQAQALDGVAEVALLAPYVNTDKTEIARDAARFGVPVADTWSCYEGGEVHCGRCGTCVERIEAMALAGLADPTPYQDTQFWREAVARAK

SEQ ID NO: 40227 - protein, 235 aa, Oceanisphaera arctica
  misc_feature (1)..(235): tr|A0A2P5TQX9|A0A2P5TQX9_9GAMM 7-cyano-7-deazaguanine s ynthase OS=Oceanisphaera arctica OX=641510 GN=queC PE=3 SV=1
MKALLICSGGFDSVTLAYRLAAEQSLGALLTFDYGQRHKKEIDAARLCAERLGIPHLVMDIGHIGRQLSGSALTDDIDVPHGHYSEENMKLTVVPNRNAIMLTIAFGVAAARDLDTVALAVHGGDHFIYPDCRPDFIRLFGEMQARALDGVAEVALYAPYVDADKTEIARDAARFAVPVAETWSCYEGGELHCGRCGTCVERIEAMTLAGVVDPTSYRDEQYWREAVARVNKCTP

SEQ ID NO: 40228 - protein, 237 aa, Oceanisphaera avium
  misc_feature (1)..(237): tr|A0A1Y0CUU2|A0A1Y0CUU2_9GAMM 7-cyano-7-deazaguanine s ynthase OS=Oceanisphaera avium OX=1903694 GN=queC PE=3 SV=1
MNALLICSGGFDSVTLAYRLAKEHSLGALLTFDYGQRHKKEIDAARLCAEQLKVPHWVLDIGNIGQQLSGSALTDDIEVPHGYYTEQNMQLTVVPNRNAIMLTIAFGVAASRGFNTVALAVHGGDHFIYPDCRPDFIRLFGEMQSQALDGVAEVGLYAPYVHGDKTDIAKDAAQFGVPIANTWSCYEGGELHCGRCGTCVERIEAISLAGIMDPTPYQDNQFWKAASMSRVSQEQGT

SEQ ID NO: 40229 - protein, 242 aa, Oceanisphaera profunda
  misc_feature (1)..(242): tr|A0A1Y0D1Q8|A0A1Y0D1Q8_9GAMM 7-cyano-7-deazaguanine s ynthase OS=Oceanisphaera profunda OX=1416627 GN=queC PE =3 SV=1
MNALLICSGGFDSVTLAYRLASEGALSALLTFDYGQRHKKEIDAARLCAQQLKVPHLVLDIGHIGRQLSSALTDDIDVPHGHYSEENMKLTVVPNRNAIMLTIAFGVAASRGLDTVALAVHGGDHFIYPDCRPDFIRLFADMQAQALDGVAEVGLFAPYVHTDKIEIARDAARFNVPIAETWSCYEGGELHCGRCGTCVERIEAMTLAGIVDPTPYLDTQFWQTAVANSALANDKANAKADD

SEQ ID NO: 40230 - protein, 235 aa, Oceanisphaera psychrotolerans
  misc_feature (1)..(235): tr|A0A1J4QCR7|A0A1J4QCR7_9GAMM 7-cyano-7-deazaguanine s ynthase OS=Oceanisphaera psychrotolerans OX=1414654 GN= queC PE=3 SV=1
MKALLICSGGFDSVTLAHRLAAEQSLGALLTFDYGQRHKKEIDAARHCAERLKVPHLVMDIGHIGRQLSGSALTDDIEVPHGHYSEENMKVTVVPNRNAIMLTIAFGVAAARGLDTVALAVHGGDHFIYPDCRPDFIRLFGEMQARALDGVAEVALFAPYVDADKTEIARDAARFEVPVAETWSCYEGGEVHCGRCGTCVERIEAMALAGVEDPTPYLDKEYWLEAVARVKKCTP

SEQ ID NO: 40231 - protein, 219 aa, Oceanobacillus arenosus
  misc_feature (1)..(219): tr|A0A3D8Q3P3|A0A3D8Q3P3_9BACI 7-cyano-7-deazaguanine s ynthase OS=Oceanobacillus arenosus OX=1229153 GN=queC P E=3 SV=1
MKDDKAIVVFSGGQDSTTCLFWALKTFKEVEVVTFDYNQRHAAEIDCAKEIANDLGVKQHILDMGLINQLAPNALTRDTIEVEDGKDGELPNTFVPGRNLVFLTFAGILGYQIGAKHIITGVCETDFSGYPDCRDDFVKSLNVTLNLSMDHKFVIHTPLMWLNKAETWKMADDLDALEYVRTKTLTCYNGIKGDGCGTCPSCKLRLNGYEEYLKMKRTV

SEQ ID NO: 40232 - protein, 219 aa, Oceanobacillus bengalensis
  misc_feature (1)..(219): tr|A0A494YS93|A0A494YS93_9BACI 7-cyano-7-deazaguanine s ynthase OS=Oceanobacillus bengalensis OX=1435466 GN=que C PE=3 SV=1
MKKDKAIVVFSGGQDSTTCLFWAMQKFKEVETVTFDYGQKHKLEIECAKEIAEDLGVKHHILDMSLLNQLAPNALTRESIEVDEGDEGELPNTFVPGRNLLFLSFAGVLAKQVGAKHLVTGVSETDFSGYPDCRDTFIKSLNVTLNLSMDEVFVIHTPLMYLDKKGVWGLSDELGVLDIIREKTLTCYNGIKADGCGECPACKLRNHGLEQYLLNKGEK

SEQ ID NO: 40233 - protein, 97 aa, Oceanobacillus caeni
  misc_feature (1)..(97): tr|A0A0N0M7K5|A0A0N0M7K5_9BACI 7-cyano-7-deazaguanine s ynthase (Fragment) OS=Oceanobacillus caeni OX=405946 GN =AFL42_12820 PE=3 SV=1
SETDFSGYPDCRDSFIKSLNVTLNLAMDEGFVIHTPLMWLDKKEVWRLSDDLGVMDLIREKTLTCYNGIKADGCGKCPACKLRNHGLEQYLLTKGEK

SEQ ID NO: 40234 - protein, 121 aa, Oceanobacillus caeni
  misc_feature (1)..(121): tr|A0A0N1MXR1|A0A0N1MXR1_9BACI 7-cyano-7-deazaguanine s ynthase (Fragment) OS=Oceanobacillus caeni OX=405946 GN =AFL42_17970 PE=3 SV=1
MEKDNAIVVFSGGQDSTTCLFWAKEQFKEVETVTFDYGQRHQLEIECAKEIAEDLGVKHHILDMSLLHQLAPNALTRDDMEIADGDGTRLPNTFVPGRNLLFLSFAGVLAKQVGARHLVTG

SEQ ID NO: 40235 - protein, 219 aa, Oceanobacillus chungangensis
  misc_feature (1)..(219): tr|A0A3D8PN74|A0A3D8PN74_9BACI 7-cyano-7-deazaguanine s ynthase OS=Oceanobacillus chungangensis OX=1229152 GN=q ueC PE=3 SV=1
MNDEKAIVVFSGGQDSTTCLFWALKTFKEVEVVTFDYNQRHAAEINCAKEIADELGVKQHILDMGLLNQLAPNALTRETIEVEDGEDGELPNTFVPGRNLVFLTFAGILGYQLGARHIITGVCETDFSGYPDCRDEFVKSLNVTLNLSMDHKFVIHTPLMWLNKAETWKMADDLNALEYVRTKTLTCYNGIKGDGCGTCPSCKLRLNGYKEFLKMNHMA

SEQ ID NO: 40236 - protein, 216 aa, Oceanobacillus halophilus
  misc_feature (1)..(216): tr|A0A495A228|A0A495A228_9BACI 7-cyano-7-deazaguanine s ynthase OS=Oceanobacillus halophilus OX=930130 GN=queC PE=3 SV=1
MKNEKAMVVFSGGQDSTTCLFWALERFAEVEAVTFDYNQRHDAEIECAKEIANDFAIKHHILNMDLLNQLAPNALTRDNMEVKAGENGELPSTFVPGRNLLFFSFAGILANQVDAKHMITGVCETDFSGYPDCRDDFVKSLNVTLNLAMDENLVIHTPLMWLNKAETWKLADDMGKLDYIRSKTLTCYNGIKGDGCGTCPACKLRLQGYEKYIKMK

SEQ ID NO: 40237 - protein, 221 aa, Oceanobacillus iheyensis
  misc_feature (1)..(221): sp|Q8ETE9|QUEC_OCEIH 7-cyano-7-deazaguanine synthase OS =Oceanobacillus iheyensis (strain DSM 14371 / CIP 10761 8 / JCM 11309 / KCTC 3954 / HTE831) OX=221109 GN=queC P E=3 SV=1
MTGKKAVVILSGGLDSTTCMGVGKEAGYELYPISFHYGQRHDREIENAKKVASYFNVTEHKVFSLEFLKEIGGSSLTDQSMEVSQEGVGEDVPNTYVPGRNTIFLSIAASYAEAIGAEKIYVGVSAVDYSGYPDCRPEFIEAMQQTIYQGTNANPAMTIEAPLIDLSKGDTVKLGMKLNVPYHLTTSCYLGGEEACGECDSCRLRLQGFEEAGATDPIKYM

SEQ ID NO: 40238 - protein, 222 aa, Oceanobacillus oncorhynchi
  misc_feature (1)..(222): tr|A0A0A1MVF6|A0A0A1MVF6_9BACI 7-cyano-7-deazaguanine s ynthase OS=Oceanobacillus oncorhynchi OX=545501 GN=queC PE=3 SV=1
MEKNNRAVVVFSGGQDSTTCLFWALEKFEHVELVTFNYNQRHSLEIEVAKEIAGDQGLSHHILDMSLLNQLAPNALTREDIEVENAEDGGIPNTFVPGRNLLFLSFATILAKQIDAKHIITGVCETDFSGYPDCRDIFTKSLNVTLNLSMDEDFVIHTPLMWLDKAETWELADELQAFDYVRERTLTCYNGVRGAGCGECPACQLRQRGLDQYLVRRQEMNQ

SEQ ID NO: 40239 - protein, 219 aa, Oceanobacillus profundus
  misc_feature (1)..(219): tr|A0A417YLN7|A0A417YLN7_9BACI 7-cyano-7-deazaguanine s ynthase OS=Oceanobacillus profundus OX=372463 GN=queC P E=3 SV=1
MKKDKAIVVFSGGQDSTTCLFWAMEQFREVETVTFDYGQRHKLEIECAKEIAEDVGVKHHILDMSLLHQLAPNALTRNDIEVADGDETELPNTFVPGRNLLFLSFAGVLAKQVGAKHLVTGVSETDFSGYPDCRDSFIKSLNVTLNLAIDEPFVIHTPLMWLDKEEVWGLSDELGVLNVIREKTLTCYNGVKADGCGACPACKLRNNGLEQYLLKKGEK

SEQ ID NO: 40240 - protein, 224 aa, Oceanobacillus sojae
  misc_feature (1)..(224): tr|A0A511ZJB9|A0A511ZJB9_9BACI 7-cyano-7-deazaguanine s ynthase OS=Oceanobacillus sojae OX=582851 GN=queC PE=3 SV=1
MGKNNKRAVVVFSGGQDSTTCLFWALEKFEHVELVTFDYNQRHSLEIEVAREIAEEQGLRHHILDMSLLNQLAPNALTRADIEVENAEEEGKLPNTFVPGRNLLFLSFAAILAKQINAKHIITGVCETDFSGYPDCRDIFTKSLNVTLNLSMDEDFVIHTPLMWLDKAETWEMADGLQVFDYIRERTLTCYNGIRGAGCGECPACQLRQRGLDQYLARRQEVNQ

SEQ ID NO: 40241 - protein, 219 aa, Oceanobacillus sp.
  misc_feature (1)..(219): tr|A0A345PET8|A0A345PET8_9BACI 7-cyano-7-deazaguanine s ynthase OS=Oceanobacillus sp. 160 OX=2052660 GN=queC PE =3 SV=1
MKKDKAIVVFSGGQDSTTCLFWAKKQFKEVETVTFDYGQRHKLEIECAKEIAEDLGVKHHILDMSLLHQLAPNALTRDDIEVAEGEGTELPNTFVPGRNLLFLSFAGVLARRVGAKHLVTGVSETDFSGYPDCRDSFIKSLNVTLNLAIDEEFVIHTPLMWLDKKEVWELSDDLGVLDLIREKTLTCYNGIKADGCGECPACKLRNNGLEQYLLKKGVE

SEQ ID NO: 40242 - protein, 219 aa, Oceanobacillus sp.
  misc_feature (1)..(219): tr|A0A498D1I6|A0A498D1I6_9BACI 7-cyano-7-deazaguanine s ynthase OS=Oceanobacillus sp. YLB-02 OX=2448030 GN=queC PE=3 SV=1
MKNEKAIVVFSGGQDSTTCLFWAKQQFKEVEAVTFDYGQKHKLEIECAKEIAEELGVKHHILDMSLLHQLAPNALTRDDIEVAQGDESELPNTFVPGRNLLFLSFAGVLARQVGAKHLVTGVSETDFSGYPDCRDSFIKSLNVTLNLAMDETLVIHTPLMWLDKKEVWGLSDELGIMDVIRKKTLTCYNGIKADGCGECPACKLRNNGLEQYLQSIGEK

SEQ ID NO: 40243 - protein, 220 aa, Oceanobacter sp.
  misc_feature (1)..(220): tr|A0A2G2JN09|A0A2G2JN09_9GAMM 7-cyano-7-deazaguanine s ynthase OS=Oceanobacter sp. OX=2030817 GN=queC PE=3 SV= 1
MGEKAVVIYSGGMDSFTILQRAYKEGYELYALTFDYGQKHKKEIRYASAVCDELGIPHRVIDITAINQLLQSSSLTSDMEIPEGHYEAANMKSTVVPNRNMILLSLAIGYAVDIGASKVFYGAHSGDHAIYPDCRPDFVHAMNKVAKLANYEPVDIVTPYLNSAKTEILADGLSMGLDYGKTWTCYNGRDKACGKCGSCVERLEAFAANNAVDSLEYEQA

SEQ ID NO: 40244 - protein, 235 aa, Oceanococcus atlanticus
  misc_feature (1)..(235): tr|A0A1Y1SCA3|A0A1Y1SCA3_9GAMM 7-cyano-7-deazaguanine s ynthase OS=Oceanococcus atlanticus OX=1317117 GN=queC P E=3 SV=1
MNQDIEHAPRDAVILLSGGLDSATVLAMAQAQGFRCHALSISYGQRHVAELEAARALAEQAGCLSYRRIEMDMRLIGGSALTDPAIEVPTTPSDDIPITYVPARNTVFLSLAMGLAEVLGAQDLFIGVNAVDYSGYPDCRPAFLEQFQKLSQLATKAGVESGQGLRIHAPLLHMSKGEIIRQGIALGVDYAATVSCYQADDQGRACGVCDSCRLRQEGFVQAGVNDPTRYISAST

SEQ ID NO: 40245 - protein, 235 aa, Oceanococcus sp.
  misc_feature (1)..(235): tr|A0A520SLU9|A0A520SLU9_9GAMM 7-cyano-7-deazaguanine s ynthase OS=Oceanococcus sp. OX=1958892 GN=queC PE=3 SV= 1
MNQDIEHAPRDAVILLSGGLDSATVLAMAQAQGFRCHALSISYGQRHVAELEAARALAEQAGCLSYRRIEMDMRLIGGSALTDPAIEVPTTPSDDIPITYVPARNTVFLSLAMGLAEVLGAQDLFIGVNAVDYSGYPDCRPAFLEQFQKLSQLATKAGVESGQGLRIHAPLLHMSKGKIIRQGIALGVDYAATVSCYQADDQGRACGVCDSCRLRQEGFVQAGVNDPTRYISAST

SEQ ID NO: 40246 - protein, 220 aa, Oceanospirillaceae bacterium
  misc_feature (1)..(220): tr|A0A2E0A0N8|A0A2E0A0N8_9GAMM 7-cyano-7-deazaguanine s ynthase OS=Oceanospirillaceae bacterium OX=1899355 GN=q ueC PE=3 SV=1
MAEKAVVIYSGGMDSFTILNRAIKEGFEVYALTFDYGQKHKKEIRYAESVCQELGISHRIIDITAINQLLQSSSLTSDKAIPEGHYEAANMKSTVVPNRNMILLSLAIGYAVDIGSNKVYYGAHSGDHAIYPDCRPDFVHAMNRVAKLANYEPVDIVTPYLNGDKIEILADGLKMGLDYGKTWTCYNGREKACGKCGSCVERLEAFEKNHATDPLEYETV

SEQ ID NO: 40247 - protein, 231 aa, Oceanospirillaceae bacterium
  misc_feature (1)..(231): tr|A0A2E2KKK3|A0A2E2KKK3_9GAMM 7-cyano-7-deazaguanine s ynthase OS=Oceanospirillaceae bacterium OX=1899355 GN=q ueC PE=3 SV=1
MVIHMNTPASPKAVVLLSGGLDSATALAMASDRGYDCYVLSFDYGQRSLTELNAAKEIAKQQGAVEHRVIRLHLEDFGGSALTDHSIDVPEEETEDIPVTYVPARNTVFLSLALGWAEVLEADAIFIGVNAVDYSGYPDCRPEYITAFETMANLATKRGVSGDPITIETPLIDLTKEEIILAGTKLNVDYGLTVSCYQADDNGKACGACDSCRLRAKGFENAGLKDPTKYQ

SEQ ID NO: 40248 - protein, 59 aa, Oceanospirillales bacterium
  misc_feature (1)..(59): tr|A0A357LV89|A0A357LV89_9GAMM 7-cyano-7-deazaguanine s ynthase (Fragment) OS=Oceanospirillales bacterium OX=19 14300 GN=DEA26_00430 PE=3 SV=1
IYPDCRPDFVHAMNRVAKLANYEPVDIVTPYLNGDKIEILADGLKMGLDYGKTWTCYNG

SEQ ID NO: 40249 - protein, 38 aa, Oceanospirillales bacterium
  misc_feature (1)..(38): tr|A0A357LVG3|A0A357LVG3_9GAMM 7-cyano-7-deazaguanine s ynthase (Fragment) OS=Oceanospirillales bacterium OX=19 14300 GN=DEA26_00435 PE=4 SV=1
WTCYNGREKACGKCGSCVERLEAFEKNHATDPLEYETV

SEQ ID NO: 40250 - protein, 226 aa, Oceanospirillum multiglobuliferum
  misc_feature (1)..(226): tr|A0A1V4T266|A0A1V4T266_9GAMM 7-cyano-7-deazaguanine s ynthase OS=Oceanospirillum multiglobuliferum OX=64969 G N=queC PE=3 SV=1
MSATNKKAVVLVSGGLDSATVLATAKAQGYECYALSFDYGQRQISELNAARAVALAHGAVDHKVVRLSLNDFGGSALTDHSIDVPETLEEGIPITYVPARNTVFLSLALGWAEVLSANEVFIGVNAVDYSGYPDCRPEFIQAFESMANLATKAGVEGHKLSIRTPLMQLTKAEIIRMGIAAGVDYSLTVSCYQADEEGKACGRCDSCRLRAKGFADAGVVDPTRYQ

SEQ ID NO: 40251 - protein, 235 aa, Oceanospirillum sp.
  misc_feature (1)..(235): tr|A0A2D5G9K0|A0A2D5G9K0_9GAMM 7-cyano-7-deazaguanine s ynthase OS=Oceanospirillum sp. OX=2021254 GN=queC PE=3 SV=1
MTDKKKAVVLVSGGLDSATVLATANDQGYDCYALSFDYGQRQISELNAARAVAEAHGAIDHKVVRLSLNDFGGSALTDDSIDVPEEETEGIPVTYVPARNTVFLSLALGWAEVLGANEIFIGVNAVDYSGYPDCRPEFIDAYEKMANLATKAGVEGQKLSIKTPLMSLTKAEIINLGTAVGVDYSLTVSCYQADDDGRACGKCDSCRLRAKGFEDAGVADPTRYQSQISKEYLSR

SEQ ID NO: 40252 - protein, 232 aa, Ochrobactrum anthropi
  misc_feature (1)..(232): sp|A6WXM7|QUEC_OCHA4 7-cyano-7-deazaguanine synthase OS =Ochrobactrum anthropi (strain ATCC 49188 / DSM 6882 / JCM 21032 / NBRC 15819 / NCTC 12168) OX=439375 GN=queC PE=3 SV=1
MKTLVVCSGGLDSVSLAYRIASEHQLTALLSFDYGQRHKKELDSAKACAERLGVPHQIIDITNIGASLTGSALTDDIDVPDGHYAEETMKITVVPNRNAIMLAIAFGVAAAQKAEAIALAVHGGDHFIYPDCRPGFIDAFQTMQNHALDGYADIKLLAPYVHASKADIVIDGAKHGAPFAATWSCYKGGEHHCGRCGTCVERREAFHLAGVEDPTLYEDADFWRSAIEKRNA

SEQ ID NO: 40253 - protein, 196 aa, Ochrobactrum anthropi
  misc_feature (1)..(196): tr|A0A011SXF7|A0A011SXF7_OCHAN 7-cyano-7-deazaguanine s ynthase OS=Ochrobactrum anthropi OX=529 GN=BG46_26450 P E=3 SV=1
MSIVTLVSGGLDSTLVAYLAKEEGIQQYPIFIDYGQRSRDREHAACRSAMAKLQLPDLEVADLSGYGRLIKSGLTDPNQRVLEDAFTPGRNLLFLLVAAAYAFQRDADAISIGLLHEETSLFPDQTSAFLQEAEAMIARSMGREIKVLAPLSSFHKQEVIELATLKGIEGTYSCHLGGETPCGACIACNEFKAEGV

SEQ ID NO: 40254 - protein, 232 aa, Ochrobactrum cytisi
  misc_feature (1)..(232): tr|A0A1J6HJ63|A0A1J6HJ63_9RHIZ 7-cyano-7-deazaguanine s ynthase OS=Ochrobactrum cytisi OX=407152 GN=queC PE=3 S V=1
MKTLVVCSGGLDSVSLAYRIATEHQLTALLSFDYGQRHKKELDSAKACAERLGVPHQIIDITNIGASLTGSALTDNIDVPDGHYAEETMKITVVPNRNAIMLAIAFGVAAAQKAEAVALAVHGGDHFIYPDCRPGFIDAFQTMQNHALDGYADIKLLAPYVHASKADIVIDGAKYGTPFAATWSCYKGGEHHCGRCGTCVERREAFHLAGIQDPTLYEDADFWRSAIEKRNA

SEQ ID NO: 40255 - protein, 232 aa, Ochrobactrum gallinifaecis
  misc_feature (1)..(232): tr|A0A502BLE7|A0A502BLE7_9RHIZ 7-cyano-7-deazaguanine s ynthase OS=Ochrobactrum gallinifaecis OX=215590 GN=queC PE=3 SV=1
MKTLVICSGGLDSVSLAHKIAAEHQLTGLISFDYGQRHKKELSFAQACARRLNVAHQIIDISPIGASLTGSALTDKIDVPDGHYAEETMKITVVPNRNAIMMTIAFGVAAAQKADAVALAVHGGDHFIYPDCRPGFINAFQTMQNHALEGYADIRLLAPYVQKSKSDIVIDGAKYKTPFEATWSCYKGGEHHCGRCGTCVERREAFHLAGITDPTRYEDADFWRSTIENRSA

SEQ ID NO: 40256 - protein, 232 aa, Ochrobactrum grignonense
  misc_feature (1)..(232): tr|A0A256FAJ0|A0A256FAJ0_9RHIZ 7-cyano-7-deazaguanine s ynthase OS=Ochrobactrum grignonense OX=94627 GN=queC PE =3 SV=1
MKTLVICSGGLDSVSLAHKIAAEHQLTGLISFDYGQRHKKELSFAEACAKRLNVPHQTIDIRPIGASLTGSALTDDIDVPDGHYAEETMKITVVPNRNAIMLAIAFGVAAAQKAEAVALAVHGGDHFIYPDCRPGFIDAFQTMQNHALEGYADIRVLAPYVHKSKSDIVSDGAKYEAPFEATWSCYKGGEHHCGRCGTCVERREAFHLAGVADPTRYEDADFWRAAIEKRNA

SEQ ID NO: 40257 - protein, 232 aa, Ochrobactrum haematophilum
  misc_feature (1)..(232): tr|A0A397L9T9|A0A397L9T9_9RHIZ 7-cyano-7-deazaguanine s ynthase OS=Ochrobactrum haematophilum OX=419474 GN=queC PE=3 SV=1
MKTLVVCSGGLDSVSLAHRIAAEHELTTLLSFDYGQRHKKELDSAKACAERLGVPHQIIDIRTIGASLTGSALTDDVDVPDGHYAEETMKITVVPNRNAIMLAIAFGVAAAQKADAVALAVHGGDHFIYPDCRPGFIDAFQTMQNHALEGYADIRLFAPYVNASKADIVTDGAKYGTPFEATWSCYKGGDRHCGRCGTCVERREAFHLAGVKDPTVYEDADFWRAAIERRNA

SEQ ID NO: 40258 - protein, 232 aa, Ochrobactrum haematophilum
  misc_feature (1)..(232): tr|A0A2P9HQW1|A0A2P9HQW1_9RHIZ 7-cyano-7-deazaguanine s ynthase OS=Ochrobactrum haematophilum OX=419474 GN=queC PE=3 SV=1
MKTLVVCSGGLDSVSLAHRIAAEHDLTALLSFNYGQRHKKELDSAKACAERLSVPHQILDIRTIGASLTGSALTDNVDVPDGHYAEETMKITVVPNRNAIMLAIAFGVAAAQKAEAVALAVHGGDHFIYPDCRPNFINAFQTMQNHALEGYADIKLLAPYVNASKADIVTDGARHDTPFEATWSCYKGGENHCGRCGTCVERREAFHLAGVKDPTVYEDADFWREAVARRNT

SEQ ID NO: 40259 - protein, 232 aa, Ochrobactrum intermedium
  misc_feature (1)..(232): tr|U4VFG2|U4VFG2_9RHIZ 7-cyano-7-deazaguanine synthase OS=Ochrobactrum intermedium 229E OX=1337887 GN=queC PE= 3 SV=1
MKTLVVCSGGLDSVSLAYRIAGEHQLTALLSFDYGQRHRKELDSAKACAERLGAPHQIIDIRTIGASLTGSALTDDVDVPDGHYAEETMKITVVPNRNAIMLAIAFGVAAAQKADAVALAVHGGDHFIYPDCRPGFIDAFQTMQNHALDGYADIKLLAPYVHVSKADIVIDGAKYGTPFAATWSCYKGGEHHCGRCGTCVERREAFHLAGIEDPTLYEDADFWRAAIEKRSV

SEQ ID NO: 40260 - protein, 232 aa, Ochrobactrum intermedium; identical to SEQ ID NO: 40259
  misc_feature (1)..(232): tr|C4WJA1|C4WJA1_9RHIZ 7-cyano-7-deazaguanine synthase OS=Ochrobactrum intermedium LMG 3301 OX=641118 GN=queC PE=3 SV=1

SEQ ID NO: 40261 - protein, 198 aa, Ochrobactrum lupini
  misc_feature (1)..(198): tr|A0A256GWU3|A0A256GWU3_9RHIZ 7-cyano-7-deazaguanine s ynthase OS=Ochrobactrum lupini OX=255457 GN=CES86_0862 PE=3 SV=1
MRKALLLSGGMDSTCLAYWRRPDLAITIDYGHKAAKGEIRAATAICRHLGIEHLIIRCDLSALGSGDMAGKPADPNAPASEWWPYRNQMLATLAAMECIKHGINVLELGALRTDGFHVDGRREFVEALSALLSMQEGGLRLEAPAAAYSAEELVKASGTPIEILAWSHSCHTNEYSCGYCRGCQKHYVTMEAIGVGPY

SEQ ID NO: 40262 - protein, 232 aa, Ochrobactrum lupini
  misc_feature (1)..(232): tr|A0A256GRP2|A0A256GRP2_9RHIZ 7-cyano-7-deazaguanine s ynthase OS=Ochrobactrum lupini OX=255457 GN=queC PE=3 S V=1
MKTLVVCSGGLDSVSLAYRIASEHQLTALLSFDYGQRHKKELDSAKACAERLGIPHQIIDITNIGASLTGSALTDNIDVPDGHYAEETMKITVVPNRNAIMLAIAFGVAVAQKAEAIALAVHGGDHFIYPDCRPGFIDAFQTMQNHALDGYADIKLLAPYVHASKADIVIDGAKYGAPFAATWSCYKGGEHHCGRCGTCVERREAFHLAGIQDPTLYEDADFWRSAIEKRNA

SEQ ID NO: 40263 - protein, 232 aa, Ochrobactrum oryzae
  misc_feature (1)..(232): tr|A0A2S7J1D8|A0A2S7J1D8_9RHIZ 7-cyano-7-deazaguanine s ynthase OS=Ochrobactrum oryzae OX=335286 GN=queC PE=3 S V=1
MKTLVVCSGGLDSVSLAYRIAAEHQLTALLSFDYGQRHRKELDSARACAERLGAPHQIIDIRSIGASLIGSALTDDVDVPDGHYAEETMKMTVVPNRNAIMLAIAFGVAAAQKAEAVALAVHGGDHFIYPDCRPGFIDAFQTMQNHALDGYANIKLLAPYVRASKADIVIDGAKYGTPFTATWSCYKGGEHHCGRCGTCVERREAFHLAGIEDPTLYEDPDFWCDAVARRNA

SEQ ID NO: 40264 - protein, 232 aa, Ochrobactrum pecoris
  misc_feature (1)..(232): tr|A0A5C5CND7|A0A5C5CND7_9RHIZ 7-cyano-7-deazaguanine s ynthase OS=Ochrobactrum pecoris OX=867683 GN=queC PE=3 SV=1
MKTLVVCSGGLDSVSLAYRIASEYQLAALLSFDYGQRHKKELDSAKACAERLGVRHQIIDITNIGASLTGSALTDDVDVPDGHYAEETMKITVVPNRNAIMLAIAFGVAAAQTADAVALAVHGGDHFIYPDCRPGFIDAFQIMQNHALDGYADIKLLAPYVHASKADIVIDGARYGTPFAATWSCYKGGEYHCGRCGTCVERREAFHHAGIEDPTLYEDADFWRDAVARRNT

SEQ ID NO: 40265 - protein, 232 aa, Ochrobactrum pseudogrignonense
  misc_feature (1)..(232): tr|A0A256GNY7|A0A256GNY7_9RHIZ 7-cyano-7-deazaguanine s ynthase OS=Ochrobactrum pseudogrignonense OX=419475 GN= queC PE=3 SV=1
MKTLVICSGGLDSVSLAHKIAAEQQLTGLISFDYGQRHKKELSFAEACAKRLNVPHQIIDIRPIGASLTGSALTDDVDVPDGHYAEETMKITVVPNRNAIMLAIAFGVATAQKADAVALAVHGGDHFIYPDCRPGFIDAFQTMQNHALEGYADIQVLAPYVHKSKSDIVSDGVKYKAPFEATWSCYKGGEHHCGRCGTCVERREAFHLAGVTDPTRYEDADFWRAAIEKRSA

SEQ ID NO: 40266 - protein, 232 aa, Ochrobactrum pseudogrignonense
  misc_feature (1)..(232): tr|A0A1A9FRV6|A0A1A9FRV6_9RHIZ 7-cyano-7-deazaguanine s ynthase OS=Ochrobactrum pseudogrignonense OX=419475 GN= queC PE=3 SV=1
MKTLVICSGGLDSVSLAHKIAAEQQLTGLISFDYGQRHKKELSFAEACAKQLNVPHQIIDIRPIGASLTGSALTDDVDVPDGHYAEETMKITVVPNRNAIMLAIAFGVAAAQKADAVALAVHGGDHFIYPDCRPGFIDAFQTMQNHALEGYADIQVLAPYVHKSKSDIVSDGVKYKAPFEATWSCYKGGEHHCGRCGTCVERREAFHLAGVTDPTRYEDADFWRAAIEKRSA

SEQ ID NO: 40267 - protein, 232 aa, Ochrobactrum quorumnocens
  misc_feature (1)..(232): tr|A0A248UGF4|A0A248UGF4_9RHIZ 7-cyano-7-deazaguanine s ynthase OS=Ochrobactrum quorumnocens OX=271865 GN=queC PE=3 SV=1
MKTLVICSGGLDSVSLAHKIAAEHQLTGLISFDYGQRHKKELNFAEACAKRLNVPHQIIDIRPIGASLTGSALTDDIDVPDGHYAEETMKVTVVPNRNAIMLAIAFGVAAAQKADAVALAVHGGDHFIYPDCRPGFIDAFQSMQNHALEGYADIRVLAPYVHKSKSDIVLDGAKYRAPFEATWSCYKGGEHHCGRCGTCVERREAFHLACINDPTHYEDANFWRAAIEKRNG

SEQ ID NO: 40268 - protein, 232 aa, Ochrobactrum rhizosphaerae
  misc_feature (1)..(232): tr|A0A256F359|A0A256F359_9RHIZ 7-cyano-7-deazaguanine s ynthase OS=Ochrobactrum rhizosphaerae OX=571254 GN=queC PE=3 SV=1
MKTLVICSGGLDSVSLAHKIAAEHQLIGLISFDYGQRHKKELSFADACAKRLSVPHHIIDIRPIGASLTGSALTDAIDVPDGHYAEETMKITVVPNRNAIMLAIAFGVAAAQKAEAVALAVHGGDHFIYPDCRPGFIDAFQTMQNHALEGYADIRVVAPYVHKSKSDIVLDGAKYKTPFEATWSCYKGGEHHCGRCGTCVERREAFHLAGISDPTRYEDTAFWRAAIEKRSV

SEQ ID NO: 40269 - protein, 232 aa, Ochrobactrum sp.
  misc_feature (1)..(232): tr|A0A4R7WTR8|A0A4R7WTR8_9RHIZ 7-cyano-7-deazaguanine s ynthase OS=Ochrobactrum sp. LP_5_YM OX=2485134 GN=queC PE=3 SV=1
MKTLVICSGGLDSVSLAHKIAIEHQLTGLLSFDYGQRHKKELSFAEACAKRLNVPHQTIDIRPIGASLTGSALTDDIDVPDGHYAEETMRITVVPNRNAIMLAIAFGVAAAQKADAVALAVHGGDHFIYPDCRPGFIDAFQTMQNHALEGYADIRLLAPYVHKSKSDIVLDGAKYRAPFEATWSCYKGGQHHCGRCGTCVERREAFHLAGVSDPTHYEDADFWRAAIEKRNG

SEQ ID NO: 40270 - protein, 232 aa, Ochrobactrum sp.
  misc_feature (1)..(232): tr|A0A5C5CHJ1|A0A5C5CHJ1_9RHIZ 7-cyano-7-deazaguanine s ynthase OS=Ochrobactrum sp. LCB8 OX=2479765 GN=queC PE= 3 SV=1
MKTLVVCSGGLDSVSLAHRIAAEHDLTALLSFNYGQRHKKELDSAKACAERLSVPHQIIDIRTIGASLTGSALTDNVDVPDGHYAEETMKITVVPNRNAIMLAIAFGVAAAQKAEAVALAVHGGDHFIYPDCRPGFINAFQTMQNHALEGYADIKLLAPYVNASKADIVTDGARHDTPFEATWSCYKGGENHCGRCGTCVERREAFHLAGVKDPTVYEDADFWREAVARRNA

SEQ ID NO: 40271 - protein, 232 aa, Ochrobactrum thiophenivorans
  misc_feature (1)..(232): tr|A0A256G0W9|A0A256G0W9_9RHIZ 7-cyano-7-deazaguanine s ynthase OS=Ochrobactrum thiophenivorans OX=571255 GN=qu eC PE=3 SV=1
MKTLVICSGGLDSVSLAHKIAAEHKLTGLISFDYGQRHKKELDFAAACAERLNIPHQIIDIRPIGTSLSGSALTDDIDVPDGHYAEETMKITVVPNRNAIMMTIAFGVAAAQKADAVALAVHGGDHFIYPDCRPGFINAFQTMQNHALDGYADIRVLAPYVHKAKSDIVVDGAKHRTPFEATWSCYKGGEHHCGRCGTCVERREAFHLAGVTDPTRYEDADFWRAAIEKRSA

SEQ ID NO: 40272 - protein, 232 aa, Unknown
  misc_feature (1)..(232): tr|A0A2A4Z215|A0A2A4Z215_9PROT 7-cyano-7-deazaguanine s ynthase OS=OCS116 cluster bacterium OX=2030921 GN=queC PE=3 SV=1
MQTLVICSGGMDSITLAHKIADQGNLSHILTFDYGQRHVKEIDFARNCAADLDVPFTLIDMSNIGKQFTGTALTGNVDVPDGHYAEASMKVTMVPNRNVIMLSIAYGLAATHKLKRVALAVHGGDHFIYPDCRPDFIAAFAKMQKMALEGYADIDIYAPYVNASKADIATDAKALNVDHTKSWSCYKGGDLHCGRCGTCVERREAFDLAGYADPTIYADPDFWQGVVEEAAS

SEQ ID NO: 40273 - protein, 455 aa, Unknown
  misc_feature (1)..(455): tr|A0A2A4Z6D5|A0A2A4Z6D5_9PROT ATPase OS=OCS116 cluster bacterium OX=2030921 GN=COB13_05220 PE=4 SV=1
MPHNHLKPFEMSITRIYVTELGQCVPEGWDACFVGEHLKFKESALETYFFKNREDVVYDAFVLMAAVEYCDYIKQRVTRGWGRKFVLSVPVDDPLHWNDEKVRQPLISSLNILTGDFWNIKFHKRDFVPDWPSQGEFPIETNPLAVMAYSNGLDSLSVSGILSEEFGDKLVRIRLGGKAKNKKHPFVAIPYQVHPNVYKKESSGRSRGFKFAVLSASSAYLSGASRIIVPESGQGSLGPAFVPLGRIPIDYRNHPKFFSKMEQFLFALFGKELSFEIPRLWYTKGQTIAHYIKRSNDDKSWRETVSCWRGSQQTSVNREKRQCGICAACLLRRLSVHAAGLEESNDTYLWHDLSVSDFAKGAARDVDKMHDFGAHKKYAIAGMGHLRDMAEISHLGLSPSLNLHASELARIQNIEKKVIMSNQIELLSNHAQEWEAFLTSLGEKSFLVKWARRRK

SEQ ID NO: 40274 - protein, 615 aa, Octadecabacter arcticus
  misc_feature (1)..(615): tr|M9RQ48|M9RQ48_9RHOB Uncharacterized protein OS=Octad ecabacter arcticus 238 OX=391616 GN=OA238_c24870 PE=4 S V=1
MDGVVQPPEHIVTCLPPEADGRGDAQLRFEIDGKLKAVSLRIGHIRKSLVAGLPDVALDLIEVAAFVYAIDSSVSRGGLMDQQMGAKWHRRFHVSLPVRNLALWSEPKLKTAFEETLMFLSGDRFVFDFVQSETEAATPERYFDFGKESAWEPDSVLMFSGGLDSYAGALEEIIERKHKVALISHFSATKIAPIQRDLQKHMAQKLGPQMLMHFPMRVQLKRGTNAEGTHRARSFLFAALGMATAIAFGQKRVSFYENGVVSLNLPPVGNVLGTRATRTTHPQTLQRFEALFSMIFDQNLRVDNPFFWRTKTEVVQTIARLGMADQIAFTRSCADVHNQTKQYAHCGRCSQCVDRRFAMLAAGLAGHDPEEAYRLDLMASPRERVQDKEVALSYVRSAFAYEAINEDELVARFPAILNAVESLGEPPDTALRRIVDLLKRHGSSVATVMRDEMSSTRMEPAPANSLPDLYGAAQREQLFTSMPVSPEPQNELEPVFDIVIDTKRKVLRINDAIQIKGAGFNLLNTLATAFLHGAGQGLDLLDFPTLDAGKLAVGAGLQDDAAVRQSVSRTRSLLGTKFTSAGLSSEDGKNLIENIPWSGYRLRPDRVRVGYVTGN

SEQ ID NO: 40275 - protein, 224 aa, Odoribacter laneus
  misc_feature (1)..(224): tr|R5UYQ6|R5UYQ6_9BACT 7-cyano-7-deazaguanine synthase OS=Odoribacter laneus CAG:561 OX=1263089 GN=queC PE=3 S V=1
MKKAIVLLSGGLDSSTALYVAKNEGFDELYALTFEYGQKHDKEIESAKAVARAAGVKEHKFVHLLLNQWGDCSLTNPALQIDKGNVNRTDIPATYVPARNMVFLSVAASYADALEISDLFIGVSETDYSGYVDCRESFIKAMEEAVNLGTVLGAEKKRRITIHAPFLHMTKADEIRLGIKLGVDFSLTWSCYRGEERPCGTCDSCLLRARAFAEAGIEDPLLKK

SEQ ID NO: 40276 - protein, 224 aa, Odoribacter laneus
  misc_feature (1)..(224): tr|H1DFE1|H1DFE1_9BACT 7-cyano-7-deazaguanine synthase OS=Odoribacter laneus YIT 12061 OX=742817 GN=queC PE=3 SV=1
MKKAIVLLSGGLDSSTALYVAKNEGFDEVYALTFEYGQKHDKEIESAKAVARAAGVKEHKFVRLLLNQWGDCSLTNPAVQIDKGNVNRTDIPATYVPARNMVFLSVAASYADALEISDLFIGVSETDYSGYVDCRESFIKAMEEAVNLGTVLGAEKKRRITIHAPFLHMTKADEIRLGIKLGVDFSLTWSCYRGEERPCGTCDSCLLRARAFAEAGIEDPLLKK

SEQ ID NO: 40277 - protein, 222 aa, Odoribacter sp.
  misc_feature (1)..(222): tr|R5P8R7|R5P8R7_9BACT 7-cyano-7-deazaguanine synthase OS=Odoribacter sp. CAG:788 OX=1262909 GN=queC PE=3 SV=1
MKKAIVLLSGGLDSSTALYVAKKEGFDELYALTFEYGQKHDREIRSASAIAKAVGVREHKIVRLMLNAWKGSSLTDPDVVIQDGDADRTDIPDTYVPARNMVFLSVAASYADALDITDIFIGVSEMDYSGYVDCREEFIRSMEQTINLGTVLGAEKKQKITIHAPFLRMTKADEVKLGTKLGVDFSLTWSCYRGGEKPCGTCDSCLLRARAFAEAGIADPLV

SEQ ID NO: 40278 - protein, 225 aa, Odoribacter sp.; identical to SEQ ID NO: 36916
  misc_feature (1)..(225): tr|A0A373UV75|A0A373UV75_9BACT 7-cyano-7-deazaguanine s ynthase OS=Odoribacter sp. AF21-41 OX=2293111 GN=queC P E=3 SV=1

SEQ ID NO: 40279 - protein, 223 aa, Odoribacter splanchnicus
  misc_feature (1)..(223): tr|A0A3D1UEX9|A0A3D1UEX9_9BACT 7-cyano-7-deazaguanine s ynthase OS=Odoribacter splanchnicus OX=28118 GN=queC PE =3 SV=1
MKKAIVLLSGGLDSSTALYLAKSQGFDEIYAITFEYGQKHDKELKSAIAIAKAAGVKEHKIVNLLLNQWSGCALTDPDMEVEDGHIERQDIPSTYVPARNMVFLSVAASWADALDITDIFIGVSEVDYSGYVDCREEFIKAMENAINLGTVLGAEKKQRITIHAPFMHLTKAEEVKLGVSLGVDFGLTWTCYRGGEHPCGVCDSCLLRAKAFAEANEIDPLVC

SEQ ID NO: 40280 - protein, 223 aa, Odoribacter splanchnicus
  misc_feature (1)..(223): tr|A0A412WIR2|A0A412WIR2_9BACT 7-cyano-7-deazaguanine s ynthase OS=Odoribacter splanchnicus OX=28118 GN=queC PE =3 SV=1
MKKAIVLLSGGLDSSTALYLAQSQGFDEIYAITFEYGQKHDKELKSAIAIAKAAGVKEHKIVNLLLNQWSGCALTDPDMEVEDGHIERQDIPSTYVPARNMVFLSVAASWADALDITDIFIGVSEVDYSGYVDCREEFIKAMENAINLGTVLGAEKKQRITIHAPFMHLTKAEEVKLGVSLGVDFGLTWTCYRGGEHPCGVCDSCLLRAKAFAEANEIDPLVC

SEQ ID NO: 40281 - protein, 223 aa, Okeania hirsuta
  misc_feature (1)..(223): tr|A0A3N6NKW9|A0A3N6NKW9_9CYAN 7-cyano-7-deazaguanine s ynthase OS=Okeania hirsuta OX=1458930 GN=queC PE=3 SV=1
MKAVILLSGGLDSSTVLYQAKADGCQCYAISFDYQQRHRRELDSAKKIAESVGVVEHHVVSFDLRLWGGSALTDNQIDLPNDRSVEEMSQNIPITYVPARNTIFLSFALAYAEVVNASRVYIGVNALDYSGYPDCRPDYIQAMQEVFRLGTKQGREGEAIAIVSPLIDMKKTEIIQLGNNLGVPWEKTWSCYAGEEKPCGVCDSCRLRLAAFQELGLKDPLSD

SEQ ID NO: 40282 - protein, 228 aa, Oleiagrimonas soli
  misc_feature (1)..(228): tr|A0A099CVJ3|A0A099CVJ3_9GAMM 7-cyano-7-deazaguanine s ynthase OS=Oleiagrimonas soli OX=1543381 GN=queC PE=3 S V=1
MTEQTSSQPKAVVLVSGGMDSAVVVAMARAKGFEVYALSVAYGQRHDSELQAAARVCAMLGARAHKVVDVDLRSIGGSALTDDIDVPEEGGEGIPVTYVPARNTIMLSVALGWAEVLGASDIFCGVNAVDYSGYPDCRPAFIESFQQLAQVATRAGVEGSPMRIHAPLMAMGKADIVRAGLELGVDFAQTVSCYQADAEGRACGHCDACRLRAQGFAEAGVDDPTHYR

SEQ ID NO: 40283 - protein, 228 aa, Oleiagrimonas sp.
  misc_feature (1)..(228): tr|A0A328T2C2|A0A328T2C2_9GAMM 7-cyano-7-deazaguanine s ynthase OS=Oleiagrimonas sp. MCCC 1A03011 OX=1926883 GN =queC PE=3 SV=1
MTEQTSPQRNAVVLVSGGMDSAVVAAMARAQGFAVHALSVAYGQRHDSELQAAARVCAMVGASAHKVVDVDLRSIGGSALTDDIDVPEEGGDGIPVTYVPARNTIMLSVALGWAEVLNASDIFCGVNAVDYSGYPDCRPAFIESFQNLAQVATRAGVEGTPMRIHAPLMSMSKADIVRAGVELGVDFAQTVSCYQADAGGRACGHCDACRLRAQGFAEAGVEDPTHYR

SEQ ID NO: 40284 - protein, 220 aa, Oleibacter marinus
  misc_feature (1)..(220): tr|A0A1N7LHY9|A0A1N7LHY9_9GAMM 7-cyano-7-deazaguanine s ynthase OS=Oleibacter marinus OX=484498 GN=queC PE=3 SV =1
MAEKAVVIYSGGMDSFTILNRAKNEGFDLYALTFDYGQRHSKEIQFAKRVCDELEISHKIIDITAINQLLQSSSLTSDIEIPEGHYEAANMKSTVVPNRNMILLSLAIGYAVDISANKVFYGAHSGDHAIYPDCRPDFVHAMNRVAKLANYEPVDIVTPYLNSDKTEILADGLKMGLDYGKTWTCYNGRDKACGKCGSCTERLEAFAANSATDPIAYESV

SEQ ID NO: 40285 - protein, 226 aa, Oleiphilus messinensis
  misc_feature (1)..(226): tr|A0A1Y0I1V1|A0A1Y0I1V1_9GAMM 7-cyano-7-deazaguanine s ynthase OS=Oleiphilus messinensis OX=141451 GN=queC PE= 3 SV=1
MVNPETTGAQDKAVVIYSGGMDSYTLLNLALRQHHRVYALSFNYGQRHSKELHFAQKVCDELAIPHKLVDIMAINQLILGSSLTDDIEVPEGHYEETSMKSTVVPNRNMIMLSLAIGWAVSIKANVVYYGAHSGDHAIYPDCRPEFVQKMDDVARIANYEEVQIQAPFMYMSKIDILAQGLQWQLDYGKTWTCYNGREKACGKCGSCTERLEAFTHHGLKDPLAYE

SEQ ID NO: 40286 - protein, 233 aa, Oleispira antarctica
  misc_feature (1)..(233): tr|R4YPA8|R4YPA8_OLEAN 7-cyano-7-deazaguanine synthase OS=Oleispira antarctica RB-8 OX=698738 GN=queC1 PE=3 SV =1
MSDTSSDQLSTKQEKPKAVVIYSGGMDSYTILNKAKTEGYDLYALTFDYGQKHDKEIEFASNACKELEINHKIIDITAINQLLQSSSLTSDIEIPEGHYESASMKSTVVPNRNMILLSLAIGYAVDIGANKVFYGAHSGDHAIYPDCRPDFVHAMNKVAKLANYEPVDIVTPYLNSDKSEILADGLKMGLDYGKSWTCYNGREKACGKCGSCVERLEAFEINKTTDPLAYEAL

SEQ ID NO: 40287 - protein, 224 aa, Oleispira sp.
  misc_feature (1)..(224): tr|A0A2E3B8L2|A0A2E3B8L2_9GAMM 7-cyano-7-deazaguanine s ynthase OS=Oleispira sp. OX=2024846 GN=queC PE=3 SV=1
  misc_feature (119)..(119): Xaa can be any naturally occurring amino acid
MSDSTAKPKAVVIYSGGMDSFTILNKAKAEGYDLYALTFDYGQKHDKEIQFASNVCKELDIKHKIIDITAINQLLQSSSLTSDIEIPEGHYEAANMKSTVVPNRNMILLSLAIGYAVDXKASKVFYGAHSGDHAIYPDCRPDFVHAMNKVAKLANYEPVDIVTPYLNTDKADILADGIKMGLDYGKSWTCYNGREKACGKCGSCVERLEAFELNNATDPLSYEV

SEQ ID NO: 40288 - protein, 462 aa, Oleomonas sp.
  misc_feature (1)..(462): tr|A0A418WGQ2|A0A418WGQ2_9PROT ATPase OS=Oleomonas sp. K1W22B-8 OX=2320859 GN=D3874_21430 PE=4 SV=1
MIPKAFHVADAVPHRVDAIEIGEAPRDGARLATLGQTITLSIEGLKDFFFADWRPELIDLLVIAAAVEYCDLSVRRPSWGWARSFDLLVAVHEDEQWSAAPVGDALEEALAFLTGDRWRLSFTKRRNAVVKVSPRRFVFDTPDKVIMPYSDGLDSRAVAALVEEREKGGLVRVRLGSKGVDSARIPRKKRRFAVVPFEVKLDKRQRVESSSRSRGFKFAVVTGIAAQLAPVDRIVVTESGQGALGPILASSGQSYPDYRVHPAFTRRIERLFEALTNKAPSYEYPRIWNTKGETLAAATALPKPPTWHDTRSCWQDSRRVSFDGARRQCGICAACMLRRMSIHRAGIDEPSSGYIWEDLGAAEMEDGAVMGFSGMSSAFRDYAFAGILHLDHLAALSGSELHWRTVRRVARETAEALGIEMAEGERKMIELLERHRAEWLDFLVSLGSRSFVARVAMVSPWH

SEQ ID NO: 40289 - protein, 241 aa, Oleomonas sp.
  misc_feature (1)..(241): tr|A0A418WF89|A0A418WF89_9PROT 7-cyano-7-deazaguanine s ynthase OS=Oleomonas sp. K1W22B-8 OX=2320859 GN=queC PE =3 SV=1
MPAVTSGPIMADGGALVLFSGGQDSATCLAWALDRFERVETVGFDYGQRHRVELACRATLRAGLGRMRPDWAAKLGDDHTIGLSALGEVSNTALTRDVAIEMTQGGLPNTFVPGRNIVFLTFAAALAYRRGLRHIVGGMCETDFSGYPDCRDDTIKALQVALNLGMDSRFVLHTPLMWIDKAQTWALARSLGGDALVDLIVEDSHTCYLGTREMRHPWGYGCGTCPACLLRAEGFRRFKSA

SEQ ID NO: 40290 - protein, 225 aa, Oligella ureolytica
  misc_feature (1)..(225): tr|A0A378XCC8|A0A378XCC8_9BURK 7-cyano-7-deazaguanine s ynthase OS=Oligella ureolytica OX=90244 GN=queC_2 PE=3 SV=1
MSVSDQALVIFSGGQDSTTCLLQAIARFGANHVQAISFVYGQRHAIELDCAKRIAQELGVKQIIIDLSLVGQITHNALMDDQATIEESGDGTPPNTMVDGRNALFLMYAGIYAKSQGMKHIYLGVSETDFSGYPDCRDVFVKSMNVTLNLSMDYDFQIHTPLMYLTKAQTWELADDLGYLDFVREKTHTCYLGVEGGCGECPSCVLRENGLREYLRSKGARDESR

SEQ ID NO: 40291 - protein, 224 aa, Oligella ureolytica
  misc_feature (1)..(224): tr|A0A378XAE0|A0A378XAE0_9BURK 7-cyano-7-deazaguanine s ynthase OS=Oligella ureolytica OX=90244 GN=queC_1 PE=3 SV=1
MSFSDQALVIFSGGQDSTTCLLQALAQYGPNQVQTISFIYGQRHSIEMDCAQAIAQDLGVKQTVMDLSLIGQITSNALMDDQATIEETADGPPNTMVDGRNALFLMYAGIYAKSQGIKHIYLGVSETDFSGYPDCRDVFVKSMNVTLNLSMGYDFQIHTPLMNLTKAQAWALADELGYLDYVREKTHTCYLGVKGGCGECPSCVLRNDGLREYLATKEASYENC

SEQ ID NO: 40292 - protein, 224 aa, Oligella urethralis
  misc_feature (1)..(224): tr|A0A095Z3P9|A0A095Z3P9_9BURK 7-cyano-7-deazaguanine s ynthase OS=Oligella urethralis DNF00040 OX=1401065 GN=q ueC PE=3 SV=1
MLCSEQALVIFSGGQDSTTCLLQALAHYGPNQVQAISFIYGQRHAIELNCARAIAEALGVKQHILDLSLMAQVTHNALMDAKAPIKNSPDGPPNTMVDGRNALFLMYAAIYAKSQGIKHVILGVSETDFSGCPDCRDIFVKSMNVSLNLAMDYDFQIHTPLMYLTKAQTWALADELGYLDFVRQKTHTCYLGVQGGCGHCPSCELRDKGLREYLSSKEAGNESC

SEQ ID NO: 40293 - protein, 224 aa, Oligella urethralis
  misc_feature (1)..(224): tr|A0A2X1UYF6|A0A2X1UYF6_9BURK 7-cyano-7-deazaguanine s ynthase OS=Oligella urethralis OX=90245 GN=queC PE=3 SV =1
MSCSEQALVIFSGGQDSTTCLLQALAHYGPNQVQAISFIYGQRHAIELDCARAIAEELGVKQHILDLSLMAQITHNALMDAEASIKNSPDGPPNTMVDGRNALFLMYAAIYAKSQGIKHVILGVSETDFSGYPDCRDIFVKSMNVSLNLAMDYDFQIHTPLMYLTKAQTWALADELGYLDFVRQKTHTCYLGVQGGCGHCPSCELRDKGLREYLSSKEAGNESC

SEQ ID NO: 40294 - protein, 244 aa, Oligotropha carboxidovorans
  misc_feature (1)..(244): tr|F8BUY4|F8BUY4_OLICO 7-cyano-7-deazaguanine synthase OS=Oligotropha carboxidovorans (strain ATCC 49405 / DSM 1227 / KCTC 32145 / OM5) OX=504832 GN=queC PE=3 SV=1
MIDRVMNNPLDKPLDDAALVLFSGGQDSATCLAWVLSRFARVETVGFDYGQRHAIELECRSTLIERFKAIKPEWKARLGEAHTLAIPTLAEISDTALTRDIAIEMDKGGLPNTFVPGRNLLFLTLAAALGYRRGIRHIVGGMCETDYSGYPDCRDETIKSLNVAINQGMGRDFELHTPLMWRDKGETWALAHELGGDALVDLIVQHSHTCYLGERGALHDWGYGCGECPACRLRAAGWAKYKTA

SEQ ID NO: 40295 - protein, 209 aa, Olleya namhaensis
  misc_feature (1)..(209): tr|A0A1I3MRU8|A0A1I3MRU8_9FLAO 7-cyano-7-deazaguanine s ynthase OS=Olleya namhaensis OX=1144750 GN=SAMN05443431 _103275 PE=3 SV=1
MEKNKVILLLSGGIDSTTLLAKLKKENKEVIAISFFYEQKHAIELQYARNNAKKYNVIEHKVIQLDSQLFSGSALVNSEKQLSTYSNGENPIGQENAYVPYRNLVFLSMALSLAESSKINNIYIAFNKDDCVNFWDCKSAFLTQLNLISEHSNIQIQAPLIELTKKEVIMLSQKLEVDLNETISCYQPINDKECGKCLSCLVKSRGLNN

SEQ ID NO: 40296 - protein, 191 aa, Olleya sp.
  misc_feature (1)..(191): tr|A0A2K8X246|A0A2K8X246_9FLAO 7-cyano-7-deazaguanine s ynthase OS=Olleya sp. Bg11-27 OX=2058135 GN=CW732_15505 PE=3 SV=1
MFLLISVLENKCIEKHAIELEFARDNAKKYTVIEHKTIQLDSQLFSSSALVDSHKQLSAYKDGEKPEGEENAYVSYRNLVFLSMAVSLAESHKINDIYVAFNKDDCVNFWDCTSAFLSQLNTISEHSKTEVHAPLINLTKKEVVQLAKKLDVDLNRTISCYQPSNDMECGVCLSCLVKREAFVKIKAELKK

SEQ ID NO: 40297 - protein, 232 aa, Olsenella sp.
  misc_feature (1)..(232): tr|A0A1T4LRN8|A0A1T4LRN8_9ACTN 7-cyano-7-deazaguanine s ynthase OS=Olsenella sp. KH1P3 OX=1945884 GN=queC PE=3 SV=1
MRAVILSSGGVDSTTCVGIAVDKYGAQNVTTVSAWYGQKHKKELVCAQKIAQYYGVRHRVIDLEASRIFDGSNCTLLEGNGEIRHGSYARQKDEKHGGMVDTYVPFRNGLLLSSVAAAALSEYPGQEVELYLGAHADDAAGDAYPDCTKRFTDAMYEAIEAGTGGLVHVRAPFVELTKAGVVKWGLRLGVPYELTWSCYEGGDVQCGECGTCLDRKAAFAANGVEDPVPYRV

SEQ ID NO: 40298 - protein, 232 aa, Olsenella umbonata
  misc_feature (1)..(232): tr|A0A1H9P554|A0A1H9P554_9ACTN 7-cyano-7-deazaguanine s ynthase OS=Olsenella umbonata OX=604330 GN=SAMN05216446 _0828 PE=3 SV=1
MRAVILSSGGVDSTTCVGIAVDKYGAQNVTTVSAWYGQKHKKELVCAQKIAQYYGVRHRVIDLEASRIFDGSNCTLLEGNGEIRHGSYARQKDEKHGGMVDTYVPFRNGLLLSSVAAVALSEYPGQEVELYLGAHADDAAGDAYPDCTKRFTDAMYEAIEAGTGGLVHVRAPFVELTKAGVVEWGLRLGVPYELTWSCYEGGDVQCGECGTCLDRKAAFAANGVEDPVPYRV

SEQ ID NO: 40299 - protein, 226 aa, Unknown
  misc_feature (1)..(226): tr|A0A2A5WFW8|A0A2A5WFW8_9GAMM 7-cyano-7-deazaguanine s ynthase OS=OM182 bacterium MED-G28 OX=1986256 GN=queC P E=3 SV=1
MSLGLNNAVVLVSGGLDSATCLAIASAQGHDCYALSFNYGQRSTSELSAAKKVARSIGVMEHKIIELNIGELGGSALTDEEIEVPEAESEGIPVTYVPARNTLFLSYALAWAEVIGANSIFIGVNALDYSGYPDCRPEYIAAFQNLMDIATKTSVEGKHITLETPLINLSKAEIIKSGQSLSIDFGETVSCYQAMEDGSACGKCDSCRFRMKGFYDAGVEDPTRYF

SEQ ID NO: 40300 - protein, 222 aa, Unknown
  misc_feature (1)..(222): tr|A0A0R2S955|A0A0R2S955_9GAMM 7-cyano-7-deazaguanine s ynthase OS=OM182 bacterium BACL3 MAG-120507-bin80 OX=16 55577 GN=queC PE=3 SV=1
MKKAIVLVSGGLDSATCLAIAQAEGYACYALSFDYGQRSASELDAAARLSETAGVVAHKKLPIDMGAIGGSALTDRSIAVPEEETVGIPVTYVPARNTVFLSYALAWAEVVEAEAIFIGVNALDYSGYPDCRPEYIDAFQSLINLATKAGVEGKNIVLRTPLIDLTKAEIIGVGLKLGVDYAATVSCYQADAEGRACGLCDSCRLRTKGFADAQSQDPTRYR

SEQ ID NO: 40301 - protein, 221 aa, Omnitrophica bacterium
  misc_feature (1)..(221): tr|A0A1G1J3H4|A0A1G1J3H4_9BACT 7-cyano-7-deazaguanine s ynthase OS=Omnitrophica bacterium RBG_13_46_9 OX=180181 8 GN=queC PE=3 SV=1
MKKAIVLLSGGIDSATTLYVAKKKGFAPSALIFDYGQRQRKEIESAKKIAKKARCPYRIVRLPFFWKGSSLLDSKVPVPVNRSFNSIGRGIPSTYVPARNLVFLCIAASFAESTRTRAIFIGAHTQDFSGYPDCRKVFFEAFKKVLTAGTKDGSKIEVFTPLIDKNKEEIIKIGLRLNVPYRMTWSCYKGGKRPCGICDSCIIRARGFKEAGIADPYFGSS

SEQ ID NO: 40302 - protein, 226 aa, Omnitrophica bacterium
  misc_feature (1)..(226): tr|A0A1G1KU31|A0A1G1KU31_9BACT 7-cyano-7-deazaguanine s ynthase OS=Omnitrophica bacterium RIFCSPLOWO2_12_FULL_4 4_17 OX=1801832 GN=queC PE=3 SV=1
MKAAVCLLSGGLDSATTLFYTIKENFRVLALTVDYGQIHRRELESAKKITNYLKIEHEIISIELPWKGSALLDETIPIPQNRDTTEISKEIPVTYVPARNTIFLSLAASYAEVRGASAIFIGANAIDYSGYPDCRPEYFKQMETAICLGTKAGVEGARISIETPLIHLTKAEIIKLATQLGVPLEWTWSCYRGDRFPCENCDACFLRKKGFAEAGIDDPLFSSVKE

SEQ ID NO: 40303 - protein, 234 aa, Unknown
  misc_feature (1)..(234): tr|A0A1G1M2B6|A0A1G1M2B6_9BACT 7-cyano-7-deazaguanine s ynthase OS=Omnitrophica WOR_2 bacterium GWB2_45_9 OX=18 01843 GN=queC PE=3 SV=1
MSKKAVVLLSGGLDSATTLYFAKAKGFQCYCLIFDYGQRHKKEIASAKKIAQRAGCAWQIIKLSLPWKGSSLLDKKLKIPEFSNSTNSINLSNSIPLTYVPARNIIFLSFALSCAEAIKASSIFIGANAIDYSGYPDCRPEFYRAFIRAVNLGTKAGVEGRGFSIFTPLIKMTKAGIIKLGTRLKVPYELTWSCYQGGRKPCGKCDSCNFRARGFQEAGYRDPLLRGVKYDRKN

SEQ ID NO: 40304 - protein, 222 aa, Unknown
  misc_feature (1)..(222): tr|A0A1G1NU28|A0A1G1NU28_9BACT 7-cyano-7-deazaguanine s ynthase OS=Omnitrophica WOR_2 bacterium RIFCSPHIGHO2_01 _FULL_48_9 OX=1801851 GN=queC PE=3 SV=1
MNSAIILLSGGLDSATVLFLAKAKGFKTYALIFDYGQRHRKEILRAKKLAQLSGSESRVVKISLPWAGSALLDKKMRLPQNRKIIPREIPATYVPARNIIFLSLAASYAEVVGARAIFIGANAIDYSGYPDCRPAFFKAYQKVMHKGMKAGVEGKTIKIFAPLLYKTKEQIIRLGLKLKVPYELTWSCYAGGARPCGKCDSCLLREKGFEQVRKVTKSLGHQ

SEQ ID NO: 40305 - protein, 226 aa, Opitutaceae bacterium
  misc_feature (1)..(226): tr|A0A178IJX0|A0A178IJX0_9BACT 7-cyano-7-deazaguanine s ynthase OS=Opitutaceae bacterium TSB47 OX=1184151 GN=qu eC PE=3 SV=1
MKVIVLCSGGMDSVVALHWARREHEVAAAVSFDYGAKHNARELPMAAEQAALIGARHVVIPLRFMDELFESALLSSGGEIPEGHYEAENMKQTVVPFRNAIMLSVATGLAESTGAEGLVIAAHGGDHAIYPDCREDFMQAMGDAMRLGTYAGVRLLRPFIAMKKDRIAAEGARLGVDFARTWSCYKGGAVQCGRCGTCVERREAFIGAGLPDPTVYLDNGPLPAKP

SEQ ID NO: 40306 - protein, 230 aa, Opitutaceae bacterium
  misc_feature (1)..(230): tr|A0A2T6DS24|A0A2T6DS24_9BACT 7-cyano-7-deazaguanine s ynthase OS=Opitutaceae bacterium EW11 OX=2161865 GN=que C PE=3 SV=1
MKVVVLCSGGMDSVTALHWAARNHAVQAAISFDYGSKHNHRELPFAAEQASRLGVRHEVVPLRFMDQLFASALLSSGGEIPEGHYAAENMKQTVVPFRNAILLSVATGFAESIGAEGLVIAAHGGDHAIYPDCREEFMRAMGETMRLGTYAGIQLLRPFISLSKGQIAAEGARLGVDFSKTWSCYKGGVVHCGKCGTCVERREAFIEAGIPDPTVYESTPPLPRRPQGNG

SEQ ID NO: 40307 - protein, 229 aa, Opitutae bacterium
  misc_feature (1)..(229): tr|A0A2A2QNJ8|A0A2A2QNJ8_9BACT 7-cyano-7-deazaguanine s ynthase OS=Opitutae bacterium Tous-C5TDCM OX=1982322 GN =queC PE=3 SV=1
MNVVVLCSGGMDSVVALHWARREHVVVAAVSFDYGAKHNHREIPFAAEQAALAGVRHEIVALDFVNRLFASDLLKNGGEIPEGHYEAANMKQTVVPFRNAIMLAVATGLAESRGAEGLVIAAHGGDHAIYPDCREEFMRAMGDAMRLGTYAEVKLLRPFIAMTKAEIAAAGAKLGVNFGRTWSCYKGGEVHCGKCGTCVERREAFELAGISDPTVYAETGVLPGKPGVS

SEQ ID NO: 40308 - protein, 229 aa, Opitutae bacterium
  misc_feature (1)..(229): tr|A0A2G4HK83|A0A2G4HK83_9BACT 7-cyano-7-deazaguanine s ynthase OS=Opitutae bacterium OX=2026771 GN=queC PE=3 S V=1
MNVVVLCSGGMDSVVALHWARREHVVVAAVSFDYGAKHNHREIPFAAEQAALVGVRHEIVALDFVNRLFASDLLKNGGEIPEGHYEAANMKQTVVPFRNAIMLAVATGLAESRGAEGLVIAAHGGDHAIYPDCREEFMRAMGDAMRLGTYAEVKLLRPFIAMTKAEIAEVGAKLGVDFGRTWSCYKGGDVHCGKCGTCVERREAFELAGVSDPTGYAETGVLPSKPGVI

SEQ ID NO: 40309 - protein, 233 aa, Opitutales bacterium
  misc_feature (1)..(233): tr|A0A2E7VHX6|A0A2E7VHX6_9BACT 7-cyano-7-deazaguanine s ynthase OS=Opitutales bacterium OX=2026772 GN=queC PE=3 SV=1
MKSIIVYSGGMDSTVLLYQLVAAGDEVKALTIHYGQRHEKEINCARALAKGLGVEHRVVDLSSLAELLGGSALTSLEVEVPEGHYAEENMKATVVPNRNMILLAVAAGWAISSQFDRVGYAAHAGDHAVYPDCRPEFADALDAAIQLADWREVRLDRPFLDLTKAEIVKLGVDLGVPFDRTWSCYQGGELHCGRCGTCVERREAFHLAGIPDPTPYASGVPTVEEMIANDWKL

SEQ ID NO: 40310 - protein, 218 aa, Opitutales bacterium
  misc_feature (1)..(218): tr|A0A2E7PZE2|A0A2E7PZE2_9BACT 7-cyano-7-deazaguanine s ynthase OS=Opitutales bacterium OX=2026772 GN=queC PE=3 SV=1
MKAVALFSGGLDSTVLAYQLLAEGADLRLLSVHYGQRHRRELNNASRLAESMRVPHRILEFPELGSLLGGSSLTDESIDLPEGHYEEESMKATIVPNRNMILLSLAAGHALSIGFDTVAYAAHAGDHTIYPDCRPEFASAMENALGLADWQKLGLHRPFVDKTKADLVRIGHELGVPFESTWSCYAGRDLHCGRCGTCVERKEAFALAGIADPTEYEH

SEQ ID NO: 40311 - protein, 228 aa, Opitutus sp.
  misc_feature (1)..(228): tr|A0A1H1N9C2|A0A1H1N9C2_9BACT 7-cyano-7-deazaguanine s ynthase OS=Opitutus sp. GAS368 OX=1882749 GN=queC PE=3 SV=1
MKVVVLCSGGMDSVTALHWARAHHTVAAVLSFDYAAKHNHREIPFAVEHASLVGAPHQTVPLDFIGKLFTSDLLVSGGDIPEGHYEDGNMKRTVVPFRNGIMLAAACGFAESARADGLVIAAHGGDHAIYPDCREDFMCAMGEAMKSGTYAGIQLLRPFITMTKAGIAAEGARLGVDFARTWSCYKGGEVHCGRCGTCVERREAFQLAGMPDPTKYESTPPLPRGPAV

SEQ ID NO: 40312 - protein, 225 aa, Opitutus sp.
  misc_feature (1)..(225): tr|A0A2T6D893|A0A2T6D893_9BACT 7-cyano-7-deazaguanine s ynthase OS=Opitutus sp. ER46 OX=2161864 GN=queC PE=3 SV =1
MHRVKVIVLCSGGMDSVTALHAAHAAHEVVAALSFDYGSKHNHREIPFAAEHAAHLGVRHEVIRLDFVDRLFASDLLRSGGDVPEGHYAAANMKRTVVPFRNAIMLSIACGFAESVGAEGLVIAAHTGDHTIYPDCREDFMRAMGDAMRLGTYAGIQLLRPFIALDKGGIAREGARLGVDFARTWSCYKGGELHCGVCGTCVERREAFAVAGLPDPTTYAAAPAR

SEQ ID NO: 40313 - protein, 220 aa, Opitutus terrae
  misc_feature (1)..(220): tr|B1ZWM2|B1ZWM2_OPITP 7-cyano-7-deazaguanine synthase OS=Opitutus terrae (strain DSM 11246 / JCM 15787 / PB90 -1) OX=452637 GN=queC PE=3 SV=1
MDSVTALYWAAREHHVSAVVSFDYGSKHNPKELPFAAEHAARLGARHEVIHLDFVNRLFASALLQRGGAIPDGHYEAENMKQTVVPFRNAILLSIACGLAESVGAEGLVIAAHGGDHAIYPDCREEFMRAMGEAMALGTYAGIRLLRPFIAKNKAQIAAEGARLGVDFARTWSCYKGGPVHCGTCGTCVERREAFAEAGLADPTVYASQPTLPERPKEVD

SEQ ID NO: 40314 - protein, 223 aa, Orbus hercynius
  misc_feature (1)..(223): tr|A0A495RCQ8|A0A495RCQ8_9GAMM 7-cyano-7-deazaguanine s ynthase OS=Orbus hercynius OX=593135 GN=queC PE=3 SV=1
MMTQNKKALVIFSGGQDSTTCLIQAIKHYGANQVEAISFNYGQRHKVELECAVAITKHFGVGHTIIDTVTLQQTTHNALLDNTCQVSAAKDDEKYPNTFVDGRNALFLLLAGCHAKQKGIHDIILGVCETDYSGYPDCRDIFVKSMNVTMNLAMDYPFNLITPLMYLTKAQTWALADDLGYLDYVKHNTHTCYNGTINGCGHCPSCLLRQQGLSEYLQQKRNN

SEQ ID NO: 40315 - protein, 224 aa, Orenia marismortui
  misc_feature (1)..(224): tr|A0A4R8HB75|A0A4R8HB75_9FIRM 7-cyano-7-deazaguanine s ynthase OS=Orenia marismortui OX=46469 GN=queC PE=3 SV= 1
MKKAVVLLSGGLDSTTALYLAKSKGYDLYAISFNYGQRHDKELDCAKNIAEMVDVSEHIIVDTNMRAWGGSALTDSNIEVPEGKQDNNEIPVTYVPARNMLFLSYAASYAEVIGAQDIFIGVSEVDYSGYVDCRQEFLDAMENAINKGTVCGAEEGRPIKIHAPFINMTKAEEIKLGMELGVDYSLTWSCYRGEGNACGSCDSCVLRLQAFEEAGYEDPVEYQD

SEQ ID NO: 40316 - protein, 224 aa, Orenia metallireducens
  misc_feature (1)..(224): tr|A0A1C0ACI1|A0A1C0ACI1_9FIRM 7-cyano-7-deazaguanine s ynthase OS=Orenia metallireducens OX=1413210 GN=queC PE =3 SV=1
MKKAVVLLSGGLDSTTALYLAKSKGYEVYAISFDYGQRHDKELQSAKNVAEVAGVKEHIIVETNMGAWGGSALTDQSIDVPEGDEQRKEIPVTYVPARNMIFLSYAASYAEVVGAQDVFIGVSEVDYSGYVDCRQEFINAMEQAINKGTVCGAEEGKPIKIHAPFINMTKAEEIKLGIKLGVDYAQTWSCYCGEEQACGSCDSCVLRLKAFEEAGHIDPLKYQD

SEQ ID NO: 40317 - protein, 223 aa, Orenia metallireducens
  misc_feature (1)..(223): tr|A0A285GVQ7|A0A285GVQ7_9FIRM 7-cyano-7-deazaguanine s ynthase OS=Orenia metallireducens OX=1413210 GN=queC PE =3 SV=1
MKKAVVLLSGGLDSTTALYLAKSKGYEVYAISFNYGQRHDKELESAKKVAEVAGVKEHIIVETNMSAWGGSALTDQRIDVPEGDEKRKEIPVTYVPARNMIFLSYAASYAEVVGAQDVFIGVSEVDYSGYVDCRQEFIDAMEEAINKGTVCGAEEGKPIKIHAPFINMTKAEEIKLGMKLGVDYSQTWSCYRGEEQACGSCDSCVLRLKAFKEAGYDDPVIYK

SEQ ID NO: 40318 - protein, 228 aa, Oribacterium sp.
  misc_feature (1)..(228): tr|A0A1H3XMI3|A0A1H3XMI3_9FIRM 7-cyano-7-deazaguanine s ynthase OS=Oribacterium sp. KHPX15 OX=1855342 GN=queC P E=3 SV=1
MKAMVLLSGGVDSTTALGMAVDKYGKDNVIALTVSYGQKHDKEVNAATAVAKHYGVEHLFLDLKKIFEYSNCSLLKQSTEEIPEESYAKQIEETGGKVPVSTYVPFRNGLFLSSAASLALSKDCGVIYYGAHSDDAAGSAYPDCSPVFNEHMSAAIWEGSGHQLKIEAPFVNITKKDVVKIGLDLKVPYELTWSCYEGGDKPCRKCGTCIDREAAFEANGVVDPLLAE

SEQ ID NO: 40319 - protein, 227 aa, Oribacterium sp.
  misc_feature (1)..(227): tr|A0A1S9BSW2|A0A1S9BSW2_9FIRM 7-cyano-7-deazaguanine s ynthase OS=Oribacterium sp. C9 OX=1943579 GN=queC PE=3 SV=1
MQVMVLLSGGVDSTTALGIAVDKYGKENVIALSVMYGQKHDKEIGAAEAVAKHYGVEHLYLDLSKIFQYSDCSLLKQSDEAIPEISYAEQIKETKGEVPVSTYVPFRNGLFLSSAASIALSKGCSLIYYGAHADDAAGFAYPDCSDAFVNAMNEAIWEGSGHQLKIEAPFVKVNKSNIVKMGLDLKVPYELTWSCYEGGEKPCGKCGTCIDRAAAFAANGVEDPALK

SEQ ID NO: 40320 - protein, 232 aa, Oricola cellulosilytica
  misc_feature (1)..(232): tr|A0A4R0PFD9|A0A4R0PFD9_9RHIZ 7-cyano-7-deazaguanine s ynthase OS=Oricola cellulosilytica OX=1429082 GN=queC P E=3 SV=1
MKTVVVCSGGLDSVALAHRIAAENELAGLVSFDYGQRHRKELGFAALCAERLGAPHQIVDIGDIGRSLSGSALTDDVAVPDGHYAEETMRSTVVPNRNAIMLAITFGIASARGLDAVATAVHGGDHFIYPDCRPGFINAFQKMQDHALDGYSEITLLAPYVHQPKSAIVLDGARHGTPFALTWSCYKGGERHCGRCGTCVERREAFHLAGVPDETDYADPDFWRAAIDARSA

SEQ ID NO: 40321 - protein, 241 aa, Orrella dioscoreae
  misc_feature (1)..(241): tr|A0A1C3K491|A0A1C3K491_9BURK 7-cyano-7-deazaguanine s ynthase OS=Orrella dioscoreae OX=1851544 GN=queC PE=3 S V=1
MSAPSPAVLSAERRALVLFSGGQDSSTCLAWALSRYAHVETVAFDYGQRHRIELDARLEVLAGVRAQFPEWAARLGEDHLLDLGVLGQVSDTALTQDRAIEMQANGLPNTFVPGRNLLFLTLAAALGYRRGLDVLVGGMCETDFSGYPDCRDDTIKAQQVALGLGMGTRVLIETPLMWLDKAQTWALARALGGDALVDLIVERSHTCYLGERGARHGWGYGCGTCPACALRAQGWLKWRQA

SEQ ID NO: 40322 - protein, 241 aa, Oryzisolibacter propanilivorax
  misc_feature (1)..(241): tr|A0A1G9UF61|A0A1G9UF61_9BURK 7-cyano-7-deazaguanine s ynthase OS=Oryzisolibacter propanilivorax OX=1527607 GN =queC PE=3 SV=1
MTAAGAASAPGARRALVLLSGGQDSATCLAWALARYAEVETIGFDYGQRHRVELQARQVLRARLQEMPWPGRLGPDHLLPVDVLRHLGATAMTEDIAIAVQHDGLPNTFVPGRNLLFFTLAAALAYRRGLQVLVGGMSETDFSGYPDCRDNTLKALQVALSLGVDRPLVIETPLMWRDKAQAWELAHELGGDALVELIRAETHTCYIGRHDALHDWGHGCGACPACELRARGWQAWQAGPT

SEQ ID NO: 40323 - protein, 234 aa, Oryzomicrobium terrae
  misc_feature (1)..(234): tr|A0A5C1E4B3|A0A5C1E4B3_9RHOO 7-cyano-7-deazaguanine s ynthase OS=Oryzomicrobium terrae OX=1735038 GN=exsB PE= 3 SV=1
MIDSASPATPPKAVILLSGGLDSATVLAIAREQGYACYCLSVDYGQKHRAELDAAVRVAKALGAIEHRVAKIDIGQFGGSALTDPTLAVPTDGVQPGIPITYVPARNTILLALSLAWAEVLDARHVFVGVNAVDYSGYPDCRPAFVQAFENLANLATKAAVEGAKLTVHAPLIDLSKADIVRAGTRLGVDYGLTVSCYQADDAGRACGSCDACRLRREGFAAAGLADPTHYQNA

SEQ ID NO: 40324 - protein, 228 aa, Oscillatoria acuminata
  misc_feature (1)..(228): tr|K9THK0|K9THK0_9CYAN 7-cyano-7-deazaguanine synthase OS=Oscillatoria acuminata PCC 6304 OX=56110 GN=queC PE= 3 SV=1
MKAVILLSGGLDSSTVLYQAKADGCTCYAMSFDYQQRHRRELEAARAIAQSAGVAEHQIVSFDLRQWGGSALTDDKIDLPCDRSVEEMGQSIPITYVPARNTIFLSFALAYAEATDAHRVYIGVNAIDYSGYPDCRPDYIQAMQNVFRLGTKQGRESEATEIVTPLIELKKTEIIQLGNRLGVPWEKTWSCYAGGDRPCGVCDSCQLRLAAFAELGLTDPLPYLQRGS

SEQ ID NO: 40325 - protein, 224 aa, Oscillatoria nigroviridis
  misc_feature (1)..(224): tr|K9VRL6|K9VRL6_9CYAN 7-cyano-7-deazaguanine synthase OS=Oscillatoria nigro-viridis PCC 7112 OX=179408 GN=que C PE=3 SV=1
MKAVILLSGGLDSSTVLYQAKADGCECYAISFDYKQRHRRELESARAIALSAGVKAHQIVNFDLTLWGGSALTDNEMELPIDRNLAEMSQNIPITYVPARNTIFLSFALAYAETLEADRIYIGVNALDYSGYPDCRLDYIQAMQEVFRLGTKQGREGEPIKIITPLIELKKTEIIQLGNKLGVPWEQTWSCYAGGENACGVCDSCRLRLAAFEELGLKDPVPYA

SEQ ID NO: 40326 - protein, 484 aa, [Oscillatoria] sp.
  misc_feature (1)..(484): tr|D8FT54|D8FT54_9CYAN Uncharacterized protein OS=[Osci llatoria] sp. PCC 6506 OX=272129 GN=OSCI_10011 PE=4 SV= 1
MNYEPSIEQNFHDSDRRVYTLHFEPVVNSNGSVHFIDHSQGKELSVGINVDDEEFQYRVKADFPSVIADLIDLAVAIHAADRLAGQDLHREQRCLYVILPVRHPELLSAEPFRIKLEELLEWTTGSEWVFDFQKRIVPGRSVEQHSAIPTVPRGCEVALWSGGLDALAGLYTRLQMYPEKSFVLFGTGSSNTVYARQERVAKKVQSIFPGRCHLFRVPIRFHDSDVQQKNKCSRARGVVFTLLGAACAYLMEQRILCVYENGIGAINLPYRASAVGLDHSRSVHPLTLLMVGDVVSELLGEEFCVQNPFLFWTKAQMCKALAKDRRHDLPSLTMSCDSPHRQRPVQCGYCSSCLLRRQALAAADIKDKTRYVVLHGKRSVKEPSLYFLNMLEQVRTFRRLPRFSDEPGLQWEAMTREFSVLDDIVDRSAVAENLLPADMRSRLIQLYHTYVSEWEAVESKIAAGLLNKCSDQQISGSLVAAQQG

SEQ ID NO: 40327 - protein, 231 aa, [Oscillatoria] sp.
  misc_feature (1)..(231): tr|D8G007|D8G007_9CYAN 7-cyano-7-deazaguanine synthase OS=[Oscillatoria] sp. PCC 6506 OX=272129 GN=queC PE=3 S V=1
MKAVVLLSGGLDSSTVLYQAQADGCESYTISFDYQQRHLRELESAKAIALSAGVVKHQVVSFDLSLWGGSALTDNKIDFPRDRTLAQMSESIPITYVPARNTIFLSFALAWAETLNADRIYIGVNALDYSGYPDCRPDYIQAMQEVFRLGTKQGREGNPISILTPLIDLKKTEIIKLGNHLGVPWEKTWSCYAGGELACGLCDSCRLRVAAFEELGLTDPLPYVENYNTQK

SEQ ID NO: 40328 - protein, 229 aa, Oscillatoriales cyanobacterium
  misc_feature (1)..(229): tr|A0A1C0V2X0|A0A1C0V2X0_9CYAN 7-cyano-7-deazaguanine s ynthase OS=Oscillatoriales cyanobacterium USR001 OX=188 0991 GN=queC PE=3 SV=1
MKAVILLSGGLDSSTVLYQAQADGWESYAISFDYQQRHRRELESAKAIAHSAGINQHQIVSFDLTLWGGSALTDRKIDYPRDRTLDRMSETIPITYVPARNTIFLSFALAWAETLNAQRIYIGVNALDYSGYPDCRPDYIQAMQEVFRLGTKQGIEGNPISIVAPLINLKKTEIIKLGNKLGVPWEKTWSCYAGGEIACGLCDSCRLRLAAFEELGLKDPLSYAQNTNT

SEQ ID NO: 40329 - protein, 237 aa, Oscillatoriales cyanobacterium
  misc_feature (1)..(237): tr|A0A1J5GKE8|A0A1J5GKE8_9CYAN 7-cyano-7-deazaguanine s ynthase OS=Oscillatoriales cyanobacterium CG2_30_40_61 OX=1805291 GN=queC PE=3 SV=1
MKAVILLSGGLDSSTVLYQAKADGCECYAISFDYQQRHRKELESARKIAEFAGVVEHQVVTFDLSLWGGSALTDNRLDLPQNRSSEIMAKTIPITYVPARNTIFLSFALAYAEAIAASKIYIGVNALDYSGYPDCRPDYIQAIEEVFRLGTKQGREGDPITIESPLIHLKKTEIIKLGNRLGVPWEFTWSCYAGEEQACGVCDSCRLRLAAFAELELIDPIAYIADGNREQGTGNRE

SEQ ID NO: 40330 - protein, 45 aa, Oscillibacter sp.
  misc_feature (1)..(45): tr|A0A316T722|A0A316T722_9FIRM Uncharacterized protein OS=Oscillibacter sp. OX=1945593 GN=DBX95_02885 PE=4 SV= 1
MKAFILLSGGIDSMACVNFYKALNYEVECIFCDYGQPASISEKQV

SEQ ID NO: 40331 - protein, 229 aa, Osedax symbiont
  misc_feature (1)..(229): tr|S6GLE0|S6GLE0_9GAMM 7-cyano-7-deazaguanine synthase OS=Osedax symbiont Rs2 OX=1330035 GN=queC PE=3 SV=1
MNKAKNRRAVVLLSGGLDSATVLAMATRQGYDCYVLSFDYGQRSVVELDAAKELAKSAGAIEHKVLRMPLEDFGGSALTDTSIDMPADGPQESEIPVTYVPARNTVFLSLALGWAEVLEADAIFIGVNSVDYSGYPDCRPAFIEAFEVLANLATRAGVEGNKLSIETPLMDMTKGQIIEQGIALGIDYKQTVSCYQADQRGYACNKCDSCKLRREGFEQVGIEDQTNYF

SEQ ID NO: 40332 - protein, 231 aa, Osedax symbiont
  misc_feature (1)..(231): tr|S6GKI6|S6GKI6_9GAMM 7-cyano-7-deazaguanine synthase OS=Osedax symbiont Rs1 OX=1330036 GN=queC PE=3 SV=1
MMNSKKQKAVILLSGGLDSATVLAMATAQGYACYVLSFDYGQRSIVELQAAIKLAKIAAAVEHKILHMPLEDFGGSALTDTSIAMPSAEKVSTSEIPVTYVPARNTVFLSLALGWAEVIEANCIFIGVNSVDYSGYPDCRPDFIDAFEKMANLATRAGVEGNKLTIETPLMHLTKGQIITKGLALGVDYKATVSCYQADSQGNACDNCASCKLRKEGFIQAGIDDQTNYFK

SEQ ID NO: 40333 - protein, 229 aa, Osedax symbiont
  misc_feature (1)..(229): tr|A0A1Y5HG40|A0A1Y5HG40_9BACT 7-cyano-7-deazaguanine s ynthase OS='Osedax' symbiont bacterium Rs2_46_30_T18 OX =1856298 GN=queC PE=3 SV=1
MNKVKKPRAVVLLSGGLDSATVLAMATRQNYDCYVLSFDYGQRSVVELDAAKELAKGAGAIEHKVLRMPLEDFGGSALTDTSIDMPEDGPQESEIPVTYVPARNTVFLSLALGWAEVLEADAIFIGVNSVDYSGYPDCRPAFIQAFEAVANLATRAGVEGSKLTIETPLMDMTKAQIIEQGIALGIDYKQTVSCYQADQRGYACNNCDSCKLRREGFEQAGIDDQTNYF

SEQ ID NO: 40334 - protein, 219 aa, Otariodibacter oris
  misc_feature (1)..(219): tr|A0A420XGU0|A0A420XGU0_9PAST 7-cyano-7-deazaguanine s ynthase OS=Otariodibacter oris OX=1032623 GN=queC PE=3 SV=1
MNEIKKAAVIFSGGQDSTTCLFLAIQEFGVENVEVITFQYGQRHAIELEKAAWIAQDLGVKQTLIDTSVIKSITTNALMDSSATIKQEGDKPNTFVDGRNALFLLYAAIYAKSQNIHTIFTGVCETDFSGYPDCRDVFIKSMNVTLNLAMDYNFNIRTPLMYLTKKETWKLADDLGAFEYIKNHTHTCYLGVEGGCHTCPSCVLREKGLNEYLQERDNV

SEQ ID NO: 40335 - protein, 251 aa, Ottowia oryzae
  misc_feature (1)..(251): tr|A0A2S0MDZ7|A0A2S0MDZ7_9BURK 7-cyano-7-deazaguanine s ynthase OS=Ottowia oryzae OX=2109914 GN=queC PE=3 SV=1
MHDSALVLFSGGQDSTTCLADALSRYRRVETVGFDYGQRHHVEMRQRLMVRRVLQARFPEWRARLGEDHVIDLNVLGQISETALTRDSAIALAGSGLPNTFVPGRNLVFLAFAGALAYRRGLQVIVAGVCETDYSGYPDCRDDTMKAMQLALSLGMDRRLVIETPLMWIDKAATWAMAHALGQAADPHGGGDALVDILLEHTHTCYHAERDQRHEWGYGCGQCPACALRAAGWKGWRQALGGASAAPAARA

SEQ ID NO: 40336 - protein, 243 aa, Ottowia sp.
  misc_feature (1)..(243): tr|A0A5C7VLL7|A0A5C7VLL7_9BURK 7-cyano-7-deazaguanine s ynthase OS=Ottowia sp. OX=1898956 GN=queC PE=3 SV=1
MHTRALVLFSGGQDSTTCLADALTRFEHVETIGFDYGQRHHVELAQRTVVLREMRSRFADWAARLGDDHLIDVGVLGQISETSLTRELAFEMQASGLPNTFVPGRNLVFLTLAGALAYRRGLDTLVTGVCETDYSGYPDCRDDTMKAMQLALSLGMDRRLLIDTPLMWRDKAQTWQLAHALGQQADAQGGGDALVDLIVEHTHTCYVGDRAQRHAWGYGCGACPACELRAAGWARWQAGRGAR

SEQ ID NO: 40337 - protein, 245 aa, Ottowia sp.
  misc_feature (1)..(245): tr|A0A5C8J240|A0A5C8J240_9BURK 7-cyano-7-deazaguanine s ynthase OS=Ottowia sp. GY511 OX=2603274 GN=queC PE=3 SV =1
MHDSALVLFSGGQDSTTCLADALSRFRRVETVGFDYGQRHNAELAQRAVVRHELQARFPAWRERLGDDHVIDLQVLGQISDTALTRDTAIAMADSGLPNTFVPGRNLVFLTFAGALAYRRGLQVIVTGVCEADYSGYPDCRDDTMKAMQLALSLGMDRRVVIDTPLMWIDKAATWQLAHALGQQADPAGGGEALVDVIVEHSHTCYAGDRSQRHAWGYGCGVCPACELRAAGWQRWRAGPAPSAV

SEQ ID NO: 40338 - protein, 246 aa, Oxalobacter formigenes
  misc_feature (1)..(246): tr|C3X5N3|C3X5N3_OXAFO 7-cyano-7-deazaguanine synthase OS=Oxalobacter formigenes HOxBLS OX=556268 GN=queC PE=3 SV=1
MNIPSLPPPVTRDKNALVLFSGGQDSTTCLAWALTHYNHVETVGFSYGQRHAVELEGRPRILEKLRQFSEKWNRRLGADHIVDLSLISHLSETAMTTEMEIRVMENGLPNTFVPGRNLMFLTAAAMLAYRRDLNTLVGGMCETDFSGYPDCRDDAVKALQVALNIGMDTRLALLTPLMWKNKKETWQMAFDLGGQKLIELIVSETHTCYIGEHNRLHEWGYGCGKCPACLLRKRGFMEYQSEKKPI

SEQ ID NO: 40339 - protein, 246 aa, Oxalobacter formigenes
  misc_feature (1)..(246): tr|C3XBV8|C3XBV8_OXAFO 7-cyano-7-deazaguanine synthase OS=Oxalobacter formigenes OXCC13 OX=556269 GN=queC PE=3 SV=1
MNTTRQNHSIESTKKALVLFSGGQDSTTCLAWALNHYDKVETIGFSYGQRHAVELTVRPGILQKIRNFSEEWNKKLGEDHVCDLSLISSLSETAMTSDVEIRMMENGLPNTFVPGRNLMFLMVAAMLAYRRDLNVLVGGMCETDFSGYPDCRDDAIKAMQLALNIGMDARLNLVTPLMWKNKKETWQLAAELGGQGLVDLIVNETHTCYVGEHDKLNTWGFGCGECPACLLRKKGFEEFISRGKPE

SEQ ID NO: 40340 - protein, 238 aa, Oxalobacter sp.
  misc_feature (1)..(238): tr|A0A3A6P053|A0A3A6P053_9BURK 7-cyano-7-deazaguanine s ynthase OS=Oxalobacter sp. OX=2093374 GN=queC PE=3 SV=1
MTDHARALVLFSGGQDSTTCLAWALSRYAHVETIGFDYGQRHIVELTVRPTILEKLRELSPDWARKLGEDHLIALPVISTVSECALTRDVAIAIQDNGLPNTFVPGRNLLFLTVAAMLAYRRGLTVLVGGMCETDFSGYPDCRDGTLKALQVALNLGMATDLALETPLMWLGKAQTWQLAQEVGGEALVNLIRDETHTCYLGERHWHDWGRGCGECPACALRMKGYREFMQHLTEDLT

SEQ ID NO: 40341 - protein, 235 aa, Oxalobacteraceae bacterium
  misc_feature (1)..(235): tr|F1W321|F1W321_9BURK 7-cyano-7-deazaguanine synthase OS=Oxalobacteraceae bacterium IMCC9480 OX=937450 GN=que C PE=3 SV=1
MTLPNGALVLFSGGQDSTTCVAWALQRYARVETIGFDYGQRHAIEMTVRPDVLASLRTQSPDWDHRLGEDHVIDLSLIGKISDTALTSNVEIAMLENGLPNTFVPGRNLLFMMVAATLAYRRGLDVLVGGMCETDFSGYPDCRDDTMKALQVTLNLGMATRLKLETPLMWIDKAATWALAESLGGDTLVDLIRTGTHTCYLGERGALHDWGYGCGTCPACALRAKGYAGYRQREG

SEQ ID NO: 40342 - protein, 198 aa, Oxalobacteraceae bacterium
  misc_feature (1)..(198): tr|A0A4Q3IJ04|A0A4Q3IJ04_9BURK 7-cyano-7-deazaguanine s ynthase (Fragment) OS=Oxalobacteraceae bacterium OX=187 1070 GN=EOO80_17290 PE=3 SV=1
FDYGQRHAIELAVRPGVLAKLRALNPDWDTRLGEDHMIDLSLISKISDTALTSNVAIEMQENGLPNTFVPGRNLMFMTVAATVAYRRGLNVLVGGMCETDFSGYPDCRDDTMKALQVALNLGMATRLKVETPLMWIDKAQTWELAEQEGGAALVDLIRFDTHTCYLGERGEAHAWGHGCGTCPACALRARGYAQYVAR

SEQ ID NO: 40343 - protein, 233 aa, Pacificibacter maritimus
  misc_feature (1)..(233): tr|A0A3N4UVC8|A0A3N4UVC8_9RHOB 7-cyano-7-deazaguanine s ynthase OS=Pacificibacter maritimus OX=762213 GN=queC P E=3 SV=1
MKTIVICSGGLDSVSLAHMVAQEHQLTRLVSFDYGQRHRKELDFAALCAERLGVPHNIIDLRSIGAVLTGSALTDDIDVPDGHYEEDSMRVTVVPNRNAIMLTVAFGFAAAQGDEAVATAVHGGDHFIYPDCRPAFTESFEKMQKFALDGYANVALHTPFVHQSKADIVTAGARYNTPFDLTWSCYKGGAQQCGRCGTCVERREAFHLAGVTDPTSYADPDFWTAALARQAGV

SEQ ID NO: 40344 - protein, 223 aa, Pacificimonas flava
  misc_feature (1)..(223): tr|M2SCM3|M2SCM3_9SPHN 7-cyano-7-deazaguanine synthase OS=Pacificimonas flava OX=1234595 GN=queC PE=3 SV=1
MLLSGGLDSTTCAASARADGFDVLALTIDYNQRHRVELEAAARAAAACDAVRHVVLPLDLSVFGGSSLTSDMPVPKGDGKMSDSVIPPTYVPARNTVFLSVALAWAEAAGARDIYIGVNALDYSGYPDCRPEFIRGFESLAEKATKAGDEGEAFRIRTPLLDLDKAGIARLADRLGVDAGATWTCYDPVMRGGEALHCGRCDACRLRHKGFVEAGLPDPTRYA

SEQ ID NO: 40345 - protein, 229 aa, Pacificimonas flava
  misc_feature (1)..(229): tr|A0A219B662|A0A219B662_9SPHN 7-cyano-7-deazaguanine s ynthase OS=Pacificimonas flava OX=1234595 GN=queC PE=3 SV=1
MTRQAVVLLSGGLDSTTCAAQARADGFELLALTIDYNQRHRVELDAAARAAERFEARRHVVLPLDLSAFGGSALTSDMEVPKGEGEVDDSQIPSTYVPARNTVFLSVALAFAEASRARDIYIGVNALDYSGYPDCRPAFIKAFEDLAAQATKAGTEGDRFQVHTPLIDLDKAGIATLARQLGVDAGETWTCYDPVEKGGQVLHCGRCDACRLRHKGFVEAGLPDPTAYA

SEQ ID NO: 40346 - protein, 241 aa, Paenibacillaceae bacterium
  misc_feature (1)..(241): tr|A0A2A6DY25|A0A2A6DY25_9BACL 7-cyano-7-deazaguanine s ynthase OS=Paenibacillaceae bacterium JTherm OX=1906605 GN=queC PE=3 SV=1
MKKAVVVLSGGLDSTTCAALAREAGYELYPLTFDYGQRHRVELGAARKIAAYYGAADRHKIVRLDFFRDFGGSALTDDSIAVPERPDGAVPDDEIPVTYVPGRNLIFLSVAVSYAETIAAEAVYIGVNALDYSGYPDCRPEFVRSFEQTAALATKAGVGGRPVRIETPLVRMTKADIVREGVRLGVPFELTWSCYKGGDAPCGVCDSCLLRRKGFAEAGVRDPLEDKAGASYGVGDSGLRP

SEQ ID NO: 40347 - protein, 117 aa, Paenibacillaceae bacterium
  misc_feature (1)..(117): tr|A0A354DFH9|A0A354DFH9_9BACL 7-cyano-7-deazaguanine s ynthase (Fragment) OS=Paenibacillaceae bacterium OX=200 3592 GN=DDY49_03185 PE=3 SV=1
MKKKAVVVLSGGLDSTTCMGIARAEGYELYPLTFDYGQRHNREVEQAKKVASFFEVQDHRVVSLNFLNQIGGSALTDLNVDVPVNRDIDDEIPVTYVPARNLIFLSLATAFAEVVGA

SEQ ID NO: 40348 - protein, 222 aa, Paenibacillus agaridevorans
  misc_feature (1)..(222): tr|A0A2R5F028|A0A2R5F028_9BACL 7-cyano-7-deazaguanine s ynthase OS=Paenibacillus agaridevorans OX=171404 GN=que C PE=3 SV=1
MKLEKAVVVFSGGQDSTTCLFWAMSRFSEVEAITFDYGQRHKLELDCAAEIAGTLGIKHHILDMSLLNQLAPNALTRDDIAIEQKEGELPTTFVDGRNLLFLTFAAVLAKGIGAKHIVTGVCETDFSGYPDCRDVFIKSLNVTLNLSMDYGFVIDTPLMWLNKAETWELADELGAFDFVRERTLTCYNGMLADGCGECPACKLRRKGLADYLAIRGSREAGR

SEQ ID NO: 40349 - protein, 237 aa, Paenibacillus algorifonticola
  misc_feature (1)..(237): tr|A0A1I2IQ13|A0A1I2IQ13_9BACL 7-cyano-7-deazaguanine s ynthase OS=Paenibacillus algorifonticola OX=684063 GN=q ueC PE=3 SV=1
MTATQKAQQNQAASGGQAVKKAVVVFSGGQDSTTCLFWALKRYDVVEAVTFNYGQRHKLELDSAAQIAEELGVKHHVLDMSLLNQLAPNALTRDDIAIEQKEGGLPTTFVDGRNLLFLSFAAILAKQIGAHTVVTGVCETDFSGYPDCRDIFIKSTNVTLNLAMDYPFVIETPLMWLNKAQTWQLADELGAFDFVRNKTLTCYNGIIADGCGECPACKLRSQGLQQYLSSRKEDVAE

SEQ ID NO: 40350 - protein, 254 aa, Paenibacillus alvei
  misc_feature (1)..(254): tr|K4ZQT9|K4ZQT9_PAEA2 7-cyano-7-deazaguanine synthase OS=Paenibacillus alvei (strain ATCC 6344 / DSM 29 / NBR C 3343 / NCIMB 9371 / NCTC 6352) OX=1206781 GN=queC PE= 3 SV=1
MKKDQEQMNNNQAASADGRHWDASNRRHAQSERKQGKAVVVFSGGQDSTTCLFWALQRFEEVETITFDYGQRHKSELEHAKAIAGKLGVPHRILDMSLLNQLAPNALTRDDIAIEQEEGELPSTFVEGRNLLFFSFAAVYAKQIGARHIVTGVCETDFSGYPDCRDVFVKSLNVTLNLAMDYGFVLHTPLMWLDKADTWRLADQLGAFDFVRTETVTCYNGLPGDGCGECPSCKLRQAGLERYLADREQEGGIS

SEQ ID NO: 40351 - protein, 255 aa, Paenibacillus alvei
  misc_feature (1)..(255): tr|A0A383RJ14|A0A383RJ14_PAEAL 7-cyano-7-deazaguanine s ynthase OS=Paenibacillus alvei OX=44250 GN=queC PE=3 SV =1
MKQANEQVCNNHVSSAGEAAWNADSHSQAHAGRKQGKAVVVFSGGQDSTTCLFWALQRFEEVETITFDYGQRHKSELEHAKAIAGKLGVPHRILDMSLLNQLAPNALTRDDIAIEQEEGELPSTFVEGRNLLFFSFAAVYAKQIGARHIVTGVCETDFSGYPDCRDVFVKSLNVTLNLAMDYGFVLHTPLMWLDKADTWRLADELGAFDFVRTETVTCYNGLPGDGCGECPSCKLRKAGLERYLMERKQEEGASR

SEQ ID NO: 40352 - protein, 226 aa, Paenibacillus amylolyticus
  misc_feature (1)..(226): tr|A0A4R5ZCU7|A0A4R5ZCU7_PAEAM 7-cyano-7-deazaguanine s ynthase OS=Paenibacillus amylolyticus OX=1451 GN=queC P E=3 SV=1
MNEEKAVVVFSGGQDSTTCLFWAKQQFAEVEVVTFDYGQRHKLEIECAAEIARDLGVQQTVLDMSLLNQLAPNALTRTDVEITHEEGELPSTFVDGRNLLFLSFAAIMAKQKGARHLVTGVCETDFSGYPDCRDSFVKSMNVTLNLSMDYPFVIHTPLMWLDKAQTWKMADDLGAFDYVRERTLTCYNGVIGDGCGDCPACKLRKAGLDRYVQQRTAAESAGVDVR

SEQ ID NO: 40353 - protein, 225 aa, Paenibacillus amylolyticus
  misc_feature (1)..(225): tr|A0A1R1BX80|A0A1R1BX80_PAEAM 7-cyano-7-deazaguanine s ynthase OS=Paenibacillus amylolyticus OX=1451 GN=queC P E=3 SV=1
MNEEKAVVVFSGGQDSTTCLFWAKQQFAEVEVVTFDYGQRHKLEIECAAEIARDLGVQQTVLDMSLLNQLAPNALTRTDVEITHEEGELPSTFVDGRNLLFLSFAAIMAKQKGARHLVTGVCETDFSGYPDCRDSFVKSMNVTLNLSMDYPFVIHTPLMWLDKAQTWKMADDLGAFDYVRERTLTCYNGVIGDGCGECPACKLRKAGLDRYVQQRTAAESAGVDV

SEQ ID NO: 40354 - protein, 225 aa, Paenibacillus antarcticus
  misc_feature (1)..(225): tr|A0A162QFW1|A0A162QFW1_9BACL 7-cyano-7-deazaguanine s ynthase OS=Paenibacillus antarcticus OX=253703 GN=queC PE=3 SV=1
MTNDKAVVVFSGGQDSTTCLFWALKNFSEVETITFDYGQRHKLEIECATSIAADLGVKQTILDMSLLNQLAPNALTRHDVDITHDEGQLPNTTVDGRNLLFMSFAAIVAKQVGARHLITGVCETDFSGYPDCRDVFIKSLNVTLNLSMDYGFVIHTPLMWLNKAQTWQMSDELDAFNYIQERTLTCYNGIIGVGCGECPACKLRQAGLDQYLDTRKDSSSTQGGA

SEQ ID NO: 40355 - protein, 220 aa, Paenibacillus aquistagni
  misc_feature (1)..(220): tr|A0A1X7LZV1|A0A1X7LZV1_9BACL 7-cyano-7-deazaguanine s ynthase OS=Paenibacillus aquistagni OX=1852522 GN=queC PE=3 SV=1
MKQEKAVVVFSGGQDSTTCLFWALERFAHVEAISFDYGQRHRTELEHASRIAEELHIPHCILDMSLLNQLAPNALTRADMEIKEEEGKLPNTFVDGRNMVFFTFAAIYAKQMGARHIVVGVCETDFSGYPDCRDVFIKSLDVTLNLAMDYPFVIHTPLMWLDKAATWKLADELGALSFVREKTVTCYNGIAGDGCGECPACRLRMAGLEKYLLEREEVQQ

SEQ ID NO: 40356 - protein, 221 aa, Paenibacillus baekrokdamisoli
  misc_feature (1)..(221): tr|A0A3G9IYW3|A0A3G9IYW3_9BACL 7-cyano-7-deazaguanine s ynthase OS=Paenibacillus baekrokdamisoli OX=1712516 GN= queC PE=3 SV=1
MQSNKAIVVFSGGQDSTTCLFKAMKEFDTVEAVTFDYGQRHKLELECAARIAAEFNIQQHVLDMSLINQLAPNALTRTDIAIEQKEGELPSTFVDGRNLLFLSFAAVLAKQKGAKHIITGVSQSDFSGYPDCRDVFIKSLNVTINLAMDYEFVIDTPLMWLTKAQTWQLADDLGAYDYVKNNTLTCYEGIIADGCGECPACLLRARGVDQYEAARREGRRL

SEQ ID NO: 40357 - protein, 231 aa, Paenibacillus barcinonensis
  misc_feature (1)..(231): tr|A0A2V4VQD6|A0A2V4VQD6_PAEBA 7-cyano-7-deazaguanine s ynthase OS=Paenibacillus barcinonensis OX=198119 GN=que C PE=3 SV=1
MLNEEKAVVVFSGGQDSTTCLFWAKQQFAEVEVVTFDYGQRHKLEIECAAAIAKDLGVQQTVLDMSLLNQLAPSALTRSDVEITHEEGELPSTFVDGRNLLFLSFAAILAKQKGARHLVTGVCETDFSGYPDCRDSFVKSMNVTLNLSMDYPFVIHTPLMWLDKAATWKMADELGAFDYVRERTLTCYNGVIGDGCGECPACKLRQAGLDRYVQERMSALEAASSIGVDVR

SEQ ID NO: 40358 - protein, 222 aa, Paenibacillus barengoltzii
  misc_feature (1)..(222): tr|R9L9J5|R9L9J5_9BACL 7-cyano-7-deazaguanine synthase OS=Paenibacillus barengoltzii G22 OX=1235795 GN=queC PE =3 SV=1
MLKKEKAVVVFSGGQDSTTCLFWAIQQFGEVEAVTFDYGQRHKLEIECAKSITAELGIKHTVLDMSLLGQLTANALTRSDIAIEHQEGELPSTFVDGRNHLFLSFAAVLAKGVGAKHIVTGVCETDFSGYPDCRDVFVKSLNVTLNLAMDYEFVIHTPLMWIDKAETWKLADELGAFDFVRERTLTCYNGIIGDGCGECPACKLRKAGLDKYLQERQEANSR

SEQ ID NO: 40359 - protein, 234 aa, Paenibacillus beijingensis
  misc_feature (1)..(234): tr|A0A0D5NJX1|A0A0D5NJX1_9BACL 7-cyano-7-deazaguanine s ynthase OS=Paenibacillus beijingensis OX=1126833 GN=que C PE=3 SV=1
MKEQKEKDKAIVVFSGGQDSTTCLFWAKERFRDIEAVTFNYGQRHAQELEVAAGIASDLGVKHHVLDMSLLNQLAPSALTREDIKVADAPKEGGLPSTFVDGRNLLFLSFAAVLAKGVGAKRIVTGVCETDFSGYPDCRNSFIQSLNVTLNLAMDYPFVIETPLMWLDKEQTWELADQLGAFDYVRERTLTCYNGVIADGCGECPACKLRRRGLDAYVSRRGAASAAGGSEGSR

SEQ ID NO: 40360 - protein, 220 aa, Paenibacillus borealis
  misc_feature (1)..(220): tr|A0A1R0YG63|A0A1R0YG63_9BACL 7-cyano-7-deazaguanine s ynthase OS=Paenibacillus borealis OX=160799 GN=queC PE= 3 SV=1
MNKKALVVFSGGQDSTTCLVWAIQHFEEVQVVTFNYNQRHAAEIEVAKEIAAKFNVKQHILDLGLLNQLAPNALTRDDIEIVSGEGDELPSTFVDGRNLLFLSFAAILAKQLGYANIVTGVCQTDFSGYPDCRDVFVKSLNVTLNLSMDYEFVIHTPLMWLDKKETWKMADELGQFDYIRQHTLTCYNGIIGSGCGTCPACLLRKRGLEQYVAERKKVGL

SEQ ID NO: 40361 - protein, 220 aa, Paenibacillus borealis
  misc_feature (1)..(220): tr|A0A089LFS1|A0A089LFS1_9BACL 7-cyano-7-deazaguanine s ynthase OS=Paenibacillus borealis OX=160799 GN=queC PE= 3 SV=1
MNKKALVVFSGGQDSTTCLVWALQQFQEVQVVTFNYNQRHAAEIEVAKEIAAKFGVKQHILDLGLLNQLAPNALTRDDIEIAAGEGEELPSTFVDGRNLLFLSFAAILAKQLGYSNIITGVCQTDFSGYPDCRDVFVKSLNVTLNLSMDYEFVIHTPLMWLDKKETWKMADELGYFDYIREQTLTCYNGIIGSGCGTCPACLLRQRGLEQYEAERQGAGL

SEQ ID NO: 40362 - protein, 242 aa, Paenibacillus bovis
  misc_feature (1)..(242): tr|A0A172ZE87|A0A172ZE87_9BACL 7-cyano-7-deazaguanine s ynthase OS=Paenibacillus bovis OX=1616788 GN=queC PE=3 SV=1
MLKNEKAVVVFSGGQDSTTCLFWAKQTFAEVEVVTFNYGQRHSAEIEVAKQIAEELGVQQTILDMSLLNQLAPNALTRSDIEITQEEGELPSTFVDGRNLLFLSFAAILAKQKGARHLITGVCETDFSGYPDCRDIFVKSLNVTLNLSMDYDFVIHTPLMWLDKSETWKMADDLGAFQYIRENTLTCYNGIIGDGCGECPACKLRKAGLDKYVQERNAAPAARRIMIELDESDTSAARGGQQ

SEQ ID NO: 40363 - protein, 221 aa, Paenibacillus catalpae
  misc_feature (1)..(221): tr|A0A1I1Z9M9|A0A1I1Z9M9_9BACL 7-cyano-7-deazaguanine s ynthase OS=Paenibacillus catalpae OX=1045775 GN=queC PE =3 SV=1
MKKGKAVVVFSGGQDSTTCLFWALDRYEEVEAVTFNYGQRHALELECAAQIAAELGVRHHVLDMSLLNQLAPNALTRSDIEIEEKEGGLPTTFVDGRNLLFLSFAAVLAKQIGARAIVTGVCETDFSGYPDCRDIFIKSLNVTLNLSMDYPFVIETPLMWLDKAETWELADQLGAFEYVRTKTLTCYNGVIADGCGECPACKLRSQGLNRYLASKEEGKAE

SEQ ID NO: 40364 - protein, 236 aa, Paenibacillus cellulosilyticus
  misc_feature (1)..(236): tr|A0A2V2YEE7|A0A2V2YEE7_9BACL 7-cyano-7-deazaguanine s ynthase OS=Paenibacillus cellulosilyticus OX=375489 GN= queC PE=3 SV=1
MSETKKAVIILSGGLDSTTCMGFAKEAGYELYPITFDYGQRHRIELEKSQQVADFYSVSDRYKVIKLDFLRGIGGNALTDDSIAVPTATGIEQKDAEEAGNDIPVTYVPGRNFMFLAIATSFAEAVGAEAIYIGVNALDYSGYPDCRPDFIAKVQEAMALATKVGVEGKPITIETPLISLSKADIVREGMRMGVPYELTTSCYNGKEEACGECDSCMLRLKGFKEAGHKDPIPYAI

SEQ ID NO: 40365 - protein, 221 aa, Paenibacillus chitinolyticus
  misc_feature (1)..(221): tr|A0A410WRX3|A0A410WRX3_9BACL 7-cyano-7-deazaguanine s ynthase OS=Paenibacillus chitinolyticus OX=79263 GN=que C PE=3 SV=1
MKQEKAVVVFSGGQDSTTCLFWTLKHFGEVETLTFDYGQRHKLEIECAARIARELGVKNTVLDMSLLNQLAPNALTRGDIEIEEKEGELPSTFVEGRNLLFLSFAGVYAKVAGSRHLVTGVCETDFSGYPDCRDAFVKSLNVTLNLSMDYPFVIHTPLMWLNKAETWKLSDELGAFDFVRTKTLTCYNGIVGDGCGECPACKLRSAGLQNYLLEREGADAR

SEQ ID NO: 40366 - protein, 221 aa, Paenibacillus contaminans
  misc_feature (1)..(221): tr|A0A329MUB4|A0A329MUB4_9BACL 7-cyano-7-deazaguanine s ynthase OS=Paenibacillus contaminans OX=450362 GN=queC PE=3 SV=1
MNQSKAVVVFSGGQDSTTCLFWALERYVEVEAVTFDYGQRHKLEVECAAAIADELRAKHRIIDMSLLGQLAPNALTRNDIAIEQQEGALPTTFVDGRNMLFLTFAAVLGKQIGAKHIVSGVCETDFSGYPDCRDVFVKSLNVTLNLAMDYPFVLETPLMWLNKKETWELADRLGAFDFVRERTLTCYNGIMADGCGECPACVLRRKGLDDYSAVRIRGVLS

SEQ ID NO: 40367 - protein, 227 aa, Paenibacillus crassostreae
  misc_feature (1)..(227): tr|A0A167GR35|A0A167GR35_9BACL 7-cyano-7-deazaguanine s ynthase OS=Paenibacillus crassostreae OX=1763538 GN=que C PE=3 SV=1
MKNEKAIVVFSGGQDSTTCLFWAKKNYSEVETITFDYGQRHKLEIECAASIAQDVGVQQTVLDMSLLNQLAPNALTRHDVEISHEEGQLPNTFVDGRNLLFLSFAAIFAKQRGARHLITGVCETDFSGYPDCRDLFIKSLNVTLNLSMDYDFVIHTPLMWLNKAETWQLSDELGAFEYIQNRTLTCYNGIIGSGCGECPACKLRKTGLDQYLAMPKDGLSTQGGAQI

SEQ ID NO: 40368 - protein, 240 aa, Paenibacillus curdlanolyticus
  misc_feature (1)..(240): tr|E0IGC0|E0IGC0_9BACL 7-cyano-7-deazaguanine synthase OS=Paenibacillus curdlanolyticus YK9 OX=717606 GN=queC PE=3 SV=1
MADNKNKKAVIILSGGLDSTTCMGFAKEAGYELFPLTFDYGQRHRIELEKSRQVAEHYGVIDRYKVIKLDFLRNIGGSALTDEAIAVPKGTGVEQMDVEQAESEIPVTYVPGRNFMFLAIATSYAEAVGAEAIYIGVNALDYSGYPDCRPEFIAKVEEVMALATKVGVEGKPISIETPLIALSKADIVREGVRMGVPYELTTSCYNGEEEACGECDSCVLRLKGFSEAGHTDPIPYHKHG

SEQ ID NO: 40369 - protein, 111 aa, Paenibacillus darwinianus
  misc_feature (1)..(111): tr|A0A015M979|A0A015M979_9BACL 7-cyano-7-deazaguanine s ynthase (Fragment) OS=Paenibacillus darwinianus OX=1380 763 GN=BG52_07380 PE=3 SV=1
MTDKREKAVVVFSGGQDSTTCLFWALERFAAVEAVTFNYGQRHSRELECAAQIAQELSVKHHILDMSLLNQLAPNALTRDDIDIATGEGGLPTTFVDGRNLLFLSFAAVLA

SEQ ID NO: 40370 - protein, 109 aa, Paenibacillus darwinianus
  misc_feature (1)..(109): tr|A0A015KIK1|A0A015KIK1_9BACL 7-cyano-7-deazaguanine s ynthase (Fragment) OS=Paenibacillus darwinianus OX=1380 763 GN=BG52_07385 PE=3 SV=1
ARHIVTGVCETDFSGYPDCRDIFIKSLNVTLNLAMDYPFVVDTPLMWLDKAQTWELADRLGAFDFVRSRTLTCYNGIIADGCGECPACRLRRGGLEAYLERRGGNSGKA

SEQ ID NO: 40371 - protein, 241 aa, Paenibacillus dendritiformis
  misc_feature (1)..(241): tr|A0A2W4GN14|A0A2W4GN14_9BACL 7-cyano-7-deazaguanine s ynthase OS=Paenibacillus dendritiformis OX=130049 GN=qu eC PE=3 SV=1
MNRKEAAADRAAGAAVQGKPQEKAVVVFSGGQDSTTCLFWALERFDAVETVTFDYGQRHRSELEHAKRIAAKLQVPNRVLDMSLLNQLAPNALTRADIDIAQEEGELPNTFVEGRNLLFFSFAAIYAKQIGARHIVTGVCETDFSGYPDCRDVFVKSLNVTLNLAMDYGFVLHTPLMWLNKAETWRLADELGAFEFVRTETVTCYNGLPGDGCGECPSCKLRRAGLESYLAERAQKAGAGA

SEQ ID NO: 40372 - protein, 241 aa, Paenibacillus dendritiformis; identical to SEQ ID NO: 40371
  misc_feature (1)..(241): tr|H3SNA2|H3SNA2_9BACL 7-cyano-7-deazaguanine synthase OS=Paenibacillus dendritiformis C454 OX=1131935 GN=queC PE=3 SV=1

SEQ ID NO: 40373 - protein, 433 aa, Paenibacillus donghaensis
  misc_feature (1)..(433): tr|A0A2Z2KS49|A0A2Z2KS49_9BACL ATPase OS=Paenibacillus donghaensis OX=414771 GN=B9T62_22730 PE=4 SV=1
MNIVCKLSEADDFVIDSHFIEYNVNNSGQYTYTFWSKESIKKLINLPNFISNIGLDFLYISLFVFGADRISDRNSTYDSWTRVYNLYIPVLELDKWNNNKELLEQMLNYLSGDKWNIIFRSREYTQMEIRAREKYKKRSVEKELDVKKICMFSGGLDSFIGAIDALEECCDNVLFVSHYGGGKGVKEYQDLLKAKLYKKYTVNEDQFFSFHAAARDGKEDTTRTRSFMFFCHAIALATSINTSIELLIPENGLISLNIPLTNSRLGSSSTRTTHPYYLDMLQTLIQKLGLSISIRNPYQFKTKGEMILECKNMNFLKRNISNTMSCSHPDHGRMLGEKEACHCGNCLPCVIRRAAILKSGFKDYTVYRDIDFKSGETAKVNFNSYMLGLNKYQEKTAFLSVQKSGPIKADIDKYAQIYIRGMEELGEVLNRIK

SEQ ID NO: 40374 - protein, 221 aa, Paenibacillus donghaensis
  misc_feature (1)..(221): tr|A0A2Z2KF48|A0A2Z2KF48_9BACL 7-cyano-7-deazaguanine s ynthase OS=Paenibacillus donghaensis OX=414771 GN=queC PE=3 SV=1
MNKKALVVFSGGQDSTTCLVWALKQFEEVQVVTFNYNQRHSAEIEVATAIAHKFNVKQHILDLGLLNQLAPNALTRDDIEITPGEGQQPPNTFVDGRNLLFLSFAAILAKQLRFAHLVTGVCQTDFSGYPDCRDVFVKSLNVTLNLSMDVEFVIHTPLMWLDKKETWKMADELGVFDYIREHTLTCYNGITGSGCGTCPACLLRQRGLEQYEAERGSASHA

SEQ ID NO: 40375 - protein, 220 aa, Paenibacillus durus
  misc_feature (1)..(220): tr|A0A089HMB1|A0A089HMB1_PAEDU 7-cyano-7-deazaguanine s ynthase OS=Paenibacillus durus OX=44251 GN=queC PE=3 SV =1
MNKKAMVVFSGGQDSTTCLVWALKQFEEVQVVTFNYNQRHAAEIEVAKEIAAHFNVKQHILDLGLLNQLAPNALTRGDIEIKAGEDGELPSTFVDGRNLLFLSFSAILAKQFSYNHIVTGVCQTDFSGYPDCRDVFVKSLNVTLNLSMDYEFVIHTPLMWLDKKETWQMADELGQFDYIREHTLTCYNGIKGSGCGECPACQLRNRGLKQYEAIRKTVGR

SEQ ID NO: 40376 - protein, 220 aa, Paenibacillus durus
  misc_feature (1)..(220): tr|A0A0F7F9D1|A0A0F7F9D1_PAEDU 7-cyano-7-deazaguanine s ynthase OS=Paenibacillus durus ATCC 35681 OX=1333534 GN =queC PE=3 SV=1
MNKKALVVFSGGQDSTTCLAWALKQFEEVQVVTFNYNQRHAAEIEVAKEIAAHFNVKQHILDLGLLNQLAPNALTRGDIEISAGEDGELPSTFVDGRNLLFLSFAAILAKQLSYNHIVTGVCQTDFSGYPDCRDVFVKSLNVTLNLSMDYEFVIHTPLMWLDKKETWQLADELGQFEYIREHTLTCYNGIKGSGCGECPACQLRNRGLKQYEEVRKTVGR

SEQ ID NO: 40377 - protein, 227 aa, Paenibacillus elgii
  misc_feature (1)..(227): tr|A0A2T6G503|A0A2T6G503_9BACL 7-cyano-7-deazaguanine s ynthase OS=Paenibacillus elgii OX=189691 GN=queC PE=3 S V=1
MKKAVVILSGGLDSTTCMGMAQDAGYDVYPITFDYGQRQRREIENARQVAEFYKTASRHKVIALGFLKEFGGSALTDESIEVPPAGESGAVDSDIPVTYVPGRNLLFLSIATSYAETIGAEAIYIGVNALDYSGYPDCRPEFIRKVEEVMALATRVGVEGGPIRIETPLIHWTKAEIIREGMRLDVPYHLTTSCYNGQEEACGVCDSCRLRLKGFDEAGTADPIAYQ

SEQ ID NO: 40378 - protein, 227 aa, Paenibacillus elgii
  misc_feature (1)..(227): tr|A0A163YX16|A0A163YX16_9BACL 7-cyano-7-deazaguanine s ynthase OS=Paenibacillus elgii OX=189691 GN=queC PE=3 S V=1
MKKAVVILSGGLDSTTCMGMAQDAGYDVYPITFDYGQRQRREIENARQVAEFYKTASRHKVIALGFLKEFGGSALTDESIEVPPAGESGAVDSDIPVTYVPGRNLLFLSIATSYAETIGAEAIYIGVNALDYSGYPDCRPEFIRKVEEVMALATRVGVEGGPIRIETPLIHWTKAEIIREGMRLGVPYHLTTSCYNGQEEACGVCDSCRLRLKGFDEAGTADPIAYQ

SEQ ID NO: 40379 - protein, 220 aa, Paenibacillus etheri
  misc_feature (1)..(220): tr|A0A0W1AZ81|A0A0W1AZ81_9BACL 7-cyano-7-deazaguanine s ynthase OS=Paenibacillus etheri OX=1306852 GN=queC PE=3 SV=1
MNKKALVVFSGGQDSTTCLVWALKQFEEVQVVTFNYNQRHAAEIEVATEIAAKFNVRQHILDLGLLNQLAPNALTRQDIDIVAGEGDELPSTFVDGRNLLFLSFAAILAKQLGYSHIVTGVCQTDFSGYPDCRDVFVKSLNVTLNLSMDYEFAIHTPLMWLDKKETWKMADELGYFDYVREHTLTCYNGIIGSGCGTCPACLLRQRGLEQYEAERTGVSS

SEQ ID NO: 40380 - protein, 237 aa, Paenibacillus faecis
  misc_feature (1)..(237): tr|A0A5D0D1T1|A0A5D0D1T1_9BACL 7-cyano-7-deazaguanine s ynthase OS=Paenibacillus faecis OX=862114 GN=queC PE=3 SV=1
MLKNEKALVVFSGGQDSTTCLFWALREFREVEAVTFDYGQLHRQEIECAEKIAGELGVKWTRLDMSLLGQLTQNALTRNDIPISHEEGALPSTFVEGRNHLFLSFAAVLAKGIGARHLVTGVCETDFSGYPDCRDAFIKSLNVTLNLAMDHPFVIHTPLMWIDKAETWKLADDLGAFDFIRERTLTCYNGILGDGCGTCPACKLRRAGMETYLERRNAAQDALSAGAAPAGPREEAQ

SEQ ID NO: 40381 - protein, 1219 aa, Paenibacillus ferrarius
  misc_feature (1)..(1219): tr|A0A1V4HHG4|A0A1V4HHG4_9BACL Carrier domain-containin g protein OS=Paenibacillus ferrarius OX=1469647 GN=BC35 1_28820 PE=4 SV=1
MSDQVLSGELVLAANQRTREEPYWLEKMSGEVAAAAFPTDHSAFRNGDHTTAGLRFELTGSLYEKVSVLSKGSDHTLHIILTAALNLLLAKYTGERDLVVGTPIYRPETDGQFLNTVLPLRTRMEAGNSFRDLLLQVRSTMLEAVEHQEYPMEVLLTKLNRPHLYEVSLVMENIQSPQHLDRLPAALNFVFTHRNDVVEATVEYNNSRYHEESVECIVSHFITLLEKVLGDINADFTTLSLLSQSEEEALVVAYNATTTEYPADKTVAQLFEQQVENNPANLAVAAGNVSLTYQELNAKANRLARVLQSRGVSADSLVALLVENSADTIVGMLAVLKAGGAYVPIDPDNPVERKKFLLEDSQAVVILTQQHLLATQAELFEAVESERLLLIDDLDVYADHDETNLAPVAGPSNLAYVIYTSGTTGKPKGVLIENKGAVNYLTFAAKHYVQGEKADFPLFTSIAFDLTVTSIFTPLLTGNAAIVYQEEHKERLLERVLEEDRVGVVKATPAHLKLIKHRDWSNSSVKRLVVGGEDLKAELARELIAAFGGNVEIYNEYGPTETVVGCMIHRFDESSDTRDSVPIGVPADNTDIFVLDADRNSVPVGVVGEIFIGGDGVARGYLNRPELTSERFVTLPQGRVYKSGDLAKFLPSGQLEYLGRADNQVKINGYRIELGEIETQLLHLHEKYTPKDSVFHDITQQAHPEGVTYCSRCVLPSNYPKITFDEHGVCSVCRDYATYQPHTEKYFKTMDDFRELVDVNKGTDYDVLLLFSGGKDSTYVLYRLVNMGYKVLTFTFDNGFISEGAFTNIKNITKQLGVDHRVLTADQMKSVFVKSLKTFSNVCNGCWNAINGLGAQLAEETGCKVIISGLSRGQIFDMRLWGLFQLGIFDEQEIEEKLLLFRKGFHTRVNIFSKTLDVDLDGGFVESLHFVDFFRYDNTPTHQIREYLYEQGWVPPKDTGFCSSNCRINDIGIYVHLMNEGYHNYAAPSSWDIRFGIISREEGMQEITYKGDVNHVERVLKYIGYFQAPKIDDVVVVPIRDDSRREKLCAYVVAKDELEADWLREALAEELPTYMVPTYFVQLPSLPLTANGKVDTMALPLPVVTGTANVEYLTPSNDVELEIRKIWASVLSIDEEKIGFNDRFFDLGGDSYNMVQVNIRVNEMFSKSIPVVTMYNYPTIHSLAEYLPSEESIEVQELPDEQLEILDDSLSLFGEVFND

SEQ ID NO: 40382 - protein, 238 aa, Paenibacillus ferrarius
  misc_feature (1)..(238): tr|A0A1V4HKZ8|A0A1V4HKZ8_9BACL 7-cyano-7-deazaguanine s ynthase OS=Paenibacillus ferrarius OX=1469647 GN=queC P E=3 SV=1
MSSNEVTKKRAVIILSGGLDSTTCMGLAKEAGYELYPLSFDYGQRHKIEIENAKQVAEHYGVSKRHKIIKLDFLRDFGGSALTDDTIEVPNVMDSEQPDAGESEIPVTYVPGRNLLFLSIATSYAEVTGSEAIYIGVNALDYSGYPDCRPEFIHKVEEVIALATKVGVEGKGITIETPLMDWTKAKIIEEGLKIGVPYELTTSCYNGKAEACGVCDSCRLRLKGFEEAGSKDPIPYLI

SEQ ID NO: 40383 - protein, 222 aa, Paenibacillus ginsengarvi
  misc_feature (1)..(222): tr|A0A3B0BKD0|A0A3B0BKD0_9BACL 7-cyano-7-deazaguanine s ynthase OS=Paenibacillus ginsengarvi OX=400777 GN=queC PE=3 SV=1
MQKEKAVVVFSGGQDSTTCLIWAMQRFEEVTAVTFDYGQRHKLEVEVAAAIAEELKVEHRVLDMSLLGQLAPNALTRGDIAIEQQEGSLPTTFVDGRNLLFLSFAAVIAKQIGAKHIVTGVCETDFSGYPDCRDVFVKSANVTLNLAMDYPFVIDTPLMWLSKAETWELADRLGAFDFVRQRTLTCYNGIVADGCGECPACKLRRKGLDEYAASLPKEADRP

SEQ ID NO: 40384 - protein, 220 aa, Paenibacillus glacialis
  misc_feature (1)..(220): tr|A0A168NN03|A0A168NN03_9BACL 7-cyano-7-deazaguanine s ynthase OS=Paenibacillus glacialis OX=494026 GN=queC PE =3 SV=1
MTNDKAVVVFSGGQDSTTCLFWALKNFSEVETITFDYGQRHKLEIECATSIATDLGVKQTILDMSLLNQLAPNALTRHDVDIAHEEGQLPNTFVDGRNLLFLSFAAIVAKQAGARHLITGVCETDFSGYPDCRDVFVKSLNVTLNLSMDYDFVIHTPLMWLNKAETWHMSDQLDAFNYIRERTLTCYNGVIGDGCGECPACKLRKAGLDQYLATSIQGGA

SEQ ID NO: 40385 - protein, 209 aa, Paenibacillus glucanolyticus
  misc_feature (1)..(209): tr|A0A163GRN2|A0A163GRN2_9BACL 7-cyano-7-deazaguanine s ynthase OS=Paenibacillus glucanolyticus OX=59843 GN=AWU 65_03800 PE=3 SV=1
MKKKAIVMVSGGPDSSTLLYHLKTEFELVPVYFDYGQNASDYEIVAARKISEELNLHLEIIDISSLRRTFLGLNRRDNISLSINGNCPVALLSIAGLYATERNIDTLLLGVHKEDFPEIKNITSTLNKYSEVLEEFNNKHVEVSAPFITKKKKEVFELAKQLNVPFELTRSCERNSYIHCGECNPCKERKHSFLEAEIQDPTKYLAQHC

SEQ ID NO: 40386 - protein, 225 aa, Paenibacillus glucanolyticus
  misc_feature (1)..(225): tr|A0A163KNF6|A0A163KNF6_9BACL 7-cyano-7-deazaguanine s ynthase OS=Paenibacillus glucanolyticus OX=59843 GN=que C PE=3 SV=1
MLKNEKAVVVFSGGQDSTTCLFWGKERFAEVETVTFDYGQRHKLEIECAAQIAKEQGVKQTVLDMSLLNQLAPNALTRSDIEIAEGDGLPTTFVDGRNLLFLSFAAVLAKGAGAKHLITGVCETDFSGYPDCRDSFIKSLNVTLNLAMDYPFVIHTPLMWLDKSETWELADQMNALEYVRDHTLTCYNGIKGDGCGECPACKLRKAGLDNYMLRRNRVSEGGRLV

SEQ ID NO: 40387 - protein, 220 aa, Paenibacillus graminis
  misc_feature (1)..(220): tr|A0A089NJ58|A0A089NJ58_9BACL 7-cyano-7-deazaguanine s ynthase OS=Paenibacillus graminis OX=189425 GN=queC PE= 3 SV=1
MNKKALVVFSGGQDSTTCLVWALKNYEEVQVVTFNYNQRHAAEIEVAKAIAKKFNVKQHILDLSLLNQLAPNALTRDDIEIAAGEGKELPSTFVDGRNLLFLSFAAILAKQLGFANIITGVCQTDFSGYPDCRDVFVKSLNVTLNLSMDYEFIIHTPLMWLDKKETWKLADELGYFEYIREHTLTCYNGIIGSGCGTCPACLLRQRGLDQYEAERNEVGS

SEQ ID NO: 40388 - protein, 222 aa, Paenibacillus hemerocallicola
  misc_feature (1)..(222): tr|A0A5C4T977|A0A5C4T977_9BACL 7-cyano-7-deazaguanine s ynthase OS=Paenibacillus hemerocallicola OX=1172614 GN= queC PE=3 SV=1
MNNTKAVVVFSGGQDSTTCLFWAMERFDEVETVTFDYGQRHKLEVEVAAAIAGELNVKHHVLDMSLLGQLAPNALTRNDIAIEQREGSLPTTFVDGRNLLFLSFAAIAAKQIGAKHIVTGVCETDFSGYPDCRDVFVKSLNVTLNLAMDYPFVIDTPLMWLNKAETWELADRLGAFDFVRNRTLTCYNGIVADGCGECPACRLRRKGLDDYSALSGREACSP

SEQ ID NO: 40389 - protein, 243 aa, Paenibacillus herberti
  misc_feature (1)..(243): tr|A0A229NZ20|A0A229NZ20_9BACL 7-cyano-7-deazaguanine s ynthase OS=Paenibacillus herberti OX=1619309 GN=queC PE =3 SV=1
MEQQQVRVNPLDKRQGKAVVVFSGGQDSTTCLFWAQQRYEEVEAVTFRYGQRHELELDCAASIAAELGVKHHMLDMSLLGQLAPSALTRADVAVADAPAEGGLPNTFVPGRNLLFMSFAAVLAQGVGARTIVTGVCETDFSGYPDCRNVFIQSLNVSINLAMDSSFVIETPLMWLDKEQTWELADQLGAFDFVRERTLTCYNGIPSDGCGECPACKLRSSGLERYLARRDGGGVSASLQGGAR

SEQ ID NO: 40390 - protein, 226 aa, Paenibacillus ihbetae
  misc_feature (1)..(226): tr|A0A1B2DXP7|A0A1B2DXP7_9BACL 7-cyano-7-deazaguanine s ynthase OS=Paenibacillus ihbetae OX=1870820 GN=queC PE= 3 SV=1
MLKHEKAVVVFSGGQDSTTCLFWAKERFADVETVTFDYGQRHKLEIECASQIAKEQGVKQTVLDMSLLNQLAPNALTRTDIEIKEGDQGLPTTFVEGRNLLFLSFAAVLAKGIGAKHLVTGVCETDFSGYPDCRDSFIKSLNVTLNLAMDYPFVIHTPLMWLDKAETWELADQMNALEYIRDHTLTCYNGIKGDGCGECPACKLRKAGLDKYLSRRNASVEGGRSV

SEQ ID NO: 40391 - protein, 227 aa, Paenibacillus illinoisensis
  misc_feature (1)..(227): tr|A0A2W0CVX4|A0A2W0CVX4_9BACL 7-cyano-7-deazaguanine s ynthase OS=Paenibacillus illinoisensis OX=59845 GN=queC PE=3 SV=1
MLNEEKAVVVFSGGQDSTTCLFWAKQQFAEVEVVTFDYGQRHKLEIECAAAIARDLNVQQTVLDMSLLNQLAPNALTRTDVEITHEEGELPSTFVDGRNLLFLSFAAILAKQKGARHLVTGVCETDFSGYPDCRDSFVKSMNVTLNLSMDYPFVIHTPLMWLDKAQTWKMADDLGAFDYVRERTLTCYNGVIGDGCGECPACKLRKAGLDRYVEQRSAGASVGADVR

SEQ ID NO: 40392 - protein, 220 aa, Paenibacillus jilunlii
  misc_feature (1)..(220): tr|A0A1G9KBI1|A0A1G9KBI1_9BACL 7-cyano-7-deazaguanine s ynthase OS=Paenibacillus jilunlii OX=682956 GN=queC PE= 3 SV=1
MNKKALVVFSGGQDSTTCLIWALKNYEEVQVVTFNYNQRHAAEIEVAKEIAKKFNVKQHILDLGLLNQLAPNALTRDDIEIAAGDGEELPSTFVDGRNLLFLSFAAILAKQLQFANIITGVCQTDFSGYPDCRDVFVKSLNVTLNLSMDYEFVIHTPLMWLDKKETWKLADELGYFEYIREHTLTCYNGIIGSGCGTCPACLLRQRGLDQYAAERNEVVS

SEQ ID NO: 40393 - protein, 229 aa, Paenibacillus kribbensis
  misc_feature (1)..(229): tr|A0A222WRS9|A0A222WRS9_9BACL 7-cyano-7-deazaguanine s ynthase OS=Paenibacillus kribbensis OX=172713 GN=queC P E=3 SV=1
MFANEKAVVVFSGGQDSTTCLFWAKKHFAEVETVTFDYGQRHKQEIEVAAGIARKLGVPQTVLDMSLLNQLAPNALTRTDIDITQEEGELPSTFVDGRNLLFLSFAAVLAKQKGARHIITGVCETDFSGYPDCRDSFIKSLNVTLNLSMDYPFVIHTPLMWLNKAETWKMADELEAFEFVRTRTLTCYNGVIGDGCGECPACKLRRAGLEQYLAVRGHGASSQGAEGHA

SEQ ID NO: 40394 - protein, 226 aa, Paenibacillus lactis
  misc_feature (1)..(226): tr|G4HI39|G4HI39_9BACL 7-cyano-7-deazaguanine synthase OS=Paenibacillus lactis 154 OX=743719 GN=queC PE=3 SV=1
MLKHEKAVVVFSGGQDSTTCLFWAKERFAEVETVTFDYGQRHKLEIECAAQIAKDQGVKQTVLDMSLLNQLAPNALTRTDIEIKEGDQGLPTTFVEGRNLLFLSFAAVLAKGIGAKHLVTGVCETDFSGYPDCRDSFIKSLNVTLNLAMDYPFVIHTPLMWLDKAETWELADQMNALEYIRDHTLTCYNGIKGNGCGECPACKLRKAGLDKYLSRRNASVEGGRTV

SEQ ID NO: 40395 - protein, 223 aa, Paenibacillus larvae
  misc_feature (1)..(223): tr|A0A2A5K0L1|A0A2A5K0L1_PAELB 7-cyano-7-deazaguanine s ynthase OS=Paenibacillus larvae subsp. larvae (strain N RRL B-3650 / LMG 16245) OX=741161 GN=queC PE=3 SV=1
MKQEKAIVVFSGGQDSTTCLFWALRQFGEVETVTFDYGQRHSLEMKVAKSIAEELGLKHTVLDMSLLNQLAPSALTRKDMAIEEKEGEPPSTFVDGRNMLFLTFAAVMAKQAGARHLVTGVCETDFSGYPDCRDAFIKSLNVTLNLAMDYPFVIHTPLMWLNKAQTWELADQLGAYEFVKEKTLTCYNGVMGSGCGECPACKLRNAGLKQYEQQLAVKGAVIQ

SEQ ID NO: 40396 - protein, 223 aa, Paenibacillus larvae
  misc_feature (1)..(223): tr|A0A2L1UJ50|A0A2L1UJ50_9BACL 7-cyano-7-deazaguanine s ynthase OS=Paenibacillus larvae subsp. larvae OX=147375 GN=queC PE=3 SV=1
MKQEKAIVVFSGGQDSTTCLFWALRQFGEVETVTFDYGQRHSLEMKVAKSIAEELGLKHTVLDMSLLNQLAPSALTRKDMAIEEKEGGPPSTFVDGRNMLFLTFAAVMAKQAGARHLVTGVCETDFSGYPDCRDAFIKSLNVTLNLAMDYPFVIHTPLMWLNKAQTWELADQLGAYEFVKEKTLTCYNGVMGSGCGECPACKLRNAGLKQYEQQLAVKGAVIQ

SEQ ID NO: 40397 - protein, 225 aa, Paenibacillus lautus
  misc_feature (1)..(225): tr|A0A385TQC3|A0A385TQC3_PAELA 7-cyano-7-deazaguanine s ynthase OS=Paenibacillus lautus OX=1401 GN=queC PE=3 SV =1
MLKNEKAVVVFSGGQDSTTCLFWAKERFAEVETVTFDYGQRHKLEIECAAQIAKEQGVKQTVLDMSLLNQLAPNALTRSDIEIAEGDGLPTTFVDGRNLLFLSFAAVMAKGVGAKHLITGVCETDFSGYPDCRDSFIKSLNVTLNLAMDYPFVIHTPLMWLDKSETWELADQMNALEYIRDHTLTCYNGIKGDGCGECPACKLRKAGLDKYMQRRNGSSEGGRLV

SEQ ID NO: 40398 - protein, 223 aa, Paenibacillus lautus
  misc_feature (1)..(223): tr|A0A328WSY3|A0A328WSY3_PAELA 7-cyano-7-deazaguanine s ynthase OS=Paenibacillus lautus OX=1401 GN=queC PE=3 SV =1
MLKNEKAVVVFSGGQDSTTCLFWAKERFAEVETVTFDYGQRHKLEIECAAQIAKEQGVKQTVLDMSLLNQLAPNALTRSDIEIAEGDGLPTTFVEGRNLLFLSFAAVLAKGIGAKHLVTGVCETDFSGYPDCRDSFIKSLNVTLNLAMDYPFVIHTPLMWLDKSETWELADQMNALEYVRDHTLTCYNGIKGDGCGECPACKLRKAGLDNYMQRRNRVSEGGV

SEQ ID NO: 40399 - protein, 222 aa, Paenibacillus lentus
  misc_feature (1)..(222): tr|A0A3S8RZC5|A0A3S8RZC5_9BACL 7-cyano-7-deazaguanine s ynthase OS=Paenibacillus lentus OX=1338368 GN=queC PE=3 SV=1
MLQHEKSVVVFSGGQDSTTCLFWALKQFREVEVVTFDYGQRNKQEIECARGIAEELGVKFHLLDMSLLAQLSPNAMTRHDMDIVHEDGELPNTFVEGRNHLFLSFAAVLAKGVGARHIITGVCETDFSGYPDCRDAFVKSLNVTLNLAMDHNFVIHTPLMWLDKAATWQLADELGAFDYIRERTLTCYNGVIGDGCGECPSCKLRLAGMNAYLDKRAKGESS

SEQ ID NO: 40400 - protein, 222 aa, Paenibacillus macerans
  misc_feature (1)..(222): tr|A0A090ZUV5|A0A090ZUV5_PAEMA 7-cyano-7-deazaguanine s ynthase OS=Paenibacillus macerans OX=44252 GN=queC PE=3 SV=1
MLKNEKAVVVFSGGQDSTTCLFWAKKQFGEVEAVTFDYGQRHAREIECAKDIAQELDIKHTILDMSLLGQLTQNALTRSDIAIVQKDGELPSTFVDGRNHLFLSFAAVLAKGIGAKHIVTGVCETDFSGYPDCRDVFVKSLNVTLNLAMDYEFVIHTPLMWIDKAETWKLADELGAFDFVRERTLTCYNGVIGDGCGECPACKLRKAGLDKYLLERQGADKQ

SEQ ID NO: 40401 - protein, 220 aa, Paenibacillus macquariensis
  misc_feature (1)..(220): tr|A0A1N6UXF4|A0A1N6UXF4_9BACL 7-cyano-7-deazaguanine s ynthase OS=Paenibacillus macquariensis OX=948756 GN=que C PE=3 SV=1
MTNDKAVVVFSGGQDSTTCLFWALKNFSEVETITFDYGQRHKLEIECAASIASDLGVKQTILDMSLLNQLAPNALTRHDVDITHDEGQLPNTTVDGRNLLFMSFAAIVAKQAGARHLITGVCETDFSGYPDCRDIFIKSLNVTLNLSMDYDFVIHTPLMWLNKAETWHMSDELGAFNYIQERTLTCYNGIIGDGCGECPACKLRKAGLDQYLATSIQGGA

SEQ ID NO: 40402 - protein, 220 aa, Paenibacillus macquariensis; identical to SEQ ID NO: 40401
  misc_feature (1)..(220): tr|A0A168FML5|A0A168FML5_PAEMC 7-cyano-7-deazaguanine s ynthase OS=Paenibacillus macquariensis OX=1468 GN=queC PE=3 SV=1

SEQ ID NO: 40403 - protein, 230 aa, Paenibacillus montanisoli
  misc_feature (1)..(230): tr|A0A328UAQ1|A0A328UAQ1_9BACL 7-cyano-7-deazaguanine s ynthase OS=Paenibacillus montanisoli OX=2081970 GN=queC PE=3 SV=1
MKKAVIILSGGLDSTTCMGYAKEAGYELYPITFNYGQRHIIELNNARAVAEFYGVSDRFKVIELGFLREFGGSALTDDTIAVPKTGADPVPEEAGEIPVTYVPGRNLLFLSIATSFAETVGAEAIYIGVNALDYSGYPDCRPEFIAKVEEVIAIATKIGVEGKPISIETPLIHLTKAGIVAEGMRMGVPYQLTTSCYNGELEACGECDSCRLRLKGFAEAGLTDPIAYKK

SEQ ID NO: 40404 - protein, 232 aa, Paenibacillus mucilaginosus
  misc_feature (1)..(232): tr|F8FPI9|F8FPI9_PAEMK 7-cyano-7-deazaguanine synthase OS=Paenibacillus mucilaginosus (strain KNP414) OX=10366 73 GN=queC PE=3 SV=1
MTTSKKAVVILSGGLDSTTCMGLAREAGYDLYPITFDYGQRQKREIENARKVAEFYGVSDRHKVISLGFLKEFGGSALTDESIEVPAAGETGLEGSEIPVTYVPGRNLLFLSIATSYAEVTGAEAIYIGVNALDYSGYPDCRPEFIRKVEEVMALATRVGVEGGPIRIETPLIDWTKAEIVRQGNRIGVPYHLTTSCYNGQEEACGECDSCRLRLKGFEEAGSTDPIPYREA

SEQ ID NO: 40405 - protein, 232 aa, Paenibacillus mucilaginosus
  misc_feature (1)..(232): tr|H6NA14|H6NA14_9BACL 7-cyano-7-deazaguanine synthase OS=Paenibacillus mucilaginosus 3016 OX=1116391 GN=queC PE=3 SV=1
MTTSKKAVVILSGGLDSTTCMGLAREAGYDLYPITFDYGQRQKREIENARKVTEFYGVSDRHKVISLGFLKEFGGSALTDESIEVPAAGETGLEGSEIPVTYVPGRNLLFLSIATSYAEVKGAEAIYIGVNALDYSGYPDCRPEFIRKVEEVMALATRVGVEGGPIRIETPLIDWTKAEIVRQGNRIGVPYHLTTSCYNGQEEACGECDSCRLRLKGFEEAGSTDPIPYREA

SEQ ID NO: 40406 - protein, 223 aa, Paenibacillus nanensis
  misc_feature (1)..(223): tr|A0A3A1V2F3|A0A3A1V2F3_9BACL 7-cyano-7-deazaguanine s ynthase OS=Paenibacillus nanensis OX=393251 GN=queC PE= 3 SV=1
MLKKEKAVVVFSGGQDSTTCLFWAIERFAEVEAVTFNYGQRHSLELECAAEIAKELGVKHHVLDMSLLNQLAPNALTRDDIAIEQKEGGLPTTFVDGRNLLFLSFAAVLAKGIGAKHIVTGVCETDFSGYPDCRDVFVKSLNVTLNLSMDYNFVIDTPLMWLNKAETWALADELGAFEFVRERTLTCYNGIKADGCGECPACKLRRKGLEDYVAERGARGAER

SEQ ID NO: 40407 - protein, 256 aa, Paenibacillus naphthalenovorans
  misc_feature (1)..(256): tr|A0A0U2VJT0|A0A0U2VJT0_9BACL 7-cyano-7-deazaguanine s ynthase OS=Paenibacillus naphthalenovorans OX=162209 GN =queC PE=3 SV=1
MSAAGLFGLKGPTNDTRVKAGIVLHMKKAVVILSGGLDSTTCMGIAQEAGYELYPITFDYGQRQRREIENARQVAEFYGVSDRHRVISLGFLKEFGGSALTDESIEVPPAGESGAVDSEIPITYVPGRNLLFLSIATSYAEVSGAEAIYIGVNALDYSGYPDCRPEFIRKVQEVMALATRVGVEGGPIRIETPLIHWTKAEIIREGMRLGVPYQLTTSCYNGQEEACGVCDSCRLRLKGFADAQATDPVPYRTGKE

SEQ ID NO: 40408 - protein, 256 aa, Paenibacillus naphthalenovorans
  misc_feature (1)..(256): tr|A0A480BCQ1|A0A480BCQ1_9BACL 7-cyano-7-deazaguanine s ynthase OS=Paenibacillus naphthalenovorans OX=162209 GN =queC PE=3 SV=1
MSAAGLFGLKGPTNDTRVKAGIVLHMKKAVVILSGGLDSTTCMGIAQEAGYELYPITFDYGQRQRREIENARQVAEFYGVSDRHRVISLGFLKEFGGSALTDESIEVPLAGESGAVDSEIPITYVPGRNLLFLSIATSYAEVSGAEAIYIGVNALDYSGYPDCRPEFIRKVQEVMALATRVGVEGGPIRIETPLIHWTKAEIIREGMRLGVPYQLTTSCYNGQEEACGVCDSCRLRLKGFADAQATDPVPYRTGKE

SEQ ID NO: 40409 - protein, 228 aa, Paenibacillus nuruki
  misc_feature (1)..(228): tr|A0A1E3KZR3|A0A1E3KZR3_9BACL 7-cyano-7-deazaguanine s ynthase OS=Paenibacillus nuruki OX=1886670 GN=queC PE=3 SV=1
MLKNQKAVVVFSGGQDSTTCLFWAKEQFAEVEVVTFNYGQRHSAEIEVATQIAQELGVEQTILDMSLLNQLAPNALTRSDIDITHEEGELPSTFVDGRNLLFLSFASIMAKQKGARHIITGVCETDFSGYPDCRDIFVKSLNVTLNLSMDHQFVIHTPLMWLDKAQTWEMADQLGAFDYVREKTLTCYNGIVGSGCGECPACKLRQAGLDRYLAEREQSNDSTEGARR

SEQ ID NO: 40410 - protein, 192 aa, Paenibacillus odorifer
  misc_feature (1)..(192): tr|A0A1R0Y9R3|A0A1R0Y9R3_9BACL 7-cyano-7-deazaguanine s ynthase OS=Paenibacillus odorifer OX=189426 GN=BSK52_00 430 PE=3 SV=1
MNKRNYKVLVLLSGGLDSTCLVHYHLSQGNKVTALFFDYGQQSCEREFQSAKEISEYYDIQLSRQKLGFNIKNNDGEFYCRNALFVLAACSFLGESSSLISLGIHSGTPYYDSTAAFVTDTQMLLNGYFGGVIRIITPFLDYAKEQIIDYSVQEKIPVHLTYSCEIGGQKPCGLCKSCIDRRRLYEQSPGKD

SEQ ID NO: 40411 - protein, 220 aa, Paenibacillus odorifer
  misc_feature (1)..(220): tr|A0A1R0WR97|A0A1R0WR97_9BACL 7-cyano-7-deazaguanine s ynthase OS=Paenibacillus odorifer OX=189426 GN=queC PE= 3 SV=1
MNKKALVVFSGGQDSTTCLVWALQQYEEVQVVTFNYNQRHAAEIEVATEIAAKFNVKQHILDLGLLNQLAPNALTRQDIDIVAGEGDELPSTFVDGRNLLFLSFAAILAKQLGYSHIVTGVCQTDFSGYPDCRDVFVKSLNVTLNLSMDYEFAIHTPLMWLDKKETWKMADQLGYFDYVREHTLTCYNGIIGSGCGTCPACLLRQRGLEQYEAERMEAGS

SEQ ID NO: 40412 - protein, 227 aa, Paenibacillus oryzae
  misc_feature (1)..(227): tr|A0A1A5YP24|A0A1A5YP24_9BACL 7-cyano-7-deazaguanine s ynthase OS=Paenibacillus oryzae OX=1844972 GN=queC PE=3 SV=1
MRNEKAVVVFSGGQDSTTCLFWAIKTFREVEAVTFNYGQRHVLELDCAADIAAELGIRHHVLDMGLLNQLAPNALTRNDIEIKQEDGGLPSTFVDGRNLLFLTFAAVLAKGIGARHIVTGVCETDFSGYPDCRDVFIKSLNVTLNLSMDYRFVIDTPLMWLNKAQTWALADELGAFQFVRERTLTCYNGIKADGCGECPACQLRRRGLEEYLDSGASLEGTQLEGTS

SEQ ID NO: 40413 - protein, 231 aa, Paenibacillus oryzisoli
  misc_feature (1)..(231): tr|A0A198AMU4|A0A198AMU4_9BACL 7-cyano-7-deazaguanine s ynthase OS=Paenibacillus oryzisoli OX=1850517 GN=queC P E=3 SV=1
MSENTKRAVIILSGGLDSTTCMGLAKEAGYELFPISFDYGQRHKIEIENAKQVAEHYGVGARHKIIKLDFLRDFGGSALTDDSIAVPNVTNAPETEEIPVTYVPGRNLLFLSIATSYAEVTGSSAIYIGVNALDYSGYPDCRPEFIHKVEEVIALATKVGVEGKGITIETPLINWTKAKIVEEGLKIGVPYELTTSCYNGKAEACGECDSCRLRLKGFEEAGSKDPIAYLP

SEQ ID NO: 40414 - protein, 230 aa, Paenibacillus pabuli
  misc_feature (1)..(230): tr|A0A327PRV5|A0A327PRV5_9BACL 7-cyano-7-deazaguanine s ynthase OS=Paenibacillus pabuli OX=1472 GN=queC PE=3 SV =1
MLNEEKAVVVFSGGQDSTTCLFWAKQQFAEVEVVTFDYGQRHKLEIECAAEIARDLGVQQTVLDMSLLNQLAPNALTRTDVEITHEEGELPSTFVDGRNLLFLSFAAIMAKQKGARHLVTGVCETDFSGYPDCRDSFVKSMNVTLNLSMDYPFVIHTPLMWLDKAQTWKMADELGAFDYVRERTLTCYNGIIGDGCGECPACKLRKAGLDRYLEQRTDSATVGATGADVR

SEQ ID NO: 40415 - protein, 223 aa, Paenibacillus paeoniae
  misc_feature (1)..(223): tr|A0A371PMV0|A0A371PMV0_9BACL 7-cyano-7-deazaguanine s ynthase OS=Paenibacillus paeoniae OX=2292705 GN=queC PE =3 SV=1
MLKNEGAVVVFSGGQDSTTCLFWALEQFAEVEAITFNYGQRHKLELDCAAEIAVELGVKHHILDMSLLNQLAPNALTRDDIAIEQKDGELPTTFVDGRNLLFLSFAAVLAKGIGARHIVTGVCETDFSGYPDCRDVFIKSLNVTLNLSMDYNFVIDTPLMWLNKAETWALADELGAFDFVRERTLTCYNGIIADGCGDCPACGLRRRGLEEYVASRETRGAGL

SEQ ID NO: 40416 - protein, 236 aa, Paenibacillus pasadenensis
  misc_feature (1)..(236): tr|A0A2N5N121|A0A2N5N121_9BACL 7-cyano-7-deazaguanine s ynthase OS=Paenibacillus pasadenensis OX=217090 GN=queC PE=3 SV=1
MVDRLEGGSLDKRKGKAVVVFSGGQDSTTCLFWALQRYEEVEAVTFRYGQRHALELECAASIAAELGVRHHVLDMSLLGQLAPSSLTRSDVAVADAAEEGGLPNTFVPGRNLLFLSFAAVLAQGVGAKTIVTGVCETDFSGYPDCRNVFIQSLNVSLNLAMDETFVIETPLMWLDKEQTWELADRLGAFEFVRERTLTCYNGIPADGCGECPACKLRRAGLDKYMARRGAKEAARG

SEQ ID NO: 40417 - protein, 231 aa, Paenibacillus pectinilyticus
  misc_feature (1)..(231): tr|A0A1C0ZV73|A0A1C0ZV73_9BACL 7-cyano-7-deazaguanine s ynthase OS=Paenibacillus pectinilyticus OX=512399 GN=qu eC PE=3 SV=1
MSENNKKRAVIILSGGLDSTTCMGLAQEAGYDLFPISFDYGQRHKIEIENAKQVAEHYGVSARHKIIKLDFLRDFGGSALTDDTIDVPNVVNGPESEEIPVTYVPGRNLLFLSIATSYAEVTGSQAIYIGVNALDYSGYPDCRPEFIHKVEEVIALATKVGVEGKGITIETPLISWSKAKIVEEGLKIGVPYELTTSCYNGKAEACGECDSCRLRLKGFEEAGSKDPIAYL

SEQ ID NO: 40418 - protein, 227 aa, Paenibacillus peoriae
  misc_feature (1)..(227): tr|A0A0K2F5G6|A0A0K2F5G6_9BACL 7-cyano-7-deazaguanine s ynthase OS=Paenibacillus peoriae OX=59893 GN=queC PE=3 SV=1
MFANEKAVVVFSGGQDSTTCLFWAKKHFAEVETVTFDYGQRHKQEIEVAAGIARELGVPQTVLDMSLLNQLAPNALTRTDIDITQQEGELPSTFVDGRNLLFLSFAGVLAKQKGARHLITGVCETDFSGYPDCRDSFIKSLNVTLNLSMDYPFVIHTPLMWLNKAETWHMADELKAFEFVRTRTLTCYNGVIGDGCGECPACKLRRAGLEQYLAVRGASSQGVEGHA

SEQ ID NO: 40419 - protein, 222 aa, Paenibacillus pini
  misc_feature (1)..(222): tr|W7YJ86|W7YJ86_9BACL 7-cyano-7-deazaguanine synthase OS=Paenibacillus pini JCM 16418 OX=1236976 GN=queC PE=3 SV=1
MLKNEKAVVVFSGGQDSTTCLFWALQNFSEVETVTFDYGQRHKLEIECAQQIAEELGVKNTILDMSLLNQLAPNALTRSDIDITHEDGELPSTFVEGRNHLFLSFAAVLGKQSGARHLITGVCETDFSGYPDCRDVFVKSLNVTLNLAMDYEFVIHTPLMWLDKAETWAMAHKLSAYEFVRERTLTCYNGIIGDGCGECPACLLRKAGLDKFLLTRSEESHL

SEQ ID NO: 40420 - protein, 222 aa, Paenibacillus pinisoli
  misc_feature (1)..(222): tr|A0A3A6PEJ1|A0A3A6PEJ1_9BACL 7-cyano-7-deazaguanine s ynthase OS=Paenibacillus pinisoli OX=1276110 GN=queC PE =3 SV=1
MKNEKAVVVFSGGQDSTTCLFWALERFAEVEAVTFNYGQRHKLELDCAAEIAAELGVKHHVLDMSLLNQLAPNALTRDDIDIEQKDGELPTTFVDGRNLLFLSFAAVLAKGIGARHIVTGVCETDFSGYPDCRDVFVKSLNVTLNLSMDYNFVIDTPLMWLNKAETWALADELGAFAFVRERTLTCYNGIKADGCGECPACVLRRRGLEEYIASRGAEGAAL

SEQ ID NO: 40421 - protein, 227 aa, Paenibacillus polymyxa
  misc_feature (1)..(227): tr|A0A378XTC8|A0A378XTC8_PAEPO 7-cyano-7-deazaguanine s ynthase OS=Paenibacillus polymyxa OX=1406 GN=thiI1 PE=3 SV=1
MFTKEKAVVVFSGGQDSTTCLFWAKKHFAEVETVTFDYGQRHKQEIEVAAGIASELGVPQTVLDMSLLNQLAPNALTRTDIDITQEEGELPSTFVDGRNLLFLSFAAVLAKQKGARHIITGVCETDFSGYPDCRDSFIKSLNVTLNLSMDYPFVIHTPLMWLNKAETWQMADELKAFEFVRTRTLTCYNGIIGDGCGECPACNLRRAGLEQYLAVRGASSQGAEGHA

SEQ ID NO: 40422 - protein, 227 aa, Paenibacillus polymyxa; identical to SEQ ID NO: 40418
  misc_feature (1)..(227): tr|E0RL58|E0RL58_PAEP6 7-cyano-7-deazaguanine synthase OS=Paenibacillus polymyxa (strain E681) OX=349520 GN=qu eC PE=3 SV=1

SEQ ID NO: 40423 - protein, 231 aa, Paenibacillus polysaccharolyticus
  misc_feature (1)..(231): tr|A0A1G5GJ92|A0A1G5GJ92_9BACL 7-cyano-7-deazaguanine s ynthase OS=Paenibacillus polysaccharolyticus OX=582692 GN=queC PE=3 SV=1
MLNKEKAVVVFSGGQDSTTCLFWAKQQFAEVEVVTFDYGQRHKLEIECAAAIAKDLGVQQTVLDMSLLNQLAPNALTRDDVEITHEEGELPSTFVDGRNLLFLSFAAIMAKQKGARHLVTGVCETDFSGYPDCRDSFVKSMNVTLNLSMDYPFVIHTPLMWLDKAATWKMADELGAFDYVRERTLTCYNGVIGDGCGECPACKLRKAGLDRYVEERAVALTATPSTGVDAR

SEQ ID NO: 40424 - protein, 241 aa, Paenibacillus popilliae
  misc_feature (1)..(241): tr|M9LHR6|M9LHR6_PAEPP 7-cyano-7-deazaguanine synthase OS=Paenibacillus popilliae ATCC 14706 OX=1212764 GN=que C PE=3 SV=1
MNRKEAAADRAAGTAVRGKPQEKAVVVFSGGQDSTTCLFWALERFDTVETVTFDYGQRHRSELEHAKRIAAKLQVPNRVLDMTLLNQLAPNALTRVDIDIAQEEGELPNTFVEGRNLLFFSFAAIYAKQIGARHIVTGVCETDFSGYPDCRDVFVKSLNVTLNLAMDYGFVLHTPLMWLNKAETWRMADELGAFDFVRTETLTCYNGFPGDGCGQCPSCKLRRAGLEDYLAERAQKAGARA

SEQ ID NO: 40425 - protein, 221 aa, Paenibacillus prosopidis
  misc_feature (1)..(221): tr|A0A368VUT6|A0A368VUT6_9BACL 7-cyano-7-deazaguanine s ynthase OS=Paenibacillus prosopidis OX=630520 GN=queC P E=3 SV=1
MKKEKAVVVFSGGQDSTTCLFWAMERFAEVEAVTFNYGQRHKLELECAADIAKELNVKHHILDMSLLNQLAPNALTRDDIAIEQKEGELPSTFVDGRNLLFLTFAAVLAKQIGAKHIVTGVCETDFSGYPDCRDVFIKSLNVTLNLSMDYPFVIDTPLMWLNKAETWELADKLGAFQFVRERTLTCYNGIMADGCGHCPACLLRKKGLDDYLVKREQGGTR

SEQ ID NO: 40426 - protein, 222 aa, Paenibacillus rhizosphaerae
  misc_feature (1)..(222): tr|A0A1R1F2C4|A0A1R1F2C4_9BACL 7-cyano-7-deazaguanine s ynthase OS=Paenibacillus rhizosphaerae OX=297318 GN=que C PE=3 SV=1
MLKNEKAVVVFSGGQDSTTCLFWALRQFKEVETVTFDYGQRHRLEIECAQSIAAELGVKNTVLDMSLLNQLAPNALTRSDIEITQEEGELPSTFVDGRNHLFLSFAAVLGKQSGARHLVTGVCETDFSGYPDCRDAFVKSLNVTLNLAMDYDFVIHTPLMWLDKAETWKLADDLGAFPFVRERTLTCYNGIIGDGCGECPACRLRKAGLDKYLQSKAEALQP

SEQ ID NO: 40427 - protein, 241 aa, Paenibacillus rigui
  misc_feature (1)..(241): tr|A0A229UL96|A0A229UL96_9BACL 7-cyano-7-deazaguanine s ynthase OS=Paenibacillus rigui OX=554312 GN=queC PE=3 S V=1
MTTNQGKKAVIILSGGLDSTTCMGIAQAEGYELYPITFDYGQRHKIELENARQVAAHYGVADRHKVIQLGFLKEFGGSALTDESLEVPDMTKPKPEQASSADGAQESEVPITYVPGRNLLFLSIATSYAEVTEAEVIYIGVNALDYSGYPDCRPEFIRKVEEVMALATRVGVEGGPIRIATPLSEWTKAEIIREGMKLNVPYHLTTSCYNGQEEACGVCDSCRLRLKGFAEAGSQDPIAYK

SEQ ID NO: 40428 - protein, 220 aa, Paenibacillus riograndensis
  misc_feature (1)..(220): tr|A0A0E4HAY1|A0A0E4HAY1_9BACL 7-cyano-7-deazaguanine s ynthase OS=Paenibacillus riograndensis SBR5 OX=1073571 GN=queC PE=3 SV=1
MNNKALVVFSGGQDSTTCLVWALKNYEEVQAVTFNYNQRHAAEIEVAKEIAKKFNVKQHILDLGLLHQLAPNALTRDDIEIAAGEGEELPSTFVDGRNLLFLSFAAILAKQLEFTNIVTGVCQTDFSGYPDCRDVFVKSLNVTLNLSMDYEFVIHTPLMWLDKKETWKLADELGCFEYIREHTLTCYNGIIGSGCGTCPACLLRQRGLDQYEAERNEVGS

SEQ ID NO: 40429 - protein, 223 aa, Paenibacillus riograndensis
  misc_feature (1)..(223): tr|A0A132TM65|A0A132TM65_9BACL 7-cyano-7-deazaguanine s ynthase OS=Paenibacillus riograndensis OX=483937 GN=que C PE=3 SV=1
MEQKNRKAVVVFSGGQDSTTCLFWAMKHFDEVEAVTFNYGQRHALEIECAKQIADELGVKWTLLDMSLLGQLTQNALTRKDLEIVHNDGELPSTFVEGRNHLFLSFAAVFAKGVDARHIVTGVCETDFSGYPDCRDDFIKSLNVTLNLAMDHNFIIHTPLMWINKAETWEMADQLGAFEFVRQKTLTCYNGIIGDGCGTCPACQLRKAGLDKFLQGKNSEQML

SEQ ID NO: 40430 - protein, 220 aa, Paenibacillus sabinae
  misc_feature (1)..(220): tr|X4ZJU8|X4ZJU8_9BACL 7-cyano-7-deazaguanine synthase OS=Paenibacillus sabinae T27 OX=1268072 GN=queC PE=3 SV =1
MNKKALVVFSGGQDSTTCLAWALKQFEEVQVVTFNYNQRHAAEIEVAKEIAAHFNVKQHILDLGLLNQLAPNALTRGDIEIKAGEDGELPSTFVDGRNLLFLSFAAILAKQLSYNHIVTGVCQTDFSGYPDCRDVFVKSLNVTLNLSMDYEFVIHTPLMWLDKKETWQLADELGQFEYIREHTLTCYNGIKGSGCGECPACQLRNRGLQQYEEVRKTVGR

SEQ ID NO: 40431 - protein, 222 aa, Paenibacillus selenitireducens
  misc_feature (1)..(222): tr|A0A1T2X3Y6|A0A1T2X3Y6_9BACL 7-cyano-7-deazaguanine s ynthase OS=Paenibacillus selenitireducens OX=1324314 GN =queC PE=3 SV=1
MLKNEKAVVVFSGGQDSTTCLFWALQQFREVEAVTFDYGQRHRLEIDCAKDIAAELKVQLTVLDMSLLGQLTQNALTRSDIPIVHEEGELPSTFVEGRNHLFLSFAAVLAKGVSARHLVTGVCETDFSGYPDCRDSFVKSLNVTLNLAMDYNFVIHTPLMWIDKAETWKLADELGAFEFVRERTLTCYNGVIGDGCGECPACKLRRAGMESYLQSRQEALQP

SEQ ID NO: 40432 - protein, 229 aa, Paenibacillus silvae
  misc_feature (1)..(229): tr|A0A2W6N8L9|A0A2W6N8L9_9BACL 7-cyano-7-deazaguanine s ynthase OS=Paenibacillus silvae OX=1325358 GN=queC PE=3 SV=1
MNEEKAVVVFSGGQDSTTCLFWAKKQFAEVEVVTFDYGQRHKLEIECAAAIAKELGVQQTVLDMSLLNQLAPNALTRSDVEITHKEGELPSTFVDGRNLLFLSFAAILAKQKGARHLVTGVCETDFSGYPDCRDSFVKSMNVTLNLSMDYPFVIHTPLMWLDKAATWKMADELGAFDYVRERTLTCYNGVIGDGCGECPACKLRKAGLDRYLQERTTALEAAPSTGADA

SEQ ID NO: 40433 - protein, 225 aa, Paenibacillus solani
  misc_feature (1)..(225): tr|A0A0M1P1F6|A0A0M1P1F6_9BACL 7-cyano-7-deazaguanine s ynthase OS=Paenibacillus solani OX=1705565 GN=queC PE=3 SV=1
MLKDEKAVVVFSGGQDSTTCLFWAKERFAEVQTVTFDYGQRHKLEIECAAQIAKEQGVKQTVLDMSLLNQLAPNALTRSDIEIAEGEGMPTTFVEGRNLLFLSFAAVLAKGIGAKHLITGVCETDFSGYPDCRDSFIKSLNVTLNLAMDYPFVIHTPLMWLDKSETWELADQMNALEYVRDHTLTCYNGIKGDGCGECPACKLRKAGLDKYLQRRNRMTEGGRLV

SEQ ID NO: 40434 - protein, 220 aa, Paenibacillus sophorae
  misc_feature (1)..(220): tr|A0A1H8FND1|A0A1H8FND1_9BACL 7-cyano-7-deazaguanine s ynthase OS=Paenibacillus sophorae OX=1333845 GN=queC PE =3 SV=1
MNKKALVVFSGGQDSTTCLVWALQQFEEVQVVTFNYNQRHAAEIEVAKEIAAHFNVKQHILDLGLLNQLAPNALTRGDIEIKAGEDGELPSTFVDGRNLLFLSFAAILAKQFSYNHIVTGVCQTDFSGYPDCRDVFVKSLNVTLNLSMDYEFVIHTPLMWLDKKETWQMADELGQFDYIREHTLTCYNGIKGSGCGECPACQLRNRGLKQYEAARKTVGR

SEQ ID NO: 40435 - protein, 220 aa, Paenibacillus sp.
  misc_feature (1)..(220): tr|A0A1Q5XLB6|A0A1Q5XLB6_9BACL 7-cyano-7-deazaguanine s ynthase OS=Paenibacillus sp. P46E OX=1349436 GN=queC PE =3 SV=1
MNKKALVVFSGGQDSTTCLVWALQQFEEVQVVTFNYNQRHAAEIEVAKEIAKKFNVKQHILDLGLLNQLAPNALTRDDIEIAAGDGEDLPSTFVDGRNLLFLSFAAILAKQLGYANIITGVCQTDFSGYPDCRDVFVKSLNVTLNLSMDYEFVIHTPLMWLDKKETWKLADELGYFDYIREHTLTCYNGIMGSGCGTCPACLLRKRGLDQYEAERNEVVS

SEQ ID NO: 40436 - protein, 238 aa, Paenibacillus sp.
  misc_feature (1)..(238): tr|A0A0Q7J794|A0A0Q7J794_9BACL 7-cyano-7-deazaguanine s ynthase OS=Paenibacillus sp. Root444D2 OX=1736538 GN=qu eC PE=3 SV=1
MSVSNEDKKRAVIILSGGLDSTTCMGLAKEAGYELYPISFDYGQRHKIEIENAKQVAEHYGVSGRHKIIKLDFLRDFGGSALTDDSIDVPNVVDGLTEGSEESEIPVTYVPGRNLLFLSIATSYAEVTGSQAIYIGVNALDYSGYPDCRPEFIHKVEEVIALATKVGVEGKGITIETPLIDWTKARIVEEGLKIGVPYELTTSCYNGKAEACGVCDSCRLRLKGFEEAGSKDPIPYLA

SEQ ID NO: 40437 - protein, 220 aa, Paenibacillus stellifer
  misc_feature (1)..(220): tr|A0A089LY56|A0A089LY56_9BACL 7-cyano-7-deazaguanine s ynthase OS=Paenibacillus stellifer OX=169760 GN=queC PE =3 SV=1
MNKKALVVFSGGQDSTTCLAWALKQFEEVQVVTFNYNQRHAAEIEVAKEIAGHFGVKQHILDLGLLNQLAPNALTRSDIEISAGEEGELPSTFVDGRNLLFLSFAAILAKQLGYHHIVTGVCQTDFSGYPDCRDVFVKSLNVTLNLSMDYEFVIHTPLMWLDKKETWQMADELGQFEYIREHTLTCYNGIKGSGCGECPACQLRNRGLQQYEAVRKTVNG

SEQ ID NO: 40438 - protein, 225 aa, Paenibacillus swuensis
  misc_feature (1)..(225): tr|A0A172TQ13|A0A172TQ13_9BACL 7-cyano-7-deazaguanine s ynthase OS=Paenibacillus swuensis OX=1178515 GN=queC PE =3 SV=1
MKKAVIILSGGLDSTTCMGYAKEQGYELYPITFDYGQRHRIELENARKVAAFYGAEGRHKVVQLGFLKEFGGSALTDESIAVPEGAEAEDEIPVTYVPARNLLFLSIAASYAEVNGAEALYIGVNAMDYSGYPDCRPEFISKVEEVIALGTKAGVEGKSMSIETPLLLLTKADIIREGTRMEVPYELTTSCYNGKAEACRTCDSCRLRLKGFAEAGLQDPIAYEE

SEQ ID NO: 40439 - protein, 230 aa, Paenibacillus taichungensis
  misc_feature (1)..(230): tr|A0A2V3S919|A0A2V3S919_9BACL 7-cyano-7-deazaguanine s ynthase OS=Paenibacillus taichungensis OX=484184 GN=que C PE=3 SV=1
MLNEEKAVVVFSGGQDSTTCLFWAKQQFAEVEVVTFDYGQRHKLEIECAAEIARDLGVQQTVLDMSLLNQLAPNALTRTDVEITHEEGELPSTFVDGRNLLFLSFAAIMAKQKGARHLVTGVCETDFSGYPDCRDSFVKSMNVTLNLSMDYPFVIHTPLMWLDKAQTWKMADDLGAFDYVRERTLTCYNGIIGDGCGECPACKLRKAGLDRYLEQRTDSATVGATGADVR

SEQ ID NO: 40440 - protein, 229 aa, Paenibacillus taichungensis
  misc_feature (1)..(229): tr|A0A329R728|A0A329R728_9BACL 7-cyano-7-deazaguanine s ynthase OS=Paenibacillus taichungensis OX=484184 GN=que C PE=3 SV=1
MNEEKAVVVFSGGQDSTTCLFWAKQQFAEVEVVTFDYGQRHKLEIECAAEIARDLGVQQTVLDMSLLNQLAPNALTRTDVEITHEEGELPSTFVDGRNLLFLSFAAIMAKQKGARHLVTGVCETDFSGYPDCRDSFVKSMNVTLNLSMDYPFVIHTPLMWLDKAQTWKMADKLGAFDYVRERTLTCYNGIIGDGCGECPACKLRKAGLDRYLEQRNDSAIVGTAGADVR

SEQ ID NO: 40441 - protein, 229 aa, Paenibacillus taihuensis
  misc_feature (1)..(229): tr|A0A3D9S778|A0A3D9S778_9BACL 7-cyano-7-deazaguanine s ynthase OS=Paenibacillus taihuensis OX=1156355 GN=queC PE=3 SV=1
MKKAVVILSGGLDSTTCMGYAKEAGYELYPITFNYGQRHKIELNNARAVAEHYGVSDRFRLVELGFLRDFGGSALTDDSIDVPKVGTDPVPDEAGEIPVTYVPGRNLLFLSIATSFAETVGAEAIYIGVNALDYSGYPDCRPEFIAKVEEVIAIATKIGVEGKPISIETPLISLTKADIVKEGMRMDVPYHLTTSCYNGEPEACGECDSCRLRLKGFAEAGMKDPIPYK

SEQ ID NO: 40442 - protein, 227 aa, Paenibacillus terrae
  misc_feature (1)..(227): tr|G7VYT5|G7VYT5_PAETH 7-cyano-7-deazaguanine synthase OS=Paenibacillus terrae (strain HPL-003) OX=985665 GN=q ueC PE=3 SV=1
MFANEKAVVVFSGGQDSTTCLFWAKKHFAEVETVTFDYGQRHKQEIEVAAGIAHELGVPQSVLDMSLLNQLAPNALTRTDIDITQQEGELPSTFVDGRNLLFLSFAAVLAKQKGARHIITGVCETDFSGYPDCRDSFIKSLNVTLNLSMDYPFVIHTPLMWLNKAETWQMADELEAFEFVRTRTLTCYNGVIGDGCGECPACKLRRAGLEQYLAVRGASSQGVEGHA

SEQ ID NO: 40443 - protein, 227 aa, Paenibacillus terrae
  misc_feature (1)..(227): tr|A0A0D7X912|A0A0D7X912_9BACL 7-cyano-7-deazaguanine s ynthase OS=Paenibacillus terrae OX=159743 GN=queC PE=3 SV=1
MFANEKAVVVFSGGQDSTTCLFWAKKHFAEVETVTFDYGQRHKQEIEVAAGIAHELGVPQSVLDMSLLNQLAPNALTRTDIDITQQEGELPSTFVDGRNLLFLSFAAVLAKQKGARHMITGVCETDFSGYPDCRDSFIKSLNVTLNLSMDYPFVIHTPLMWLNKAETWQMADELEAFEFVRTRTLTCYNGIIGDGCGECPACKLRRAGLEQYLAVRGASSPGVEGHA

SEQ ID NO: 40444 - protein, 222 aa, Paenibacillus thermophilus
  misc_feature (1)..(222): tr|A0A388MNP5|A0A388MNP5_9BACL 7-cyano-7-deazaguanine s ynthase OS=Paenibacillus thermophilus OX=1181891 GN=que C PE=3 SV=1
MLKNEKAVVVFSGGQDSTTCLFWAKKQFGEVEAVTFDYGQRHAREIECAKDIAQELDIKHTILDMSLLGQLTQNALTRSDIAIAQKDGELPSTFVDGRNHLFLSFAAVLAKGIGAKHIVTGVCETDFSGYPDCRDVFVKSLNVTLNLAMDYEFVIHTPLMWIDKAETWKLADELGAFDFVRERTLTCYNGVIGDGCGECPACKLRKAGLDKYLLERQEAGKQ

SEQ ID NO: 40445 - protein, 245 aa, Paenibacillus thiaminolyticus
  misc_feature (1)..(245): tr|A0A378ZHK3|A0A378ZHK3_PANTH 7-cyano-7-deazaguanine s ynthase OS=Paenibacillus thiaminolyticus OX=49283 GN=th iI1 PE=3 SV=1
MNDAMNRKEAAAERAGDRAVQGKPQEKAVVVFSGGQDSTTCLFWAMERFDAVETVTFDYGQRHRSELEHAKRIAAKLQVPNRVLDMTLLNQLAPNALTRADIDIAQEEGELPNTFVEGRNLLFFSFAAIYAKQIGARHIVTGVCETDFSGYPDCRDVFVKSLNVTLNLAMDYGFVLHTPLMWLNKAETWRLADELGAFDFVRTETVTCYNGLPGDGCGECPSCKLRRAGMESYLAERAQKSGAGA

SEQ ID NO: 40446 - protein, 241 aa, Paenibacillus thiaminolyticus
  misc_feature (1)..(241): tr|A0A3A3GCB2|A0A3A3GCB2_PANTH 7-cyano-7-deazaguanine s ynthase OS=Paenibacillus thiaminolyticus OX=49283 GN=qu eC PE=3 SV=1
MNRKEAAADRAGGRADQGKPQEKAVVVFSGGQDSTTCLFWALERFDAIETVTFDYGQRHRSELEHAKRIAAKLQVPNRVLDMTLLNQLAPNALTRADIDIAQEEGELPNTFVEGRNLLFFSFAAIYAKQIGARHIVTGVCETDFSGYPDCRDVFVKSLNVTLNLAMDYGFVLHTPLMWLNKAETWRLADELGAFDFVRTETVTCYNGLPGDGCGECPSCKLRRDGLESYLAERAQKAGAGA

SEQ ID NO: 40447 - protein, 227 aa, Paenibacillus tianmuensis
  misc_feature (1)..(227): tr|A0A1G4RQC0|A0A1G4RQC0_9BACL 7-cyano-7-deazaguanine s ynthase OS=Paenibacillus tianmuensis OX=624147 GN=queC PE=3 SV=1
MKKAVVILSGGLDSTTCMGMAQDAGYDVYPITFDYGQRQRREIENARQVAEFYNTANRHKVIALGFLKEFGGSALTDESIDVPPAGESGAVDSDIPVTYVPGRNLLFLSIATSYAETIGAEAIYIGVNALDYSGYPDCRPEFIRKVEEVMALATRVGVEGGPIRIETPLIHWTKAEIIREGMRLGVPYHLTTSCYNGQEEACGVCDSCRLRLKGFDEAGTADPIVYQ

SEQ ID NO: 40448 - protein, 220 aa, Paenibacillus typhae
  misc_feature (1)..(220): tr|A0A1G8GW32|A0A1G8GW32_9BACL 7-cyano-7-deazaguanine s ynthase OS=Paenibacillus typhae OX=1174501 GN=queC PE=3 SV=1
MNKKALVVFSGGQDSTTCLVWALKHFEEVQVVTFNYNQRHAAEIEVAKEIAANFGVKQHILDLGLLNQLAPNALTRDDIAIEAGEDGELPSTFVDGRNLLFLSFAAIMAKQLGYANIITGVCQTDFSGYPDCRDVFVKSLNVTLNLSMDYEFVIHTPLMWLDKKETWKLADELGQFDYVREHTLTCYNGIIGSGCGTCPACLLRQRGLEQYVAERKQGDL

SEQ ID NO: 40449 - protein, 217 aa, Paenibacillus tyrfis
  misc_feature (1)..(217): tr|A0A081NU69|A0A081NU69_9BACL 7-cyano-7-deazaguanine s ynthase OS=Paenibacillus tyrfis OX=1501230 GN=queC PE=3 SV=1
MTKNNNKAVVVFSGGQDSTTCLFWAKQHFSEIEAVTFNYGQRHSAELECAARITKDLSIKHHVQDMSLLNQLAPNALTRSDIDIASEEGKLPTTFVDGRNLLFLSFAAILAKQIGAKHIITGVCETDFSGYPDCRDVFIKSLNVTLNLSMDYQFVIETPLMWLNKAQAWKLADELGAFEYIRNNTLTCYNGILADGCGECPACILRKRGLEEYLLSK

SEQ ID NO: 40450 - protein, 227 aa, Paenibacillus tyrfis; identical to SEQ ID NO: 40378
  misc_feature (1)..(227): tr|A0A081P6G1|A0A081P6G1_9BACL 7-cyano-7-deazaguanine s ynthase OS=Paenibacillus tyrfis OX=1501230 GN=queC PE=3 SV=1

SEQ ID NO: 40451 - protein, 225 aa, Paenibacillus uliginis
  misc_feature (1)..(225): tr|A0A1X7HMR2|A0A1X7HMR2_9BACL 7-cyano-7-deazaguanine s ynthase OS=Paenibacillus uliginis N3/975 OX=1313296 GN= queC PE=3 SV=1
MLKNEKAVVVFSGGQDSTTCLFWAKEQFAEVETVTFDYGQRHKYEIQCAAQIAEEQGVKQTVLDMSLLNQLAPNALTRSDMEIKEGDDGVPNTFVDGRNLLFLSFAAVLAKQVGARHLVTGVCETDFSGYPDCRDNFIKSLNVTLNLAMDYPFVIHTPLMWLDKADTWELADQMNALDYVRQNTLTCYNGIKGDGCGECPACQLRKAGLDKYLSRRTLQIKGGVQ

SEQ ID NO: 40452 - protein, 225 aa, Paenibacillus vortex
  misc_feature (1)..(225): tr|A0A2R9SYF2|A0A2R9SYF2_9BACL 7-cyano-7-deazaguanine s ynthase OS=Paenibacillus vortex V453 OX=715225 GN=queC PE=3 SV=1
MLKNEKAVVVFSGGQDSTTCLFWTKERFAEVETVTFDYGQRHKLEIECAAQIAKEQGVKQTVLDMSLLNQLAPNALTRSDIEIAEGDGLPTTFVDGRNLLFLSFAAVLAKGAGAKHLITGVCETDFSGYPDCRDSFIKSLNVTLNLAMDYPFVIHTPLMWLDKSETWELADQMNALEYVRDHTLTCYNGIKGDGCGECPACKLRKAGLDNYMLRRNRVSEGGRLV

SEQ ID NO: 40453 - protein, 223 aa, Paenibacillus vortex
  misc_feature (1)..(223): tr|A0A2R9SZ60|A0A2R9SZ60_9BACL 7-cyano-7-deazaguanine s ynthase OS=Paenibacillus vortex V453 OX=715225 GN=queC PE=3 SV=1
MDKKNKKAVVVFSGGQDSTTCLFWAMKQFDEVEAVTFNYGQRHALEIECANQIADELGVKWTLLDMSLLGQLTQNALTRDDVEIVHNDGEFPSTFVEGRNHLFLSFAAVFAKGVGARHIVTGVCETDFSGYPDCRDDFVKSLNVTLNLAMDHNFIIHTPLMWINKAETWEMADQLGAFEFVRKKTLTCYNGVIGDGCGNCPACQLRKAGLDTFLQTRNLEQMS

SEQ ID NO: 40454 - protein, 232 aa, Paenibacillus whitsoniae
  misc_feature (1)..(232): tr|A0A430J6P1|A0A430J6P1_9BACL 7-cyano-7-deazaguanine s ynthase OS=Paenibacillus whitsoniae OX=2496558 GN=queC PE=3 SV=1
MSAQVSVKRAVVILSGGLDSTTCMGIAKEAGYELYPISFDYGQRHKIEIENAKQVAAHYGVAQRHKIIKLDFLRDFGGSALTDDSIDVPNVTESEQTDEIPVTYVPGRNLLFLSIATSYAEVTGSSAIYIGVNALDYSGYPDCRPEFIHKVEEVIELATKVGVEGKGIKIETPLIDWTKARIIEEGLKIGVPYELTTSCYNGKAEACGVCDSCRLRLKGFEEAGAKDPIPYL

SEQ ID NO: 40455 - protein, 220 aa, Paenibacillus wynnii
  misc_feature (1)..(220): tr|A0A098M6N7|A0A098M6N7_9BACL 7-cyano-7-deazaguanine s ynthase OS=Paenibacillus wynnii OX=268407 GN=queC PE=3 SV=1
MNKKALVVFSGGQDSTTCLIWAMQQFEEVQVVTFNYNQRHAAEIEVATAIANKFNVKQHILDLGLLNQLAPNALTRNDIEIAAGEGEELPSTFVDGRNLLFLSFAAIMAKQFDYNHIVTGVCQTDFSGYPDCRDVFVKSLNVTLNLSMDYEFVIHTPLMWLDKKETWQMADQLGYFDYVREHTLTCYNGIIGSGCGTCPACELRSRGLQQYEAERKKVDS

SEQ ID NO: 40456 - protein, 241 aa, Paenibacillus xerothermodurans
  misc_feature (1)..(241): tr|A0A2W1P097|A0A2W1P097_9BACL 7-cyano-7-deazaguanine s ynthase OS=Paenibacillus xerothermodurans OX=1977292 GN =queC PE=3 SV=1
MSNHNQGGRKAVIILSGGLDSTTCMGIAQAKGYKLYPITFDYGQRHRIELDNARAVAEHYGAQGRHKVIQLGFLKEFGGSALTDDSIAVPDTTKAAEHTAQPESDIPVTYVPGRNLLFLSIATSYAEAIGAEAIFIGVNALDYSGYPDCRPEFIRKVEEVMAVATRVGVEGGPIRIETPLTEWTKAEIIRQGNMLQVPYHLTTSCYNGQAEACGVCDSCRLRLKGFAEAGSADPIAYRARH

SEQ ID NO: 40457 - protein, 226 aa, Paenibacillus xylanexedens
  misc_feature (1)..(226): tr|A0A1L5LXP4|A0A1L5LXP4_9BACL 7-cyano-7-deazaguanine s ynthase OS=Paenibacillus xylanexedens OX=528191 GN=queC PE=3 SV=1
MNEEKAVVVFSGGQDSTTCLFWAKQQFAEVEVVTFDYGQRHKLEIECAAEIARDLGVQQTVLDMSLLNQLAPNALTRTDVEITHEEGELPSTFVDGRNLLFLSFAAIMAKQKGARHLVTGVCETDFSGYPDCRDSFVKSMNVTLNLSMDYPFVIHTPLMWLDKAQTWKMADDLGAFDYVRERTLTCYNGVIGDGCGECPACKLRKAGLDRYVQQRSAAESAGADVR

SEQ ID NO: 40458 - protein, 226 aa, Paenibacillus xylanexedens
  misc_feature (1)..(226): tr|A0A3N6CIZ9|A0A3N6CIZ9_9BACL 7-cyano-7-deazaguanine s ynthase OS=Paenibacillus xylanexedens OX=528191 GN=queC PE=3 SV=1
MLNEEKAVVVFSGGQDSTTCLFWAKQQFAEVEVVTFDYGQRHKLEIECAAEIARDLGVQQTVLDMSLLNQLAPNALTRTDVEITHEEGELPSTFVDGRNLLFLSFAAIMAKQKGARHLVTGVCETDFSGYPDCRDSFVKSMNVTLNLSMDYPFVIHTPLMWLDKAQTWKMADDLGAFDYVRERTLTCYNGVIGDGCGECPACKLRKAGLDRYVQQRDAGSTGVDVR

SEQ ID NO: 40459 - protein, 222 aa, Paenibacillus yonginensis
  misc_feature (1)..(222): tr|A0A1B1MWM6|A0A1B1MWM6_9BACL 7-cyano-7-deazaguanine s ynthase OS=Paenibacillus yonginensis OX=1462996 GN=queC PE=3 SV=1
MLKDEKAVVVFSGGQDSTTCLYWAIQQFREVETVTFMYGQRHSLEIECAKSISKELGIKNTVLDMSLLGQLTENALTRSDIDIAQEEGSLPNTFVDGRNHLFLSFAAVMAKQVGARHLVTGVCETDFSGYPDCRDTFVKSLNVTLNLAMDYQFVIHTPLMWLDKAQTWQLADDLNAFDFVRERTLTCYNGVIGDGCGECPACKLRKAGLDRYLSARAEGVRL

SEQ ID NO: 40460 - protein, 233 aa, Paenimaribius caenipelagi
  misc_feature (1)..(233): tr|A0A547PUM8|A0A547PUM8_9RHOB 7-cyano-7-deazaguanine s ynthase OS=Paenimaribius caenipelagi OX=2489174 GN=queC PE=3 SV=1
MKTLVICSGGLDSVSLAHIVSAEHQLTRLVSFDYGQRHRKELDYAASAAVRLGVPHHLIDMRTIGAALTGSALTDDIDVPDGHYAEDTMRITVVPNRNAIMLAIGFGIAAANGDDAVATAVHGGDHFIYPDCRPEFTTAFDAMQRQALDGYADVQLYTPFVTRSKADIVADGAKHGTPFAETWSCYKGGAVHCGRCGTCVERREAFHLAGVEDPTSYADPDYWTTAIEAKEAS

SEQ ID NO: 40461 - protein, 222 aa, Paenisporosarcina antarctica
  misc_feature (1)..(222): tr|A0A4V1AMP8|A0A4V1AMP8_9BACL 7-cyano-7-deazaguanine s ynthase OS=Paenisporosarcina antarctica OX=417367 GN=qu eC PE=3 SV=1
MKQDKAVVVFSGGQDSTTCLLWALTQYQEVYTVTFDYGQRHIEEITCAEEIAKELNVPFKVLDMKLINQLAANALTRSDIAVTEGTSEELPSTFVPGRNHLFLSFAAVYAQSIGARHIITGVCETDFSGYPDCRDVFVKALNVSINLAMDSSLEFQTPLMWLNKAETWKMADDLDALDFVRTRTLTCYEGIRGDGCGKCPSCVLRQNGLTTYLEEKQGSGAK

SEQ ID NO: 40462 - protein, 223 aa, Paenisporosarcina quisquiliarum
  misc_feature (1)..(223): tr|A0A1H8B0Z5|A0A1H8B0Z5_9BACL 7-cyano-7-deazaguanine s ynthase OS=Paenisporosarcina quisquiliarum OX=365346 GN =queC PE=3 SV=1
MKQEKAIIVFSGGQDSTTCLFWAKERFRAIEAVTFDYGQRHSLEIECAKEIAKELGVKHHILDMSLLNQLAPNALTRDDIKVEDGGKGELPSTFVPGRNLLFLSFAGVLASQVGAKHIVTGVCETDFSGYPDCRDIFVKSLNVTLNLSMDSTFVIETPLMWLNKAQTWELADQLGALEFVQKKTLTCYNGVIADGCGKCPACKLRNKGLNEYLSSKSTKGVIA

SEQ ID NO: 40463 - protein, 222 aa, Paenisporosarcina sp.
  misc_feature (1)..(222): tr|A0A2T6KGD9|A0A2T6KGD9_9BACL 7-cyano-7-deazaguanine s ynthase OS=Paenisporosarcina sp. OV554 OX=2135694 GN=qu eC PE=3 SV=1
MKKGKAVVVFSGGQDSTTCLLWALTKYEEVFTVTFDYGQRHIEEITCAEEIAHELNVPFKVLDMTLINQLSANALTRSDIAVTDATDGNLPSTFVPGRNHLFLSFAAVYAQSIGARDIITGVCETDFSGYPDCRDVFVKALNVSINLAMDTSLQFQTPLMWLDKAQTWKLADDLGALEFVRTRTLTCYEGIRGDGCGTCPSCVLRQKGLLTYLEQKQGSESK

SEQ ID NO: 40464 - protein, 218 aa, Paenisporosarcina sp.
  misc_feature (1)..(218): tr|A0A385YS13|A0A385YS13_9BACL 7-cyano-7-deazaguanine s ynthase OS=Paenisporosarcina sp. K2R23-3 OX=2320858 GN= queC PE=3 SV=1
MKNKKAVVVFSGGQDSTTCLLWAVQQFDEVHAVTFDYGQRHKEEIRCATEIAQTLHIPHKILDMRLINQLTENALTRDDIPLTEGDGETLPSSFVPGRNQLFLSFAAVYAHSIGADHLITGVSQTDYSGYPDCRDTFIKSLNVSLNLAMEKDFVIHTPLMWLDKAATWKLADDLGGLDFVRSKTLTCYNGIRADGCGECPACVLRKNGLDTYLEGARA

SEQ ID NO: 40465 - protein, 456 aa, Palleronia abyssalis
  misc_feature (1)..(456): tr|A0A2R8BRI9|A0A2R8BRI9_9RHOB 7-cyano-7-deazaguanine s ynthase OS=Palleronia abyssalis OX=1501240 GN=queC PE=4 SV=1
MIIDAPHPSISRKLSVEIVESDAKRASADHTLVLGCDIRFSTRNLESYANANWEPVVFDAMVVAAAVEYCDRSLRRSVREWARDYRLRLPVHEPDRWNTPEVLDALHDVLGFLTGDRWHFTFVARVHAEPSPRQQSFDLPPDAKATLAFSDGMDSRAVAGLVGANARQALVRVRLGTKRCDRPRRGQPFTGIPYKLGKSVPNPEPSARNRGFRFALVSGLASYICRAEQIIIPESGQGALGPVLVPVAHAYPDYRNHPAFLRRMERFLGALLGRSVEYTFPRIWHTKGQTLAAYLGLGIDHGEWKRTRSCWKGPQWSSVDGEYRQCGACAACMLRRLSVHSAGQMEADDTYIAADLSAPELEASVPATFRKANRSFREYAIAGALHLDHLADLTKEDGRPVLRRQALVLAEALGMSAIQTEHNLKAMIAEHAGEWRAFVASLGDGSFLHNWVRGSR

SEQ ID NO: 40466 - protein, 402 aa, Palleronia marisminoris
  misc_feature (1)..(402): tr|A0A1Y5RZ17|A0A1Y5RZ17_9RHOB 7-cyano-7-deazaguanine s ynthase OS=Palleronia marisminoris OX=315423 GN=queC PE =4 SV=1
MGEAIVRVDGSQTPIIVRINGQRPTFNLGTDALQAKALRELDPVLLDLMEIASTVFAADGAIARGGATRPDMGAGWYRQFDFEIPVRNPELWQRPDVTAALCEVVETLTEDSVRFRFTQSNADPILQPYLDLDPNGASFDADEVVLFSGGLDSFAGALELLATTSSRVILVTHRSAQKAIPRQVELGQYLAKRFPGRVLHVNILARRTDQEARDSTQRSRTLLFAAFGQAVAHAFGAGRVSFFENGIVSHNLPLSPQIVGTMATRTTHPLTLRTINRLMQVVLSEPVGIENKYQWLTKSEVVSRIEQYGAAKQIVRAVSCTSIREQNSLHTHCGACTQCFDRRFAILHAGLADYDPEEIYGTDILFGERTTHRAITMAVEWTSHALRLGDLDEQAFMTAFGH

SEQ ID NO: 40467 - protein, 236 aa, Paludibacter jiangxiensis
  misc_feature (1)..(236): tr|A0A170YB10|A0A170YB10_9BACT 7-cyano-7-deazaguanine s ynthase OS=Paludibacter jiangxiensis OX=681398 GN=queC PE=3 SV=1
MQPKPAPAYFHRPFIFYRNILFTMNALIVYSGGLDSSTLLHQYKDDIRLAVSFHYGSKHNDREISYARQNCEELGIRHIVINLGFMNEYFRSDLLQSGGDIPEGHYEADNMRKTIVPFRNGIMLSIAVGLAESNDLDAVLIGNHFGDHAIYPDCRRSFIDAFTAAAKAGTEVGIQILSPYCDISKREIALIGQELGIDYNKTYSCYKGGEKHCGKCGTCVERKEALEGFDPTEYEA

SEQ ID NO: 40468 - protein, 214 aa, Paludibacter propionicigenes
  misc_feature (1)..(214): tr|E4T8A6|E4T8A6_PALPW 7-cyano-7-deazaguanine synthase OS=Paludibacter propionicigenes (strain DSM 17365 / JCM 13257 / WB4) OX=694427 GN=queC PE=3 SV=1
MKDIVILYSGGMDSSVALYEHADRIRRALTFNYGSKHNLREMEYAARNCKRLGIEHHVIELDMNKMGFVSDLLQSGGDIPNGHYEDQNMIKTVVPFRNGIMLSIAAGIAESIGCDKLMISNHAGDHAIYPDCREEFIQTMNKAISLGTYNHCEILAPYTNLTKREIALIGKEIGVPFEDTYSCYNGLETHCGTCGTCTERKEGLEGFDPTVYLH

SEQ ID NO: 40469 - protein, 230 aa, Paludibacterium purpuratum
  misc_feature (1)..(230): tr|A0A4R7AZA1|A0A4R7AZA1_9NEIS 7-cyano-7-deazaguanine s ynthase OS=Paludibacterium purpuratum OX=1144873 GN=que C PE=3 SV=1
MEQNNEKALVVLSGGQDSTTCLFWAIRRFGLANVSAVTFDYGQRHRIELDSARKVAAIAGVEQIELPIDTFGAIGGNALTDAAIAPQTGDTPDSAALPNTFVPGRNLIFLTFATALAYTRGIRHIVTGVAQTDYSGYPDCRENTLKALELAIRLGMDAPLSLHAPLMYLTKAQTVHLAQEVGAMEAMAWSHTCYNGAVPPCGQCDSCRLRAKGFADAGIADPLVVRTARS

SEQ ID NO: 40470 - protein, 225 aa, Paludifilum halophilum
  misc_feature (1)..(225): tr|A0A235B589|A0A235B589_9BACL 7-cyano-7-deazaguanine s ynthase OS=Paludifilum halophilum OX=1642702 GN=queC PE =3 SV=1
MAEKRAVVVLSGGLDSTTCMGIAREQGYELYPLTFHYGQRHSREVEQAKQVAAFYRIREHRIVDIQFLNQIGGSALTDSSMEVPTDGAEETIPDTYVPARNMIFLSLAAAYAEVIGAEAVYIGVSAVDYSGYPDCRPSFIESMTRTVNLATKAGATGSELAIETPLIRWSKAETIREGLRLGVPYHLTTSCYLGGEIACGHCDSCRLRLKGFAEAGAEDPIVYAE

SEQ ID NO: 40471 - protein, 234 aa, Paludisphaera borealis
  misc_feature (1)..(234): tr|A0A1U7CV61|A0A1U7CV61_9BACT 7-cyano-7-deazaguanine s ynthase OS=Paludisphaera borealis OX=1387353 GN=queC_2 PE=3 SV=1
MIEGHQNRPAVVLLSGGLDSATTLAEAKAAGFTPYALSVAYGQRHAVEIEAARRVARSMGVARHVELTIDLRAFGGSALTAEIEVPKDRSADAMAEGIPITYVPARNTVFLSLALAWAETLGAYDLFVGVNCVDYSGYPDCRPEFLQGFEYLADLATRAGVEGRGRYRVHAPLLTMTKNEIIRRGIELGVDYGLTHSCYDPTPEGLSCGRCDSCRLRLAAFESLGLTDPIAYAG

SEQ ID NO: 40472 - protein, 217 aa, Paludisphaera borealis
  misc_feature (1)..(217): tr|A0A1U7CKX5|A0A1U7CKX5_9BACT 7-cyano-7-deazaguanine s ynthase OS=Paludisphaera borealis OX=1387353 GN=queC_1 PE=3 SV=1
MIAVLISGGIESAVLCGEFVRSRRRVQPIYIRCGLDWEDVELAAARAYLKAIACDRLEPLVVLDEPIRDVYGPHWSTDGGVDVPGAETPDEAVYLPGRNLLLTVKSALWCRLRNVHELALGSLGSNPFSDSTPEFFQGLETVLGQALSGSPRLIRPFSRLHKSDVVARGDGLPLHLTFSCIRPDAGLHCGVCNKCAERRDGFRDANRPDRTRYADEQ

SEQ ID NO: 40473 - protein, 230 aa, Panacagrimonas perspica
  misc_feature (1)..(230): tr|A0A4S3K8D0|A0A4S3K8D0_9GAMM 7-cyano-7-deazaguanine s ynthase OS=Panacagrimonas perspica OX=381431 GN=queC PE =3 SV=1
MSTVMSGAKPRAVVLLSGGLDSATVLAIAKTQGFDAYALSVAYGQRHLIELEAAARVATQLGASAHQVMHVDLDVVGGSALTDRNIAVPQSPSTGIPVTYVPARNTLFLSLALGWAEVLGASDLFIGVNAVDYSGYPDCRPEFIQAFERLADLATRAGVEGRGFRIHAPLQYWSKKQIVEKGTELGVDFAQTVSCYSADDEGRACGRCDSCRLRVEGFIAAGIADPTRYA

SEQ ID NO: 40474 - protein, 245 aa, Pandoraea apista
  misc_feature (1)..(245): tr|A0A427IWK7|A0A427IWK7_9BURK 7-cyano-7-deazaguanine s ynthase OS=Pandoraea apista OX=93218 GN=queC PE=3 SV=1
MIMTTSTDSALVLFSGGQDSTTCLAWALSRYARVETLGFDYGQRHGVELECRTDVLAKLRERFPQWAPRLGDDHMIDLSILGQISETSLTRDTTIAMAANNLPNTFVPGRNLLFLTIGATIAYRRGLRVLVGGMCETDFSGYPDCRDDTMKALQVALNLGMDQRFVVETPLMWIDKADTWQMAQDLGGELLVETVREDTHTCYLGERSVLHPWGYGCGECPACQLRQRGYEQWRARSNDQDRGAA

SEQ ID NO: 40475 - protein, 243 aa, Pandoraea apista
  misc_feature (1)..(243): tr|A0A0G4JER4|A0A0G4JER4_9BURK 7-cyano-7-deazaguanine s ynthase OS=Pandoraea apista OX=93218 GN=queC PE=3 SV=1
MTTSTDSALVLFSGGQDSTTCLAWALSRYARVETLGFDYGQRHGVELECRTDVLAKLRERFPQWAPRLGDDHMIDLSILGQISETSLTRDTTIAMAANNLPNTFVPGRNLLFLTIGATIAYRRGLRVLVGGMCETDFSGYPDCRDDTMKALQVALNLGMDQRFVVETPLMWIDKADTWQMAQDLGGELLVETVREDTHTCYLGERSVLHPWGYGCGECPACQLRQRGYEQWRARSNDQDRGAA

SEQ ID NO: 40476 - protein, 240 aa, Pandoraea faecigallinarum
  misc_feature (1)..(240): tr|A0A0H3WVS2|A0A0H3WVS2_9BURK 7-cyano-7-deazaguanine s ynthase OS=Pandoraea faecigallinarum OX=656179 GN=queC PE=3 SV=1
MTTSTDSALVLFSGGQDSTTCLAWALSRYARVETLGFDYGQRHSVELECRTDVLAKLRERFAQWAPRLGDDHMIDLSILGQISETSLTRETTIAMAANNLPNTFVPGRNLLFLTIGATIAYRRGLRVLVGGMCETDFSGYPDCRDDTMKALQVALNLGMDQRFIVETPLMWIDKADTWQMAQDLGGDLLVETVREDTHTCYLGERSVLHAWGYGCGECPACQLRQRGYEQWRARSDGSAA

SEQ ID NO: 40477 - protein, 245 aa, Pandoraea fibrosis
  misc_feature (1)..(245): tr|A0A0B3TRY2|A0A0B3TRY2_9BURK 7-cyano-7-deazaguanine s ynthase OS=Pandoraea fibrosis OX=1891094 GN=queC PE=3 S V=1
MIMTTSTDSALVLFSGGQDSTTCLAWALSRYARVETLGFDYGQRHSVELECRTDVLAKLRERFPQWAPRLGDDHMIDLSILGQISETSLTRETTIAMAANNLPNTFVPGRNLLFLTIGATIAYRRGLRVLVGGMCETDFSGYPDCRDDTMKALQVALNLGMDQRFIVETPLMWIDKADTWQMAQDLGGELLVETVREDTHTCYLGERSVLHPWGYGCGECPACQLRQRGYEQWRARSNDQDRGAA

SEQ ID NO: 40478 - protein, 243 aa, Pandoraea fibrosis
  misc_feature (1)..(243): tr|A0A5E4VZV9|A0A5E4VZV9_9BURK 7-cyano-7-deazaguanine s ynthase OS=Pandoraea fibrosis OX=1891094 GN=queC PE=3 S V=1
MTTSTDSALVLFSGGQDSTTCLAWALSRYARVETLGFDYGQRHSVELECRTDVLAKLRERFPQWAPRLGDDHMIDLSILGQISETSLTRETTIAMAANNLPNTFVPGRNLLFLTIGATIAYRRGLRVLVGGMCETDFSGYPDCRDDTMKALQVALNLGMDQRFIVETPLMWIDKADTWQMAQDLGGELLVETVREDTHTCYLGERSVLHPWGYGCGECPACQLRQRGYEQWRARSNDQDRGAA

SEQ ID NO: 40479 - protein, 247 aa, Pandoraea norimbergensis
  misc_feature (1)..(247): tr|A0A0U2NCU8|A0A0U2NCU8_9BURK 7-cyano-7-deazaguanine s ynthase OS=Pandoraea norimbergensis OX=93219 GN=queC PE =3 SV=1
MTTSTDSALVLFSGGQDSTTCLAWALSRYARVETLGFDYGQRHSVELECRTDVLAKMRQRFPHWAPRMGDDHMIDLSILGQISETSLTRETTIAMAANNLPNTFVPGRNILFLTIGATIAYRRGLRVLVGGMCETDFSGYPDCRDDTMKALQVALNLGMDQRFIVETPLMWIDKADTWQMAQDLGGNLLVETVREDTHTCYLGERSVLHPWGYGCGECPACQLRQRGYEQWRARGNDADNHQTHGAA

SEQ ID NO: 40480 - protein, 246 aa, Pandoraea oxalativorans
  misc_feature (1)..(246): tr|A0A0E3Y9E0|A0A0E3Y9E0_9BURK 7-cyano-7-deazaguanine s ynthase OS=Pandoraea oxalativorans OX=573737 GN=queC PE =3 SV=1
MIMTTSTDSALVLFSGGQDSTTCLAWALSRYARVETLGFDYGQRHSVELECRTDVLAKLRERFPQWAPRLGDDHMIDLSILGQISETSLTRETTIAMAANNLPNTFVPGRNLLFLTIGATIAYRRGLRVLVGGMCETDFSGYPDCRDDTMKALQVALNLGMDQRFIVETPLMWIDKADTWQMAQDLGGDVLVETVREDTHTCYLGERSVLHPWGYGCGECPACQLRQRGYEQWRARDNPNQGRQAV

SEQ ID NO: 40481 - protein, 243 aa, Pandoraea pnomenusa
  misc_feature (1)..(243): tr|A0A378YPA1|A0A378YPA1_9BURK 7-cyano-7-deazaguanine s ynthase OS=Pandoraea pnomenusa OX=93220 GN=queC PE=3 SV =1
MTTSTDSALVLFSGGQDSTTCLAWALSRYARVETLGFDYGQRHSVELECRTDVLAKLRQRFPDWSPRLGDDHMIDLSILGQISETSLTRETTIAMAADNLPNTFVPGRNLLFMTIGATIAYRRGLRVLVGGMCETDFSGYPDCRDDTMKALQVALNLGMDRRFIVETPLMWIDKADTWQMAQDLGGQALVETVREDTHTCYLGERSVLHPWGYGCGECPACQLRQRGYEQWRARGHDQDRGAA

SEQ ID NO: 40482 - protein, 245 aa, Pandoraea pnomenusa
  misc_feature (1)..(245): tr|A0A514AS70|A0A514AS70_9BURK 7-cyano-7-deazaguanine s ynthase OS=Pandoraea pnomenusa OX=93220 GN=queC PE=3 SV =1
MIMTTSTDSALVLFSGGQDSTTCLAWALSRYARVETLGFDYGQRHSVELECRTDVLAKLRQRFPDWSPRLGDDHMIDLSILGQISETSLTRETTIAMAADNLPNTFVPGRNLLFMTIGATIAYRRGLRVLVGGMCETDFSGYPDCRDDTMKALQVALNLGMDRRFIVETPLMWIDKADTWQMAQDLGGQALVETVREDTHTCYLGERSVLHPWGYGCGECPACQLRQRGYEQWRARGHDQDRGAA

SEQ ID NO: 40483 - protein, 243 aa, Pandoraea pulmonicola
  misc_feature (1)..(243): tr|A0A378Z5L3|A0A378Z5L3_9BURK 7-cyano-7-deazaguanine s ynthase OS=Pandoraea pulmonicola OX=93221 GN=queC PE=3 SV=1
MTTSTDSALVLFSGGQDSTTCLAWALSRYARVETLGFDYGQRHSVELECRTDVLAKLRERFPQWAPRLGDDHMIDLSILGQISETSLTRETTIAMAANNLPNTFVPGRNLLFLTIGATIAYRRGLRVLVGGMCETDFSGYPDCRDDTMKALQVALNLGMDQRFIVETPLMWIDKADTWQMAQDLGGDKLVETVREDTHTCYLGERSVLHPWGYGCGECPACQLRQRGYEQWRARTGDQDRGAA

SEQ ID NO: 40484 - protein, 245 aa, Pandoraea sp.
  misc_feature (1)..(245): tr|A0A1Q4CH28|A0A1Q4CH28_9BURK 7-cyano-7-deazaguanine s ynthase OS=Pandoraea sp. 64-18 OX=1895806 GN=queC PE=3 SV=1
MIMTTSTDSALVLFSGGQDSTTCLAWALSRYARVETLGFDYGQRHRVELECRTDVLAKLRARFAQWAPRLGDDHMIDLSILGQISETSLTRETTIAMAANHLPNTFVPGRNLLFLTIGATIAYRRGLRVLVGGMCETDFSGYPDCRDDTMKALQVALNLGMDQRFIVETPLMWIDKADTWQMAQDLGGDALVETVREDTHTCYLGERSVLHAWGYGCGECPACQLRQRGFEQWRARGHDHDRSAV

SEQ ID NO: 40485 - protein, 237 aa, Pandoraea sp.
  misc_feature (1)..(237): tr|A0A522JLD7|A0A522JLD7_9BURK 7-cyano-7-deazaguanine s ynthase OS=Pandoraea sp. OX=1883445 GN=queC PE=3 SV=1
MTISEDAALVLFSGGQDSTTCLAWALARYARVETLGFDYGQRHRVELDCRTDVLARLRAEFPAWTPRLGEDHMIDLSVLGQISDTALTREVSIAMSADHLPNTFVPGRNLLFMTIGATIAYRRGLRVLVGGMCETDFSGYPDCRDDTMKALQVALNLGMDRRFIVETPLMWIDKTQTWRLAHSLGGAPLVELVREATHTCYLGERGELHAWGYGCGECPACELRRRGYEGYIAQGGQ

SEQ ID NO: 40486 - protein, 246 aa, Pandoraea sputorum
  misc_feature (1)..(246): tr|A0A239S689|A0A239S689_9BURK 7-cyano-7-deazaguanine s ynthase OS=Pandoraea sputorum OX=93222 GN=queC_2 PE=3 S V=1
MIMTTSTDSALVLFSGGQDSTTCLAWALSRYARVETLGFDYGQRHSVELECRTDVLAKLRERFPQWAPRLGDDHMIDLSILGQISETSLTRETTIAMAANNLPNTFVPGRNLLFLTIGATIAYRRGLRVLVGGMCETDFSGYPDCRDDTMKALQVALNLGMDQRFIVETPLMWIDKADTWQMAQDLGGDVLVETVREDTHTCYLGERSVLHPWGYGCGECPACQLRQRGYEQWRARDNRNQGRQAV

SEQ ID NO: 40487 - protein, 206 aa, Pandoraea sputorum
  misc_feature (1)..(206): tr|A0A239S888|A0A239S888_9BURK 7-cyano-7-deazaguanine s ynthase OS=Pandoraea sputorum OX=93222 GN=queC_1 PE=3 S V=1
MKEVLLLASGGLDSTTVAYQLASERVDVVPMFFDYGQHCAEVEWNRVNEVLPASMRRPERNDISDLFRGSQSRLIREADLWNEEIKDDDLYIPYRTMLFFAAAAARAQTIGILDVYTGFINSNHAKEIDCTTAFMNSLDGLTSSIGSVRFHSPFRYSSKADVARAALQLGVPIGRTYSCQASGQFPCGACPNCVERLNALKDAGLV

SEQ ID NO: 40488 - protein, 262 aa, Pandoraea terrae
  misc_feature (1)..(262): tr|A0A5E4TB18|A0A5E4TB18_9BURK 7-cyano-7-deazaguanine s ynthase OS=Pandoraea terrae OX=1537710 GN=queC PE=3 SV= 1
MTPATDTALVLFSGGQDSTTCLAWALSRYSRVETLGFDYGQRHRIELECRTDVLAKLRERFGQWRDRLGEDHMVDLSILGQISDTALTREVSIAMEADRLPNTFVPGRNLLFMTIGATIAYRRGLRVLVGGMCETDFSGYPDCRDDTMKALQVALNLGMDSRFVVETPLMWIDKANTWAMAQDLGGDALVELIREDTHTCYLGERSVLHAWGYGCGECPACQLRRRGFEAWRAGTTVAEFMASPALAGKDADDNAGKSGKAK

SEQ ID NO: 40489 - protein, 239 aa, Pandoraea thiooxydans
  misc_feature (1)..(239): tr|A0A0G3EXU9|A0A0G3EXU9_9BURK 7-cyano-7-deazaguanine s ynthase OS=Pandoraea thiooxydans OX=445709 GN=queC PE=3 SV=1
MIMTISEDTALVLFSGGQDSTTCLAWALARYARVETLGFDYGQRHRVELDCRTDVLARLRAEFPAWSPRLGEDHMIDLSVLGQISDTALTREVSIAMSADHLPNTFVPGRNLLFMTIGATIAYRRGLRVLVGGMCETDFSGYPDCRDDTMKALQVALNLGMDRRFIVETPLMWIDKTQTWQLAHSLGGAALVELVREATHTCYLGERGELHAWGYGCGECPACELRRRGYEGYRAQGGQ

SEQ ID NO: 40490 - protein, 233 aa, Pandoraea thiooxydans
  misc_feature (1)..(233): tr|A0A0G3ERN8|A0A0G3ERN8_9BURK 7-cyano-7-deazaguanine s ynthase OS=Pandoraea thiooxydans OX=445709 GN=queC PE=3 SV=1
MKTRAMVLFSGGQDSTTCLAWALDRYEHVETVGFDYGQRHSVELECRPRVLSHFREQFPEWGGKLGDDHMLDLSILGQISDTALTQGKSIEMEESGLPNTFVPGRNLLFFTLAAAIAYRRGLEVLVGGMCETDYSGYPDCRDSTLKALQVAIALGMDQPLIIETPLMWLDKGDTWRMAEHLGGEVLVELIRTETHTCYVGNRTAQHEWGYGCGECPACELRRKGFKSFREVAV

SEQ ID NO: 40491 - protein, 251 aa, Pandoraea vervacti
  misc_feature (1)..(251): tr|A0A1J0LYU0|A0A1J0LYU0_9BURK 7-cyano-7-deazaguanine s ynthase OS=Pandoraea vervacti OX=656178 GN=queC PE=3 SV =1
MIMTTSTDSALVLFSGGQDSTTCLAWALSRYARVETLGFDYGQRHSVELECRTDVLAKLRERFAQWAPRLGDDHMIDLSILGQISETSLTRETTIAMAANQLPNTFVPGRNLLFLTIGATIAYRRGLRVLVGGMCETDFSGYPDCRDDTMKALQVALNLGMDQRFIIETPLMWIDKADTWQMAQDLGGDVLVETVREDTHTCYLGERSVLHAWGYGCGECPACQLRQRGYEQWRARGNDGAGGAGGTGGAV

SEQ ID NO: 40492 - protein, 229 aa, Pannonibacter indicus
  misc_feature (1)..(229): tr|A0A0K6HS36|A0A0K6HS36_9RHOB 7-cyano-7-deazaguanine s ynthase OS=Pannonibacter indicus OX=466044 GN=queC PE=3 SV=1
MKTLVVCSGGMDSVTLAHKVAQENELVGLVSFNYGQRHLKELDFARACADDLGVEHIVIDISGIGRQLSGSALTDDVAVPDGHYAEETMRITVVPNRNAIMLAIAFGIAAARGAEAVATAVHGGDHFIYPDCRPGFTEAFETMQRQALAGVADVRLYTPYVHTDKAAIAAEGVRLGVDYTRSWSCYKGGEIHCGRCGTCVERREAFHMAGAEDPTTYADPDFWKEACGV

SEQ ID NO: 40493 - protein, 219 aa, Pannonibacter phragmitetus
  misc_feature (1)..(219): tr|A0A0U3PD77|A0A0U3PD77_9RHOB 7-cyano-7-deazaguanine s ynthase OS=Pannonibacter phragmitetus OX=121719 GN=queC PE=3 SV=1
MDSVTLAHKVAQEHELVGLVSFNYGQRHLKELDFARACAEDLGVEHIVIDISGIGRQLSGSALTDDVAVPDGHYAEETMRITVVPNRNAIMLAIAFGIAAARGAEAVATAVHGGDHFIYPDCRPGFTEAFETMQRQALAGVADVRLYTPYVHTDKAAIAAEGVRLGVDYTRSWSCYKGGEIHCGRCGTCVERREAFHMAGAEDPTTYADPDFWKEACGV

SEQ ID NO: 40494 - protein, 229 aa, Pannonibacter phragmitetus
  misc_feature (1)..(229): tr|A0A379A1F2|A0A379A1F2_9RHOB 7-cyano-7-deazaguanine s ynthase OS=Pannonibacter phragmitetus OX=121719 GN=queC PE=3 SV=1
MKTLVVCSGGMDSVTLAHKVAQEHELIGLVSFNYGQRHLKELDFARTCADDLGVEHIVIDISGIGRQLSGSALTDDVAVPDGHYAEETMRITVVPNRNAIMLAIAFGIAAARGAEAVATAVHGGDHFIYPDCRPGFTEAFEIMQRQALAGVADVRLYTPYVHTDKAAIAAEGVRLGVDYTRSWSCYKGGETHCGRCGTCVERREAFHLAGAEDPTTYADPDFWKEACGV

SEQ ID NO: 40495 - protein, 231 aa, Pantoea alhagi
  misc_feature (1)..(231): tr|A0A1W6B199|A0A1W6B199_9GAMM 7-cyano-7-deazaguanine s ynthase OS=Pantoea alhagi OX=1891675 GN=queC PE=3 SV=1
MKRAVVVFSGGQDSTTCLIQALAQYDEVHCVTFDYGQRHRQEIDVARELAMRLGARAHKVLDVTLLNELAISSLTRDNIPVPQYDASASGLPSTFVPGRNILFLTLASIYAYQVEAEAVITGVCETDFSGYPDCRDEFVKALNHAVELGMARAVRFETPLMWLNKAETWALADYWQQLPLVRQDTLTCYNGIKGDGCGECAACHLRANGLKSYQDDPAAVMLSMQQKTGLG

SEQ ID NO: 40496 - protein, 231 aa, Pantoea allii
  misc_feature (1)..(231): tr|A0A4S3BIS9|A0A4S3BIS9_9GAMM 7-cyano-7-deazaguanine s ynthase OS=Pantoea allii OX=574096 GN=queC PE=3 SV=1
MKRAVVVFSGGQDSTTCLIQALQQYDEVHCVTFDYGQRHREEIDVARDLAIKLGARAHKVLDVTMLNELAVSSLTRDNIPVPAYNPEASGLPSTFVPGRNILFLTLASVYAYQVEAEAVITGVCETDFSGYPDCRDEFVKALNHAVSLGMAREVRFETPLMWLNKAETWALADYWQQLMLVREQTLTCYNGVKGDGCGECAACHLRANGLQVYLNDRAGVMAAMKAKNGLN

SEQ ID NO: 40497 - protein, 231 aa, Pantoea allii
  misc_feature (1)..(231): tr|A0A2V2BI07|A0A2V2BI07_9GAMM 7-cyano-7-deazaguanine s ynthase OS=Pantoea allii OX=574096 GN=queC PE=3 SV=1
MKRAVVVFSGGQDSTTCLVQALQLYDEVHCVTFDYGQRHREEIEVARELALKLGARAHKVLDVTMLNALAVSSLTRDNIPVPAYDPQATGLPSTFVPGRNILFLTLASVYAYQVEAEAVITGVCETDFSGYPDCRDEFVKALNHAVTLGMARNIRFETPLMWLDKAETWALADYWQQLTLIREETLTCYNGVKGDGCGECAACHLRAKGLKAYLQDSPGIMSAMKAKTGLE

SEQ ID NO: 40498 - protein, 231 aa, Pantoea ananas
  misc_feature (1)..(231): tr|A0A2S8A0R5|A0A2S8A0R5_PANAN 7-cyano-7-deazaguanine s ynthase OS=Pantoea ananas OX=553 GN=queC PE=3 SV=1
MKRAVVVFSGGQDSTTCLIQALEQYDEVHCVTFDYGQRHREEIEVARDLASKLGARAHKVLDVTMLNELAVSSLTRDNIPVPAYNPEASGLPSTFVPGRNILFLTLASVYAYQVEAEAVITGVCETDFSGYPDCRDEFVKALNHAVSLGMAREVRFETPLMWLNKAETWALADYWQQLSLVREQTLTCYNGVKGDGCGECAACNLRANGLQGYLNDRDSVMAAMKAKSGLS

SEQ ID NO: 40499 - protein, 231 aa, Pantoea ananas
  misc_feature (1)..(231): tr|A0A2V1ZGC5|A0A2V1ZGC5_PANAN 7-cyano-7-deazaguanine s ynthase OS=Pantoea ananas OX=553 GN=queC PE=3 SV=1
MKRAVVVFSGGQDSTTCLVQALQHYDEVHCVTFDYGQRHREEIDVARDLSLKLGARAHKVLDVTMLNELAVSSLTRDSIPVPAYDPKASGLPSTFVPGRNILFLTLASVYAYQVEAEAVITGVCETDFSGYPDCRDEFVKALNHAIGLGMARDVRFETPLMWLNKAETWALADYWQQLTLIREETLTCYNGIKGDGCGECAACHLRSNGLNAYLQDRPGIMAAMKAKTGLP

SEQ ID NO: 40500 - protein, 231 aa, Pantoea ananatis
  misc_feature (1)..(231): tr|A0A0H3L0Z2|A0A0H3L0Z2_PANAA 7-cyano-7-deazaguanine s ynthase OS=Pantoea ananatis (strain AJ13355) OX=932677 GN=ybaX PE=3 SV=1
MKRAVVVFSGGQDSTTCLVQALQHYDEVHCVTFDYGQRHREEIDVARDLSLKLGARAHKVLDVTMLNELAVSSLTRDSIPVPAYDPEASGLPSTFVPGRNILFLTLASVYAYQVEAEAVITGVCETDFSGYPDCRDEFVKALNHAIGLGMARDVRFETPLMWLNKAETWALADYWQQLTLIREETLTCYNGIKGDGCGECAACHLRSNGLNAYLQDRPGIMAAMKAKTGLP

SEQ ID NO: 40501 - protein, 255 aa, Pantoea ananatis
  misc_feature (1)..(255): tr|D4GLQ0|D4GLQ0_PANAM 7-cyano-7-deazaguanine synthase OS=Pantoea ananatis (strain LMG 20103) OX=706191 GN=yba X PE=3 SV=1
MPLQLFSRAFRYYHKHQFLLLGRAMKRAVVVFSGGQDSTTCLVQALQHYDEVHCVTFDYGQRHREEIDVARDLSLKLGARAHKVLDVTMLNELAVSSLTRDSIPVPAYDPKASGLPSTFVPGRNILFLTLASVYAYQVEAEAVITGVCETDFSGYPDCRDEFVKALNHAIGLGMARDVRFETPLMWLNKAETWALADYWQQLTLIREETLTCYNGIKGDGCGECAACHLRSNGLNAYLQDRPGIMAAMKAKTGLP

SEQ ID NO: 40502 - protein, 231 aa, Pantoea anthophila
  misc_feature (1)..(231): tr|A0A506P6L1|A0A506P6L1_9GAMM 7-cyano-7-deazaguanine s ynthase OS=Pantoea anthophila OX=470931 GN=queC PE=3 SV =1
MKRAVVVFSGGQDSTTCLVQALALYDEVHCVTFDYGQRHREEIEVARELAIRLGARAHKVLDVTMLNELAVSSLTRDSIPVPAYNPDATGLPSTFVPGRNILFLTLASVYAYQVEAEAVITGVCETDFSGYPDCRDEFVKAMNQAVTLGMARTLRFETPLMWLNKAETWALADYWQQLPLIREETLTCYNGVKGDGCGECAACHLRANGLQGYLSDRAGVMAAMKAKSGLN

SEQ ID NO: 40503 - protein, 231 aa, Pantoea coffeiphila
  misc_feature (1)..(231): tr|A0A2S9IHD4|A0A2S9IHD4_9GAMM 7-cyano-7-deazaguanine s ynthase OS=Pantoea coffeiphila OX=1465635 GN=queC PE=3 SV=1
MKRAVVVFSGGQDSTTCLIQALKQYDEVHCVTFDYGQRHRAEIDVAQRLSLSLGARAHKVLDVTLLNELAVSSLTRDNIPVPDWDPTSSGLPSTFVPGRNILFLTLAAIYAYQVEAEAVITGVCETDFSGYPDCRDEFVKALNHAVSLGMARDIRFETPLMWLNKAETWALADYWQQLKLVREQTLTCYNGIQGDGCGECAACHLRANGLQEYQHNADTVMQAMKTKTGLV

SEQ ID NO: 40504 - protein, 231 aa, Pantoea conspicua
  misc_feature (1)..(231): tr|A0A1X1BYK1|A0A1X1BYK1_9GAMM 7-cyano-7-deazaguanine s ynthase OS=Pantoea conspicua OX=472705 GN=queC PE=3 SV= 1
MKRAVVVFSGGQDSTTCLIQALQQYDEVHCVTFDYGQRHREEIDVARDLAIRLGARAHKVLDVTMLNDLAVSSLTRDNIPVPTWDPNASGLPSTFVPGRNILFLTLASVYAYQVEAEAVITGVCETDFSGYPDCRDEFVKALNHAVSLGMAREVRFETPLMWLNKAETWALADYWQQLPLVREQTLTCYNGIKGDGCGDCAACHLRANGLQGYLNDRSGVMASLKAKSGLK

SEQ ID NO: 40505 - protein, 231 aa, Pantoea cypripedii
  misc_feature (1)..(231): tr|A0A1X1ERT8|A0A1X1ERT8_PANCY 7-cyano-7-deazaguanine s ynthase OS=Pantoea cypripedii OX=55209 GN=queC PE=3 SV= 1
MKRAVVVFSGGQDSTTCLIQALQQYDEVHCVTFDYGQRHREEIEVAAELAHKLGARAHKVLDVTLLNELAVSSLTRDNIPVPAYDPEASGLPSTFVPGRNILFLTLASIYAYQVEAEAVITGVCETDFSGYPDCRDEFVKALNNAVSLGMARNIRFETPLMWLNKAETWALADYWQQLPLVRAETLTCYNGVKGDGCGECAACHLRARGLADYQANTAAIMAQMKQKSALA

SEQ ID NO: 40506 - protein, 231 aa, Pantoea deleyi
  misc_feature (1)..(231): tr|A0A506Q2Q7|A0A506Q2Q7_9GAMM 7-cyano-7-deazaguanine s ynthase OS=Pantoea deleyi OX=470932 GN=queC PE=3 SV=1
MKRAVVVFSGGQDSTTCLIQALQLYDEVHCVTFDYGQRHREEIEVAQALAITLGARAHKVLDVTMLNELAVSSLTRDNIPVPAYDPAASGLPSTFVPGRNILFLTLASVYAYQVEAEAVITGVCETDFSGYPDCRDEFVKALNQAVTLGMARTIRFETPLMWLNKAETWALADYWQQLTLVREQTLTCYNGVKGDGCGECAACHLRARGLQAYLDDRPGVMAAMKAKSGLN

SEQ ID NO: 40507 - protein, 231 aa, Pantoea dispersa
  misc_feature (1)..(231): tr|A0A437T8K1|A0A437T8K1_9GAMM 7-cyano-7-deazaguanine s ynthase OS=Pantoea dispersa OX=59814 GN=queC PE=3 SV=1
MKRAVVVFSGGQDSTTCLIQALQQYDEVHCVTFDYGQRHREEISVAAELAHQLGARAHKVLDVTLLNELAVSSLTRDNIPVPAYNPQASGLPSTFVPGRNILFLTLASIYAYQVEAEAVITGVCETDFSGYPDCRDEFVKALNNAVTLGMAREVRFETPLMWLNKAETWALADYWQQLPLVRSETLTCYNGVKGDGCGECAACHLRARGLADYQANAASVMAAMKQKSGLR

SEQ ID NO: 40508 - protein, 231 aa, Pantoea dispersa
  misc_feature (1)..(231): tr|A0A518XAK0|A0A518XAK0_9GAMM 7-cyano-7-deazaguanine s ynthase OS=Pantoea dispersa OX=59814 GN=queC PE=3 SV=1
MKRAVVVFSGGQDSTTCLVQALQHYDEVHCVTFDYGQRHREEIEVAAALAHKLGARAHKVLDVTLLNELAVSSLTRDNIPVPAYDPQASGLPSTFVPGRNILFLTLAAIYAYQVEAEAVITGVCETDFSGYPDCRDEFVKALNQAVSLGMARHIRFETPLMWLNKAETWALADYWQQLPLVRAETLTCYNGIRGDGCGECAACHLRARGLADYQANAAAVMAAMKQKSGLR

SEQ ID NO: 40509 - protein, 231 aa, Pantoea eucalypti
  misc_feature (1)..(231): tr|A0A506PSB9|A0A506PSB9_9GAMM 7-cyano-7-deazaguanine s ynthase OS=Pantoea eucalypti OX=470933 GN=queC PE=3 SV= 1
MKRAVVVFSGGQDSTTCLIQALEQYDEVHCVTFDYGQRHREEIEVARDLAIKLGARAHKVLDVTMLNELAVSSLTRDNIPVPAYNPEASGLPSTFVPGRNILFLTLASVYAYQVEAEAVITGVCETDFSGYPDCRDEFVKALNNAVSLGMAREVRFETPLMWLNKAETWALADYWQQLSLVREQTLTCYNGVKGDGCGECAACNLRANGLQGYLNDRDRVMAAMKAKSGLS

SEQ ID NO: 40510 - protein, 231 aa, Pantoea latae
  misc_feature (1)..(231): tr|A0A1V9DIK6|A0A1V9DIK6_9GAMM 7-cyano-7-deazaguanine s ynthase OS=Pantoea latae OX=1964541 GN=queC PE=3 SV=1
MKRAVVVFSGGQDSTTCLIQALQQYDEVHCVTFDYGQRHREEIDVARELALKLGARAHKVLDVTLLNELAVSSLTRDNIPVPSYDPAASGLPSTFVPGRNILFLTLASVYAYQVEAEAVITGVCETDFSGYPDCRDEFVKALNHAVTLGMAREVRFETPLMWLNKAETWALADYWQSLTLVREETLTCYNGVKGDGCGECAACHLRARGLNDYLADRDGVMAAMKSKSGLA

SEQ ID NO: 40511 - protein, 231 aa, Pantoea rodasii
  misc_feature (1)..(231): tr|A0A0B1R7D6|A0A0B1R7D6_9GAMM 7-cyano-7-deazaguanine s ynthase OS=Pantoea rodasii OX=1076549 GN=queC PE=3 SV=1
MKRAVVVFSGGQDSTTCLIQALQQYDEVHCVTFDYGQRHREEIEVAAELAHKLGARAHKVLDVTLLNELAVSSLTRDNIPVPTYDPNASGLPSTFVPGRNILFLTLASIYAYQVEAEAVITGVCETDFSGYPDCRDEFVKALNNAVSLGMARNIRFETPLMWLNKAETWALADYWQQLPLVRAETLTCYNGVKGDGCGECAACHLRARGLADYQANASAVMAAMKQKSGLR

SEQ ID NO: 40512 - protein, 231 aa, Pantoea rodasii
  misc_feature (1)..(231): tr|A0A2M9WAK7|A0A2M9WAK7_9GAMM 7-cyano-7-deazaguanine s ynthase OS=Pantoea rodasii OX=1076549 GN=queC PE=3 SV=1
MKRAVVVFSGGQDSTTCLIQALQQYDEVHCVTFDYGQRHREEIEVAAELAQKLGARAHKVLDVTLLNELAVSSLTRDNIPVPAYDPDASGLPSTFVPGRNILFLTLASIYAYQVEAESVITGVCETDFSGYPDCRDEFVKALNNSVILGMARNIRFETPLMWLNKAETWALADYWQQLPLVRAETLTCYNGVKGDGCGECAACHLRARGLADYQANTAAVMTAMKQKSGLN

SEQ ID NO: 40513 - protein, 231 aa, Pantoea rwandensis
  misc_feature (1)..(231): tr|A0A1X1CTZ4|A0A1X1CTZ4_9GAMM 7-cyano-7-deazaguanine s ynthase OS=Pantoea rwandensis OX=1076550 GN=queC PE=3 S V=1
MKRAVVVFSGGQDSTTCLIQALQQYDEVHCVTFDYGQRHREEIEVAAELSQKLGARAHKVLDVTLLNELAVSSLTRDNIPVPTYDPNASGLPSTFVPGRNILFLTLAAIYAYQVEAEAVITGVCETDFSGYPDCRDEFVKALNHAVSLGMARDVRFETPLMWLNKAETWALADYWQQLPLVRAETLTCYNGVKGDGCGECAACHLRARGLADYQANAAAVMSVMKQKSGLN

SEQ ID NO: 40514 - protein, 231 aa, Pantoea sesami; identical to SEQ ID NO: 38097
  misc_feature (1)..(231): tr|A0A1M5LNZ5|A0A1M5LNZ5_9GAMM 7-cyano-7-deazaguanine s ynthase OS=Pantoea sesami OX=1881110 GN=queC PE=3 SV=1

SEQ ID NO: 40515 - protein, 231 aa, Pantoea sp.; identical to SEQ ID NO: 40498
  misc_feature (1)..(231): tr|E0LTT5|E0LTT5_9GAMM 7-cyano-7-deazaguanine synthase OS=Pantoea sp. aB OX=517433 GN=queC PE=3 SV=1

SEQ ID NO: 40516 - protein, 231 aa, Pantoea sp.
  misc_feature (1)..(231): tr|A0A2P5IRU6|A0A2P5IRU6_9GAMM 7-cyano-7-deazaguanine s ynthase OS=Pantoea sp. PSNIH6 OX=2080494 GN=queC PE=3 S V=1
MKRAVVVFSGGQDSTTCLIQALQQYDEVHCVTFDYGQRHREEIDVARALALKLGARAHKVLDVTLLNELAVSSLTRDNIPVPSYDPAASGLPSTFVPGRNILFLTLASVYAWQVEAEAVITGVCETDFSGYPDCRDEFVKALNHAVSLGMAREVRFETPLMWLNKAETWALADYWQSLTLVREETLTCYNGVKGDGCGECAACHLRARGLNDYLADRDAVMAAMKRKSGLA

SEQ ID NO: 40517 - protein, 231 aa, Pantoea stewartii
  misc_feature (1)..(231): tr|H3R9A5|H3R9A5_PANSE 7-cyano-7-deazaguanine synthase OS=Pantoea stewartii subsp. stewartii DC283 OX=660596 G N=queC PE=3 SV=1
MKRAVVVFSGGQDSTTCLVQALQRYDEVHCVTFDYGQRHREEIDVARDLALKLGARAHKVLDVTMLNALAVSSLTRDSIPVPSYDPTATGLPSTFVPGRNILFLTLASVYAYQVEAEAVITGVCETDFSGYPDCRDEFVKALNHAVSLGMARNIRFETPLMWLNKAETWALADYWQQLTLIREDTLTCYNGIKGDGCGDCAACHLRANGLKAYQQDRAGIMAAMKAKTGLE

SEQ ID NO: 40518 - protein, 231 aa, Pantoea vagans
  misc_feature (1)..(231): tr|E1SFA3|E1SFA3_PANVC 7-cyano-7-deazaguanine synthase OS=Pantoea vagans (strain C9-1) OX=712898 GN=queC PE=3 SV=1
MKRAVVVFSGGQDSTTCLIQAVQLYDEVHCVTFDYGQRHREEIEVARDLAMILGVRAHKVLDVTMLNELAVSSLTRDNIPVPAYNPEASGLPTTFVPGRNILFLTLASVYAYQVEAEAVITGVCETDFSGYPDCRDEFVKALNHAVSLGMAREVRFETPLMWLNKAETWALADYWQQLALVREQTLTCYNGVKGDGCGECAACHLRANGLQGYLNDRAGVMAAMKAKSGLN

SEQ ID NO: 40519 - protein, 231 aa, Pantoea vagans; identical to SEQ ID NO: 40511
  misc_feature (1)..(231): tr|A0A0U3T5U7|A0A0U3T5U7_9GAMM 7-cyano-7-deazaguanine s ynthase OS=Pantoea vagans OX=470934 GN=queC PE=3 SV=1

SEQ ID NO: 40520 - protein, 221 aa, Parabacteroides acidifaciens
  misc_feature (1)..(221): tr|A0A3D8HDA4|A0A3D8HDA4_9BACT 7-cyano-7-deazaguanine s ynthase OS=Parabacteroides acidifaciens OX=2290935 GN=q ueC PE=3 SV=1
MKHQEAALVCFSGGQDSTTCLFWAKKHFSRVEAVCFTYGQKHSLEIEVARKIAADAHVPFQVLDVSLISQLDASCSLTHTDIAMDQEKPADSYPNTFVPGRNMVFLTFAAILARSKGIFNLVTGVSEADYSGYPDCRDTFVRSLNVTLNLAMDEQFVIHTPLMNRDKSEVWELSDQLGVFDLVRTQTLTCYNGVIAEGCGHCPACKLRNEGLKKYIERKGK

SEQ ID NO: 40521 - protein, 220 aa, Parabacteroides chinchillae
  misc_feature (1)..(220): tr|A0A1H5YE97|A0A1H5YE97_9BACT 7-cyano-7-deazaguanine s ynthase OS=Parabacteroides chinchillae OX=871327 GN=que C PE=3 SV=1
MKQQEAALVCFSGGQDSTTCLFWAKKHFPRVEAVCFTYGQKHSLEIEVARKIASEASIPFHLLDVSLISQLAPNSLTDTSIPMDQDKPSDSYPNTFVPGRNMVFLTFAAIMARSKGIFNLVTGVSEADFSGYPDCRDTFIRSLNVTLNLAMDEQFVIHTPLMKRDKSDVWELSDKLGVFNLVRTQTLTCYNGILADGCGHCPACKLRKEGLNKYLQRKKQ

SEQ ID NO: 40522 - protein, 224 aa, Parabacteroides distasonis
  misc_feature (1)..(224): sp|A6LIS9|QUEC_PARD8 7-cyano-7-deazaguanine synthase OS =Parabacteroides distasonis (strain ATCC 8503 / DSM 207 01 / CIP 104284 / JCM 5825 / NCTC 11152) OX=435591 GN=q ueC PE=3 SV=1
MKQQDAALVCFSGGQDSTTCLFWAKKHFSRVEAVCFTYGQKHSLEIEVARKIAADADVPFQLLDVSLISQLDPNCSLTNASIEMDQEKPEDSYPNTFVPGRNMVFLTFAAILARGKGIYHLVTGVSEADYSGYPDCRDTFVRSLNVTLNLAMDEQFVIHTPLMDRDKSEVWELSDELGVFDLVRTQTLTCYNGVMAEGCGHCPACKLRKDGLEKYLKRKEENQK

SEQ ID NO: 40523 - protein, 224 aa, Parabacteroides distasonis; identical to SEQ ID NO: 40522
  misc_feature (1)..(224): tr|A0A069S7C9|A0A069S7C9_9BACT 7-cyano-7-deazaguanine s ynthase OS=Parabacteroides distasonis str. 3776 Po2 i O X=1339341 GN=queC PE=3 SV=1

SEQ ID NO: 40524 - protein, 223 aa, Parabacteroides goldsteinii
  misc_feature (1)..(223): tr|A0A0F5JFN3|A0A0F5JFN3_9BACT 7-cyano-7-deazaguanine s ynthase OS=Parabacteroides goldsteinii DSM 19448 = WAL 12034 OX=927665 GN=queC PE=3 SV=1
MKHQDAALVCFSGGQDSTTCLFWAKKHFKRVEAVCFSYGQKHSLEIDIARKIAADADVPFQLLDVSLISQLAPNSLTDTSIEMDEDKPADSYPNTFVPGRNMVFLTFAAIMARSKGIFHLVTGVSEADFSGYPDCRDTFVRSLNVTLNLAMDEQFVIHTPLMDRDKSEVWQLSDELGVFDLVHTQTLTCYNGVPADGCGHCPACKLRREGLEKYLKRKLTANK

SEQ ID NO: 40525 - protein, 233 aa, Parabacteroides goldsteinii
  misc_feature (1)..(233): tr|S0GJT8|S0GJT8_9BACT Uncharacterized protein OS=Parab acteroides goldsteinii dnLKV18 OX=1235789 GN=C803_01622 PE=4 SV=1
MQNNTYNKKVLLYSGGMDSWLIDKLWKPDIRLYIDMNTRYSKEEMKRLPDDTIIEKLDLSKWEREDKIIPLRNMYLIGIATNYGDEICLGATAGDRVLDKSPVFAELYEELLGYLYQKQHWTEKRTIRINLDYKAYTKTELLKQYIIQGGSISEAFSSSFSCYAPVDGHECWSCKPCFRKFIAFALNGYPFSEEVIERNISYIKREILPLIESGEYGRKREEEEIRQVLTLYR

SEQ ID NO: 40526 - protein, 224 aa, Parabacteroides gordonii
  misc_feature (1)..(224): tr|A0A0F5JKV8|A0A0F5JKV8_9BACT 7-cyano-7-deazaguanine s ynthase OS=Parabacteroides gordonii MS-1 = DSM 23371 OX =1203610 GN=queC PE=3 SV=1
MKHQEAALVCFSGGQDSTTCLFWAKKHFKRVEAVCFTYGQKHSLEIDIARKIAADAHVPFQLLDVSLISQLAPNSLTDTSITMDEDKPADSYPNTFVPGRNMVFLTFAAIMARSKGIFHLVTGVSEADFSGYPDCRDTFVRSLNVTLNLAMDEQFVIHTPLMDRDKSEVWQLSDELGVFDLVRTQTLTCYNGVPADGCGHCPACKLRKEGLEKYLKKKSTVDKQ

SEQ ID NO: 40527 - protein, 73 aa, Parabacteroides johnsonii
  misc_feature (1)..(73): tr|B7BEF9|B7BEF9_9BACT 7-cyano-7-deazaguanine synthase (Fragment) OS=Parabacteroides johnsonii DSM 18315 OX=53 7006 GN=PRABACTJOHN_03438 PE=3 SV=1
MKHQEAALVCFSGGQDSTTCLFWAKKHFSRVEAVCFTYGQKHSLEIEVARKIAADADVPFQLLDVSLISQLDP

SEQ ID NO: 40528 - protein, 220 aa, Parabacteroides johnsonii
  misc_feature (1)..(220): tr|K6ACA8|K6ACA8_9BACT 7-cyano-7-deazaguanine synthase OS=Parabacteroides johnsonii CL02T12C29 OX=999419 GN=qu eC PE=3 SV=1
MKHQEAALVCFSGGQDSTTCLFWAKKHFSRVEAVCFTYGQKHSLEIEVARKIAADADVPFQLLDVSLISQLDPNCSLTNTDISMDQEKPADSYPNTFVPGRNMVFLTFAAILARSKGIFHLVTGVSEADFSGYPDCRDTFVRSLNVTLNLAMDEQFVIHTPLMDRDKSEVWELSDTLGVFDLVRTQTLTCYNGIMAEGCGHCPACTLRREGLENYLKRRR

SEQ ID NO: 40529 - protein, 233 aa, Parabacteroides merdae
  misc_feature (1)..(233): tr|A0A4Q5CA08|A0A4Q5CA08_9BACT Uncharacterized protein OS=Parabacteroides merdae OX=46503 GN=EAJ15_16450 PE=4 SV=1
MQNNTYNKKVLLYSGGMDSWLIDKLWKPDIRLYIDMNTRYSKEEMKRLPDDIVIEKLDLSKWEREDKIIPLRNMYLIGIATNYGDEICLGATAGDRVLDKSPVFAELYEELLGYLYQKQHWTEKRTIRINLDYKAYTKTELLKQYIIQGGSINEAFSSSFSCYAPVDGHECWNCKPCFRKFIAFALNGYPFPREVIDMNISYIKREILPLIESGEYGRKREEEEIRQILTLYR

SEQ ID NO: 40530 - protein, 221 aa, Parabacteroides merdae
  misc_feature (1)..(221): tr|A0A351DZA5|A0A351DZA5_9BACT 7-cyano-7-deazaguanine s ynthase OS=Parabacteroides merdae OX=46503 GN=queC PE=3 SV=1
MKHKKEAALVCFSGGQDSTTCLFWAKKHFSRVEAVCFTYGQKHSLEIEVARKIAADADVPFQLLDVSLISQLDPNCSLTNTGISMDQEKPADSYPNTFVPGRNMVFLTFAAILARSKGIFNLVTGVSEADFSGYPDCRDTFVRSLNVTLNLAMDERFVIHTPLMDRDKSEVWELADELGVFDLVRTQTLTCYNGIMAEGCGHCPACKLRREGLEKYLKRRR

SEQ ID NO: 40531 - protein, 224 aa, Parabacteroides sp.; identical to SEQ ID NO: 40522
  misc_feature (1)..(224): tr|E1Z005|E1Z005_9BACT 7-cyano-7-deazaguanine synthase OS=Parabacteroides sp. 20_3 OX=469591 GN=queC PE=3 SV=1

SEQ ID NO: 40532 - protein, 236 aa, Parabacteroides sp.
  misc_feature (1)..(236): tr|C7X6I2|C7X6I2_9BACT 7-cyano-7-deazaguanine synthase OS=Parabacteroides sp. D13 OX=563193 GN=queC PE=3 SV=1
MLAKPRIKNKKDMKQQDAALVCFSGGQDSTTCLFWAKKHFSRVEAVCFTYGQKHSLEIEVARKIAADANVPFQLLDVSLISQLDPNCSLTNASIEMDQEKPEDSYPNTFVPGRNMVFLTFAAILARGKGIYHLVTGVSEADYSGYPDCRDTFVRSLNVTLNLAMDEQFVIHTPLMDRDKSEVWELSDELGVFDLVRTQTLTCYNGVMAEGCGHCPACKLRKDGLEKYLKRKEENQK

SEQ ID NO: 40533 - protein, 243 aa, Paraburkholderia aromaticivorans
  misc_feature (1)..(243): tr|A0A248VEU8|A0A248VEU8_9BURK 7-cyano-7-deazaguanine s ynthase OS=Paraburkholderia aromaticivorans OX=2026199 GN=queC PE=3 SV=1
MIRNDAKRSALVLFSGGQDSATCLAWALERYETVETLGFDYGQRHRVELECREGFRNAVARAFPAWAERLGDDHMIDLSVLGAISDTAMTREIEIEATANGLPNTFVPGRNLMFMTIAAAIAYRRGLQVLVGGMCETDFSGYPDCRDDTMKALQVALNLGMDTRLLLETPLMWLDKADTWRLAHELGGAELVELVRVETHTCYVGERAELHAWGFGCGECPACRLRKRGYEAYLAGEKVTEPV

SEQ ID NO: 40534 - protein, 243 aa, Paraburkholderia aspalathi
  misc_feature (1)..(243): tr|A0A1I7CGC9|A0A1I7CGC9_9BURK 7-cyano-7-deazaguanine s ynthase OS=Paraburkholderia aspalathi OX=1324617 GN=que C PE=3 SV=1
MIRKDAKRSALVLFSGGQDSATCLAWALERYETVETLGFDYGQRHRVELECREGFRNAVTRAFPAWADRLGEDHMIDLSVLGSISDTAMTREIEIHATANGLPNTFVPGRNLMFMTIAAAIAYRRGLQVLVGGMCETDFSGYPDCRDDTMKALQVALNLGMDTRFLLETPLMWLDKADTWRLAHELGGDELVELVRVETHTCYVGERAELHAWGFGCGECPACRLRKRGYEAYLAGEKVTEPV

SEQ ID NO: 40535 - protein, 243 aa, Paraburkholderia azotifigens
  misc_feature (1)..(243): tr|A0A5C6VWW5|A0A5C6VWW5_9BURK 7-cyano-7-deazaguanine s ynthase OS=Paraburkholderia azotifigens OX=2057004 GN=q ueC PE=3 SV=1
MTRKDAKRSALVLFSGGQDSATCLAWALDRYETVETLGFDYGQRHRVELECREGFRSAVARTFLEWGERLGDDHMIDLSVLGSISDTAMTREIEIHATSNGLPNTFVPGRNLMFMTIAAAIAYRRGLRVLVGGMCETDFSGYPDCRDDTMKALQVALNLGMDSRFVLETPLMWIDKADTWRLAHELGGDELVELIRVETHTCYLGERAELHAWGFGCGECPACRLRKRGYEAYLSGEQVTEPA

SEQ ID NO: 40536 - protein, 388 aa, Paraburkholderia bryophila
  misc_feature (1)..(388): tr|A0A329B840|A0A329B840_9BURK Queuosine biosynthesis p rotein QueC OS=Paraburkholderia bryophila OX=420952 GN= BX591_1552 PE=4 SV=1
MPLQYDSIMNDTDADQALSLGLCGHCSGLQTGRKAEYEKEADYEWLLNAMLDAVKDERKLLRKGASLVKSLPIVNRSGLGIAAGILDSITPRDPQSTYDAMVLYSGGKDSTYMLIKLAEKGLKVCAWMLDPGYQSPQTIDNAKRITDKLGVPLVIEKSDKTLTDDLFRSGFSIDGNSDIELQKGAMTYGSACWPCFSVIAVSASRFANRHRIPLCFIGTQKGQNRLNLDGAGVLSAMELPKVNDLVDKFVKPFRKAIPDHVDQLRADPDEVGFPTVLVPFYELVRKPEKEAQIAYLEGHGWILPKNTGACSSNCMINELGRAVMRSKFGFDLYQVIDANERRLGHRPDEAAYGAPDPKIVKLGAVMLGLSDTEIGELGIDVQRGNRNA

SEQ ID NO: 40537 - protein, 244 aa, Paraburkholderia bryophila
  misc_feature (1)..(244): tr|A0A329C1C0|A0A329C1C0_9BURK 7-cyano-7-deazaguanine s ynthase OS=Paraburkholderia bryophila OX=420952 GN=queC PE=3 SV=1
MIRKDAKRSALVLFSGGQDSATCLAWALERYDTVETLGFDYGQRHRVELECREGFRGAVTRAFPAWADRLGDDHMIDLSVLGSISDTAMTREIEIEATANGLPNTFVPGRNLMFMTIAAAIAYRRGLQVLVGGMCETDFSGYPDCRDDTMKALQVALNLGMDTRFLLETPLMWLDKADTWRLAHELGGDELVELVRVETHTCYVGERSELHAWGFGCGECPACRLRKRGYEAYLSGEKVTEPPV

SEQ ID NO: 40538 - protein, 243 aa, Paraburkholderia caballeronis
  misc_feature (1)..(243): tr|A0A1H7HE20|A0A1H7HE20_9BURK 7-cyano-7-deazaguanine s ynthase OS=Paraburkholderia caballeronis OX=416943 GN=q ueC PE=3 SV=1
MTRTGGKNGALVLFSGGQDSATCLAWALDRYDTVETLGFDYGQRHRVELECREGFRSAVAHAFPDWGKRLGDDHMVDLSVLGAISDTAMTREIQIETAASGLPNTFVPGRNLMFMTIAAAIAYRRGLKVLVGGMCETDFSGYPDCRDDTIKALQVALNLGMDSRFVLETPLMWLDKADTWRLAQQLGGDELVELVRVETHTCYVGERSELHPWGFGCGECPACRLRRRGYDAFLAGEQVSEPV

SEQ ID NO: 40539 - protein, 216 aa, Paraburkholderia caledonica
  misc_feature (1)..(216): tr|A0A2Z5M8M2|A0A2Z5M8M2_9BURK 7-cyano-7-deazaguanine s ynthase OS=Paraburkholderia caledonica OX=134536 GN=CUJ 87_03160 PE=3 SV=1
MVKFTHAVLLSGGLDSTVLLHQFHSQSGQKIRAINVNGGNASWLHQLHYSKANCNELGIPIEPLDLRGFQQLMAGYVPPELAGIDDFDSRCPYDGSILPVVMACAAYHCQISDTPMLLVGLTKEQSNPNTINFLKTLGNALSLFDPQARPVSIEAPFLSLTKSQVVQRGVQLGMDFSKTWSCFMGGSHHCGVCGPCVNRKDAFAAAAVADPTTYIA

SEQ ID NO: 40540 - protein, 243 aa, Paraburkholderia caledonica
  misc_feature (1)..(243): tr|A0A2Z5M740|A0A2Z5M740_9BURK 7-cyano-7-deazaguanine s ynthase OS=Paraburkholderia caledonica OX=134536 GN=que C PE=3 SV=1
MIRKDAKRSALVLFSGGQDSATCLAWALERYETVETLGFDYGQRHRVELECREGFRNAVVRTFPAWSERLGDDHMIDLSVLGAISDTAMTREIEIEATANGLPNTFVPGRNLMFMTIAAAIAYRRGLQVLVGGMCETDFSGYPDCRDDTMKALQVALNLGMDTRLLLETPLMWLDKADTWRLAHELGGDELVELVRIETHTCYVGERAELHAWGFGCGECPACRLRKRGYEAYLAGEKVTEPV

SEQ ID NO: 40541 - protein, 243 aa, Paraburkholderia caribensis
  misc_feature (1)..(243): tr|A0A0P0R6B9|A0A0P0R6B9_9BURK 7-cyano-7-deazaguanine s ynthase OS=Paraburkholderia caribensis MBA4 OX=1323664 GN=queC PE=3 SV=1
MTRKDAKSSALVLFSGGQDSATCLAWALDRYETVETLGFDYGQRHRVELECREGFRSAVARTFPEWGERLGDDHMIDLSVLGSISDTAMTREIEIHAASNGLPNTFVPGRNLMFMTIAAAIAYRRGLRVLVGGMCETDFSGYPDCRDDTMKALQVALNLGMDSRFVLETPLMWIDKADTWRLAHELGGEELVELIRVETHTCYLGERAELHAWGFGCGECPACRLRKRGYEAYLNGEQVTEPA

SEQ ID NO: 40542 - protein, 243 aa, Paraburkholderia caribensis
  misc_feature (1)..(243): tr|A0A2T3YLG9|A0A2T3YLG9_9BURK 7-cyano-7-deazaguanine s ynthase OS=Paraburkholderia caribensis OX=75105 GN=queC PE=3 SV=1
MTRKDAKSSALVLFSGGQDSATCLAWALDRYETVETLGFDYGQRHRVELECREGFRSAVARTFPEWGERLGDDHMIDLSVLGSISDTAMTREIEIHAASNGLPNTFVPGRNLMFMTIAAAIAYRRGLRVLVGGMCETDFSGYPDCRDDTMKALQVALNLGMDSRFVLETPLMWIDKADTWRLAHELGGDELVELIRVETHTCYLGERAELHAWGFGCGECPACRLRKRGYEAYLNGEQVAEPA

SEQ ID NO: 40543 - protein, 243 aa, Paraburkholderia diazotrophica
  misc_feature (1)..(243): tr|A0A1H6R1T9|A0A1H6R1T9_9BURK 7-cyano-7-deazaguanine s ynthase OS=Paraburkholderia diazotrophica OX=667676 GN= queC PE=3 SV=1
MTRKDAKSSALVLFSGGQDSATCLAWALDRYETVETLGFDYGQRHRVELECREGFRSAVARTFPDWGERLGDDHMIDLSVLGSISDTAMTRDIEIHAASNGLPNTFVPGRNLMFMTIAAAIAYRRGLRVLVGGMCETDFSGYPDCRDDTMKALQVALNLGMDSRFVLETPLMWIDKADTWRLAHTLGGDALVELIRIETHTCYLGERSELHAWGFGCGECPACRLRKRGYEAFLNGEQVTEPA

SEQ ID NO: 40544 - protein, 233 aa, Paraburkholderia diazotrophica
  misc_feature (1)..(233): tr|A0A1H6RLR7|A0A1H6RLR7_9BURK 7-cyano-7-deazaguanine s ynthase OS=Paraburkholderia diazotrophica OX=667676 GN= queC PE=3 SV=1
MKTRALVLFSGGQDSATCLAWALNRYTYVETVGFDYGQRHSVELDCRLTVLDDLRKVFPIWSERLGCDHLLDLSVLGSVSDTALTQGKAIEIEKSGLPNTFVPGRNLLFFTLAAAIAYRRDLHSLVGGMCETDYSGYPDCRDNTLKSLQVTLALGMDSPLIIETPLMWIDKADTWQMAADLGGSALVDLIRKATHTCYVGDRTQSHDWGYGCGQCPACELRANGYRTFATRNV

SEQ ID NO: 40545 - protein, 244 aa, Paraburkholderia dipogonis
  misc_feature (1)..(244): tr|A0A4Y8N8N2|A0A4Y8N8N2_9BURK 7-cyano-7-deazaguanine s ynthase OS=Paraburkholderia dipogonis OX=1211383 GN=que C PE=3 SV=1
MIRKDAKRSALVLFSGGQDSATCLAWALERYETVETLGFDYGQRHRVELECREGFRDAVARAFPAWAERLGDDHMIDLSVLGAISDTAMTREIEIEATANGLPNTFVPGRNLMFMTIAAAIAYRRGLQVLVGGMCETDFSGYPDCRDDTMKALQVALNLGMDTRVLLETPLMWLDKGDTWRLAHELGGDELVELVRVETHTCYVGERAELHAWGFGCGECPACRLRKRGYEAYLSGEKVTEAPV

SEQ ID NO: 40546 - protein, 244 aa, Paraburkholderia eburnea
  misc_feature (1)..(244): tr|A0A2S4MNY1|A0A2S4MNY1_9BURK 7-cyano-7-deazaguanine s ynthase OS=Paraburkholderia eburnea OX=1189126 GN=queC PE=3 SV=1
MTRTETRNGALVLFSGGQDSATCLAWALDRYDTVETLGFDYGQRHRVELECRDGFRAAIAREFPEWAERLGEDHMIDLSVLGSISDTAMTREIEIETAASGLPNTFVPGRNLMFMQIAAAIAYRRGLRVLVGGMCETDFSGYPDCRDDTMKALQVALNLGMDTRFLLETPLMWLDKGDTWRLAEQLGGEALVELVRVETHTCYVGERAELHAWGFGCGECPACKLRKRGYEAYLAGEQVTEAPV

SEQ ID NO: 40547 - protein, 244 aa, Paraburkholderia endofungorum
  misc_feature (1)..(244): tr|A0A2P5KD91|A0A2P5KD91_9BURK 7-cyano-7-deazaguanine s ynthase OS=Paraburkholderia endofungorum OX=417203 GN=q ueC PE=3 SV=1
MTRTDAQRGALVLFSGGQDSATCVAWALSRYDRVETIGFDYGQRHRVELECREGFRDALIRAFPQWKPTLGDDHRVDLSVLGAISDTAMTREIQIETQANGLPNTFVPGRNLMFMTIAAAVAYRRGLGVLVGGMCETDFSGYPDCRDDTMKVLQVALNLGMDQRFVLETPLMWLDKADTWRLAESIGGEALVKLIRVDTHTCYVGERAELHDWGFGCGECPACRLRARGYHAFRHGGRVDPASL

SEQ ID NO: 40548 - protein, 243 aa, Paraburkholderia fungorum
  misc_feature (1)..(243): tr|A0A2N8QLI0|A0A2N8QLI0_9BURK 7-cyano-7-deazaguanine s ynthase OS=Paraburkholderia fungorum OX=134537 GN=queC PE=3 SV=1
MIRKDAKRSALVLFSGGQDSATCLAWALERYETVETLGFDYGQRHRVELECREGFRNAVARAFPAWAERLGEDHMIDLSVLGSISDTAMTREIEIHATANGLPNTFVPGRNLMFMTIAGAIAYRRGLQVLVGGMCETDFSGYPDCRDDTMKALQVALNLGMDTRFLLETPLMWLDKADTWRLAHELGGEELVELVRVETHTCYVGERAELHAWGFGCGECPACRLRKRGYEAYLAGEKVTEPV

SEQ ID NO: 40549 - protein, 244 aa, Paraburkholderia fungorum
  misc_feature (1)..(244): tr|A0A1H0YZ88|A0A1H0YZ88_9BURK 7-cyano-7-deazaguanine s ynthase OS=Paraburkholderia fungorum OX=134537 GN=queC PE=3 SV=1
MIRNDAKRSALVLFSGGQDSATCLAWALERYETVETLGFDYGQRHRVELECREGFRQAVTRAFPAWADRLGEDHMIDLSVLGSISDTAMTREIEIEATANGLPNTFVPGRNLMFMTIAAAIAFRRGLQVLVGGMCETDFSGYPDCRDDTMKALQVALNLGMDTRFLLETPLMWLDKADTWRLAHQLGGDELVELVRVETHTCYVGERAELHSWGFGCGECPACRLRKRGYEAYLAGENVTESPL

SEQ ID NO: 40550 - protein, 243 aa, Paraburkholderia ginsengiterrae
  misc_feature (1)..(243): tr|A0A1A9NAT2|A0A1A9NAT2_9BURK 7-cyano-7-deazaguanine s ynthase OS=Paraburkholderia ginsengiterrae OX=1462993 G N=queC PE=3 SV=1
MIRNNAKRSALVLFSGGQDSATCLAWALERYETVETLGFDYGQRHRVELECREGFRHAIVRAFPAWADRLGDDHMIDLSVLGSISDTAMTREIEIEAATNGLPNTFVPGRNLMFMTIAAAIAYRRGLQVLVGGMCETDFSGYPDCRDDTMKALQVALNLGMDARFQLETPLMWLDKADTWRLAHELGGEELVELVRVETHTCYVGERSELHDWGFGCGECPACRLRKRGYEAYLAGEKVTEPV

SEQ ID NO: 40551 - protein, 243 aa, Paraburkholderia graminis
  misc_feature (1)..(243): tr|B1G3M8|B1G3M8_PARG4 7-cyano-7-deazaguanine synthase OS=Paraburkholderia graminis (strain ATCC 700544 / DSM 17151 / LMG 18924 / NCIMB 13744 / C4D1M) OX=396598 GN=q ueC PE=3 SV=1
MIRKDAKRSALVLFSGGQDSATCLAWALERYDTVETLGFDYGQRHRVELECREGFRNAVARTFPAWGERLGDDHMIDLSVLGAISETAMTREIEIEATASGLPNTFVPGRNLMFMTIAAAIAYRRGLEVLVGGMCETDFSGYPDCRDDTMKALQVALNLGMDSRFALETPLMWLDKADTWRLAHELGGDELVELVRVETHTCYVGERAELHAWGFGCGECPACRLRKRGYEAYLAGEKVTEPA

SEQ ID NO: 40552 - protein, 243 aa, Paraburkholderia hospita
  misc_feature (1)..(243): tr|A0A244DG77|A0A244DG77_9BURK 7-cyano-7-deazaguanine s ynthase OS=Paraburkholderia hospita OX=169430 GN=queC P E=3 SV=1
MTRKDAKSSALVLFSGGQDSATCLAWALDRYETVETLGFDYGQRHRVELECREGFRSAVARTFPEWGERLGDDHMIDLSVLGSISDTAMTREIEIHAASNGLPNTFVPGRNLMFMTIAAAIGYRRGLRVLVGGMCETDFSGYPDCRDDTMKALQVALNLGMDSRFVLETPLMWIDKADTWRLAHELGGEELVELIRVETHTCYLGERAELHAWGFGCGECPACRLRKRGYEAYLNGEQVTEPA

SEQ ID NO: 40553 - protein, 243 aa, Paraburkholderia hospita
  misc_feature (1)..(243): tr|A0A1H6HV07|A0A1H6HV07_9BURK 7-cyano-7-deazaguanine s ynthase OS=Paraburkholderia hospita OX=169430 GN=queC P E=3 SV=1
MTRKDAKSSALVLFSGGQDSATCLAWALDRFETVETLGFDYGQRHRVELECREGFRSAVARTFPEWGERLGDDHMIDLSVLGSISDTAMTREIEIHAASNGLPNTFVPGRNLMFMTIAAAIGYRRGLRVLVGGMCETDFSGYPDCRDDTMKALQVALNLGMDSRFVLETPLMWIDKADTWRLAHELGGEELVELIRVETHTCYLGERAELHAWGFGCGECPACRLRKRGYEAYLNGEQVTEPA

SEQ ID NO: 40554 - protein, 243 aa, Paraburkholderia insulsa
  misc_feature (1)..(243): tr|A0A2T1B4H2|A0A2T1B4H2_9BURK 7-cyano-7-deazaguanine s ynthase OS=Paraburkholderia insulsa OX=1441714 GN=queC PE=3 SV=1
MIRKDAKRSALVLFSGGQDSATCLAWALERYETVETLGFDYGQRHRVELECREGFRNAVARAFPAWAERLGEDHMIDLSVLGSISDTAMTREIEIHATANGLPNTFVPGRNLMFMTIAGAIAYRRGLQVLVGGMCETDFSGYPDCRDDTMKALQVALNLGMDTRFLLETPLMWLDKADTWRLAHELGGDELVELVRVETHTCYVGERAELHAWGFGCGECPACRLRKRGYEAYLAGEKVTEPV

SEQ ID NO: 40555 - protein, 243 aa, Paraburkholderia megapolitana
  misc_feature (1)..(243): tr|A0A1I3UUM8|A0A1I3UUM8_9BURK 7-cyano-7-deazaguanine s ynthase OS=Paraburkholderia megapolitana OX=420953 GN=q ueC PE=3 SV=1
MTRKDAKSSALVLFSGGQDSATCLAWALERYETVETLGFDYGQRHRVELECREGFRQAIVQRFPAWAARLGDDHTIDLSVLGAISDTAMTREIQIETAANGLPNTFVPGRNLMFMTIAAAIAYRRGLQVLVGGMCETDFSGYPDCRDDTMKALQVTLNLGMATRLLLETPLMWLDKADTWRLAHTLGGDELVELVRVETHTCYVGERAELHAWGFGCGECPACRLRKRGYEAYLVGEKVTAPA

SEQ ID NO: 40556 - protein, 198 aa, Paraburkholderia monticola
  misc_feature (1)..(198): tr|A0A149PXM4|A0A149PXM4_9BURK 7-cyano-7-deazaguanine s ynthase OS=Paraburkholderia monticola OX=1399968 GN=CI1 5_06275 PE=3 SV=1
MKTALLLSGGMDSVAIAYWMRPEVGITVAYGQRAAEAEVRAAAAVCEALNIEHHVIDADLSALGSGDMAGSAPAALAPVSEWWPFRNQMLITLAAMKAVSLDVNRLLIGTLRTDGMHADGTQEFIAAINALLRCQEGAISLEAPAIGLTGPELITASGVPADLLAWAHSCHVANEACGMCRGCRKHYETLGELGFEPY

SEQ ID NO: 40557 - protein, 243 aa, Paraburkholderia monticola
  misc_feature (1)..(243): tr|A0A149PY28|A0A149PY28_9BURK 7-cyano-7-deazaguanine s ynthase OS=Paraburkholderia monticola OX=1399968 GN=que C PE=3 SV=1
MIRKDAKRSALVLFSGGQDSATCLAWALDRYDTVETLGFDYGQRHRVELECREGFRQAITRAFPAWADRLGDDHMIDLSLLGAISDTAMTREIEIQATSNGLPNTFVPGRNLMFMTIAAAIAYRRGLQVLVGGMCETDFSGYPDCRDDTMKALQVALNLGMDTRFALETPLMWLDKADTWRLAHELGGDELVELVRVETHTCYVGERAELHSWGFGCGECPACRLRKRGYEAYLAGEKVTEPV

SEQ ID NO: 40558 - protein, 206 aa, Paraburkholderia phenazinium
  misc_feature (1)..(206): tr|A0A1G8LXQ3|A0A1G8LXQ3_9BURK 7-cyano-7-deazaguanine s ynthase OS=Paraburkholderia phenazinium OX=60549 GN=SAM N05216466_117167 PE=3 SV=1
MKQALLLASGGLDSTTVGYQLVATGVEVVPIFFDYGQHCVEMEWSRVNEVLPADVQRPERFNMSDIFRGSQSRLIREADLWTEEVKDDDLYIPYRTMLFFAAAAARAQTVGILDVYTGFINSNHAKEIDCSAAFMNSLDGLTSSIGPVRFHSPFRYSSKADVARAAAELGVPIGRTYSCQASAQFPCGACPNCVERLNALKEAKLV

SEQ ID NO: 40559 - protein, 244 aa, Paraburkholderia phenazinium
  misc_feature (1)..(244): tr|A0A4R7RGM3|A0A4R7RGM3_9BURK 7-cyano-7-deazaguanine s ynthase OS=Paraburkholderia phenazinium OX=60549 GN=que C PE=3 SV=1
MIRKDAKSSALVLFSGGQDSATCLAWALERYETVETLGFDYGQRHRVELECREGFRDAVVRAVPAWADRLGDDHMIDLSVLGSISDTAMTREIQIEATANGLPNTFVPGRNLMFMTIAAAIAYRRGLQVLVGGMCETDFSGYPDCRDDTMKALQVALNLGMDQRFLLETPLMWLDKADTWRLAHELGGDELVELIRVETHTCYLGERAELHAWGFGCGECPACRLRKRGYEAYLAGEKVTEAPV

SEQ ID NO: 40560 - protein, 232 aa, Paraburkholderia phenoliruptrix
  misc_feature (1)..(232): tr|K0DL45|K0DL45_9BURK 7-cyano-7-deazaguanine synthase OS=Paraburkholderia phenoliruptrix BR3459a OX=1229205 G N=queC PE=3 SV=1
MLFSGGQDSATCLAWALERYETVETLGFDYGQRHRVELECREGFRNAVARTFPAWGERLGDDHMVDLSVLGAISETAMTREIEIEATANGLPNTFVPGRNLMFMTIAAAIAYRRGLQVLVGGMCETDFSGYPDCRDDTMKALQVALNLGMDSRFVLDTPLMWLDKADTWRLAHALGGDELVELVRVETHTCYVGERAELHAWGFGCGECPACRLRKRGYEAWLAGEKVTGPV

SEQ ID NO: 40561 - protein, 243 aa, Paraburkholderia phymatum
  misc_feature (1)..(243): sp|B2JJV1|QUEC_PARP8 7-cyano-7-deazaguanine synthase OS =Paraburkholderia phymatum (strain DSM 17167 / CIP 1082 36 / LMG 21445 / STM815) OX=391038 GN=queC PE=3 SV=1
MTRKDAKSSALVLFSGGQDSATCLAWALDRYETVETLGFDYGQRHRVELECREGFRSAVARTFPEWGERLGDDHMIDLSVLGSISETAMTREIEIHAASNGLPNTFVPGRNLMFMTIAAAIAYRRGLRVLVGGMCETDFSGYPDCRDDTMKALQVALNLGMDSRFVLETPLMWIDKADTWRLAHELGGDELVELIRVETHTCYLGERAELHAWGFGCGECPACRLRKRGYEAYLSGEQVTEPA

SEQ ID NO: 40562 - protein, 244 aa, Paraburkholderia phytofirmans
  misc_feature (1)..(244): sp|B2T1L3|QUEC_PARPJ 7-cyano-7-deazaguanine synthase OS =Paraburkholderia phytofirmans (strain DSM 17436 / LMG 22146 / PsJN) OX=398527 GN=queC PE=3 SV=1
MIRKDAKRSALVLFSGGQDSATCLAWALERYETVETLGFDYGQRHRVELECREGFRNAVARAFPAWAERLGDDHMIDLSVLGAISDTAMTREIEIEATANGLPNTFVPGRNLMFMTIAAAIAYRRGLQVLVGGMCETDFSGYPDCRDDTMKALQVALNLGMDTRVLLETPLMWLDKGDTWRLAHQLGGDELVELVRVETHTCYVGERAELHAWGFGCGECPACRLRKRGYEAYLSGEKVTEAPV

SEQ ID NO: 40563 - protein, 243 aa, Paraburkholderia piptadeniae
  misc_feature (1)..(243): tr|A0A1N7RKG9|A0A1N7RKG9_9BURK 7-cyano-7-deazaguanine s ynthase OS=Paraburkholderia piptadeniae OX=1701573 GN=q ueC PE=3 SV=1
MTRKDAKSSALVLFSGGQDSATCLAWALDRYETVETLGFDYGQRHRVELECREGFRSAVARTFPEWGERLGDDHMIDLSVLGSISETAMTRDIEIHAASNGLPNTFVPGRNLMFMTIAAAIAYRRGLRVLVGGMCETDFSGYPDCRDDTMKALQATLNLGMDSRFVLETPLMWIDKADTWRLAHTLGGDALVELIRIETHTCYLGERSELHAWGFGCGECPACRLRKRGYEAYLNGEQVTEPA

SEQ ID NO: 40564 - protein, 243 aa, Paraburkholderia rhizosphaerae
  misc_feature (1)..(243): tr|A0A4R8LQI7|A0A4R8LQI7_9BURK 7-cyano-7-deazaguanine s ynthase OS=Paraburkholderia rhizosphaerae OX=480658 GN= queC PE=3 SV=1
MTRKDAKRSALVLFSGGQDSATCVAWALDRYETVETLGFDYGQRHRVELECRGSFRSAIAGAFPEWAARLGEDHLIDLSVLGSISDTAMTREIEIETAASGLPNTFVPGRNLMFMTIAAAIAYRRGLQVLVGGMCETDFSGYPDCRDDTLKALQVALNLGMDSRFVVETPLMWLDKADTWRLAHQLGGDALVDLVRVETHTCYVGERAELHDWGYGCGECPACRLRKRGYEAYLTGEQVSEPV

SEQ ID NO: 40565 - protein, 244 aa, Paraburkholderia rhizoxinica
  misc_feature (1)..(244): tr|E5ANB1|E5ANB1_PARRH 7-cyano-7-deazaguanine synthase OS=Paraburkholderia rhizoxinica (strain DSM 19002 / CIP 109453 / HKI 454) OX=882378 GN=queC PE=3 SV=1
MTRTDAQRGALVLFSGGQDSATCVAWALSRYERVETLGFDYGQRHRVELECRDGFRDALIRAFPQWKQTLGDDHRVDLSVLGAISDTAMTREIQIETQANGLPNTFVPGRNLMFMTIAAAVAYRRGLGVLVGGMCETDFSGYPDCRDDTMKALQVALNLGMDQRFVLETPLMWLDKADTWRLAASIGGEALVELIRVETHTCYVGERAELHDWGFGCGACPACRLRARGYHAFRHGRRVDPASL

SEQ ID NO: 40566 - protein, 243 aa, Paraburkholderia rhynchosiae
  misc_feature (1)..(243): tr|A0A2N7WQ26|A0A2N7WQ26_9BURK 7-cyano-7-deazaguanine s ynthase OS=Paraburkholderia rhynchosiae OX=487049 GN=qu eC PE=3 SV=1
MIRKDAKRSALVLFSGGQDSATCLAWALERYETVETLGFDYGQRHRVELECREGFRTAVARTFPAWGERLGDDHMIDLSVLGGISETAMTREIEIEATANGLPNTFVPGRNLMFMTIAAAIAYRRGLQVLVGGMCETDFSGYPDCRDDTMKALQVALNLGMDSRFLLETPLMWLDKADTWRLAHELGGDELVELVRVETHTCYVGERAELHAWGFGCGECPACRLRKRGYEAYLTGQKVTEPV

SEQ ID NO: 40567 - protein, 421 aa, Paraburkholderia ribeironis
  misc_feature (1)..(421): tr|A0A1N7SJB5|A0A1N7SJB5_9BURK 7-cyano-7-deazaguanine s ynthase OS=Paraburkholderia ribeironis OX=1247936 GN=BN 2475_750022 PE=3 SV=1
MRLRCQGPRPLRAADGLHSLEDYYVTSEVVDIGGLVGTLNNRAFLNGIMRRVGTRTVHWRGLTNLSYLKHYRLYMCDSSMWETGARYGALVLYMGHGQSIMLTGASVARCRDPAVLARIRDYGIETSALLQPPHGMAAVRERAAVRRERIGALARHRTQPRRAVVQRRRDQPRGVADLGRVCTPVWSQDMNESRIERKAMVVLSGGQDSTTCLYWAKRRDDNLRGITFDYAGHHRREIDAARTVAALAHLGLNIGPLLAARSRLTDHRREPETYTHLASMHAIVGDCVELTFVPMRNAFFLRLATNQAVALDCFTLVTGVCEADYANYPDCREHFIRSMERTIKEALGVSNFRIETPLVHLSKVLSIRLAQSIPGALDALACSHTCFASKYPRAAHAMPACCAHGFEQAGIEDPLIEAARA

SEQ ID NO: 40568 - protein, 243 aa, Paraburkholderia ribeironis
  misc_feature (1)..(243): tr|A0A1N7RJS4|A0A1N7RJS4_9BURK 7-cyano-7-deazaguanine s ynthase OS=Paraburkholderia ribeironis OX=1247936 GN=qu eC PE=3 SV=1
MIRKDAKRSALVLFSGGQDSATCLAWALERYETVETLGFDYGQRHRVELECREGFRQAVMRTFPAWAGRLGDDHMIDLSVLGSISDTAMTREIEIEATASGLPNTFVPGRNLMFMTIAAAIAYRRGLQVIVGGMCETDFSGYPDCRDDTMKALQATLNLGMDTRLLIETPLMWLDKADTWRLAHELGGDELVELVRVETHTCYVGERAELHAWGFGCGECPACRLRKRGFEAYLAGDKVTEPV

SEQ ID NO: 40569 - protein, 244 aa, Paraburkholderia sacchari
  misc_feature (1)..(244): tr|A0A0A6QGN9|A0A0A6QGN9_9BURK 7-cyano-7-deazaguanine s ynthase OS=Paraburkholderia sacchari OX=159450 GN=queC PE=3 SV=1
MTRTEPRNGALVLFSGGQDSATCLAWALDRYDTVETLGFDYGQRHRVELECREGFRAAIAQTFPEWGERLGDDHMIDLSVLGSISDTAMTREIEIETAANGLPNTFVPGRNLMFMQIAAAIAYRRGLEFLVGGMCETDFSGYPDCRDDTMKALQVALNLGMETRFVIETPLMWLDKADTWRLAQQLGGEALVELVRVETHTCYVGERAELNDWGFGCGECPACKLRKRGYEAYLAGEHVTQAPV

SEQ ID NO: 40570 - protein, 243 aa, Paraburkholderia sartisoli
  misc_feature (1)..(243): tr|A0A1H4FTB1|A0A1H4FTB1_9BURK 7-cyano-7-deazaguanine s ynthase OS=Paraburkholderia sartisoli OX=83784 GN=queC PE=3 SV=1
MTRTDAKRSALVLFSGGQDSATCLAWALERFETVETLGFDYGQRHRVELECREGFRSAIAREFPAWGERLGDDHMIDLGVLGAISDTAMTREIQIEAAASGLPNTFVPGRNLMFMTIAAAIAYRRGLQVLVGGMCETDFSGYPDCRDDTMKALQVALNLGMDSRFLLETPLMWLDKADTWRLALELGGEALVELIRVETHTCYVGERAELHKWGFGCGECPACKLRKRGYEAYLAGENVTEPV

SEQ ID NO: 40571 - protein, 460 aa, Paraburkholderia sediminicola
  misc_feature (1)..(460): tr|A0A3R7D659|A0A3R7D659_9BURK 7-cyano-7-deazaguanine s ynthase in queuosine biosynthesis OS=Paraburkholderia s ediminicola OX=458836 GN=DFJ54_2269 PE=4 SV=1
MTGARSGYLELKELTVDVVEPGSRPRRGAHVCELERHIRFDTEILETFSSTNWQPVVYDALVVAAAVEFCDRSLGRSSMNWGRRFHIHIPVHDPARWSEFTVSRALVEALNFLTGDDWHFIFRARKAQAAKPAQNRMEFPSDGEAVIAYSEGMDSRAVAGLERKRLGQRLVRVRVGTKQRDIPRKAQLSTPFAALPYEVKLGCDNSENSARSRGFKFSLVAAIAAYMISAPYAIVPESGQGALAPAILPVGQGYADYRNHPAFTVLMERFVYALFGHRLRYRFPRLWMTKGETLREFVDNCGDSANWATTRSCWQKQRQVSVSKSWRQCGICAACMLRRLSVHAARLDEPKENYVWETLKASTFEAGVAEGFNLITEALREYAIAGVLHFEHFSSIRESPTYEMLKRRTATELARALTESPDIVVNGLDRLLQQHGREWAAFTDDLGPESFVRKWIDTAS

SEQ ID NO: 40572 - protein, 243 aa, Paraburkholderia sediminicola
  misc_feature (1)..(243): tr|A0A3R7FM88|A0A3R7FM88_9BURK 7-cyano-7-deazaguanine s ynthase OS=Paraburkholderia sediminicola OX=458836 GN=q ueC PE=3 SV=1
MIRKDAKRSALVLFSGGQDSATCLAWALERYETVETLGFDYGQRHRVELECREGFRNAVTRAFPAWADRLGEDHMIDLSVLGSISDTAMTREIEIHATANGLPNTFVPGRNLMFMTIAAAIAYRRGLQVLVGGMCETDFSGYPDCRDDTMKALQVALNLGMDTRFLLETPLMWLDKADTWRLAHELGGDELVELVRVETHTCYVGERAELHSWGFGCGECPACRLRKRGYEAYLTGEKVTEPV

SEQ ID NO: 40573 - protein, 243 aa, Paraburkholderia silvatlantica
  misc_feature (1)..(243): tr|A0A2U1AKB4|A0A2U1AKB4_9BURK 7-cyano-7-deazaguanine s ynthase OS=Paraburkholderia silvatlantica OX=321895 GN= queC PE=3 SV=1
MTRTEAKGALVLFSGGQDSATCLAWALDRYESVETLGFDYGQRHRVELECREGFRAAIARAFPEWGERLGDDHMIDLSVLGSISDTAMTREIEIETAASGLPNTFVPGRNLMFMQIAAAIAYRRGLKVLVGGMCETDFSGYPDCRDDTMKALQVALNLGMDTRFVLETPLMWLDKADTWRLAEQLGGAALVDMIRVETHTCYVGERAELHAWGFGCGECPACKLRKRGYEAYLAGGNVTEAPV

SEQ ID NO: 40574 - protein, 244 aa, Paraburkholderia sp.
  misc_feature (1)..(244): tr|A0A4R1J0L8|A0A4R1J0L8_9BURK 7-cyano-7-deazaguanine s ynthase OS=Paraburkholderia sp. BL8N3 OX=1938808 GN=que C PE=3 SV=1
MTRTDAKDSALVLFSGGQDSATCLAWALERYRTVETLGFDYGQRHRVELECRDGFRAAVSRAFPQWAERLGEDHMIDLSVLGAISDTAMTREIEIEATANGLPNTFVPGRNLMFMTIAAAIAYRRGLQVLVGGMCETDFSGYPDCRDDTMKALQVTLNLGMQTRYSLETPLMWLDKADTWRLAEQLGGETLVELIRVETHTCYVGERAELHEWGFGCGQCPACKLRKRGFEAYRAGEQVTTEPV

SEQ ID NO: 40575 - protein, 243 aa, Paraburkholderia sp.
  misc_feature (1)..(243): tr|A0A372K5S4|A0A372K5S4_9BURK 7-cyano-7-deazaguanine s ynthase OS=Paraburkholderia sp. DHOC27 OX=2303330 GN=qu eC PE=3 SV=1
MIRKDAKRSALVLFSGGQDSATCLAWALERYETVETLGFNYGQRHRVELECREGFRSAVARGFPQWAERLGDDHMIDLSVLGSISETAMTREIQIEAAASGLPNTFVPGRNLMFMTIAAAIAYRRGLQVLVGGMCETDFSGYPDCRDDTMKALQVALNLGMDTRLLLETPLMWLDKADTWRLAHELGGDELVELIRVETHTCYVGERAELHAWGFGCGECPACRLRKRGYEAYLSGEKVTEPV

SEQ ID NO: 40576 - protein, 243 aa, Paraburkholderia sprentiae
  misc_feature (1)..(243): tr|A0A1I9YIH0|A0A1I9YIH0_9BURK 7-cyano-7-deazaguanine s ynthase OS=Paraburkholderia sprentiae WSM5005 OX=754502 GN=queC PE=3 SV=1
MIRKDAKRSALVLFSGGQDSATCLAWALDRYDTVETLGFDYGQRHRVELECREGFRQAIVRAFPAWADRLGDDHMIDLSLLGAISDTAMTREIEIEATASGLPNTFVPGRNLMFMTIAAAIAYRRGLQVLVGGMCETDFSGYPDCRDDTMKALQVALNLGMDTRFALETPLMWLDKADTWRLAHELGGDELVELVRVETHTCYVGERAELHSWGFGCGECPACRLRRRGYEAYLAGEKVTEPV

SEQ ID NO: 40577 - protein, 243 aa, Paraburkholderia susongensis
  misc_feature (1)..(243): tr|A0A1X7K7T9|A0A1X7K7T9_9BURK 7-cyano-7-deazaguanine s ynthase OS=Paraburkholderia susongensis OX=1515439 GN=q ueC PE=3 SV=1
MIRKDAKRSALVLFSGGQDSATCLAWALERYDTVETLGFDYGQRHRVELECREGFREAVTRAFPAWADRLGDDHMIDLSLLGTISDTAMTREIEIRATANGLPNTFVPGRNLMFMTIAAAIAYRRGLQVLVGGMCETDFSGYPDCRDDTMKALQVALNLGMDTRFALETPLMWLDKADTWRLAHELGGDELVELVRVETHTCYVGERAELHAWGFGCGECPACRLRKRGYEAYLAGEKVSEPV

SEQ ID NO: 40578 - protein, 198 aa, Paraburkholderia terrae
  misc_feature (1)..(198): tr|I5D349|I5D349_9BURK 7-cyano-7-deazaguanine synthase OS=Paraburkholderia terrae BS001 OX=1171375 GN=WQE_0327 2 PE=3 SV=1
MKQALLLSGGQDSIALAYWLRPSIAVTVDYGQVPAEAEERAAGAVCLALGIQHEVIKADCSAVGSGDLSGTRPLSIAPVPEWWPYRNQLILTLAATSAIRHGASELVIGTVVTDCSHTDGTSAFVEKMSEVFMLQEGRLKLCAPAIGMTSSELVKTANVPMEILAWAHSCHRSNHACGQCRGCIKHKNVIYELGHTPY

SEQ ID NO: 40579 - protein, 243 aa, Paraburkholderia terrae; identical to SEQ ID NO: 40552
  misc_feature (1)..(243): tr|I5CWM7|I5CWM7_9BURK 7-cyano-7-deazaguanine synthase OS=Paraburkholderia terrae BS001 OX=1171375 GN=queC PE= 3 SV=1

SEQ ID NO: 40580 - protein, 243 aa, Paraburkholderia terricola
  misc_feature (1)..(243): tr|A0A1M6SF43|A0A1M6SF43_9BURK 7-cyano-7-deazaguanine s ynthase OS=Paraburkholderia terricola OX=169427 GN=queC PE=3 SV=1
MIRKDAKRSALVLFSGGQDSATCLAWALERYETVETLGFDYGQRHRVELECREGFRQAVARAFPAWAKRLGDDHMIDLSVLGSISDTAMTREIAIEATANGLPNTFVPGRNLMFMTIAAAIAYRRGLQVLVGGMCETDFSGYPDCRDDTMKALQVALNLGMDSRFLLETPLMWLDKADTWRLAHELGGDELVELVRVETHTCYVGERAELHAWGFGCGECPACRLRKRGYEAYLAGEKVTEPV

SEQ ID NO: 40581 - protein, 244 aa, Paraburkholderia tropica
  misc_feature (1)..(244): tr|A0A1A5X8E5|A0A1A5X8E5_9BURK 7-cyano-7-deazaguanine s ynthase OS=Paraburkholderia tropica OX=92647 GN=queC PE =3 SV=1
MTRTETRNGALVLFSGGQDSATCLAWALDRYDTVETLGFDYGQRHRVELECREGFRAAVASRFPEWGERLGDDHMIDLSVLGSISDTAMTREIEIETAANGLPNTFVPGRNLMFMQIAAAIAYRRGLKVLVGGMCETDFSGYPDCRDDTMKALQVALNLGMDSRFVLETPLMWLDKADTWRLAETLGGEALVELVRVETHTCYVGERAELHAWGFGCGECPACKLRKRGYEAYLAGEKVTEAPV

SEQ ID NO: 40582 - protein, 243 aa, Paraburkholderia tuberum
  misc_feature (1)..(243): tr|A0A1H1CW78|A0A1H1CW78_9BURK 7-cyano-7-deazaguanine s ynthase OS=Paraburkholderia tuberum OX=157910 GN=queC P E=3 SV=1
MIRKDAKRSALVLFSGGQDSATCLAWALDRYDTVETVGFDYGQRHRVELECREGFRQAVVRAFPAWADRLGDDHTIDLSLLGAISDTAMTREIEIEATANGLPNTFVPGRNLMFMTIAAAIAYRRGLQVLVGGMCETDFSGYPDCRDDTMKALQVALNLGMDARFALETPLMWLDKADTWRLARALGGDALVELVRVETHTCYVGERAELHSWGFGCGECPACRLRKRGYEAYLAGEKVTEPV

SEQ ID NO: 40583 - protein, 243 aa, Paraburkholderia unamae
  misc_feature (1)..(243): tr|A0A328Y3X1|A0A328Y3X1_9BURK 7-cyano-7-deazaguanine s ynthase OS=Paraburkholderia unamae OX=219649 GN=queC PE =3 SV=1
MTRTEAKGALVLFSGGQDSATCLAWALERYETVETLGFDYGQRHRVELECREGFRAAIASTFPAWGERLGEDHMIDLSVLGSISDTAMTREIEIETAASGLPNTFVPGRNLMFMQIAAAIAYRRGLKVLVGGMCETDFSGYPDCRDDTMKALQVALNLGMDTRFVLETPLMWLDKADTWRLAEQLGGEALVDMVRVETHTCYVGERAELHAWGFGCGECPACKLRKRGYEAYLAGENVTEAPV

SEQ ID NO: 40584 - protein, 243 aa, Paraburkholderia xenovorans
  misc_feature (1)..(243): sp|Q146Z6|QUEC_PARXL 7-cyano-7-deazaguanine synthase OS =Paraburkholderia xenovorans (strain LB400) OX=266265 G N=queC PE=3 SV=2
MIRKDAKRSALVLFSGGQDSATCLAWALERYETVETLGFDYGQRHRVELECREGFRNAVVRAFPAWADRLGEDHMIDLSVLGAISDTAMTREIEIEATANGLPNTFVPGRNLMFMTIAAAIAYRRGLQVLVGGMCETDFSGYPDCRDDTMKALQVALNLGMDTRFLLETPLMWLDKADTWRLAHELGGAELVELVRVETHTCYLGERAELHAWGFGCGECPACRLRKRGYEAYLAGENVTEPV

SEQ ID NO: 40585 - protein, 458 aa, Paraburkholderia xenovorans
  misc_feature (1)..(458): tr|Q13XN6|Q13XN6_PARXL Uncharacterized protein OS=Parab urkholderia xenovorans (strain LB400) OX=266265 GN=Bxe_ A1806 PE=4 SV=1
MSTIPKKPARSDKRLVVLENGQKRGRAVPKDAVIAEVGQHICFNASALDSFDVEGCKPIHFNMLVLCAAVEFADRYWKRPMGWRRILHVTLPVADPRNWQKSEVLQSLHDVLNHLTGDTWQFTFVQAKAPSPIGTRQLPLDFGKTKTFAVAYSNGLDSRAVSALSGDEGEALCIRVAGNRQPRKDGDSYFTHIPFNISGYRGNESSFRSRGFQFAAVTAIAAQLSNVTRIVVPESGQGALGPVLLPLYGVYADYRNYPTFFRKMERFIKALQGYQVRFEQPRLWFTKGQTLSAFLRIPGKSGEHLKSTRSCWQTRRVVNVGSRKQCGLCAACLLRRLSLHAAGVSEAPDTYVVSDLAASNVDDALSVIPQKADRDIMVEYGSVGMRHLQHLADMADLSDDVLRAYASQIAAATENTYEETLKKLKLMLASHAKEWRAFLSAQGQQSFLNNWMDGGRYG

SEQ ID NO: 40586 - protein, 275 aa, Paracandidimonas soli
  misc_feature (1)..(275): tr|A0A4R3UT56|A0A4R3UT56_9BURK 7-cyano-7-deazaguanine s ynthase OS=Paracandidimonas soli OX=1917182 GN=queC PE= 3 SV=1
MLKQHVRITLGIDKQTPSLFHSSPFRMAPLKQRHLSKMGKIMERKALVLFSGGQDSTTCLAWALDRYSHVETISFDYGQRHSVELECRKVVLGQIRAKFPSWAARLGADHILDLASLGQISDTALTQEQEIVFEKSGLPSTFVPARNLLFFTYASAVAYRRGLTALVGGMCETDYSGYPDCRDNTLKALQVAMSLGLDAPMVVETPLMWLDKAQTWKLAEQLGGQPLIDLIRAETHTCYLGDRTHLHSWGYGCGECPACELRRNGHEAYTRTTAA

SEQ ID NO: 40587 - protein, 233 aa, Parachlamydia acanthamoebae
  misc_feature (1)..(233): tr|A0A0C1CA36|A0A0C1CA36_9BACT 7-cyano-7-deazaguanine s ynthase OS=Parachlamydia acanthamoebae OX=83552 GN=queC PE=3 SV=1
MVMKLQKKAVVIHSGGMDSSICLALAIRTFSVENVLSLSFIYDQRHSSELEQAKKICQSWNVDHIILSIPCLKEITTNALTDTSLPIQCGNGEAPNTLVVGRNGLMAQLGAIHAHELGAHCIYMGIIGVEGNHSGYRDCSRAYMDLKQTLLRLDLDDHLFTIETPLVDMSKKKTLELAQEMGVLEFLLNETITCYEGLEKLGCQKCPACILRNEGIRQFSAENPSFKLPYPVT

SEQ ID NO: 40588 - protein, 95 aa, Parachlamydia acanthamoebae
  misc_feature (1)..(95): tr|A0A0C1CA61|A0A0C1CA61_9BACT 7-cyano-7-deazaguanine s ynthase OS=Parachlamydia acanthamoebae OX=83552 GN=queC -A PE=3 SV=1
MDFLSYPDCRPGYFEAAQELFNRATKQSVEGKAPQIVTPLLKWTKEEIVKEGYRLKVPFELTSSCYDPTANGQPCQQCDACTLRQDAFLSISEVN

SEQ ID NO: 40589 - protein, 232 aa, Parachlamydia sp.
  misc_feature (1)..(232): tr|A0A2H9SPJ9|A0A2H9SPJ9_9BACT 7-cyano-7-deazaguanine s ynthase OS=Parachlamydia sp. OX=2052048 GN=queC PE=3 SV =1
MTNNLKKQTIVIHSGGMDSSICLALAIKKFSVENVLSLSFTYEQRHSTELEQAKKICRTWGVDHVILAIPCLKQITTNALTHNSIEIVHEAGSPPNTLVMGRNGLMARLGAIHAQELGAESIYMGIINVEGSHSGYRDCSRAYMDLMQTILRIDLDNEKFLIETPLVAMSKKETLMLAHELKVLDFLLEETITCYEGFPRQGCQKCPACRLRNEGIRQFLAENPSFTMKYAV

SEQ ID NO: 40590 - protein, 228 aa, Parachlamydia sp.
  misc_feature (1)..(228): tr|A0A2H9SPH9|A0A2H9SPH9_9BACT 7-cyano-7-deazaguanine s ynthase OS=Parachlamydia sp. OX=2052048 GN=queC PE=3 SV =1
MKAIVLLSGGLDSAVILARVCAEAKSCTAISFDYGQRHRIELEYAKKIADYYQVPHEIIPIDPLIFQGASSLTSNMVPQKDKSFEEILLQKTPSTYVPARNTLFLAFALVKAEIYQAQEIYFGANAMDYGSYPDCRPLYFEALQELFNQATKQSIDYQPPRVIIPWLHSTKEQIIQEGIRLGVPFEYTSSCYDPTLSGHPCQCCDACTLRNKAFKSFTESKQERLAES

SEQ ID NO: 40591 - protein, 234 aa, Paracoccus aestuarii
  misc_feature (1)..(234): tr|A0A418ZS40|A0A418ZS40_9RHOB 7-cyano-7-deazaguanine s ynthase OS=Paracoccus aestuarii OX=453842 GN=queC PE=3 SV=1
MKTALVCSGGLDSVSLAHVLAAQGRLARIVSFDYGQRHRKELDFARDCAARLAVPFHLVDLSGLGAALSGSALTDDVAVPDGHYAEETMRVTVVPNRNAIMLSVAFGIAAAQGDDAVAAAVHGGDHFIYPDCRPGFTDAFAAMQRAALEGYAEIALEVPFVHATKADIVTAGAAAGTPFARTWSCYKGGDRHCGRCGTCVERREAFHLAGVADPTDYADPDYWRAALAAHAGGA

SEQ ID NO: 40592 - protein, 233 aa, Paracoccus alcaliphilus
  misc_feature (1)..(233): tr|A0A1H8LXD1|A0A1H8LXD1_9RHOB 7-cyano-7-deazaguanine s ynthase OS=Paracoccus alcaliphilus OX=34002 GN=queC PE= 3 SV=1
MKATLVCSGGLDSVSLAHILAADHALSRIVSFDYGQRHRKELDFARAVSARLAVPFHLIDMRPVGAALTGSALTDAIDVPDGHYAEETMRVTVVPNRNAIMLTIAFGIAAAAGDDAVAAAVHGGDHFIYPDCRPGFTDAFAAMQRAALDGYADVALHVPFVRKSKADIVAEGARAGTPFAETWSCYKGSVIHCGRCGTCVERREAFDLAGVADPTAYADPDYWRAAITARGVV

SEQ ID NO: 40593 - protein, 233 aa, Paracoccus bengalensis
  misc_feature (1)..(233): tr|A0A3D9XP39|A0A3D9XP39_9RHOB 7-cyano-7-deazaguanine s ynthase OS=Paracoccus bengalensis OX=302403 GN=queC PE= 3 SV=1
MKTTVVCSGGLDSVSLAHMVAAQGSLTRLISFDYGQRHRKELDFAAAAARRLGVPHHVIDMRGVGAVLTGSALTGGAEVPDGHYAEETMRITVVPNRNAIMLTIAFGMAAAMGDEAVATAVHGGDHFIYPDCRPAFTEAFQHMQDAALDGYAQLRLLTPFVHRTKADIVAEGARHGTPFAETWSCYKGGAVHCGRCGTCVERREAFHLAGIPDPTAYEDADFWRQAIAERGRA

SEQ ID NO: 40594 - protein, 233 aa, Paracoccus denitrificans
  misc_feature (1)..(233): sp|A1B9Q5|QUEC_PARDP 7-cyano-7-deazaguanine synthase OS =Paracoccus denitrificans (strain Pd 1222) OX=318586 GN =queC PE=3 SV=1
MKTIVVCSGGLDSVSLAHMVAAQGGLTRLISFDYGQRHRKELDYAALAARRLGVPHHVIDMRGVGAVLTGSALTGGAEVPDGHYAEETMRITVVPNRNAIMLTVAFGMAAAMGDQAVATAVHGGDHFIYPDCRPAFTQAFQQMQDAALDGYAQARLLTPFVHRTKADIVTEGARHDTPFAETWSCYKGGALHCGRCGTCVERREAFHLAGIPDPTAYEDADFWRQAIAERERA

SEQ ID NO: 40595 - protein, 235 aa, Paracoccus gahaiensis
  misc_feature (1)..(235): tr|A0A4U0RDX5|A0A4U0RDX5_9RHOB 7-cyano-7-deazaguanine s ynthase OS=Paracoccus gahaiensis OX=1706839 GN=queC PE= 3 SV=1
MNTTLVCSGGLDSVSLAHVLAGQGRLSRIVSFDYGQRHRKELDFAELCARRLEVRFHLVDLSGLGAALGGSALTDDLAVPDGHYAEETMRVTVVPNRNAIMLTVAFGIAAAQGDAAVAAAVHGGDHFIYPDCRPAFTDAFAAMQDAALDGYAQIALHVPFVHATKADIVTAGAKAGTPFAQTWSCYKGGAHHCGRCGTCVERREAFDLAGIADPTEYEDPDFWRKAVAAHAAGGA

SEQ ID NO: 40596 - protein, 235 aa, Paracoccus haeundaensis
  misc_feature (1)..(235): tr|A0A5C4R6I0|A0A5C4R6I0_9RHOB 7-cyano-7-deazaguanine s ynthase OS=Paracoccus haeundaensis OX=225362 GN=queC PE =3 SV=1
MHTALVCSGGLDSVSLAHVLASQGRLSRIVSFDYGQRHRKELDFARACALRLGVPFHLVDLSGLGAALSGSALTDDLAVPDGHYAEETMRVTVVPNRNAIMLTMAFGIAAANGDSAVAAAVHGGDHFIYPDCRPGFTDAFAAMQRAALEGYADVVLDVPFVHRTKADIVTAGAAAGTPFAQTWSCYKGGARHCGRCGTCVERREAFHLARVADPTEYDDADFWQAAVAAHAVGGA

SEQ ID NO: 40597 - protein, 235 aa, Paracoccus hibiscisoli
  misc_feature (1)..(235): tr|A0A4U0QSC8|A0A4U0QSC8_9RHOB 7-cyano-7-deazaguanine s ynthase OS=Paracoccus hibiscisoli OX=2023261 GN=queC PE =3 SV=1
MNTTLVCSGGLDSVSLAQVLAAQGRLSRIVSFDYGQRHRKELDFARACATRLAVPFHLVDLSGLGAALSGSALTDDLAVPDGHYAEETMRVTVVPNRNAIMLTVAFGIAAANGDTAVAAAVHGGDHFIYPDCRPAFTDAFAAMQRAALDGYADVALEVPFVHATKADIVAAGAGAGTPFAQTWSCYKGGARHCGRCGTCVERREAFHLAGVADPTDYDDADFWQAAVAAHAAGGA

SEQ ID NO: 40598 - protein, 233 aa, Paracoccus homiensis
  misc_feature (1)..(233): tr|A0A1I0EPZ1|A0A1I0EPZ1_9RHOB 7-cyano-7-deazaguanine s ynthase OS=Paracoccus homiensis OX=364199 GN=queC PE=3 SV=1
MKTLVICSGGLDSVSLAHVIAATGNLSRLVSFDYGQRHRKEIDSAAATATRLGVPHHVIDLRPVGAVLTGSALTDAIDVPDGHYAEDTMRVTVVPNRNAIMLTVGFGLAAAQGDQAVAAAVHGGDHFIYPDCRPAFTDAFQVMQNAALDGYADIRLLTPFVHQTKADIVRAGAAHGTPFQDTWSCYKGGALHCGRCGTCVERREAFHLAGIPDPTAYADPDYWQAAVARKAGA

SEQ ID NO: 40599 - protein, 233 aa, Paracoccus laeviglucosivorans
  misc_feature (1)..(233): tr|A0A521B5K6|A0A521B5K6_9RHOB 7-cyano-7-deazaguanine s ynthase OS=Paracoccus laeviglucosivorans OX=1197861 GN= queC PE=3 SV=1
MKTLVVCSGGLDSVSLAHMVAAEHELTRLVSFDYGQRHRKELAFAAEAAGRLGVPHHLIDMRGIGAALTGSALTDDLDVPDGHYAEETMRVTVVPNRNAIMLAIAFGIAAANGDQAVATAVHGGDHFIYPDCRPAFTNAFNAMQAAALDGYADVHLFTPFVDRDKAAIVTAGARHATPFARTWSCYKGGDLHCGRCGTCVERREAFDLAGVSDPTTYADADFWRHAIAAKGAA

SEQ ID NO: 40600 - protein, 233 aa, Paracoccus pantotrophus
  misc_feature (1)..(233): tr|A0A495P5T8|A0A495P5T8_PARPN 7-cyano-7-deazaguanine s ynthase OS=Paracoccus pantotrophus OX=82367 GN=queC PE= 3 SV=1
MKTTVVCSGGLDSVSLAHMIAAQGGLSRLISFDYGQRHRKELDFAAAAARRLGVPHHVIDMRGVGAVLTGSALTGGAEVPDGHYAEETMRITVVPNRNAIMLTVAFGMAAAMGDRAVATAVHGGDHFIYPDCRPAFTEAFQHMQDAALDGYAQVRLLTPFVHRSKADIVTEGARHGTPFAETWSCYKGGTLHCGRCGTCVERREAFHLAGIPDPTAYEDGDFWRQAIAERGRA

SEQ ID NO: 40601 - protein, 425 aa, Paracoccus pantotrophus
  misc_feature (1)..(425): tr|A0A495NWV5|A0A495NWV5_PARPN 7-cyano-7-deazaguanine s ynthase in queuosine biosynthesis OS=Paracoccus pantotr ophus OX=82367 GN=BDE18_3880 PE=4 SV=1
MRLACGPDGADLPGGEGIMRVVLYGQPRAEGQGSAGDAARSEIQRRRFDPAPRAWDLLSIALSVVTADFAVLRDKSPDGWTREIELDIAVADAPFWNGQARALAEALAFLTTDRWTLRFHEGGMLPTPPREPVRPPESCVVLLSGGLDSLIGAIDLTAAGHKPFAISQTVRGDADKQVDFAAKIGGGLGHLQLNHNAHTPGVQEASQRARSLVFITFGVIAATALKAYREVAEVPLFVCENCFIAINPPLTGGRLGSLSTRTAHPEFLARLQKVLDAAGLRVKITNPYATKTKGEMLQACADQNLLGAEAARSTSCGRFQRFNYRQCGRCVPCQVRRAAFLAWDASQDTTDYVYEPIGKDDADHSGFDDVRSVAIALAAIKADGIEAWLGHALASPFIADRPALVGMLERGLEELRALHQAYGVK

SEQ ID NO: 40602 - protein, 233 aa, Paracoccus saliphilus
  misc_feature (1)..(233): tr|A0A1N7PHL2|A0A1N7PHL2_9RHOB 7-cyano-7-deazaguanine s ynthase OS=Paracoccus saliphilus OX=405559 GN=queC PE=3 SV=1
MKAIVICSGGLDSVSLAHMLAARGELSRLVSFDYGQRHRKELDYAVACAERLDVPHHVIDLRSVGAALTGSALTGDIGVPDGHYAEETMKITVVPNRNAIMLTIAYGIAAANGDRAVATAVHGGDHFIYPDCRPEFTTAFDRMQRAALDGYADVTLLTPFVHRSKADIVAEGARAGTPFAETWSCYKGGADHCGRCGTCVERREAFHLAGIDDPTVYEDPEFWQQAISSKAEA

SEQ ID NO: 40603 - protein, 233 aa, Paracoccus seriniphilus
  misc_feature (1)..(233): tr|A0A239PVM3|A0A239PVM3_9RHOB 7-cyano-7-deazaguanine s ynthase OS=Paracoccus seriniphilus OX=184748 GN=queC PE =3 SV=1
MKTLVICSGGLDSVSLAHITANEHQLTRLVSFDYGQRHRKELGFAQAAAARLGVPFHLIDMRGIGAALSGSALTDEIDVPDGHYAEETMRITVVPNRNAIMLSIGFGIAAAQGDEAVATAVHGGDHFIYPDCRPGFTRAFEAMQQAALQGYADVRLHTPFVRESKAEIVRQGAAHGTPFAETWSCYKGGEIHCGRCGTCVERREAFHLAGVSDPTPYADPDYWITALTTRENG

SEQ ID NO: 40604 - protein, 235 aa, Paracoccus siganidrum
  misc_feature (1)..(235): tr|A0A419A5X4|A0A419A5X4_9RHOB 7-cyano-7-deazaguanine s ynthase OS=Paracoccus siganidrum OX=1276757 GN=queC PE= 3 SV=1
MKTLVICSGGLDSVSLAHMVAARRELTGLLSFDYGQRHRKELDFAARCAARLGVPHQLIDISGIGAALSGSALTDALEVPDGHYAEETMRVTVVPNRNAIMLAIAFGIAAAKGDEAVAAAVHGGDHFIYPDCRPAFTDSFAAMQKAALDGYAEIELFVPFVHRSKADIVTEGARHATPFAETWSCYKGGANHCGRCGTCVERREAFALAGIADPTSYDDADFWRRALAGHAAGGA

SEQ ID NO: 40605 - protein, 233 aa, Paracoccus sp.
  misc_feature (1)..(233): tr|A0A3A3DCQ1|A0A3A3DCQ1_9RHOB 7-cyano-7-deazaguanine s ynthase OS=Paracoccus sp. JM45 OX=2283626 GN=queC PE=3 SV=1
MKTTLVCSGGIDSVSLAHSLAGQGHLSRLVSFDYGQRHRKELDFAAACARRLSVPFHLVDLSGLGSALSGSALTDDIDVPDGHYAEETMRVTVVPNRNAIMLTIAFGIAAANGDDAVAAAVHGGDHFIYPDCRPAFTDAFGAMQKAALDGYADIDLHVPFVHATKADIVTEGARHNTPFAETWSCYKGSDRHCGRCGTCVERREAFHLAGVTDPTDYADPDFWQAAIAAHEGP

SEQ ID NO: 40606 - protein, 232 aa, Paracoccus sp.
  misc_feature (1)..(232): tr|A0A2K9F152|A0A2K9F152_9RHOB 7-cyano-7-deazaguanine s ynthase OS=Paracoccus sp. BM15 OX=1529068 GN=queC PE=3 SV=1
MKAIVVCSGGLDSVSLAHVLANQGALSRLVSFDYGQRHLKELDFAARCAQRLSVPHHIIDMRSIGAALSGSALTDDIDVPDGHYAEETMKITVVPNRNAIMLTIAYGIAAAQGDTAVATAVHGGDHFIYPDCRPAFTRAFEAMQHAALDGYANVTLLTPFVDQSKADIVTAGAQAGTPFAQTWSCYKGGALQCGRCGTCIERREAFHLAGIPDPTVYADPDFWIAATQGTQA

SEQ ID NO: 40607 - protein, 233 aa, Paracoccus versutus
  misc_feature (1)..(233): tr|A0A369U2V6|A0A369U2V6_PARVE 7-cyano-7-deazaguanine s ynthase OS=Paracoccus versutus OX=34007 GN=queC PE=3 SV =1
MKTTVVCSGGLDSVSLAHMVAVQGSLTRLISFDYGQRHRKELDFAAAAARRLGVPHHVIDMRGVGAVLTGSALTGGAEVPDGHYAEETMRITVVPNRNAIMLTIAFGMAAAMGDEAVATAVHGGDHFIYPDCRPAFTQAFQQMQDAALDGYAQVRLLTPFVHRTKADIVTEGARHGTPFAETWSCYKGGAVHCGRCGTCVERREAFHLAGIPDPTAYEDADFWRQAIAERGRA

SEQ ID NO: 40608 - protein, 233 aa, Paracoccus versutus
  misc_feature (1)..(233): tr|A0A3E0BPH7|A0A3E0BPH7_PARVE 7-cyano-7-deazaguanine s ynthase OS=Paracoccus versutus OX=34007 GN=queC PE=3 SV =1
MKTTVVCSGGLDSVSLAHMVAAQGSLTRLISFDYGQRHRKELDFAAAAARRLGVPHHVIDMRGVGAVLTGSALTGGAEVPDGHYAEETMRITVVLNRNAIMLTIAFGMAAAMGDEAVATAVHGGDHFIYPDCRPAFSEAFQHMQDAALDGYAQLRLLTPFVHRTKADIVAEGARHGTPFAETWSCYKGGAVHCGRCGTCVERREAFHLAGIPDPTAYEDADFWRQAIAERGRA
